United States Patent Application Publication US 2006/0134663 A1 - sequence listing, part 57

SEQ ID NO: 135881 - DNA, 552 bp, Homo Sapiens
  misc_feature (436)..(436): n is a, c, g, or t
  misc_feature (499)..(499): n is a, c, g, or t
  misc_feature (529)..(529): n is a, c, g, or t
taaaggtgagttcgggtattttattttgccttaagagtcaacacaatttctaacattctgccattagaagtaatacaatttctaatatcctgcaatgagcattgctaaaagagtcaggagaaccatgagaaatatgcatatgaaaataaaccatgtgacaggggacatagaatccaaagagattccagcagagaatcaaagtgcacgctcacctactctgacctctccccataaaagatgagagtcatatacaaatagatgcttgtattctgtacagtcctatttaaaaatgcaccacataaaataagaataagacaggaacacactcatgaccacataaaatacagagaatgtgagacgtgcttcttgctgagatacaccacaatcaaatttagtaccaagtgactggctgataagaggtaagcacactgaggangatggtgaagaaactatagccaagaaaaaatgtcctcgctgttgagtttccagaccagactgnacagcccatatattagcttcattgcttcanagatgccattgggatcattttgc

SEQ ID NO: 135882 - DNA, 696 bp, Homo Sapiens
  misc_feature (114)..(143): n is a, c, g, or t
tgaggcaactaacagtcatatttgtctctgtgggatccctgagatgccttttttgattgccccaagtctacctaagtaggccagtggatggttcaaaaagaattcattatctannnnnnnnnnnnnnnnnnnnnnnnnnnnnngtaatcaagccatttggtgaaaatctgtaattcacaagtcaaatagcacagaacagagacaactttcggagcccactgtggacatggtgggggccagcctgtgctgctaaacatagattttgctgatctgttggcttctcagtttatagcattcagccccctggctcctcagcagctccttctcttcggctgtgtctcgagctttcagctgcgagaagtgggcaggagaggcgatgagatcatattgttggtccagataccgcaggtagatgagcatgtgcagggcataggccaacaccagcagcaggatcagggacattgccaggccgatcagaaaagctggcgagaaggaggaggcgcagtcttgggctttggtaaatcgtccccccttgatggcaaaaccttggatctggaaatcaataaaagtgacctcccacaggctcgacccatcatccgtgtcgctgggcagcaagagggcctggtcctgctgcaggctgcccacgcgttggcagcggttagagtaaccagagggagcatatacgccacgtgcgtt

SEQ ID NO: 135883 - DNA, 629 bp, Homo Sapiens
  misc_feature (47)..(136): n is a, c, g, or t
gcgtccgcaaccacgcccggctgatattagtagttttagtagaggcnnnnnnnnnnnnnnnnnnnnnnnnnnnnnnnnnnnnnnnnnnnnnnnnnnnnnnnnnnnnnnnnnnnnnnnnnnnnnnnnnnnnnnnnnntgagccactgcgcccggccaaccacattttcaaaacaggtcatgtggtgtcaggttggagtgtacttccagggataaccgtgggacattcttgaaatctgaactatcctgggaagtcttgaagtaatggatgcctatagtggacactcaggactcctgtccttggagcgagattggaggggcatctagcacttaacatatgccacaatgctttctgtggccattatttaacctctggttaaacaagcttaggaggctgacttactagtagtaaaaggagtgtgctttgagtcacagatcctggttgaactccagcatgttacaaacctcagccctgttctatgaaaggtcataactacgaggattattgtaaaaacattaatttagaaatgtaaagtggtccccaatctctggatctggtcaggatttattggagctgccactgaggggattaaataaagtggggtcaaagccccacagcctagtcaaccaaa

SEQ ID NO: 135884 - DNA, 916 bp, Homo Sapiens
tgaggcaccgcaactggcctcttcatttttattcatatgttccttcagcagccactatgtcttcccactgatttcttcagtttctgccttttccttttgaataaggctgttactcctgagggaagatgggaggtgggcctggacagggacttggtgcattcctctctcctgtcccagttcttattggtttctccagtgtctgtagaacagtggttttggtggctttacctctgcagataatttctcttgcaatgtagtggtgatggggaggtgtgtctggatgcatttcagctatagttgctgttttgctttcccagacagcaccatcccaaagggtagaggctggagcattttgtgatgtatccccagtactgaagaaaaaggcttcaatagcaggaggaattcctcaactgtatacactctgagaatttaaacaataacttctctatcacactcaaattgaaaccatccaatgaatatgtctactttaatcgtgtgctaacttaaatggcatttggcaagcctctgtcccagaaaagattatcatctgctcctgtttatttccctgcacgtccttatctctcttcagatttcagatatattgtttgtcctataacatcaaaaatttgatgtatatgtgctaatttgcagatcagtaagtttagtagctgttgtaagaataataacatatttttatcgggtgcttacatctccaagctgagaagcacctctatgtgtaatactaagaaactagaaatgatacaaatatcaagaagatacatagataaaaagtaatggcatgctaatttactgtaataacatccatcatgagaatcaatacattgttgatgctcaacatgtttgcatcataagtagttacgtgcgagaagccacacaaataaaacacatactatat

SEQ ID NO: 135885 - DNA, 759 bp, Homo Sapiens
  misc_feature (588)..(703): n is a, c, g, or t
agcgtatgcacagaaaaccccacacccttcacctttattgaacaaggagggagcccgataagaatcgctgaagaaacgcggggagtgtcccgcacaaccggatgggtgtggcaggcagcgtgggcgagtagagtgacctggggcggaagaggtgtctgaatttgcgtggctccagcggctcaacccctccgagtcttcagtgcagtatagtgatccattatctccagtgtctaatttgggagcgggaccaggagtaaagttcatgaaatgttaggtgggttagagaccactgagccatcctctgcctgacatgggcatcttgaaactgccttgtggccatgtgctgcatccatggtcttgtccctctcagagcctccttcttaagagatgggctgcgtccctgagccgctcttgtggaaatctccttttatcccatggttagaggagacagagaaggttctctgggcacaactggtcctcatacaagagaaggacttagcagaatgcgtggtccaagagaagctctccacaggtggtggctattattattagctttttattcagccccatcctgggcatatatctctnnnnnnnnnnnnnnnnnnnnnnnnnnnnnnnnnnnnnnnnnnnnnnnnnnnnnnnnnnnnnnnnnnnnnnnnnnnnnnnnnnnnnnnnnnnnnnnnnnnnnnnnnnnnnnnnnnnnttccttgaaagaatggagggaaaagcttctcctgctgggctgtgtccgtcagccgc

SEQ ID NO: 135886 - DNA, 991 bp, Homo Sapiens
atttttcatatcctttattttcagaaaaactgaaacacaaaacagaacatgcataattaagcagacctatattgtcaatggcaaacagagttgagcaattctgtggcctagtggattcagatagcagagctgtgtgactagtctaaacaattctcactcaagatgacagggtgtatgctatttttacatgtagtgaggataactttaaaaaatggatatatgctttaaatagtctttttcacactccatgttgactatgcacatggcctgaaatgagaattagagtacagtataaataccataggagcagctaattgacaaccaacagctttgaaagctttggattgtaaaattgcaaaacttgccaggagatagaagggaaaacagaaaccattatctaaccaaatgctgccagttcagagtttttcttagtttcagcaatggcccaaaggaacggcaattcagaccacgatgaatctagatgcatctgttgcagtatgaaagatctttcctaggacagggtaatcaatctctctgaagaggttgtgggcaattttagggtcaattaaggaatctcatttaatataaaatgactagggatccctttatatcatgaactcaggctatggaaacgccaatggcagtgttttccaaagtgtgatgcctgggagtatttaacacaatgttgttttccctgctcacccttctgtgaatgtactaccatggtatgctctagatctggggccactagtcacacatggctattaatcacttgacagtgatgaatccaaagtgaggtgtgctgtaggtataaaatatacacaaaaatgtgaaagcttagtacaaagaaggtaaaacatcttaataatttttttgtaccaatcacatgttgaagtgataatattttggataaattggtttaaataagataccttattaacattaattttgcctatttctttttacctctttcaatgtagttattagaaca

SEQ ID NO: 135887 - DNA, 757 bp, Homo Sapiens
tttaaacagagaagacaacatttattggcacaatttaatatgtagattagtttctgcataaatagtttagagttgcgtgattggtatatcaaagagagataaatataattttagtagatgccttgaagtttggaaaggtcttctgtaagtggcatatttgcttatttgctgtttaatagcaaattcaaggtctgatgatgtgacatgtgataacagcctttagatgcctcaccccaggcagcctcctgtacccctctggtctgccttccccactggtctgtgctatcagctgcattattcagttgcccattaagtgggaatcaaatctgtgtcattaaggagccccaggtcacaataagccttcattactttgcttatagcagtgtggctttattttgaattggaccactgattaatactgtccagctcctgttatactgatgagatcattatttaaccttacaccttctgaggctatcagttacacatcagagaagccttgccttgcattccccttgccagaaaaatattttctttgggagttccagaagccaactttgtcccagttcttacaacaaaatttcctcctctctgccccacctgcaaggctggcctcacgtaaacagccagccttggtctcggccaccagggccttcgcagcaaagacgtgcccaggggagaaaaattcaatttgtacttttcactcaactttatatttgtgacatgcatccacaggcataatttatttactgtcact

SEQ ID NO: 135888 - DNA, 552 bp, Homo Sapiens
  misc_feature (398)..(398): n is a, c, g, or t
cattatgataatgctttatttttactgtgtccattgcaaaataaggaagtggaataaaatactctttggaaatctgtttaggaggatgtattagtccattttcacactgctgataaagacagactagagactgggcaatttacaaaggaaaaaggtctaatgggagaactcacagttccatgtggctggggaagcatcacaatcatggcaggagcaaagaggagcaagtcatatcttacatggatgatgtcaggcaaaaagagagcttgtgcagggaaattctgccttataaaaccatcagatcttgtgagacttattcactatcactaggacagcatgggaaagacctaccctcatattcggttacctcccacttggaccccttcttcacaacatgntgagaattccagatgacatttgagtggggacacagacaaaccatattactctacccctggcccatcccaaatctcatgtcctcacatttcaaaagcaattatgccttcccaacagttcccccccaaggtcttaactcatttcagcattaactca

SEQ ID NO: 135889 - DNA, 695 bp, Homo Sapiens
  misc_feature (523)..(547): n is a, c, g, or t
  misc_feature (565)..(621): n is a, c, g, or t
gatttcctgacctcatgatccggcatcccccggcctgcaagaagctgggattacagccgtgagccactgcacccagccccaatccaccactttttaagcaaacccacacaagttgtgttttctatgatacctgtctgtgattttcggagctgggggttcccctacccccttttcctggcgttaagcttttctttttataccagtggatctggacccaagacattacccacactggaaggggatttgtataataaatgtgtaaactgaacccatgtgttgctgctctgtctgcctcaccttgaggacccacacctctagtcaagaccagataatatatttttgcaggaaaaaacataccttgggaatagcctgtgatagtgtcatctgttttgactttacttgctttgtgatgtggggcaacttctttgcctgtctgcactcagatttctagccaacctcaagcaataactcttggtaatataaatggtgataacaaagactctgtccttaacctccctatacnnnnnnnnnnnnnnnnnnnnnnnnngagacaatgtctcactcnnnnnnnnnnnnnnnnnnnnnnnnnnnnnnnnnnnnnnnnnnnnnnnnnnnnnnnnntggactcacaatcttcccacctcagccgcctgaatagctgaaactacagttgtgcaccaccatacccgctaatt

SEQ ID NO: 135890 - DNA, 577 bp, Homo Sapiens
  misc_feature (291)..(402): n is a, c, g, or t
ggtagggactgtttttgagatcactgggctgaaatgtattctaggggtgaaggatctaggatgtacctgctcgtcatttcctgacttcaccttttaccaattcttttcttaacaaatttaaaattggtcagagcaggagctgctagctggctttttaacagtgtttctcataatggcagtactcagcaaatagtttttctcttgtctcctaaaattaagttgcaagactaatgtaacaaacagtaaaatttaagctaaagaactcagtataggctgggtgtggtggtttannnnnnnnnnnnnnnnnnnnnnnnnnnnnnnnnnnnnnnnnnnnnnnnnnnnnnnnnnnnnnnnnnnnnnnnnnnnnnnnnnnnnnnnnnnnnnnnnnnnnnnnnnnnnnnncggcaacaacaacaaaaaaccctactagctgtgcagcggagtggtgcgcacctgtggtccctaactacaagctactcagaaggcaaggtaggagcatcactggggcccaggaggtcaaggctgcactgttcataccattgcactccagcctgggtgacagagcgagaccttgtct

SEQ ID NO: 135891 - DNA, 602 bp, Homo Sapiens
ataattaataaatattctattcttcagaagtatctatccatattattatcataaatttcatactttaggtaagtctcagaccagtttttctatagccctactttgtctagtgttcctagatgactattaggtgaagtaggcagcactacaatagcatccctggagataaaagagtacacctcactgaccagagactgcccagatggcttcctccatttgctgtgagctctcagtgatgttataaataataacatcacactccagcaggcgcatgagaaggtcttcttgagagatggcagagtacgtctccaccgcaaagtcaggccgcgggctgtcaggcttggacagcgtgcccacaatctggaatgtgccttccttcactttggttgaggaagcttccagcatagctgacttattttcatcttcctcttcctcttcctctgtaatttcttcaagcgaagccccaactacacagttagatagaaacttcccgatgtttccgctgctgtaggaatccaacaggtttataaacaccctctgggtccggataaccttctccgtgagagcagcagtttcctcttcttcagccatggtgggagccg

SEQ ID NO: 135892 - DNA, 572 bp, Homo Sapiens
tcaagatttccttcaactcattgttagcgcagaaaccggtaagatgtgccagccaggtcaaaggagaagtgacaaaggcacctgtgtacgcggagtaaagggatacaggtacgcttcacatacgaggactggctctcccacggacgggcgggcggtgggaactcgtgggcagccgcgggcagagcccatctgcatgctgtccaggcagtccagactgtccaggctgctgcaacagaggaccacaggcggggcctagaaaccgcagatgtttgtcctcgcacatttctggaggccagagtccagcatcaaggcgtcggcaggactggctccttctgggaactcggagagaatccggtccagcctcagccccttctggcacagccggcagccctggtgtcccccgatcaaggccgcggtgctccagtctccgactccgtcctcctgtggtttgcctctgcggaccccaaatctccctctcgttccttccacacgggtgctagtgtcggattcagggtccatctgcataacccaggatgacctcgtctcaagagccttaatttgtctgggcacgg

SEQ ID NO: 135893 - DNA, 624 bp, Homo Sapiens
ccgctcgaccacgcggtctgtgtaggggttgtagccacgcccgcagcacataaggtcgcagctgtcgcttccgttggatgtcttgttgcactgcctgtcttgtgtcccgtgggagcccaccttctcattcttcatgcagaagtcaggtgagctctgcagatagacgagttccgagtccttcacaggccggatatccaggtccttgggcaccaggtgcttgcgggtgcccatgggtcggtgcactaccttggtggccgacaggtatcgggtcttgaggtcagcagcgcatacacgaaggccgactcccgggtccctctctccaggtcaagcaaatagttgggggcgagctcaatggaggagcagttccagcgcatgtcggcaaaggcccggcgacaggccttcatgacctcgcgggcggcgtgcaccaccgtgtgcatgagctccaggttgctgcggcacagctgcacctgtgcagacaccagaccctccagctgcttgcagtgttgcgtctggttcagtgccagggccgatggtgtcttggacagcgccagccacttgatgccatagcacacgccggtctggagcgccagggcgaagagcagcgcctcgcagacctgcggccgc

SEQ ID NO: 135894 - DNA, 1056 bp, Homo Sapiens
  misc_feature (69)..(107): n is a, c, g, or t
  misc_feature (179)..(210): n is a, c, g, or t
  misc_feature (475)..(475): n is a, c, g, or t
  misc_feature (1043)..(1043): n is a, c, g, or t
gggctggggcttactcagcatttatttcatacagctgcttaaaaagctagttttaaaatagagatcatnnnnnnnnnnnnnnnnnnnnnnnnnnnnnnnnnnnnnnnaagaggaattgagaagtgccaccccaaagaaaaagctatgttttataaatatttctgtagcttccacatccnnnnnnnnnnnnnnnnnnnnnnnnnnnnnnnncatttacaacccaagctagtgattccatgtggtgggcccagcaggctcagaccccagggtgggccagggggtcccgcagaacattctgaagaaggcgggcagaccccttcccggaggctggtctctgtggccctgaaaggtcaagtctgtatcagtctcaccgatcccaagccccgctccttacaccagcctgtgggcactccagagcctcaggctgccaagttatttttaatcttgtcggtttcctttgatgtcctgccctccncacttcactgttgtgtagacgcatcagtttattggcttgggatcctgtttttttcaccttcataggagcatcggaaaacttggcccccatgaggagcccgtagctgaggttgtccgcacatcctccccagcggttcccgggcccgggtggctcacctgggacggggccgcaggagcagccgggcaggtcgccggaggtgcaaggcccgggcgatggcgtggctgatggcggcggccgacagcgcatacacgaaggccgactcccgggtccctctctccaggtcaagcaaatagttgggggcgagctcaatggaggagcagttccagcgcatgtcggcaaaggcccggcgacaggccttcatgacctcgcgggcggcgtgcaccaccgtgtgcatgagctccaggttgctgcggcacagctgcacctgtgcagacaccagaccctccagctgcttgcagtgttgcgtctggttcagtgccagggccgatggtgtcttggacagcgccagccacttgatgccatagcacacgccggtctggagcgccagggcgaagagcatcgcctcgcnagacctcggtcgc

SEQ ID NO: 135895 - DNA, 272 bp, Homo Sapiens
tcccctagctctttcccataacctgacctaaaaagtagccctcctgattcacctggactaaaagggtctaggtccctgtgtttttgaggtctaggtgacagctctccagaacagtgagaacggaggaacagaagggaaataataaatagcaaaagtaataagagccaacattaattgagcacatactatgtactacagcctgtgacacacactctactgtaattcccatatacagatgagggaacagggcccgcagacagacggtcaggcag

SEQ ID NO: 135896 - DNA, 466 bp, Homo Sapiens
tctagatatcccctactgtgaccaaatttctgtattacgattttatgttaaattaaactaatatggcaggttataatgatccttaagtgtaaagaaatcagtcaattacaagagtaattgtatagttattgagacctatagtgtgtggcttagatgaaagggagagtaaattttcataccatgctctctcctactcagtttgatctctctaaaattgtagtttggtttgatttaatataattcttagtagaaattttgaaagtatgctttgggattaataattatttttaatttttctggctgaatatcaaattgatagtaacaacagaagcataattttaggaaggctttcgcaaacctagccttttaagagaggtttttaacctgaagcatgagaatatatcacctgtggtttttcctttgagatgaaacgtagtttctagttatatcattacttaaagggctt

SEQ ID NO: 135897 - DNA, 820 bp, Homo Sapiens
  misc_feature (487)..(571): n is a, c, g, or t
attccttttaattttaggtaaaagaaacctttttaccagtatagtgacgagtggctaccatgattaataagtgactagacctcatggtcctcctcatactaaaaggtgaacagtgcaagctgtcggtggatctaccattctggggtcttggggacagtggccctcttctcacagctcccggtgaatgctgcaatgatcattggtaggactgttaggctttgtttctcaagaggataatctgattgggaaaagaataagagtgcagctgcagcccatccttgtgaagaaggtaccagtgcgctctcaaagccaagtcttgaaaataatagcgaatgctgtattggataacagccatgccagatacagagaagccacagatggcattgtcaccagaaaatggaagcacaaagcgctttgggtaacagcaattcaagaatgactgcagagaaaatctattaagaaattcaaatgcagatttcaatatttnnnnnnnnnnnnnnnnnnnnnnnnnnnnnnnnnnnnnnnnnnnnnnnnnnnnnnnnnnnnnnnnnnnnnnnnnnnnnnnnnnnnngcatacagtttctcagtaaaatacatttgattaaattttataacaaacaagcttatgaaatgcagatatacaaaaaggaaaacataagaagcatgcataattctaccactgaaaaatactactaaaatttggtatttaaacttttgaatgtttgtcactgcacttgcatgtgtgtgtaaatataatctccaactctgcagagaaatacaagaattgttatgaaccttaataaactcccgaaaagatttc

SEQ ID NO: 135898 - DNA, 529 bp, Homo Sapiens
  misc_feature (209)..(209): n is a, c, g, or t
  misc_feature (255)..(255): n is a, c, g, or t
gggaaattttatgttatgtctattttaccacaattgtaaaagtcagggacttacactgttggtaaaagtatgtaggatctgaaggctctttttgtgttcccatccttctttaaacataaggtaccagagatcaagccaaagccagggcatctttattcttcgaaatatcatctcactcattctataaatgggataaaattacatcagcntgttgtatcagaaatgtgtatttctttgagcacttctttagtaccntggccttgatgaaggcaatcgtgggaatgacggatgattgtcttagaggctactaagagctccatgttttatgcttagcagtgaaggcatgggctattacgcatcccatgaagcctcagaaaataatgggctctttaaaggaatgaaggattcattataaaacatccttactagatagccatttggtctctgcttctgcttctccagggcaagtttcccactctgcctaggacctctgcaccagggtttgagatgaaatcggcctctttttaag

SEQ ID NO: 135899 - DNA, 536 bp, Homo Sapiens
  misc_feature (190)..(190): n is a, c, g, or t
  misc_feature (196)..(197): n is a, c, g, or t
  misc_feature (371)..(371): n is a, c, g, or t
  misc_feature (464)..(464): n is a, c, g, or t
ctgatttgccaatgatcacactcattttggccatgccaggggggatctgtgtgtgtgatggggccgggccagggagcagtttgattcaacttttgcaaagccatgacttctgtttttccatttacccaatcttccccctttcaaactcccatgacgtcttttaaaaagcaccatgtctgctcatcttacntgaganntgtacaagataacacgtaaagcctgtagtagggagcctggcatggagtaggcatttccgaggcgctccttccatgccctgctgccctcttatttaaacattcccagcacttccttgggcactagaataaggttagattttaccttttgaaatttacggtttcctttagatattnacaataacaataattggttatcgtctttacctggaaatgcttccccctttgattagtctgttttgcactgctataaaggaatactgaggctgngtatttacaaagcagtttatttgtctcatagttctacagactgtacacgaagcaacggtgtcagcatctgct

SEQ ID NO: 135900 - DNA, 489 bp, Homo Sapiens
  misc_feature (17)..(17): n is a, c, g, or t
  misc_feature (25)..(25): n is a, c, g, or t
  misc_feature (52)..(52): n is a, c, g, or t
tctgttggtcgttatancccctgcnttatgaaagcttctgttctattcagancttctttattcttctgtagccttcaatatagcactttgtctgtcttccaggcctttgatttttagtttggccatgtgatttgctttgaccagttgttagcccatgtgatgcatgcagaaatccaacaacacatttgagtgtttgaacttccagatttgctcttctgccatcactgtgagagtattcctgagccagccagctttgatatcttgggaagttccttagatcagaagatgttttcttgaaagtcaaagtaattacacatcttgcaaatgctagatcatggttgatgcgtcagtctggataaagaaacttgcttgtataattcacactgataacaccaccaaatgtcattggaacagctgaactggaacacagaaaatgcttccttttgtgtaaaaatgcccttttctcttgcaccattttaatccgttcag

SEQ ID NO: 135901 - DNA, 491 bp, Homo Sapiens
  misc_feature (277)..(285): n is a, c, g, or t
ggtggatcctgcctgagaccagtcagaaggccctggaccagctggactcccaggctctattgatgctgggatcacccagatgccaagatatcacattgtacagaagaaagagatgatcctggaatgtgctcaggagagaagaaaaaagcagaaagcagctgggaagctttagcctgcttgagtgatctgggattctcaagtagcatacataacatcaccttggctttggttcctttagataccaagcatgtgttctgtggaggacaagaaaatccannnnnnnnngttataaagttataaacacacaagagaacaatccagttagggagaatgttaataaatacaacaaactctgccattagacctgaagataatcagctagtagaattatcaaagagattgtaagactcttactgagtacctgtttgaggtcctctgaggatagatgaaggaaggaacttaattcttaccatcactgtggcttggattag

SEQ ID NO: 135902 - DNA, 231 bp, Homo Sapiens
ggaaggagtcgttgagctgaatctttgtggagtggagtggggcgagagtcctccgagtagtctggaaaattagacttctgagccttaattcatacttataagcagctagtaaattgtaaaatatagtgaagcaatgtagtgtagtaactaaaaccccaagctttggagccagattgggcctttaaccctaaagttgccgtttattttgactggcgagtcatttacttatag

SEQ ID NO: 135903 - DNA, 662 bp, Homo Sapiens
atatatttatacatacatgaacataggagccttgcaaacatgaaattcaaaggacagaacagatggctgaagtttttacaccatcctgaggggacagaaagattaggggcttgaggcttctagaggagggaggaggtggcattccaagagaatgatgggaggaaagcatggtgtgaaaacaagtaattcagaatctaagctgttggaactttcagatattttgagccttaagggaatgtgattatgggacctgagtcatgtgacaggcagttgtaacgcaggcagcagtaatctttgttgttttggttatcaattagccttttctttacctacagtgttttataaaatgtggtaaatgacagaaggttgccagagaagaccccttccctgttcactgttgatcttcattgtagattaactttcctctttcctctcttacacaaagacttcattactatcacattgtctaagatggaacattaaatatgcttttaaattggaaaggatatgaaaacaagctgttaaaaaaaagttagttgtaactcataaacgaggcttatatagaaaatgttataatcctactaactgtccttgttttctgctaatataaggaagaacttaacttttaacttcagagcactgaccccatttctcaggagtcc

SEQ ID NO: 135904 - DNA, 575 bp, Homo Sapiens
ggggctctcctaggagacctgaaggctgcttccgctaacccgggctggcgctgctaacctcacccaacgatccctgctgtcggaaaatgtccagaggcaccatccctgctatgaagagggaatgccagtacaacagccacaaggggtcttcctgtggccctcaaacaaaaaatcactgcattacatcagcagactgcattggagagaaaggcgccgggacagaaaagcctgagataaaccacctgtcattcttggagaaaaggatgctgcggctttcccgatttggttgatgagatggaaaatcaacccttacaggaaggacatcaccaattccggaaaggatgctgcgccagtcatgtttccgcactctgtgagacgttgaaatctccagaagttgcccaaggttttcaagctgaacacaggagaaatgactctggatctctgaggactgttttcctcaataaggagctgcaatcttggctccaccaccctccctccaaaacatctcgtgtgtctggtatctggttatattgtggcctgacagagaagtttctttcggggccagtgaattaaaa

SEQ ID NO: 135905 - DNA, 478 bp, Homo Sapiens
ctgatcctatattctcctagcacgggtaatgtctgatttctttgttacaggtaactaacatgttgatgttgccctttgctgtcagtatcagctcctctaggaagcagatgctaagatggaattaggagtacaataaatttattgggggctaatggccatgacagaagggagaggaaacaggactgggcaatgaaagtcttcacacctccatgcagattagacacctgtgaaaggaaagaaagagaggcagaattgggcaaggggagcttcagaccatggtgtggatctgcataaatctctgcctatgcaatagggagttctggaacaaagagtccccattagaagagtcccatgctgggcagacagggccacacccgagcactcccagcttgtacggtattggctggggggtacccaggaagagatgggcctcagctcaaacacatggcatatgttgaagatgctgcagctagaggca

SEQ ID NO: 135906 - DNA, 736 bp, Homo Sapiens
  misc_feature (49)..(189): n is a, c, g, or t
aatgttttatgagcacctgtcccatatatggtatttttctcagggcgtnnnnnnnnnnnnnnnnnnnnnnnnnnnnnnnnnnnnnnnnnnnnnnnnnnnnnnnnnnnnnnnnnnnnnnnnnnnnnnnnnnnnnnnnnnnnnnnnnnnnnnnnnnnnnnnnnnnnnnnnnnnnnnnnnnnnnnnnnnnnngcatgcttgataaattttgcaaacttaattatttttgagttgtgggtaatatattgtaactatcacaacaaaggcaaataagtaataaatccttatctaccactgagctcattttctatattctattactcctcgttttttccctaatgaaagttccacaaaaattaattgctctgtgtggtaagcataataatggcctcccaaagatctctattttctaaccccagaacctttgaatatgttaggttacatgacaaagaggaattaaggtggcagatggattagtcacactaatcagctgagttaaaatagggacagtattctgaattatactggtggtcccaatgatgcagtcacaggggtccttaaaagtcttcctgtaagaggcaggcaggagagaaagttagggtgatgccattgcgaaaagactcatctaaaatgcagttgcggattttgatggtggaggaatgtggtaggcctctagaagctagaaaagcaaggaaaaggattctcctctagtgcctccaggaaggaatgtgacccctgg

SEQ ID NO: 135907 - DNA, 506 bp, Homo Sapiens
  misc_feature (486)..(486): n is a, c, g, or t
ggttgccctttaattttcactgagtctcttaaagattattcctgaaatatctctcaaatttgtcttttctgattacaaccttactgacgctgcagtaagttagaaactcaacatctgtagtctaaaccgttaaaatagctgcttgacttttccggtctctgtgtagctctattctctccattttcattaagtttctttgcaaaacacagacatgatactgccaaagtttcgaacaaatacctttagtggcactgagttatctactgttaaatctccagacacctcaagagagcattcaaggttcatgatcttgaaccaatttacttttgggcattctccaaaagaattcccttggtagtaaatagtatccattgctgaggctcttggcaacatttggtgggacaaaggatgggcaatgggcaacaggaagggcaatctaaaccttctctccccaccccccctccacttttttagggatggtagatntagagttgggatagagaaag

SEQ ID NO: 135908 - DNA, 763 bp, Homo Sapiens
  misc_feature (58)..(58): n is a, c, g, or t
  misc_feature (60)..(90): n is a, c, g, or t
  misc_feature (127)..(127): n is a, c, g, or t
  misc_feature (741)..(741): n is a, c, g, or t
aagctatccccagattaatccagcaattcaatgcaattctatcaaaatctctaaaagntnnnnnnnnnnnnnnnnnnnnnnnnnnnnnnnctgtatgtacacaacttctagggggttccccaattancagggaaaagtaagagctaagaatagctcagattattttgtaccacaggactaaagaaagggagcatacatccctgatatcaagatttatagtaaagcaacagtggttaaaaccagatggtatgattgaccaatgagtggatgaataaaacgtgttatacatgtaaaatagaatattattcaaccttagaaaggaaggaaattctggcacatgctacaacatggaagaaccttgaagacattatagtaagtgaaataagccagtcacaaaagtgcaaatattgcataatatatgagatacttaagtgagttaaatttatagacaaattagggagaatggtaattaccagggagtaatgggacgttactgtttaatatgtgcagcatttcattttgggatcatgaaaactttctggagatgaatagtagtgatggttgcacaacaacgtcagtgtacttaatgccactgaattgtacactcaaaaaggattaaaatgataaattctatgtaaagtagagtttaccataatttttaaataacaacatggcgtagagcaggaatggacaactagatcaataggtaaaaaatacccacagaaacagaaccatgagagncttggtgtgtgatagaacagac

SEQ ID NO: 135909 - DNA, 475 bp, Homo Sapiens
  misc_feature (400)..(400): n is a, c, g, or t
cagtgtgaatgacaaattggcaaactgcagtgggttcttcagcatttttattcaaatataaaggattcttataaaagcactagattaaaaacaaaccacaaggaaagaaaggacttaggacttggatgcaaagaggaggaagtgttatattttttcttcttctggggaggagagaagggaggaaatttccatttttcaagtgtagctcactctcaaatccatgagctctgggcatgtagtctgcaccctgggtacttctgtagatggtttgaatatgacatacacccacacgatgtaattgggccatctgtctattgttcccctgtggtctgaacctccacagcagatcacatgagctttaaaggtagagacagatgtgtgttctagttatgagtgtccnttacctctcggtactcatatatctcagtgccacctgcccttaagaactcccagaaggctggcatcgtgccgaatt

SEQ ID NO: 135910 - DNA, 411 bp, Homo Sapiens
  misc_feature (215)..(243): n is a, c, g, or t
ttaaagtggtagcacattttattcacagagcaatgaaaattattcctataaattaatgtgagctgaacaaattcaccttccaatgtgcatacagaaagtggggatgtgaagacagcaaggtgggtgagacacaagttatgaagtaatgagtaccttctcctcgtggtttttactttaaaagcacatgctaagagctggatgcagtggctcacgcnnnnnnnnnnnnnnnnnnnnnnnnnnnnncatctaagaacgggtacatgtgggctataaagcgctccacagtgctgggaatgcctacgcatctgctgttcaatacagtagccagtggccacacgtggctgttcagtgtttgagacgtggctggtgcaaccgagaaaaggaattttgaattgtttattctattttatt

SEQ ID NO: 135911 - DNA, 573 bp, Homo Sapiens
  misc_feature (292)..(292): n is a, c, g, or t
  misc_feature (493)..(493): n is a, c, g, or t
aatctggtaagcctatttaaaagtttttcttatagtgacctaaaatatacttttctctgatttccgttccttccttttcttctgctgtttataactctgggaagtctggtgctgacacaagctggagcaccaagagcagagtcttaaagaaaagacaaataggaaagggaataactgtccttactatagacacaaaggtgaataaataggactacacaaacctcaagacctagatcatatgctccatactcaataccgtttaaattttgttggtgaaacacaagagacaaantgtggagaaccgaattgtattcaaagccaactgcaacatctcaaacataactagtctattagaaggtggtgcatggtagacagggttcaacccccagaggaggaagtctttaaaagggagatggttggtaaggcacccttgagagggttcagagcaggggcccagtgccagtgggagaatgaagtcaaaatcggagctcanatgcatgatgcctacacggtgaacaattagaaaggctatagcttagatgactagtagagtttgtaactcattaactcatc

SEQ ID NO: 135912 - DNA, 400 bp, Homo Sapiens
  misc_feature (161)..(161): n is a, c, g, or t
agctttcgttaagcgtcggatgtgtagagtgctgagttaggggctggactagagacgttgggacatctcccgggaacagcagcctggaggggaaaaatctcctgacctaagtggtcattcggccttggcgcattggacacgggagtgcggcgacagccatnatcgtccatccatcttggcacttttccgtcctctgcctttgaagatgggtgtgcccggcaggctgtgaaagataaacattagagggttgtttagaagacttttttgacctgagcccatgaggtgcataccctttgtttggcggagaaaccagtggcttctgaagatcagggacgggccacaagtgcgaggcattgcagacatttcgaacccagacttccagcctggagacatccacacg

SEQ ID NO: 135913 - DNA, 690 bp, Homo Sapiens
  misc_feature (40)..(40): n is a, c, g, or t
  misc_feature (218)..(270): n is a, c, g, or t
  misc_feature (321)..(349): n is a, c, g, or t
  misc_feature (369)..(378): n is a, c, g, or t
acacgggtatgttgaggtggattttacccctggatctttntggtcaacagaccctttgctcctgaaagagttccagcatttaggttccgatcatgtctaggtcttcttggtaccacagggaggaatcattggttctgggtgttgttagatgtcaaagcattttctattgggcatgccctactgacatgacttggagttttggctctgtcataccttannnnnnnnnnnnnnnnnnnnnnnnnnnnnnnnnnnnnnnnnnnnnnnnnnnnnccaggatgcacctgtgatagccatgattgctatgaccgcacctgtgaatannnnnnnnnnnnnnnnnnnnnnnnnnnnnccagagtccgtctcttaagnnnnnnnnnntctttgaactaaatttgttgtgattttgtcttttgacaaagaagaaagggcagggaagccaatgtgaattgccccaaatcacagagcgaaatggtagtagtcaggaccaaaacactttcttagccgttttcttagttcttgtacccatctgtttctgtattttcttcaccaggccattcagcagtgtctcttaaagggtagcccgagaaacaactgacttagaaaagcgtggggcacagtctgtctacgcagacccgaggaatctgcattttaacaaactcactgggaaattctcgcgcacgccaaggtttc

SEQ ID NO: 135914 - DNA, 490 bp, Homo Sapiens
cactaatagagtatccaattttaaaaatactgacagaaggctcatgagatagaaattttcacctagatctattggaaatatactactagattctgtagaaaaagactggtgcagtaattgtaaaacacatctgatatctaaatctttgtctgttttttacctgaaatccttatgagggtgattgtgtatgtcaatttgaatcttcccgtcaacaagataaataaatacataaataaatagccaggctgcctggataaattagttcaccttttctatattttgagggcagtgcttctcctcctttgacagacacaagattcacccggggatcccttgcaatgaaaaaccatagaccacactttgactagcttggataaggggccagagcactgaaatgagtgtgtaggtgactgtgccaagattcccctgctcatttgggcactggctcaccaaataaacaaagcttaggacctccagtccttgccggaaa

SEQ ID NO: 135915 - DNA, 563 bp, Homo Sapiens
  misc_feature (55)..(55): n is a, c, g, or t
  misc_feature (84)..(84): n is a, c, g, or t
tactatattcttttacatatacagttttttcacactttatattatttagtatcanagtctactgagatattgtaaataaaatanagtgccttttaactcttgtcagtgaactgaatgacaaaagctgtatataaataatggttcctaactttgagtcacacttccttttaaggtgaaaacacagtgatcagagatatttttgcacatgcccaaatgttgcttgccatcagtcttaattacaaactaccctcctctcttctgcagttgcctgttgccatctcagaagaagcctccttcagccagatgttgctgttttctttggtacttggtctcgaacgatgatcacagacgtgacctttattttctttcaatgaagaagaaacttcatcttcttcaagttttcttatagtgtccttatgttgtgttggtattgagttaatttgggcctcagaagaatgggttgcaaattattctcttctctgcagtttccaggaatagcttctaagagagtaccacacgctgtgagcaaaggcagggagcagctgaatgcttttccatatgac

SEQ ID NO: 135916 - DNA, 450 bp, Homo Sapiens
caaaaatttaaagaatcaaatatatattctatcacacaaactggctcaattatactgccttgtatttagcaggcattaaataaatgttaggtagtgaatataaaaacaggtcaagtaatagttatagtggtcattatatctcttaatgcactcatattcttttaacatttttaaatggccaaaacagctacttttaatttgctcagaatataaaccacaaatttttaaaaatgaagagcttccaaaataaaatacattttttcagaaaatagtattttcaaatttaaattagaataaagtacttcaaatgattcatattaatgtaggacaaaatgtagaacttaataaagaaagcaagtatagtaaaaaagaatgtagctaacaagtcaaaaaacgcatatgcataattatcactgcatctcctttataaatttaaatagtagatgttaa

SEQ ID NO: 135917 - DNA, 387 bp, Homo Sapiens
  misc_feature (36)..(36): n is a, c, g, or t
  misc_feature (206)..(317): n is a, c, g, or t
tgcagtgaacccaatcaccccactgcaccccagccntgtgtaacagagcaagacctggtctcgaaaaataaataataaagtatgtgctaatattatgtaataattacatataacattagcaaaatttgttgagtatctctgtgacaggcctataaagctaggactacagtgccagttagagtttaggccaggctcactgatgtatnnnnnnnnnnnnnnnnnnnnnnnnnnnnnnnnnnnnnnnnnnnnnnnnnnnnnnnnnnnnnnnnnnnnnnnnnnnnnnnnnnnnnnnnnnnnnnnnnnnnnnnnnnnnnnnnaattagctgagcatggtgatgtgcacctgtggtcccagctactcaggaggctgaggtgggaagattgagc

SEQ ID NO: 135918 - DNA, 487 bp, Homo Sapiens
taatatgagattgcataggaacagaggagccgaatttaaaatagattagtcacgtaggaaatgcttagctgttgtaaaagtgttcacgcaatgacttaccttcctaggttttcacttttttgaaaatttttccctgaacaacatactgaattatgatatttcataatttgtgtgtgggttataagaagtatgaggagagaggatgcataggatttgctttttctgttttgggtggagattgagcttttcctgaagacctgaaagagctgcttctgatctaatctgagtgccagtaaaagtggctcttagatgaaaggctttttcttctccatattggtgtcatttaagacatacaatattatctttaagtttaaaagattatattttgtcatcggtattaacatacaaataagggttttcttgagtctttgtagatgactggctaggtcagccttttttatccctgatttgggtattagatattggt

SEQ ID NO: 135919 - DNA, 848 bp, Homo Sapiens
gtagaaaatcaatgtttatttttgtagaaagaacaagtaactgaagtttaaaagccacatttgaacgacagcccaatagaatacgaaaatacaaaattaagttaccagacaatgtataggttcaccactaaattaaacagagataagaggaccagtgaactagaatactgagcagaatgaatacagcaaaatacagtagaaataaaatatcataaaattttaattttaattaaagtctagaatgaggagcaaaacatgcctaattgtttcactagaacagtaagtatgaattggccacagcaaataaggccagtcagatccaaggactggaaaaacagaatctttccctccatgggagtagctaaaaacatgcattgcaaagggcatggatacagagaggaatgaattgttcccattactgcaatcagtatcattgtgctttgtcttgcataactgttccaagtcaagtaactagtctattaagaggctgggatgggactcagggtcaactctgcctgactccaaagcccatgaactccatgggcccttgaggttctggagagtgccacttctgcgacagaagtaggattccttagacattctcatccatctattattcttcactactgggaataatctcctttggacaatgcttctgaagcaacttggaaggtcttcaaataatttgagaaagtgactgagggctgagtttaggaaatcaaggcccaacattactcatttcttatcatcagagaaactggaaagcacataagaacacactccacatgtttgcaaattctcacatttgcaaattcttttcattttagtattttcagatttagtatttg

SEQ ID NO: 135920 - DNA, 953 bp, Homo Sapiens
  misc_feature (740)..(802): n is a, c, g, or t
  misc_feature (815)..(842): n is a, c, g, or t
gcggccgcctacccgggagttgggagcgcgctgggacttccggactaagcgggcgcaaagccccaagggtagccctctcgcgccctccgggacctcagtgcccttctgggtgcgcatgagcccggagttcgtggctgtgcagccggggaagtcagtgcagctcaattgcagcaacagctgtccccagccgcagaattccagcctccgcaccccgctgcggcaaggcaagacgctcagagggccgggttgggtgtcttaccagctgctcgacgtgagggcctggagctccctcgcgcactgcctcgtgacctgcgcaggaaaaacacgctgggccacctccaggatcaccgcctacaaaccgccccacagcgtgattttggagcctgcggtcttaaagggcaggaaatacactttgcgctgccacgtgacgcaggtgttcccggtgggctacttggtggtgaccctgaggcatggaagccgggtcatctattccgaaagcctggagcgcttcaccggcctggatctggccaacgtgaccttgacctcgagtttgctgctggaccccgcgacttctggcagcccgtgatctgccacgcgcgcctcaatctcgacggcctggtggtccgcaacagctcggcacccattacactgatgctcgcttggagccccgcgcccacagctttggcctccggttccatcgctacccgggaggctgagttgggaggatcctttgagccctnnnnnnnnnnnnnnnnnnnnnnnnnnnnnnnnnnnnnnnnnnnnnnnnnnnnnnnnnnnnnnngaccctgtctccnnnnnnnnnnnnnnnnnnnnnnnnnnnnttggcgggggaaccctctggaatcaataaaggcttccttaaccagcctctgtcctgtgacctaagggtccgcattactgcccttcttcggaggaactggtttgtttttaaa

SEQ ID NO: 135921 - DNA, 491 bp, Homo Sapiens
ctcatttctcttgctctgcctgtaaaagtgcttttgcctcccgccatgattctgaggcctccccagtcatatggaaatgtaagtccaattaaacctctttttggtcctggactctgttatgtatttgtcagcagcatgaaaacggactaatacactctcatttctgagtgggacagccacccagtttatggtacattgttatagaagcccgaactaagacagagatgaagtcccatgcagggtctctaatttgctaagctggtcatcaggcgggatattgccagtcagaaacaggaagagctgacattttgtgtatatgaaagaagatagtggacaggcccattgtgtcggctttgtccgccttggcaaactgcggggaggatgaacatgcaaaaaatccacaacactcagcacagagtctggatttagtcccattagtctgaatgggactaatgcccttataaaagggaccctggggagctctctcgccc

SEQ ID NO: 135922 - DNA, 805 bp, Homo Sapiens
ggtctggatttggtcaacaccttattcagtaaatccttaatttaccttgagacatacaaagacattcttttaaagagctattttcttggtattgcacaaaggttaattttaaagcaatccaggcaagtaagctcacaaaaagaagtacattcatctaatccatttagcaaatgttgcaaatcagcttccaccaataaaacgtagaaatctgtgaaactctatacttcgtgtcagttttaacattgtgttgatggcagccatttcaggcagaggtagccaagttccatatatatggggaaggcaaaaagcagaaaaacattgcaggagacttagcagttctctggcttctattgactatagagcaatttcgaatatgagccatgtttctatgcagaattcttcttttatgccttaaacacaaaagagcttgttgctgccttgggcagatatactggaattgtcctctttgagcttactttctcttttctctaaggtcaagtaaaaaatgtgagacgttttcatataccacaaaggtaatacagcaggctggagtcactctaatcaaattaggagcaattcccttgtaaaatccaccgacgccttctttcctccatgtctttgtgattacatctattacaccactgtaaaacatgtgttgatcctgaagacgagctcttacgacttgatatgggtatgttgctgcgacagcaaatattttggatagtgctgcaacagatatatattctactgtgctcaactgggcttctggtaatctattgatatgctggttgtacttcaacttcag

SEQ ID NO: 135923 - DNA, 766 bp, Homo Sapiens
gggtcagggtttttgacgttcctcgccagctgcacaaacctcccggagcaagtgtgagtgtgggtgagagtgcgcgcgcgcgcacgggctggctgcgcttggcacgcttggtggcccagggtcccggggcccggggtcccgtctggcggcccgggattaccgtgacgtcacattgagcctctggccaccttggactgggacacctccggagcctcacagccccgcgccgcgccgcgcctcacctcgccaccacgcgcctttgggaacccgcatcttcttccttcccctgcccatccatgggcccttctgtcttccggaccccacgggccggaggggcgccttccggagcgcagggctcggcagccgggctgccctcggctctgcctccactggggccaaccaggcgaaggaaccggcgctgggcatccgcagcggtgtaaggaactgagacacctcactgctgggggcgcggaacagctgggctgagacgggaactcgacagggaagagagagacgggccagggacagccaccatgtccttcccacactttggacacccgtaccgcggcgcttcccagtttctggcgtcggcaagttccagcaccacatgctgcgaatctacccaacgctctgtctcagatgtggcatcaggctccaccccagcgcccgctctctgctgcgcaccctacgatagtcgactgctgggcagtgcgcgaccggagctgggcgccgccttgggcatctatggagcaccctatgcggccgc

SEQ ID NO: 135924 - DNA, 1254 bp, Homo Sapiens
  misc_feature (16)..(16): n is a, c, g, or t
  misc_feature (42)..(42): n is a, c, g, or t
aggtatttggtggaantacacatggccaaggttccattttcngaaagggcggaccccaaaagttccattttatgaaagccactttaattattatttagatgaccccagatgtatgagtgccattattgttgtatagctatgaaacagatcatcatcttttacctcattacatttcctcaatataaagttcccagtgactatccgatcacatccaatttctccatttccaaagaagccgaataagggaacactaggaaaaaactttctaaatgcatcagcctcaacattccccttggctctgtaatactgaaagcccctgccaacgcatgcaaacatgaagccaatggtgttatgctctggaatgttggccgctttgaggcgctgcatcgcagcctcagcagtcttctcatcactgacgtcctcgttgaggagcacagtggcactctggattcggtgtccactaaatgacagtccaaccacacccgaggcatcaatatccagagggttcttttcagaagtcagtgatgacaggttgtccacctggcctccagccaagatgatattcatatcactgaaagtgctgactacttgctgcagataattactggctcccaccttacagcaattataaccaaagacaaggaccacacgaagttcagggttatctaaaagacctacttcagtgagttgatgtctttctaatgttaaattctttggatccttaataaaatgaaagggttgtatttttattccttcaatttgagggaataataaagcaaaaccagattctccaatttctatttcctgaggtcgattgctacctgatcccattggagtcactacaattcctggggtcacaatcccaaggacttggcattgtttggggaatagcttctcaagggcaagtgctgtttccatactagttcttttccttgctctcttatggccacgacactcttccagactaatgaaagtttctgaatcagccatgtaaagaactgtatgtggtaagatgcgaacattcaggccacccgcagcaacgccttggcgggcaggaaggtgagcacacgctccaccacctccgccaggttactcaacacgaaggtgctccgcgggtctacggaggagccgcggcactcgccgcagcagcctaccggctccattcctcaccagcccgccggaaccagtcctacggcggctcggaggaacccaattcggacgcgtgggtcgacgatatcgcaagaattccggacc

SEQ ID NO: 135925 - DNA, 944 bp, Homo Sapiens
cgtcttctcaatcacctacggtcctcgtttgaggaagcacagtgccacctctggatttcggttgcccacctaaatggccagtccaaccacccccgaggcatcaatatccaggagggttcttttcagaagtcagtgatgacaggttgtccacctggcctccagccaagatgatattcatatcactgaaagtgctgactacttgctgcagataattactggctcccaccttacagcaattataaccaaagacaaggaccacacgaagttcagggttatctaaaagacctacttcagtgagttgatgtctttctaatgttaaattctttggatccttaataaaatgaaagggttgtatttttattccttcaatttgagggaataataaagcaaaaccagattctccaatttctatttcctgaggtcgattgctacctgatcccattggagtcactacaattcctggggtcacaatcccaaggacttggcattgtttggggaatagcttctcaagggcaagtgctgtttccatactagttcttttccttgctctcttatggccacgacactcttccagactaatgaaagtttctgaatcagccatgtaaagaactgtatgtggtaagatgcgaacattctcaagctcctctgctaccacgcgaaccaagcaatgcccctccaggtggccggcctccgccaggcctgcggagatccaggttacgctccgatgggtccgcaatactctgcgcacacactccctccataagcggcacacgcaggccacccgcagcaacgccttggcgggcaggaaggtgagcacacgctccaccacctccgccaggttactcaacacgaaggtgctccgcgggtctacggaggagccgcggcactcgccgcagcagcctaccggctccattcctcaccagcccgccggaaccagtcctccc

SEQ ID NO: 135926 - DNA, 385 bp, Homo Sapiens
tttggcttaaactgtaaagcctttattatcacaaaccagagcaacatgaggcaagtactttcccaggccaggtgacttggaggctggaaaaacttgattacaagtatgtgagaccaagaatatccatgaagaaagtaaactttttgtataagccaccagcagatacagctcagaccctcttggctaaaaatgggtcatatccatacctatacctgtcatacagaagggaatgaggacccccaatgaactcaggcatttcatgattttctccagggactggacaatacaaaaccctgccttccccaatgctggggtatcttagctggtagagttaagatggtttcggccacatggattgacagtgacataactctggcaaaaaacc

SEQ ID NO: 135927 - DNA, 679 bp, Homo Sapiens
ttttgtcgtcaagaaattgtttctaatttgccctttgactaatggcccagggaacaatggagagatacccaacacacgattattgggggcgcagcgggcgcagcgcggctgctctcgggccgaagcaggcatttatttggagcagcggctaattcacaatttcatggaacttgcctgacacccccacccccttgtattaaaaaatgattatttatatgatgatttcagacagagcagcatctcagaggtttgggagccgggagacctacatctgctgctcttggggagcgtgggggtgggagaggagtgctggagggggctccagggctgggcccggttgtgggggaacaggggcccctaggctggaagggagaaggcagttctcgggagtgcttctgcgtgtgtgatatgcctctgcacacatgtcttgtgcatgtgggagtgtcacatgctgcacgaggctcacctgtctgcccatctgtgctgtgggtttggttttgtgtacacttccaagtgattcacatgtgggcacatgagtgtgtgcaggcagatgtgtgggcacacattcaagactgtgcacaagtgtgtgtgtgaatatagtgtgcgttaaagggtgatgtgagccggcctgctaggtgtaggagcgcagctggttatgtggggcggggggttatctggc

SEQ ID NO: 135928 - DNA, 609 bp, Homo Sapiens
  misc_feature (13)..(13): n is a, c, g, or t
  misc_feature (46)..(46): n is a, c, g, or t
  misc_feature (53)..(53): n is a, c, g, or t
  misc_feature (63)..(63): n is a, c, g, or t
  misc_feature (84)..(84): n is a, c, g, or t
  misc_feature (118)..(118): n is a, c, g, or t
  misc_feature (131)..(131): n is a, c, g, or t
  misc_feature (138)..(138): n is a, c, g, or t
acttcaatgttanatgacctgaccgccttctaacccactacaacgnttctccnacttggccanttccagacaagaagcatctgnaggccctttggtagagggctaaccttatctttgngttctccagatanttctaantccttggggcacccacagccacgtcttgacacacccatttgatgtcctcatcattgctgctgacgatggagttcaccgtggggcagctgtcgtccggggggatggtggtaaaggtggtaaatttcagtgtccatagccaagggaacgatgcccaccaggtccttctggctgacaaagatctcggacacggcgatgtctgtggtccccttccgtgggtactccacctgccacgtgatgggctgagtccctgaaaggctgctgaaactggctatttcaaagttcatcctcgctctcacgagtgggcctcttattggtcacaatggggaccctccagccctttatctggctgagctccgtgtcagagacctcgatctgcaggggcagccggggcacccacacggtgacacacaggggggcgctcaggtactggtatgtgaagttcaccaccgcatccatctttcctttgatctc

SEQ ID NO: 135929 - DNA, 788 bp, Homo Sapiens
  misc_feature (678)..(710): n is a, c, g, or t
gccgcctccacacctcaggcaggaagtgacttcagagcagcaggatgcaggtggctccggagaaacttcatgaagtcactggttcgtggtaaggcttctctccggtgtggatgcgaacgtggctcttgagggtctgcaggtggcggaagcgggttccgcaggtagggcaagggtagggcttctccccggtgtggatcagcacgtgcgcccgcagatgtgccacctgtacaaagcgcgagccgcacgtctcacacttatacggcttctctcccgaatggatgcggctgtgcgttttcaggtttgctggccggttaaaacgggctccgcagattgagcagtggtaaggcttttcccctgtgtgcactgtacggtgactggcaaggttgcccttgtagcggaacgaagaccggcacagctgacacttatagggtttgtcttcgtccccaggaaccaaggagtccagccccgatgagcaccctgccacagcctcacagttctggcagctgaaaaattcacttcccggtagtggacgagcccgttcagagggtgatccagaggtgtcttgagcctgggatgtgaggaggtagggggtactggctggagccccacatttgaactgcacagtggcagcagttggagagagcctgctctggggaccaggaatgggtccttcttcannnnnnnnnnnnnnnnnnnnnnnnnnnnnnnnngaggcctcgtctccactggggagcctggcttgggggcaaggttgaccagaacttctctccccgaccaggctccctgct

SEQ ID NO: 135930 - DNA, 540 bp, Homo Sapiens
  misc_feature (161)..(193): n is a, c, g, or t
cccgggtagtggacgagcccgttcagagggtgatccagaggtgtcttgagcctgggatgtgaggaggtagggggtactggctggagccccacatttgaactgcacagtggcagcagttggagagagcctgctctggggaccaggaatgggtccttcttcannnnnnnnnnnnnnnnnnnnnnnnnnnnnnnnngaggcctcgtctccactggggagcctggcttgggggcaaggttgaccagaacttctctccccgaccaggctccctgcttgggaggcctgagagtttagcacgatgtacttgtactttttccagttgcaggccttggggtcagggctggctggactgggggggccttgactgcagcttcgagattcagtaggtgggtctgggtgtccttcggagcgcctgggactacctggtggaggggccgttgggggtgttgggggttctgcttccagggggcgcagggagatgcccagaggttcatagctggcctggatgaagcggtggcatgcctggaccacgtgctccatctg

SEQ ID NO: 135931 - DNA, 526 bp, Homo Sapiens
gagaagccgtataagtgtgagacgtgcggctcgcgctttgtacaggtacggagccagcctccaagtggcttccaaggcaaacctgcaagaggtggggtggggccatagggagggttctgttcctcccagaggcaggacttgaagtctcctccctcccaggtggcacatctgcgggcgcacgtgctgatccacaccggggagaagccctacccttgccctacctgcggaacccgcttccgccacctgcagaccctcaagagccacgttcgcatccacaccggagagaagccttaccacgaaccagtgacttcatgaagtttctccggagccacctgcatcctgctgctctgaagtcacttcctgcctgaggtgtggaggcggcagggagaaaccaggaagccactaataatatcaagaggccggggcgtgcatctgtgctggagatcttaatgctggcgacatgcctccatcaaccaaggaagatggataagagttggtcccgtaagaccacagtgtctgcctcaac

SEQ ID NO: 135932 - DNA, 518 bp, Homo Sapiens
tttctcccttactagaactggaagtggaaagttagtctggtatcagtcattttcttcttgtaatcttcatccaaatctctcattctggagccacggtgaagtgtttcttcccagtctcccactgccccttttctccatgaatggagaaatggagtggtcccatgatttcagcaggaatcggatgaatagtttgccattggattcgtgtttcatgacatcaaacggaagtgtaatggacaattttatctagaactttgtcatctaatttcttcccaataaattctgccagcttctgaatttcatgctttgggttcttcttcatgtcctcatagaagagatagagaatacggtgtttgtctttggcttcccaccatcctttcacatgttcatgccaggagccccagcacacagatcctaaggatgggattttcatttcgaggaaaggaaatcgttgatgagtcggtgcatttaaaaattaacttgaaccggctgggcgcgatgtgcacgcctgtaatctc

SEQ ID NO: 135933 - DNA, 445 bp, Homo Sapiens
ctggtgatacttacatactttattcattcatatatacttggatgctttattcattcatatacacttggatgggctgccagtcccagactcggctttacggagtagaagagccagctctaccaaacctggaatcagaatgtgctcctgaatcatccaggtataatctgtgcttttcctctatgacaaggtatgttagagacctcaagagttaggcttcatagaggaattcaggtggaccaggaattccttttccttccaagtagtagaataaaaagctcatctttccggagcagagtatccagtatagcattcagattcaaacccaaatgctccctaccatctttctgcatatcctttgaaaggttttggccaaagtaatccctcgttagccgaatgtcagccgtgaagaagccggaacagcgcggtcctgtaagcaccaaaaaaa

SEQ ID NO: 135934 - DNA, 470 bp, Homo Sapiens
ctgtatgggtgtcgttcagaacaacaaagtcaggcgttttgcttttgagctcaagatgcaggacaaaagtagttatctcttggcagcagacagtgaagtggaaatggaagaatggatcacaattctaaataagatcctccagctcaactttgaagctgcaatgcaagaaaagcgaaatggcgactctcacgaagatgatgaacaaagcaaattggaaggttctggttccggtttagatagctacctgccggaacttgccaagagtgcaagagaagcagaaatcaaactgaaaagtgaaagcagagtcaaacttttttatttggacccagatgcccagaagcttgacttctcatcagctgagccagaagtgaagtcatttgaagagaagtttggaaaaaggatccttgtcaagtgcaatgatttatctttcaatttgcaatgctgtgttgccgaaaatgaagaaggaccca

SEQ ID NO: 135935 - DNA, 770 bp, Homo Sapiens
  misc_feature (459)..(459): n is a, c, g, or t
  misc_feature (502)..(502): n is a, c, g, or t
  misc_feature (504)..(504): n is a, c, g, or t
  misc_feature (507)..(507): n is a, c, g, or t
  misc_feature (519)..(519): n is a, c, g, or t
  misc_feature (567)..(567): n is a, c, g, or t
  misc_feature (603)..(603): n is a, c, g, or t
  misc_feature (655)..(655): n is a, c, g, or t
  misc_feature (662)..(662): n is a, c, g, or t
  misc_feature (677)..(677): n is a, c, g, or t
  misc_feature (695)..(695): n is a, c, g, or t
  misc_feature (700)..(700): n is a, c, g, or t
  misc_feature (729)..(729): n is a, c, g, or t
  misc_feature (736)..(736): n is a, c, g, or t
  misc_feature (744)..(744): n is a, c, g, or t
ggttaattgggcagatggcattatcccctctcctcgtgtgttacaggtgaggaaagtgagatccagacagggcaaatgactgtccatccacaaagctagtcagaggcaaagctggccaggaacttaggtctgtcccaggccagggccatggaaggaatgatctaaaggagaggagtcattgggataaggccagcctctcatattcttcaacttttctcctctggtccctgttctttccctccattccctgaagtaggcaatgacactgtgctccccaacacctgacaccccgtgctgtggccagctcctatatcagctcaagtttcctgaggattgagttgctaacagggttgggatggtgggtacgtgagcccctgggaggatgaaaaggaagcaggagaaggaagcagatagtccctaatacacatagggatggggcaggaggtggagtcagagggngctcagctctgggcctgtagaaggcagactcttgggcgcctgngnggngcactctggaangagcatgcttttgaaagaggacagcaccatatgcaggcaggtgctgcngggcatctccacctcagacatagccagggcctcttnccctttaaaggccctccccatatgaagacattcactggggagacctcgctgngccctgnctgtggggagcccgnctattttgctgagaaggngatgncattaggcagaaattggcaccgaccgtgnctgaggngccagcgntgccacaagaccctgactgctgggag

SEQ ID NO: 135936 - DNA, 481 bp, Homo Sapiens
  misc_feature (445)..(445): n is a, c, g, or t
  misc_feature (457)..(457): n is a, c, g, or t
  misc_feature (465)..(465): n is a, c, g, or t
cccaagtcattcgccagccagaccctccattaaaccactcatcaatgaaaaccacatcttttaaggctatctctaagatggaatctgttattccagagcccctccaggctgctggcacattaacttatgaacataaaaccaaaggggcccaagtaagagagtctgacctattagaggacatcattagagtagacagtttctgtaaacttcacagacaattcctatatgaacaatgtggtactcagagtaagaagtaaattaccaataggaaaaagggtgggggcaggctgagaaataccaagcctggaggttactggtccccaagttcacaagctgttagctgactattcacaggctaagggcattttctgttcatatgcaggttttgatagagctaggggaagcgtgctaggcatctgatcaaccccagtgctgccagtcaacnccaggaaagacntatgacangtaattgcagggttcc

SEQ ID NO: 135937 - DNA, 1313 bp, Homo Sapiens
gcggtcgggcgggcgtcggcgagaaggtggggggacttggggcctcctctctgggctgggtggggctggcagacgcagctcctccgggggggtcacctccatgagtagggccccaggttcccagcctgtcagcctcagctcctcaggacccagtgcctctcctattccttccacctctgcaggagctggaggtgggagccgcgggatttctaacaagatagcttcttcttcctctgcgatcagcaggtccagttctcggcggctgacctctgggagctcccgttcaccctcaatctccagcatccgtatgggctctgcctccaggatcgtgatggcctcaggtggcagcacagtgaccggaatcctctctggctccctgggctctgtaggaacttcaggagggatctcttcaactctctctgggattgcagcctctaagaggtgtcgaatctgagggatatcgaaaggactaggaagtctgggatccacagacatcatcccaaaaaagggatctggagcatcttctagggtctccatcatggccaggtggttaggaagcagcaggctgggtagctcagtctccatatctattcggatctgcagctgggcacggtggaggcgctccaagatgtgctggatgtcctccacgaggtactggcattgttgagaatagacgcggatcacaccgatctgaagttgggctgagagatagagggagaagcggggccgcggcaggccgggctgcgggggttgcactcgtaccagcacgtaattgaggatttcctcgcaggttttcaccacattcaccctcaggtattcgcgcttcaccaaccggctgccgcgagtcgccgccagccagatggtggcaaagcagccggtgtggcgctgaagcacgttgggatagtagaacattgtccctctggtctttcaccctcgattccaccagatccccgttcggatctgagtcggaattctttagggcacagaattcccaacaccaggataactgagacgcaggagatgggcgcccctctctgtggaccctcagtggatccgcacgccacgtgatgcgtcaaacttgagacttctgggttgggttccaggttggagatgcagagctccaaggggacgtccgggccggaatccagagcaggtcccgagggagcacggtgtcctccacagcaggcctcggtcctcgagcgctgggagcgatgtcaggcccctgggccttgcactggcttgggcgcacgcggtgtggccccgggccgcctaccctcgtgccgaattcacaacccaggcctcgtacctagccg

SEQ ID NO: 135938 - DNA, 708 bp, Homo Sapiens
ctgggattgcagcctctaagaggtgtcgaatctgagggatatcgaaaggactaggaagtctgggatccacagacatcatcccaaaaaagggatctggagcatcttctagggtctccatcatggccaggtggttaggaagcagcaggctgggtagctcagtctccatatctattcgcatctgcagctggcacggtggaggcgctccaagatgtgctggatgtcctctgtgggcagggagtgcgaggtagacagccagcttagcaggcagcaggtcaggccgccccagcgtcgagggatggagaccaagagtctgaggtactggcattgttgagaatagacgcggatcgcaccgatctgaagttgggctgagagatagagggagaagcggggccgcggcaggccgggctgcgggggttgctctcgtaccagcacgtaattgaggatttcctcgcaggttttcaccacattcaccctcaggtattcgcgcttcaccaaccggctgccgcgagtcgccgccagccagatggtggcaaagcagccggtgtggcgctgaagcacgttgggatagtagaacattgtccctctggtctttcaccctcgattccaccagatccccgttcggatctgagtcggaattctttagggcacagagtcccaaccctcgtgccgaattcaacacccatgcctcgtacctagcctattggtttt

SEQ ID NO: 135939 - DNA, 1156 bp, Homo Sapiens
gagtctgttcttgtgcagctgtcttcgtcgttctgtcgctccgtccgatgtaccggcgtggtcgcgctcgtgtgctgcccgggtccgtcgtgcgggtattcttcggcctccggctccttgtcacttccgagggctcttccacgctctctgggatcccccttagagagggtccgattctggggttttgcaggactgaacttctgggttccccctgacctctccccgaaagggattctggaccatcttttagggtcctccattcatgcccaggtggttagaaaacaccagtctgggttagctcagtcccaaaatctattcggatctgcaactgggcacgtggaagcggctcccagatatgctggatgtcctccacgagggtactggcattgttgagaatagacggggatcacaccgatctgaagttgggctgagagatagagggagaagcggtgccgcggcaggccgggcttcgggggttgcactcgtaccagcacgtaattgaggatttcctcgcaggttttcaccacattcaccctcaggtattcgcgcttcaccaaccggctgccgcgagtcgccgccagccagatggtggcaaagcagccggtgtggcgctgaagcacgttgggatagtagaacattgtccctctggtctttcaccctcgattccaccagatccccgttcggatctgagtcggaattctttagggcacagaattcccaacaccttggagagaagtcaggatttggacttctctggtggcaaggtgggtgcacctagaaagccaagttaatgaggcaacgaacaatgggcagatacacaattaccaggataactgagacgcaggagatgggcgcccctctctgtggaccctcagtggatccgcacgccacgtgatgcgtcaaacttgagacttctgggttgggttccaggttggagatgcagagctccaaggggacgtccgggccggaatccagagcaggtcccgagggagcacggtgtcctccacagcaggcctcggtcctcgagcgctgggagcgatgtcaggcccctgggccttgcactggctttggcggccgcggtgtggccccgggccgcctactgcaggaatagcctcgtgccgaatttaacacccaggcctcgctaccttagccttaa

SEQ ID NO: 135940 - DNA, 524 bp, Homo Sapiens
cctatctcaagctttgaagctctgagtttgcagaccacaaagatttgatagtattttcagtgtttctccatgataaggtcacacacacacacctctatatccaacgcttgtatgtcccacatgtgtttccaaattcctcatcggccttagagacacaaagagtttctggcttccctgcacctcagcgccaagtttctgtaagccacttccatgtaaaactctccttccgcttttaaaaagaaaactacattcggaaagggaagatacccaagaagaaaatcgagacggtaagtgcagcacttttataaagtaaacaaacaaaaagactgccctgacgaaggtggctgcaaaactctggggccggcgcgcacaacccacatcgcacacccccccagcgccgtgtgacgcccccagccccgttagcagaacggactcggcaccccaacctttctcggagggaaaatgcacgagtcagggccgcgctccccgccgcgctggcacacagaatgtctccgggaatcgcc

SEQ ID NO: 135941 - DNA, 510 bp, Homo Sapiens
  misc_feature (277)..(442): n is a, c, g, or t
ttttttttgtaaatgacttattttcttttattgaactgcttttattgaaaacccatttattgaccgtatagctgtggatcaatttcaggtcttctaactcaggctgtttatccgtttgtcactcctgatgccttgtgtctaatagcttatagtaaaccttaaagtcagatagtacaagtccttgttcttttccacacattgcaataaattttgaaatagataataactcatgaaaccatcacacacatcaggatatgctgtcacttcatccctttcnnnnnnnnnnnnnnnnnnnnnnnnnnnnnnnnnnnnnnnnnnnnnnnnnnnnnnnnnnnnnnnnnnnnnnnnnnnnnnnnnnnnnnnnnnnnnnnnnnnnnnnnnnnnnnnnnnnnnnnnnnnnnnnnnnnnnnnnnnnnnnnnnnnnnnnnnnnnnnnnnnnnnnctcagggggttctgctttggcttcttcctcattttctcttgctgctgccttgtaagaagtgccttttg

SEQ ID NO: 135942 - DNA, 737 bp, Homo Sapiens
catagggttgtcagatttgaaaaaaataccaataggctttgaagaaaaagacttggagatgaagcagaatgctcttgccaaagcttccctcaattgacataagaggaacaaatttatttcccaaattagttatagtataatttaccaggtatccaaataaatttgtttagacactaagagttttcccctcgaataatgcctgaccataattttacatataattcctttattcaacaaatgctcaaagtatgtttgttttataccaaacacttttaaggaattaggaataccattgtgaataaaatagacaatctctactaaatgcttagttatgatggaaggcaaacaaatacataaaataagtaagaaatacagttttatgcctcatgatgtcagatgatagtaagtgctgtgtccccaaaacacttactcattttctcaaactattataaaacagggacggtgcataaagagtgctggacatgggactgaagattctgttttaaatatggttgccagggaagtcctcactgtgtaagagcattccatcgaggacttgaaggagatgagggaagtcatcaagaggatgggaaaaagaacactcccagtaataggaccagcaaatgcaaagaccagaggagaagagacatctgctttgtttaagggacagcaaataggtctccctgctacagcagagtaaatagagtggaaatggtagaagagtttttagttgtaag

SEQ ID NO: 135943 - DNA, 547 bp, Homo Sapiens
  misc_feature (354)..(450): n is a, c, g, or t
  misc_feature (501)..(501): n is a, c, g, or t
gtagcaattcgtttgctgtccttcctctccttcgaagatgacaaggcctaccatcgtttcttcctgcctttgggccgtcaggcagttggttgggacccgctccaaccctcggttcttcctgcaatacagtggatacaatttgtcatggctactctgagtgttataggttcaagttcacttattgcctatgctgtattccataatatacagaaatctccagagataagaccacttttttatctgagcttctgtgacctgctcctgggactttgctggctcacggagacacttctctatggagcttcagtagcaaataaggacatcatctcgctataacctacaagcagttggacnnnnnnnnnnnnnnnnnnnnnnnnnnnnnnnnnnnnnnnnnnnnnnnnnnnnnnnnnnnnnnnnnnnnnnnnnnnnnnnnnnnnnnnnnnnnnnnnngtgtgagccactgcacctggcctccttaaatgtatctttatggcctaattntcacctttgcacccagttggtgatagattatacttgtcgagtttgt

SEQ ID NO: 135944 - DNA, 808 bp, Homo Sapiens
  misc_feature (324)..(326): n is a, c, g, or t
  misc_feature (775)..(775): n is a, c, g, or t
gttcagtaattatcttttatttcattttctccccttcccacccctccccctgggatccagcagagggctgtggtggcggcggcgtccaagcgggcgcggacggcgtacacgagcgcgcagctggtggagctggagaaggagttccattttaaccgctacctgtgccggcctcgcgttgtagagatggccaacctgctgaacctcagcgagcggcagatcaagatctctcctctcaccacgcgcctcctcctcagggtagaatccaagaagcgcccaaattaacacaccttacatctttgtaggtaattccccccaaatcttgannntttttttcctcaattatcggtttcttccacgaaacctaaacttcacaatcctcttccggagccacaaagaaggtgtcacgtgacccgaagcccaaccaccattgggtctttttcaaagagtggaagcctctttcgactccctcttcctccaacgcggagatcctcactcatcttttccttcgaaggggatgaggaaaaggttcctctagcttttctggagaaacggaggcattggggagagagcatgtgaggcactggtgtaggaatgggggctcatggtgtcctggtcgtggtcctctggtgtttttgaatcaattaaaccaaataatgctctctgttttccaccaggcccagacgagcgattggcggaggccggtcccgtgaccacgaattcctgtaatttcgctggagtccccctccattcctgggatggggaagtagatacccancttagggttccaggcctggccgctcacgctggg

SEQ ID NO: 135945 - DNA, 661 bp, Homo Sapiens
  misc_feature (531)..(531): n is a, c, g, or t
  misc_feature (628)..(628): n is a, c, g, or t
gttgttattgttgtttataatagagctgttttaatttgtaagacattaatttgaaagccctttaagactgtttaaaagcttgactgaaaagccataagcagagagttttatttcaacaccagtagaaaagttagaaaattaggcagagaaatgaaatagagggatagagagagctaggaaggctctacacattaattctgtaattacaggggatttttagagagtctgaataatgatcaatcaagccttgagtctttcttaatgtaatttgcccatcagtttaaaaatgtgcatgagaacaggccataatacgtagtcagctagagtcccacaaacccttggcatgccttaatgtttgagaattccattctatttctcattaatctcttgaaagcaaagataattttataaatccttttggaccagtgttttagatggtagtggctgtggcagtgacttttaattagccatcctgaacccatcatttaaaatatttatttttgctttcagaaattttgaaataagtaaggnaaaaaaccaaattatttacagatacacataaccaacccaaaataaaagcaaaatactaaattaggcacacagaaagaactaaaagtaaattcactangaaagacactccctcaaagatagaatgtaaatt

SEQ ID NO: 135946 - DNA, 562 bp, Homo Sapiens
  misc_feature (11)..(11): n is a, c, g, or t
attcggcacgnggggagtggttggaggtgaggatgagtcaacaggttggggcccaaaggcacagcgatcctgttctcagattgtgcatgagcagccgagcctgctaaccgcagctccgcacttgtccatccccctgcggctacaccatgtccagctcctacgatgaggcctcactggcgccagaggagaccaccgacagcttctgggaggtggggaactacaagcggaccgtgaagcgcatcgatgacggccaccgtctatgcaacgacctgatgaactgcgtgcaggagcgcgccaagatcgagaaggcgtacgggcagcagctcaccgactgggccaagcgttggcgccagctcatcgagaaaggtgctcccccaggctcacatcgtgcgcgcccccaggccgtcacgagccccctaggtctgggtcctaggagccccggctacttgcatgcaccatgccctccatctaccagacacaggacattttcaggcgctgttccctcctagatcaaaccaggcctacctgttcatctctattttgtacaattttaggttgaatt

SEQ ID NO: 135947 - DNA, 434 bp, Homo Sapiens
tgcaggaaggaaagaactggatcaacttttatttggttgttaaagaggtaatacatgccttaattcattcaagagatacaaaggagtaccagtaaagagtgtccttcccacgccataccacacccttccacaaccttccacaaccttccggtgtccagtctcctccctgtaggtaaacactctccctagcttctcctaagtccttttagagaggacttgcatacacacacaaatgagagtcaaatttaaaatccgcttcctccctttccagtgattttggacaatattgaacgagggacccagcagccctgggttttcatctttgttcagtcactcactgtgcatcttcgagcccatcactcatcctctcttgagctttgcttttctcatctcggaggacgatgagaggatccacatggtgaacaacttgcggc

SEQ ID NO: 135948 - DNA, 546 bp, Homo Sapiens
ttgaatataaaagtgttttattacacaacataataaagagcaaattcatgatttcctgaagtcaattccctgaggtctcttcctccatagacattacttataggcataaacctttcattaaaaactgtgaaaagaattgttctttcacaaacaatatttttaaaatcataaatggaaatatttcctttacaacataaacaatcagaaacctaaagtaaaagtagcgtacagagccactaacgtgtggaccctgcaggagattcgctacagcagaaggcattcaggaagcatgctgaggaattccagtgtggaaacaataattcagcaaagcaaagaagaggatggagagaagttgatcaatgggtacaaacagacagaagaaatgagacctaggctttgatcaatctagtagagtgactatagttcacaaaaatctagttgatattttcaaatacccagataagaatcatttggctgcctccagaaaaagaaaagatacctgtttaaggcaataagtatcccaattatactgatttgatcctttac

SEQ ID NO: 135949 - DNA, 546 bp, Homo Sapiens
  misc_feature (413)..(483): n is a, c, g, or t
tcaaggtgaatggaaagtagattttattggattttaaaaacaacaatttacttcaaaatattacagtgatcgtgctgtgtaaacaagggtgtcccaagctgtttagcttctaatggctgtgtttctctcacatttttatttgatgactttccaaggacatcgttcttccaaggacatccattcttttattttgccaacagaagatggctgagctttttgcagtttatcagtttccagatggctttcacattcttgtggacactgtgcgcttcttgggaaagggccacagttttgtttttattttcctcagtgcctgaaactttgggagtgttgactgctgaagaggatttgtgctgctaaatgcctcttggctttagatttaagaccagaaaataagacagatgaggacagcnnnnnnnnnnnnnnnnnnnnnnnnnnnnnnnnnnnnnnnnnnnnnnnnnnnnnnnnnnnnnnnnnnnnnnncaccctgagtaagtgtgcctgcaccttatgcgtcagatgtcagtcattagataaaccttctcc

SEQ ID NO: 135950 - DNA, 709 bp, Homo Sapiens
tttttatttgatgactttccaaggacatcgttcttccaaggacatccattcttttattttgccaacagaagatggctgagctttttgcagtttatcagtttccagatggctttcacattcttgtggacactgtgcgcttcttgggaaagggccacagttttgtttttattttcctcagtgcctgaaactttgggagtgttgactgctgaagaggatttgtgctgctaaatgcctcttggctttagatttaagaccagaaaataagacagatgaggacagcttctctttactggtgtatgtccagtgcctagagtagtgtatggccccacagagacactcagtaaatattcgcaccctgagtaagtgtgcctgcaccttatgcgtcagatgtcagtcattagataaaccttctccaatgcctcctgttgagagggtgggaagaagcagggagatgctgttagaggtttgctcctctgttggtctgatgactagacaattctccaactcacaaaataaatccggagtcccacggctttggcccagcccccacatcctgtacagttccactgccattgcttgacctcagcattactgtaaatatctttggacggtcccaactgacactgttaaatttgtaagacacccgactccagagatgaaagcaatattgtgccaagatatacagcagagtgtcagcttatgtcagttc

SEQ ID NO: 135951 - DNA, 1045 bp, Homo Sapiens
  misc_feature (574)..(653): n is a, c, g, or t
  misc_feature (656)..(695): n is a, c, g, or t
aacttaaacaaccatttattaatttcatagaatttagtgggtcaagaatttggacaggcataacaggcatactggctctgcttgatggtgactggtgtctcggctggggacactcaatggctggaggtgactcaatggctttgtgctggaatcatctgaagacttgtcaattcacatgtctggagtctgggttgggatgagttcaagagtatgactgctgaccagttctcctgctgtgatctttccatctggcttgacttcctcagagcatggtggcctcagtgtaagtcagaattcttacctggcagttcctggcactaagagctggtgttctgaaggcttgactagagctggaagattttcttgtcagctggcccactcatatggatttctgcaagaggcctcagtcactgggtggctgttggcaggagtcctcagtgatcttccaccacgggtgtcttcatggggctgctactccatagcaagagatccaagaggaagggacaaggcagaagctacaatgtcttttatgaccttgccttggaaattacgtgctgttatatctgccatattnnnnnnnnnnnnnnnnnnnnnnnnnnnnnnnnnnnnnnnnnnnnnnnnnnnnnnnnnnnnnnnnnnnnnnnnnnnnnnnnaannnnnnnnnnnnnnnnnnnnnnnnnnnnnnnnnnnnnnnntcttacgagagctttcttgttgtatcatccctttctaattggaatatgatgcaaagatgaggatgatcatctattctgagagacggagcgaaagaaagttataatagatccaacacatacacctcattacactatgagtaaggaataatttcaggaaactccattttaggagtcagatattttagctgcacaaacctccttccctctccagggtgctgtgagctacttgtgttctctgatgagcctgcagtagaaaaaggatgacgacagagatgaggcgcggggaggcactgggagacgcaatcaatgtgagcaaagcaagcatcccactttgggccctcgtgcgaatt

SEQ ID NO: 135952 - DNA, 1058 bp, Homo Sapiens
tggagttgagatatttattaacagatgggggtgctgggaggctggtcgtacaacggcagtggaggcagggaggcgtgtggcttgggggaaggagagatctgaatctctctcatccatggagtgtcaccattttctgaggctgaaagttcttccactagcaccgatgggaaaactccaatacgcccattgaattccccttcccagaagccatcatcatcttggttttctttgttcaagatacggattattgctccctcaggaaaagataactcatcatctgtctggccctcataatcataaagtgctttcacaaaacatacactggcatctccgttgaggctgcctgaaacgagttctgcttccgtggaattgctggacgtgtgtgaccgactgtccaaagcggccagggactgcagcatgctcaggaggctgttcgaggtgggaaactgtaggtacttttctggcacataacccacttggccaactttatttcgagcctttacccagtcttccatatctccatcttcaatcacttctaacacctcatgttcctcaatggtcaactcatctggttgagaagccttgtaggaataaacaactttgcaggtgagtggataatttcttaaggtgccagaagggctggaactgctgtcatcgaaaacatccatgttatcttcaaactcttcgccttcttctctttcggtatctgcattaagcgagtgtaaagtgccattacttggtcactgcaggagggcgggcccatcgctcattttccagttcttccattacttggttcatggcactctttagccatgtgtccacagaaacaccaatctgctttagcaggtccaaccgggcttcagctttcaatttaattatctctgctttacgaatattttctctagcttcatctattttctgttctagctctgctcggctttgttctgatacagcagctccatgacactccagatcatttagaacccgttgttggtgaacaatgtttttatgctcacgtgccacacgtgtggcccattttcgagcttccttatttagac

SEQ ID NO: 135953 - DNA, 717 bp, Homo Sapiens
  misc_feature (449)..(458): n is a, c, g, or t
cctccctgcctccactgccgttgtacgaccagcctcccagcagcccctaccccagcccagataagaggagctccctgtactttccccggtctccttcagcaaacgaaaaaagccttcatgctgagtcaccaggattctcacaggcatcaaggcatactcctgagacctcatatggcaaactgcgacctgtccgggcagctccccctccacctacacagaatcaccgaaggccagcagagaagattgaagatgtggaaatcacactggtgtgatgatgggcttgcccatccattactgctacaatcaaggccaggcttggagtttggccagtcttgttttttaggcacctttgcatgatgatgactcttgaacagagcaaaaaacaaggaggattatgtgtgactgggtggcctggtagactcctcccacgttttgaatatttcgtgccnnnnnnnnnngttgtcattttctatgtcatttctcctaccatagcacaaatcctagcggaccctaggagcaaagaggggggcagccctcatgcctaacagtggtctgtttttatatgagactcaagaacaggcctcattccagggcacagtccctaaattactgatcatgtgcattcgtacagtatattactgtgaccacaaggatgtggcaaagattctcatctttcttcaagtggcttttgctcatctgattgagaattaatcagat

SEQ ID NO: 135954 - DNA, 414 bp, Homo Sapiens
atagtgaagactaggttgaaagcacgtgctcacaacatttctgagacccttagggtgcccatgtccttggacagatgagtgattaggttttggggatgcttcagatactgagtcaggaactgactgacaaactacgtaattgtttcctgctcaggtccgggcagctccccctccacctacacagaatcaccgaaggccagcagagaagattgaagatgtggaaatcacactggtgtgatgatgggcttgcccatccattactgctacaatcaaggccaggcttggagtttggccagtcttgttttttaggcacctttgcatgatgatgactcttgaacagagcaaaaaacaaggaggattatgtgtgactgggtggcctggtagactcctcccacgttttgaatatttcgtgcc

SEQ ID NO: 135955 - DNA, 1171 bp, Homo Sapiens
tgcttaataaatgtttatttaatgaacaaattatttaatgaactaatgaatgaatgatctattccaataaatatatgctcctagactgctactgacattttattccacttagggtctgccacattggctctccaacagccggtactataatccatgctaagtaataattacaaattaggagtaatatattggtagtgttggcagaaatccccaagtgattcattctgccagatatgttaaaattatagtttagtcattgaatactgaaggtgataagtacagtcatttttacaagttgttcctggatccatggaccgaagataggcatgtacacaaacggcactaaactatggaggcagtgaggtagcacagggttacgggggacactgtggagggacttctaaactcagtgtttgtgatcagggaaggctgattcctgatcagattcttaaggagtgagttattctgtgaggtgactggtggtggttgtatcaggcaagcagaggtaaaagtgtagacatctggaggaacagaaaaacagaatcaacagcttcatggattaatatccattcaaaaggaaactccagcctcttggcttcttcaccttttctgtttctcctttctttagtttaagaatactttcaagcaaaaagataaaaaacataagaaataccactttcaaatgaaaaggcttctcagtttcatgttaggtgagtttcaggcaattcaagaaaagattaggaaatggcatgctggcctctttctcatggctgtattccacagaatgaaagcaagcccagtatttctgagtaattaggtcagcctcactcccagaggattaattcaactcccaacagattatggtagccacctttcatttccacagacagactccatcagcacggtgatttcaattagagaagtgaagctcaattgacttatccttaacacagtaggtgagaaaaagggagcaggccagggtgggtcctggatttctggcttttcatacatttcaaatgtatgaaacaaatcagttttaagtggtgggtggaggaaaatgctgacccaaataactttggaaacaagtagatgattgaacattgcacttgggtgtgtttcaagagcaggagccggcaagagggagcctcagccaacaccctcgtgccgaatt

SEQ ID NO: 135956 - DNA, 897 bp, Homo Sapiens
caccaaactctggtgtagtccagggcagtggggcaggtaaattggcttccctggaaaatatgtccatctatgtgccttattcccagttcgtgcttttaagggatggagcacaccagccatgaactaaggctggagtagcaaaacatgaaatctgctttctacaaattatccagataatctcttccaatccccttctggaggaaaaacagagctgtatgagggtgacagtctggcaggtattcaaagctgcagtgaccatggcttggctcctgttgtatccacagagctgtttgattgggttaatttatacagtttttcctgtatgaatccttttgataagtatctttagaagcttctaattcattttaaaggaatgtttctctttggcttcatgtctcattcttttcacattatatattctggtgataaatgatggatccataaatacattacctttgctcagtcagtgttttctgttgttgatgtaaagtacacaaattggatttgtttcaggatagctgaatttggaatatgacattttgccaagtcagcatcacacttgcccatacaacacagatgtggattttgcagttgttttgtttttaaaattgtatatgtctgtggtgctattgattaatgtaatattgcattaatgtgctattacaacactctagggcattcatgaggtctttcagccagcagcaaagaattccccaaacaaaagcttttaataaaatacagattgcagggcaaagaaaagtatcaaccgtgagaatttatggatagcagaagtgcttgaggaatcaacttttgatggccttgccaatggaaataccgtgtaattgttatattatttcatttccctccaaatcattaaagatcatctatatatataaa

SEQ ID NO: 135957 - DNA, 628 bp, Homo Sapiens
tgtttgtggaaatgtaacttacatattttattacgctttctgtaaacctcaaaaataatcttgtcaaggaagcactcttatcagcaatccaaactatgggatgtaaaaaccgacactaacattattttttaatatgccaaggaggcaggttactcttgctgtggtttgaaaggtttgctgtcattgtaaacttgcacctcaataaaacatttaaaagtctcaagaatgattttagaaagttcagggaggaggatgaatcggtggcaggacccacagacacagcacacaacgggcccaggtcctggactggcctttctctgggagtgcctagtcccactgtgggtgtcaaagtggttcacatcgagctttcccacccaactgtcccctaggcccagctgtgaaggacctagttcaaggaattatagtgaaaaagaaacatgaattttgaggtcaggcaaatctgactttgaatcctggcttgtccattttctagctatgtggctttgggtcagtcttttagtctcagttttctcatctctaacatggggagaataattcttcacattcttcctgggaagcataaaatgagatagcaatttgcaatgcttagtgggtgctcagtaaatta

SEQ ID NO: 135958 - DNA, 1042 bp, Homo Sapiens
tttttgctaaggtaaacaagttttatttctttatagccaagcaggtaaaagtctcaggctgcaaaatcctctgtgcaaaaaacaaatataacattattctgtaactgaacttaatttcaatcatattcaactcaggctacctttggtcaattatttattaagtctgttccggagttttttttcccccaccattttctccctgagttgcctctaagttctggggccttaagtcatcatactttgatgtctatcaagagggggacctttgtcctcagaaattcttgtttatttatgatggctcctattggcttccgggcatagtgatctatccttgctggtatcctcaagatggccttgttctcctctggacttgtgtttccagttcatacaacttgcaagactgctagactgcttgaggtcactccagccttgtcttttgcatccctcttgaggtgagaggacagggaagcacaggaaatatttggatgcctttttgtgctgctctggagctctgggagacttgacggagctatgccatgcccattctgctctgacgtgctcagcaggccccacctttactttctctgcctgtgactggtggaggtatagagagagagcaaggggaggcttgttgctccttcggttccactaaggaaatgaggcacaagtctccctttgtttggatccccaccctacctggggaattcagcatttctttgggggtatgtcacaccttccacttagatcatcatgcatcatttttctaaatctattgctgcagcattaactttatgctcagagtctttcaggatttctacttttgtctttctgaaacctttctctcaaactcttctctgccatgagtttcaaggcatcacaatgtagtggttaggagcatggactctggcgtcccgtgtgctgggtttgaatgctggctccaccatgcactggttttagggtcctggacatgagtctgtgccttggtttcttcatcttgtctccctgcatttgttcttccttcctgaaagccctttgctcatac

SEQ ID NO: 135959 - DNA, 527 bp, Homo Sapiens
ttagtggtacaaatattagagatttattattacagaacaagatggaagttggcagttccagggtttgtcctgtcaattaaccaaggcatcccggagactggactcttcctgtacccactgccacgctcagtgtggcagtgccttctcccctcatcatggcagggaggccaccacagctccaacaaccaagtcttcacatggtcagcatcccaagcatgaaataaggggatgtggttagaaagggcttttctccttgtgtagccttccctttacaagcaagaaaatctctcctagaagtccctagtaggtttcctttcagctaaaacttgggtcacaggcccatccctgaacctggcacttccaacctgtaacaaatgaggcagaagtgggactagggctggctgctgggcagctgaccggtagtgcccaccacagtctgggagccaaagagttccaaaagttcctcactcaggccaggggtaattgagaaacaggcacataacagtattcatccaggagtcctcagg

SEQ ID NO: 135960 - DNA, 1142 bp, Homo Sapiens
ggaagttgatttttaatgataaagtacaatcgaagggagggcagaggggctaagaagacacaaagtccattccaaaaatgcaggaagatgtgtatacaatgctgggaatcccaggatcccccaaaagacaataaggagaaacacaaccaagcccgtaaggaaaggtttctttatcaacacactcatcaggaaagctaaagttatctgagaaaagagaaagacttcagctggtatataattctgtgagaacagtagcacaaaaaaggaattttatattataaaagtatattttatatttttccacccctagacactgtttcatgcaaatactaccaaagagaacaaaagaggtgagaccagaattagtgataaattattggcagtagagagagagaaagagaataaaagacttagatgaaattaaccaactcaccaaagacaggccatagaggagaaagagggtgaagaccatcacaaaaccagtcaggacgacaatttgtgcagattttacaataagagccattaaagtggccatgataaggatgaagccagcatacatcaaaccccaggaaagcctagcagagaaacaaagccgtcagttagaatgttgttacttcatcacttccttgattcatttattcagcaaatgatttgtgaagctcaccatttatcaagggtaaaggaaaagaaaatgcaatagctaacttatctcctaccctcaggatcacataatataaaagaaggtaggcaataaacaagtagagaggaaaattgataactaaattgcaaaataagtaaagctggatgatacaatggatgtcactgggagaggtttccagagagagcttttctgggaagacatctatgctgatttctcagctctggacaagtttttcagtaaggttattgtataaataatatggacaaaaaagtagataatggagcagggttcagcaaactttttttctaaatagccacattgtgaatattttcagctttgcaggctgtacagtttctgttgccattgtagcacaaacacagtcataaacaatatgttagtgatgtgtggctgtgtttcaataaaatgtatttatggacaacaaaatttgaatttcatatacattttcacctcgttccgaatt

SEQ ID NO: 135961 - DNA, 715 bp, Homo Sapiens
gtggtggaatcaaagcaaatccaaatcggtcttgccccagaaaattgacgaggaaacgtcctgcccatcagtcatgcagagactagttcttccgaaatagcttccccgttcctcactctaaagctcaccagacctttttagaagatttggctttccacaattctggaatctaagagagggcgacttgtgtcttaactggagtgggaaaaccaagcaatcactttctcgcttctctctgcccctcttcaagactgaaaagtctgatctaatttatggacactccaggataggtgaccacaatccattggaaagactggaacaactgtcacattctgagcaggggtgaccagtctggccagccccacacaccctgctgtgcctggcattgtgtctctcagacagggaggggcccatcttctctctgagggcaatgctttgaaccttcattctgtttcttcccaatccctgggagatcttgttcttgctttccctctagaatgtcccactgcttcatttctactggttgcttcccctccctcgtttggaaaactaggtgtcatgcttgttttccccagccacgctgccatctcccttcctcatctaagatgagtgtgtcttgcagcttcagccatcatcaccctctgtccctgcagtcgaacttccatcctgaccaccctattcagagtctctgggagtttccttccttgctaggaag

SEQ ID NO: 135962 - DNA, 355 bp, Homo Sapiens
tttttttaaggtaaagtgatttattcaaccggagcttcttaacccatgagataggacagataatccccaaattcaaatgttacaggattttcccaactgatgaaggaagctagtaacaaaacccagcctcatcattacaagctaggcttttcccaaatcatcagctgtctatgacatttacagatacagacaggcactgtccaatacagtatccatttagccatacaagcacctgaaacgtggatattccaaactgctatgtgttgtaaatgtaaaatacacaccaatttcagacctattatgaaaaaggagtataaaatatctcattgaggccgggcgtggtgactcacacctt

SEQ ID NO: 135963 - DNA, 746 bp, Homo Sapiens
tgctgacagagttcatggctctatagatgttggcatatttgtttctcatttgtcttgctttttaaaggaagtatcctttggcaaatgcaccatttctatcatgttcaaaattccaaaacacatggaatttggacaaacctgaataaaacagcttagaaggttatgccaggaccaggttttaggaggacatgcagtatgtgatcttctcagtaccttgttcatacactctgcctgcggaaaccctggacttcctggccaaggccactctgagcgtgcaggagccctaccagcaacgctggccacccatgcacacagggcacgagaatcaaaatggtgctcgtgaggacaagcggcgacaccttcaagacagccacagcttcaagatgctccttcagttctccgtctgttgcaggtgctggtggacctggccgtcctggggcaggtgtaggccttcacccgccacagcttcaagatgctccttcagttctccgtctgttgcaggtgctggtggacctggccgtcctggggcaggtgtaggccttcacccgccacccctagaaggctgagcccgttgcagcgcccctggccagagctaaggccctcagacgcagccagagaggaccaggaagtgtggcacctgcgcaggcgccggctgggacgctgtgtttcccggatgccggagggcgggcaccgcgtcccccggcaggctgacaggggttcagccctgtgttgcctccagccctgtg

SEQ ID NO: 135964 - DNA, 505 bp, Homo Sapiens
ctgcagttgcaaatggcatttcaaatcattgtagatggtataacagtttcttccatcctctgaactctgtgtttgttcttcagcatcttcaagacatccctacaaccagaggtcagttggtcatgtttgaatgcggaatccaggccacagccacagttcaagttcactggtacagagagaacgtgcagatagccaactcagatgacttttcggattctgcttaattctcatagttaatgtaaatttgacagcccggtagtcccagctgctgggagaggttgagctggggatcccttaagatcaggagtttgaggccagactgggaaatatagcgagactccatctctttcacggaggtggatgtggagactaacaaggcgataaatgttaaaggtattcgagagagagaagcccgtgataatgaatgactacgatttttaagcccacagccaggttattcccagaagttggccctccgcaccagaccccagcagcccgcagcccg

SEQ ID NO: 135965 - DNA, 676 bp, Homo Sapiens
  misc_feature (208)..(233): n is a, c, g, or t
  misc_feature (371)..(414): n is a, c, g, or t
gaaagaaaaaaatatattatcatttattatataacaatgtcaacattaacaccaagacagggacagactccaactacgcactagtaaaaacactcaatgaggcaagactttctagagcccaaaagaaggaatgggggaagagatctggggagtagcgtgaatgtggctggttgatgggtgtggtggtagtggggggtgggactcatcnnnnnnnnnnnnnnnnnnnnnnnnnngagacaaaacaagaaagtcacatttttaaaattgtggtttcaagctactgattagatcagcatccagcgaccttgagtgcagatgtgaacattgggtgaaatgaaaaatcttgtctgtggggttctcttggctactgnnnnnnnnnnnnnnnnnnnnnnnnnnnnnnnnnnnnnnnnnnnnaggaaatgtctgttgtgaagcaggcctcactttagctattgtcgctccactctggcaccatgccaactccgtgcacagagtggtactgatgaggggatagagtccttggcacgccatgagagtagaggaactcaggtggcttgagggtgccaggggactgcaggccagtctgaggcccacactgcctgaccacaggctggtgggccacggaggtctggtgctggaacattccctctcccagcctgtggggagccatggtagg

SEQ ID NO: 135966 - DNA, 685 bp, Homo Sapiens
ccccatcacccacaccatcatcctcatcttccttgaccttcttcttcttgaagagggagctgcgtttgttgtctgaggccagcttttccatttggtactcagacatcttctccctaagctccatctgcatctccttctccttccggccaagttcctttaggtccacattgtcagcaaagaggctgaagatgggcttgctggtccccctcactttgcttctgcaactttccgcgggtgagctcagtgtggtgttgcaggacagcacagactgcatgtcagagctgggtcttgcctggctctgaggcaacaggcagccacccaaggaggagctgctgtgtccactaagcatggagacttggtcatcccccaggcagctagccgctggtactgccttcatgcttgcaacagacggtgagcgggacaacagcagcatttcattttgcttctgagcaagggtctcactgactacattggcaatccagttctggatactggcaatggaaatggtgtctccaggccccactggcaggttaggcaggggtgtggtggggttggaggttgaacaccccgctatgttgcttgcagcctgagacaggtgggagcggtggctctgggtgctcagtactgacgtcgtgtccccatcagcgctgactgaggggtctgcagaccagaacgcagacagggg

SEQ ID NO: 135967 - DNA, 688 bp, Homo Sapiens
ttttaaatcaattatgatttattcacgtgatgtaatgcaaaggagccatttaaatcatattttggacaaatgtttatgcattagggaaaagttcacaatatgctttaagtgaggataaccaattttaaaagcaacaaacaaaatggcattctacatttctaaaatttagcaatattttatagctgtctttcacctatatgtttccattaaaagaactaaaagaaaccattgcaaaccagatgtcaaaagaaaggaaaaaaattacctttcccactgccttaacaaaccaatcattttcatgtttctgtgttcgtttctagttcaaaatgacagtcatgcagtgcttttcagtgctatattatgtgattttaatttttcatctttacacttttctacattccccatctgttctacaacacaattatactccccacatattcaccacgctgatattattaacattaccagtcagctgggacccacctccccttccacaggaaggtcatctccttcaccttatcctcactgaaggatttcctatttgttgtctaagtgtaatctccacctgacctgggaaatcccaaaaaagggtctcccattactacttgctggtgaaatcctaggcccatgcttcagtcttcccatagccatctgccttcacaagtgagctagcagatgacatagccct

SEQ ID NO: 135968 - DNA, 774 bp, Homo Sapiens
tttttagctttctctatccttttgcttttaatgtattttcttgtggataacacacgattgggctttgtttgtttttgaaatccattctgacaatctcttttttaattggtgtaatcagattattcacatttaaagtggttattgatacagttggattaatatctacaatgtctgtaactgttttgtatgtgtctcacttgactttcatatctaattttgaatttgtaatttcatattctttgccttaaagagaacgcttgcagatccctcaaaacctggagacaccccccaccttgcacacattataccggtatgtgatggtagaaaagctgcacatcagtcttggcaggcagggcaggagggatgcagggattcacagatgcgactgtgcaacgcacagatgcactgggtctttgcttggtgggttcgaagcctccagacgctgacaaacactgcagccaatgagtgggttcctatggtccgatatggagggcaaggggcgggactccctcctgcctctccctggctgggttcagagcctccgcggagagactgcgttgggcccagagtgggcgtggcttacgtgtccgccggctttcctggcaggcctggcgggggggccaggttgccatgacgaccgcggctaggtcgcggcagactcggttggtgactccgggcgcgtcgaagatcttgtacctgtcgttcgcagtggctcactttcccagtaatccataagaacagcagggataacagggtcccatgtcgtttttttgc

SEQ ID NO: 135969 - DNA, 630 bp, Homo Sapiens
  misc_feature (16)..(16): n is a, c, g, or t
ttgcgctagacagctncaaggtcactaggcaactggaatttttttagctctattataatcttatggaaccactgctgaatacatgatccatcgttggctcaaacactgttatgcagtgaatgactgtacttaattttataatcagtatgatcacaattatgcaaatatttgttacatatgcataaaaagactagaaatatgaaaatgtttatctttggctcatgtatttataaatcattttttatacattgatatattttccaagccttctaagaatggaatctttgtacagattaaaaagttacaataagtgttattgttgtttttaaatttctacccaatgttgcttcctgcagaaattattctgtgaccactccaagaggacttggaagcccctcctcagtgttctcctagtatccaatagtatcctctaccattcactaagcacactggattttaattgtttgcttatctaacgcccaatacttggaactcttcagagaaagagactgattctctaatccctgaattcccaggcctaccacatacactaaagcactcctaaggtctgtggaccagatgaagaaatcagatgagtaggggtacgcaaacccaggcattccctcgtgc

SEQ ID NO: 135970 - DNA, 223 bp, Homo Sapiens
tcttaatttagtaaagctaatctgtaaaactgttcaaatatttgaacaatatttgataatgcttacataatctttcaagataatatcaggaaacagagttctttcatgtatgtaagtagttaataggacataacatcagatgtctagatgaattatagctatggcttaattacacaataatctgccttcttagtagaaattgcttatttccagcatttgctgt

SEQ ID NO: 135971 - DNA, 697 bp, Homo Sapiens
  misc_feature (94)..(94): n is a, c, g, or t
  misc_feature (330)..(348): n is a, c, g, or t
  misc_feature (657)..(657): n is a, c, g, or t
cctcattaaatatgaacctaaggcatacccatcatttaccttgattcccatataatttgtgtaagtcatatataagtccattgacaaaataaanaaataaataattggattccttgtatcaacagaaagccttgtgcttaaaacctgttattcttctttgagccagactattcagtaacatttacaaaatggtatcagctcaacattaaatctaaggttacttctcacatacatcataaagtcagccatcatctttcatttaggatttcttggggttttctttttgcatatatagattatgtattacttaaatccaaaatacatgtgtgnnnnnnnnnnnnnnnnnnngtaacttaatataaatgtttgatgagttatctcaattgactataatcttctaagtcaaaaagaaaacatttaagtacataatataaaaagaactgaacattaacagtaatgggaaattcataatggctaaatatgaaataagctttgtctttgcagttacaaactaattcttgtacattttccttttcactaaaaaaataactaattgatagtttccattcacatgaacaagttataatcaggtttgggatagtatgcccaaaacctatgtttctttactttatattcttaaaatctgagacatgattnttctggaacaaattaagatttcatgtacaatagagtccct

SEQ ID NO: 135972 - DNA, 822 bp, Homo Sapiens
atttttagatgagcacccttgctggaagtgacctgcaggagagcatacttggcaaggatgagaatacctgtgtgataaacacagcatctgcacatatttcctgcttgatttcctatccacttgatccccttcctgcttggctaaactgtctgttgtgaaaacatggggctcctctagttgagaaaaactgtagagtagagggcacactggacagggatgtgggaactgagaattaaagatgccattcactggacagggatgtgggaactcaatgttaaagatatcactccccccacatcccaggtgatttatatattgttggggtgggaaaagagaaatccaaaagagcaaacccattcataaaatggatctgctaattttattgttgaataacagaaataaaaatactatgtagcatttgggtagctagcacatggctataaaactagtggatttttagctctatttatatggaactgaagctacagttgtgtggaactaagcttccccctctggttgggtaaatggcagataccctagtttttcatccaatagttacattgagcttactctgatgtcttgttttgcataattcttttatcaggcttactctgatggtctgttctttatatattttttaatctgtgcatcctatggttgccctgacagtgtatctaatacgtgtgattagtcatattcttcactcctcaacaaaattacatcagtttttcacagtagtcaatgaaccttatatcaacacctcaacaaccttttttataaaaatcttataatttggttctaaaatgatatacagaaatgccc

SEQ ID NO: 135973 - DNA, 258 bp, Homo Sapiens
gctgtggtattttgtcttatgcaaatagtattgtgaagtattaatgaagtaagacaattttattcaaggaccaatcccatgcaaatacattcagagctgttcttagttaattgcatttataatttatactttttattaccatgtgcatttctctaaatttagtgaaattttactattttatatttttactcagtgtatatactgttgctcatgaattgttggagtataatagttaactatccttaactaagtcttatt

SEQ ID NO: 135974 - DNA, 713 bp, Homo Sapiens
agtgttatgtgagaccttaatggtttctttggtgtgaataccagattgaagataaatgttatccttttagccataatatcataagatttttcaatcatatataaagctacacaggattccaacttagacttcatagcttcagattcaaattgaatttcatactcgaattcatgtattttaggaatttcattgggatcctcacaccaattatgtgaatttctttttggaatcactaaaacttctgtcagatctggagtaagactaaatccgaaaaaaccagcattcagtatgatttctaccttctcttctgcccgcttcctggactgacattgtatgacaactgggggagatttaggaggtggtgcttgtgggagtccaacaatagggtatatccagtgtattgcttggatttcttcgctgtcgattcccacaatacttttaaattttatatccaactcatcaaaattgtcaataggccaatattttccatttgctttcgtcatctcaataataaccattgttttgtgtaatttcataatttgaggtataaataacaatgagatatctatatttcctttaggaggcagtgcaattccttgtatttcactcggagaactaaatctgaaggcagaactctcatagatgaagctatcccagcaatgatccatgacaagattcctgggatgttccacacttgtcagtattatatcaat

SEQ ID NO: 135975 - DNA, 494 bp, Homo Sapiens
  misc_feature (203)..(203): n is a, c, g, or t
gaggtttgatttttttaaataaaaaatgataaacggtcttgccatccagatcaatctctctttccccttacatatacacacacatacacactgaaaaacacccaaaccctgcatgcaccagaaacagtaaaatgaccaaaatattataaaattaaccaataaagtgcatgttccttacatattacacctgggttttctagggnactcttggtcctccatcgcgtgcatgcctgagtctgttctgaggaaaggctgaagcagtttgagatgaggggattcacaggaggcaggctccctctctggtaagcagtctttacagaggtccaagtaacctaatttggcgagagaagctgagcgcctcatttgggatggtttggtgagccctgcctggaaaaccactcgagactcgatttctttagcacgctccttcaccacaccggggctgtggctgagactctttatgttttcactactagagctatgtgggagtcgac

SEQ ID NO: 135976 - DNA, 619 bp, Homo Sapiens
  misc_feature (21)..(21): n is a, c, g, or t
  misc_feature (31)..(31): n is a, c, g, or t
  misc_feature (36)..(36): n is a, c, g, or t
ggggacaggcggcttcagccncagcaatacntttcncgagttcttcaatcgcctgattcctgctagcgttattctcgtcctgctgtttaagttcagcaaatgcaggtgtgattatcatagacaaacaactcagggtttgcacaagatcttgctctgccccattctgtactttctttggatcaggcttctttcgtacggtggtaaagctccattcaggatgagtattgttttccctgctggtagattccgaatcagagccctcggaatcagattcatcatcactgtgtccttctgccttccatctcttaaaacgatctatcagttcagtcagataagaagtcttctttgaattttttacaatgaatttgtgtttcagaagttcttttgctgtaggacgaaatgatggatctttgttcaggcaagcatcaataaactccttaaaagacttagtaaagtctccaacaagagttggaggattgtttttgggaataagaaacagaactctcattggatgcatatcggagttaggtggctctcccttggctagttcaatagcagtaattcccaatgaccaaatgtcagcttttgagtcataagctgactgttgaataacttcagg

SEQ ID NO: 135977 - DNA, 518 bp, Homo Sapiens
ataatcacatccttgattttatttatgtcacaaaagaccaacttgaatacaacctaaataaactgtctggtagataagttaacaacataacgtcaatttgaggcaacagacttacataggcataatagaaaacacactgttattttacagggagaatcgtacagtgtccgttcattcaacaagttagttaaacacaactcaactaaaacaatgtcattgaaaagtagcaaattctgtttttgctccatggacttacagccaatgagtcctgagaaagaagagagaatttaaagagcttcattggcaggtgaatctgtacttgggccttttagcttagagactgaagctccatattcaaagcagaagaatagtgagacatcccatatgaagaaagaaatcagaacagacatgcaggggcaaaagtagccatggtctgcgtcctggctcaggaggacagtatgtgttgaagagcaaagcctagaatgggctgatgcctgtaacctcaccccatctcattg

SEQ ID NO: 135978 - DNA, 647 bp, Homo Sapiens
gcaattttttcttgattagcccttgtttgtatacaagtcactgttcaatgttagacaccaaggaactatttaaaacaaacaagagaccttaggccagttttaccactaaccagcaaatcttctgctatcttttggttgaatttccttgattataaaatgagaaaaatcgggctatatgacctggatggttcttaaaactctagtattctattaaatataactaattaccatcaaattgcattgtatttgttcccggtttggaattgaaacgtactaattgctctctactcagtttctcactgagctaactttaaatgttcctttgaagcattgtactatgataattttgttcttcctgttgctagtggcagttgtgccaggaaaatttgactctgtctcaagaattaacccattgtaaacgctgtgtggttcctttcctctcactctcttaatatcagctaggctttatcatactttatttggaaagcttgagaaagcagccatttccctgtagagctacagcttaatttgacaatttgtaaaccatttgttctttctactttttgtaaggttatttccttgggaaactatttgacataaaataactattttgctgaattttgtaaaataaattatttgccaaaaca

SEQ ID NO: 135979 - DNA, 576 bp, Homo Sapiens
tctaagtttatctgttggggggtggtgtatgaattagtgtatctgtaattgtatgaatacggagtattcttatctttgtatgtgatggtgtgcttctattttaaatttatttttaactatagataggcttgctaggttggtcattccacagcttggtcttctttccgtttttgaagtaaaggtaactcactaatggtcctcagtaaacagagtgatggggcaagctgacttatatttcaattgttctgagaattgaacaactctactaatgtttcctttccaacttcaaacatacctgttcagtttcttcaacatcctgaataggagctgatctcctcagaactctcccctctcatcagacagaggacttgggcatgctctaatctcttactgctaataaattcattctttttagttttaaagccctttaaagtaatctttctgtaattagattgttgagtagattgtctttagtaatatggtggtcttaaattttgtgtggattttcagattgttaaatggttgcagaggctttcattcatgaagttcaagtttactatatcatggtatgtcagg

SEQ ID NO: 135980 - DNA, 327 bp, Homo Sapiens
ggagactggactttcatgtttgccagatagtcctggaaacaggttcccctaaccagcactccaaaaacctcctatcccccaacctcaaatcattttggattgagaataatttctcatatctttaaaagcttctagaaaagaagactattagtggaatgaataagtgtttatgccctaaaagaattagtaaactatcctgaatatgtctgtccagtaaaccagagctgaatgagaaaatgctaaaacattcttgcaacaagtcccctaagtttcttctctgcctgaacagcatagttcatcagcctaataaacagagtcaatctcaaa

SEQ ID NO: 135981 - DNA, 536 bp, Homo Sapiens
  misc_feature (222)..(283): n is a, c, g, or t
attgtaccacaattctttctttaatgctctttttaaaaaaatgttgatccaggtttcagttacatatcttttgtttccctaaagaatttcatttaaaatttcttgcaagacaggtctcctggcaacaagtttcttgaatttttatttttctgaggaaggccttaattctccttcacttttgaagggtgttttcagtgggtacagaaacttaggttggtgggnnnnnnnnnnnnnnnnnnnnnnnnnnnnnnnnnnnnnnnnnnnnnnnnnnnnnnnnnnnnnnaatgttgaatgcagttcttatctttgtgtctctgtaggtaaggtgttttctgccccacctctggtttctttcagagttttcctttatcttttatttcatatagtttgaaaattatatgtccaagtgtaggttgttggcatttattctgcctggtgttctcggagcttcctggatctttggtttggtgtctgacattaatactggaagttctcagacatggttgttgcagaactttcttctatttcttctcctc

SEQ ID NO: 135982 - DNA, 261 bp, Homo Sapiens
tttttaacatttatgtgtttattatgtacaatatgatgttttgaaatataaatacaaatacataaaatacactgtgggatggttaaatctagctaactaacaaatgcattaactaatatagttatcatttttgtggtaagaacacttaacatccactttctttacattgcgtttaaacccacagggacggcctagctggaaggacttagcaggctgaggtaatcctgtgcagttccacttttaaaaatggttgtaactcga

SEQ ID NO: 135983 - DNA, 520 bp, Homo Sapiens
ttttataattaaaagtaattctattttattgatgcaggaattagtataatcactgaaatacatccagagggtgcagcctttataggaaaagaggaagtcagcattaatttgttcaaaatgctaacacttaactgcaagcacaaagttaaacaacaggacgtctatagagtgtgcattaaaggtgaagtcaagagggaaaatgatgcagagaaataacagttttcttgtagaattaaacataccttgttagagcagggaaaatacccttgaatgcttgcttgccagcccccccttttcttgctggtaccaggtggagctacccaacaggtgttgagttgtggggatcagtttgttcttaaccctcaactatgtggtcactgctctgggtgaattacctgggacccttttttctccttcaaaacccagtttctgtcatccccaggagagggacagcagagaaaatgaaattcaattttccacttgctagaattcttaagagaagcgggtttgtgggaagtgg

SEQ ID NO: 135984 - DNA, 208 bp, Homo Sapiens
aacctgtttgtgctttttgttggtgatttcactgtttaaatggcccccaagtgtagtactgaagtgctttctagtgttcttaaatggaagaaggctgtgatgtatcttattgagaaaacatatgtgttagataaactttgttcaatcatgagttatagtgctgttgccatgagtatattaaataaaatatcattaagcagaaaccctt

SEQ ID NO: 135985 - DNA, 575 bp, Homo Sapiens
  misc_feature (565)..(565): n is a, c, g, or t
ttggtgatagttctattacataatctttaatagtgatttagtacctataagacttttatcaagtgtatatctaatgttataaaacaatgtcatagaacagtaccatctctctcagctaatttttgcttgtacaggttgcaaactgggagaagcttctgatttcattgtccgtcaagggacactaatccaggtgccatcatctgcaggggaagttggttgttataaaatctgttcatgtggacaaagtggactcttagaaaactgtatggaaatgcactgtatagacctccagaagtcttgtattgttggaggaaaaagaaaaagtgagtcttaagctctgattttgtttttaatatgagattagttatttttactttgtaggaagaatactggatagattctgaccacagagtaaggtctgcatatcagatactccaggggcagtattttccaactatacagagcactaggacttctaaggaagtctttagaagtcccctcaataaggggctaatggctaataataattaatatttattgaattctaatcatgtgctaaacacanagctaagtct

SEQ ID NO: 135986 - DNA, 477 bp, Homo Sapiens
  misc_feature (197)..(216): n is a, c, g, or t
  misc_feature (239)..(341): n is a, c, g, or t
  misc_feature (365)..(427): n is a, c, g, or t
  misc_feature (441)..(441): n is a, c, g, or t
tgctggacttacagttttattatagcaaaaaagatacatgttggaagcagcaaaagggagagatatatagggtgaaatctgggtggcttccctctttcttcccttttgtaaggacttgtgattactttaggctcattggataatctaggataatctccttaagagctttcatttaatcatatctataaattgcttgnnnnnnnnnnnnnnnnnnnngtagacggagcatcgctccgtcnnnnnnnnnnnnnnnnnnnnnnnnnnnnnnnnnnnnnnnnnnnnnnnnnnnnnnnnnnnnnnnnnnnnnnnnnnnnnnnnnnnnnnnnnnnnnnnnnnnnnnnctgccaccatgccaggctaattgnnnnnnnnnnnnnnnnnnnnnnnnnnnnnnnnnnnnnnnnnnnnnnnnnnnnnnnnnnnnnnnaaaaataccaaaantgggctgagtgtagtggcatgcgccagtaaatcccc

SEQ ID NO: 135987 - DNA, 501 bp, Homo Sapiens
  misc_feature (237)..(237): n is a, c, g, or t
  misc_feature (486)..(486): n is a, c, g, or t
ggagttagatcttagcgtttttttattctaacctattgagactgttgcttaggtattttcaggctttctttttgcctgatctatacttactgctatacattgtcctctattataggtttaggcagagtaaattttgtgaatggtatgcagtaaatttgttttttctttgttttacccatttggataactgagccagaggctttactgaaaaggtgagtttcctcccattgttctagnaatggccaactttgtcataattcaaagtgtctacaggtaattatcagttttcagattctcttttaccattgatctacatgattactcgtgtaacaccacattgccttaattaccactgttttataagaagtctaataagttatccaaatttgttcttcaaaagtgtcttagctactcttggccttggggcatttctgtatatccttttagaacccaattataagattttataaaaagggtggttgaggnggtggatataagggg

SEQ ID NO: 135988 - DNA, 511 bp, Homo Sapiens
  misc_feature (225)..(287): n is a, c, g, or t
caaataatttatagaaaatattttaattgtaaattgcagtatgataacatacaatgtctgtattattaacaaataagtacacaactaaataaaaatgttacacttttaatgtagctataatttccacaagaatttgaactaatgacataatacctatgacacatctcactaacagattgaacaataaaagaattaaattattgtcaaaataatgagattcaagtnnnnnnnnnnnnnnnnnnnnnnnnnnnnnnnnnnnnnnnnnnnnnnnnnnnnnnnnnnnnnnntttattttttgagcgacataagaattgaacatatttgggagatacataataatgtttcaatacatataatttatagtggtcagatcagagaaattagagtatccatggtttcaaatatttatcatttctttttgttggggacaaaatctccttttagctatttgaaactaaatggaatataatgttcttaactatagtcgtcctacagtggtatagaacaccag

SEQ ID NO: 135989 - DNA, 518 bp, Homo Sapiens
ttttatttttgaaaaaaattttattgattcttcaccaaaggagcacccttgatggtggaagacacccctgttcttatgagtttagtattttcacggacaaaattatgtggacggactggcatgttgtcatgtgtcttgtgagtagcatcaattttggcttttgcattttttggtggcacggtagttggagttaatccattgatctcatacttccagtacatttcttctgtctgtattactaatgttgctttatatttcctacagtacattttaggtttaaatcctacagtgatgagagttccgtttgtgttaaaaggaagaagttctccagccctgaggttttaccaaaaaactccagatcgctggccaggtaaggaagtgtgcggtgaacggctcaggatttcttgtctgacttttcagcctaagttcaaaaacagattccttaaataaaccaactccttcaatgtcaatgacagcatccgtatcaggttcagtagcgatcaacattatgggaaact

SEQ ID NO: 135990 - DNA, 1738 bp, Homo Sapiens
gacgggggctgtagctggtgagaggaagtcctagaggctatggacactctgctgctgggatcaccgagatgagcagcagctgctcaggtctgagcagggtcctggtggccgtggctacagccctggtgtctgcctcctccccctgcccccaggcctggggccccccaggggtccagtatgggcagccaggcaggtccgtgaagctgtgttgtcctggagtgactgccggggacccagtgtcctggtttcgggatggggagccaaagctgctccagggacctgactctgggctagggcatgaactggtcctggcccaggcagacagcactgatgagggcacctacatctgccagaccctggatggtgcacttgggggcacagtgaccctgcagctgggctaccctccagcccgccctgttgtctcctgccaagcagccgactatgagaacttctcttgcacttggagtcccagccagatcagcggtttacccacccgctacctcacctcctacaggaagaagacagtcctaggagctgatagccagaggaggagtccatccacagggccctggccatgcccacaggatcccctaggggctgcccgctgtgttgtccacggggctgagttctggagccagtaccggattaatgtgactgaggtgaacccactgggtgccagcacacgcctgctggatgtgagcttgcagagcatcttgcgccctgaaccaacccagggcctgcgggtagagtcagtaccaggttacccccgaagcctgcgagccagctggacataccctgcctcctggccgtgccagccccacttcctgctcaagttccgtttgcagtaccgtccggcgcagcatccagcctggtccacggtggagccagctggactggaggaggtgatcacagatgctgtggctgggctgccccatgctgtacgagtcagtgcccgggactttctagatgctggcacctggagcacctggaggccggaggcttggggaactccgagcactgggaccataccaaaggagataccagcatggggccagctacacacgcagccagaggtggagcctcaggtggacagccctgctcctccaaggccctccctccaaccacaccctcggctacttgatcacagggactctgtggagcaggtagctgtgctggcgtctttgggaatcctttctttcctgggactggtggctggggccctggcactggggctctggctgaggctgagacggggtgggaaggatggatcccctaagcctgggttcttggcctcagtgattccagtggacaggcgtccaggagctccaaacctgtagaggacccaggagggcttcggcagattccacctataattctgtcttgctggtgtggatagaaaccaggcaggacagtagatccctatggttggatctcagctggaagttctgtttggagcccatttctgtgagaccctgtatttcaaatttgcagctgaaaggtgcttgtacctctgatttcaccccagagttggagttctgctcaaggaacgtgtgtaatgtgtacatctgtgtccatgtgtgaccatgtgtctgtgaggcagggaacatgtattctctgcatgcatgtatgtaggtgcctggggagtgtgtgtgggtccttggctcttggcctttccccttgcaggggttgtgcaggtgtgaataaagagaataaggaagttcttggagattatactcag

SEQ ID NO: 135991 - DNA, 589 bp, Homo Sapiens
caggaccagttcatgccctagcccagagtcaggtccctgggagcagctttggctccccatcccgaaaccaggacactgggtccccggcagtcactccaggacaacacagcttcacggacctgcctggctgcccatactggacccctgtggagggcacttctgaggtaaggctcttcctttacccccctccccactttgtgagaatgacagataagaagcagactgttaaaacctgggtggtggggggctcactggatcaaagcatcatgttataatctggagacagaggtcagagaacagggtagagagaggacccaggttggatgacaggagcaggggtggtgtcacaagttaggcatgggaaggggccacagtgagggtggcaagtcacaagtcagagttgggaggttgtagagcagggttcttctcacctggggggccccaggcctgggggcagggggaggaggcagacaccagggctgtagccacggccaccaggaccctgctcagccctgagcagctgctgctcatctcggtgatcccagcagcagagtgtccatagcctctaggacttcctctcaccagctac

SEQ ID NO: 135992 - DNA, 519 bp, Homo Sapiens
  misc_feature (135)..(154): n is a, c, g, or t
  misc_feature (156)..(221): n is a, c, g, or t
tttttgaaggtattcccctccaacccagagataacacctatcgtttattaagccctcactattgttaaacttagttttaaagggcacgatctcatttcttaaagacttctattccgcagaatttctttccaggcnnnnnnnnnnnnnnnnnnnngnnnnnnnnnnnnnnnnnnnnnnnnnnnnnnnnnnnnnnnnnnnnnnnnnnnnnnnnnnnnnnnnnntgtccagtcttttcgaacccaaggcccaactgcgctctatctcgactttcggctccactcggatcccgaagtggcgcacgagataaaatgttgtcaggctgaggtaattctctgttagtcccggtaaaaattcgtcagtctggaaagctctcggtttggaattaaattctgtcactccggatggaaataagtccgcttaaggggggaaaatccgtttgtggaggacacgctcccgcacgtaaccccccgcggaaaatgaccccaagtacctttggccagggattgccgctgccacgcc

SEQ ID NO: 135993 - DNA, 709 bp, Homo Sapiens
atacttcagcttatttaatgttcacagtccacacttaattgatgagaaaagtagctcagggaggtgacatcattgagctaaggtaacagtgataggtggtagagccaggtgccaactcaggttggtttgataaccaagtttcctaaactcagtcatggagagatgatacagtaggatcacttccagacaagacctctagaaactagctggaagaaaacaagggaccactacacagcatgactggtgatggtatgttgtaatttcaaccctggcccaagatttaaatgattcttcctggagcaattcagagactgctgggaccttagatgttgtctcctacaggttcaaaactgctataaattagtttataaataggacatgatgtgattcctggtccaaactggggcaatctgaggctcagagcgggcactattaatagtgccagaacaagagtcgtaaatggggactgtcttggacagaaaaggacatacagtcaccctatttataaataattgtcaaatgtttcctaataggttggggaatctgaggtcgaagacatacagtctctctccatgtcaagttggaaacaggtcccacagctctcagaggcacctgagtttaggccacaggaaatatgatcagactctgtactctggcagtttcacctgatattgagaatgggacccaaggtctgtgatactgagggttc

SEQ ID NO: 135994 - DNA, 508 bp, Homo Sapiens
  misc_feature (371)..(371): n is a, c, g, or t
  misc_feature (443)..(464): n is a, c, g, or t
tcatttgtggtcctgttttaatttcaaaaataattttcttgggaaaaaaactatatgataaatttgcagagccggccattatcatgtcttactgtaacgatacactctggaacaccggaagaccctcttttaaagcaaagcggaacctgcctccttcaggaactctaaagggctgcggctggatgaaggctgagagccctctgacttctggctgacctttagcccattcgatgcctcaggtctggaaaccaaaccatcatcacaaaggcaggggaacatctccaatccccagcttttatctccacccctccgaatctgcttccttccctcaattaagaaaccatggccttttctcagaagggcaaaatgangaagcaggtgggcagcttgactgaaaaacagcaatttggcctttggataaaggtggttctctgaaaatgacnnnnnnnnnnnnnnnnnnnnnnaaataaaaaatgataaacggtcttgccatccagatcaatctctc

SEQ ID NO: 135995 - DNA, 437 bp, Homo Sapiens
  misc_feature (24)..(24): n is a, c, g, or t
aaaggcggtcctgaattttaacancccccctgtggtccatgtaaccctggcgcgcgcggactgcggctcggcgtgcgcgtgttcccggccgtctcgcctcggcgagctccctcatgttgtgtcctgcggcgccccttcgacgacaggctgtgcgcggtctgcacggcgtccgcggcggagcttcatgtgggctgcgacccgcgcagccggcgcctcgctgagggaacggacccccggtaaccggagaccgcctcccccccacccctggcgccaaaggatatcgtatgttcaggtccaaacgctcggggctggtgcggcgactttggcgaagtcgtgtggtccccgaccgggaggaaggcggcagcggcggcggcggtggcggcgacgaggatgggagcttgggcagccgagctgagccgggcccgcgggcaagagag

SEQ ID NO: 135996 - DNA, 556 bp, Homo Sapiens
  misc_feature (110)..(164): n is a, c, g, or t
caacaagcacaagccaccacacctggctaatttttaaaatattttgtagcgatgggggcctccctgtgtttcccaggctgatctcgacctccgaggctcaatcgataccnnnnnnnnnnnnnnnnnnnnnnnnnnnnnnnnnnnnnnnnnnnnnnnnnnnnnnntgggctttttggaatgagtcttcctggtcccgacagttctcctgcatgtccttgtggtggccagtctctgttctttgatgacgaatttgctttctgagtagagtctggtcacctggagctggtttggtggaataaaggacaatggggttctaggatgtagctgggagatacaagctgtgagtactctaataatgagataagttttcttatgcaggcccagtttggtctgaagtccttctcaaagagcgatcctaaactacaccaatgacgtgagcatcaggagatgcgctgcacagctcccagggtgagtatgtgagggctggatcgttggaacctagaactggctgtcatgaacctggctacctacccgttgggcccatgggtcaagcatt

SEQ ID NO: 135997 - DNA, 571 bp, Homo Sapiens
  misc_feature (498)..(498): n is a, c, g, or t
tttttgtcttctgtccatggtgctgaagtttattcactttcagtaacaggtgaggttctaccttaaaatttaatgcatggggtgggagaggcgaggaagtcaccatcaaaccactttatctacagttagcataagatgtgagaagtgttgacaggaagctgcagcttagatgggatgatcacaactccatggcaacaagatgacacgaatgcagcagagaacccaggggacaggagcctcttgcagtctgtccctaggcccagccctgcttgtcctccctggctgttatcttcggtaccggaagctgttacagcccagtccgctctgggctccaatcctgtccatcctgcccccgaagcagctggatctccgcaggctccgaggggcagtgagcagcgccctcagcttgctttttaggagggcagatcgatcagaggagtcccaggggccccgcccgagggcacctccatctctcttggcttggctgacttcctccgnccagcgagggacctccaccatagggagggggtacaacaccccctcttcttcttctcactactcacttttgggg

SEQ ID NO: 135998 - DNA, 831 bp, Homo Sapiens
tttgtcttctgtccatggtgctgaagtttattcactttcaaaccactttcagtaacaggtgaggttctaccttaaaatttaatgcatggggtgggagaggcgaggaagtcaccatcaaaccactttatctacagttagcataagatgtgagaagtgttgacaggaagctgcagcttagatgggatgatcacaactccatggcaacaagatgacacaaatgcagcagagaccccaggggacaggagcctcttgcagtctgtccctaggcccagccctgcttgtcctccctggctgttatcttcagtaccggaagctgttacagcccagtccgctctgggctccaatcctgtccatcctgcccccgaagcagctggatctccgcaggctccgaggggcagtgagcagcgccctcagcttgctttttaggagggcagatcgatcagaggagtcccaggggccccgcccgagggcacctccatctctctgggctgggctgacttccccggtccagggaggcacctcaggggaggggctgagagcagcccccgcttcttcattcggctcactgagcacttgtgggggcacgacctcatcttctaaaggcatcttttcttccaaatggtccagcaaattcttgaaatccatcaggtctgcgttggacacggcattgtacatgggattagctctggtctgacctaggagctggaatgccagtaaaaggaggaagctcacggtggtggtggagaaggagctcatgctggcgtcgtcaaggagcaatccactgcttgctgctctgtctctcccctctggttcctctctgttcccctctat

SEQ ID NO: 135999 - DNA, 463 bp, Homo Sapiens
tttttgcaagaaatgtagttctatttattctctgttctaatgggtataaacattttgttatctaacttgaacatcataccaactcaaaggcaggtcttactagcaatgactggggctcagagaggtttggcgacttcacgaaggtcacacagctgtcagggggaaaagtcagaacttggatccaggtcttcagactctcaggtctggtgtcatcctagggggcttggtgatggccatatctttaatgtatttgtggagagtgaaaggctgtcagtgagtaagcttaagagaacaggagacttgtgtgggaaacagtcggtatccattgattagactgaatcatgtagaattgctaatttcaccattttgaactatcgaaatcactatttggtatgactcaacctcatcctttaagtacacattcatgacagtgagtggttagacagtgattctagattagttt

SEQ ID NO: 136000 - DNA, 488 bp, Homo Sapiens
aaaaatattttattgtggttcacttcaaatcttctttatttcagaacaagcatgcttatatgtacagaagagagaactatggagccagcacacacggtacagaaaggagggtgcatgcccccacctcaccactgccaggaggggtctctgcctcattaccctggggcttctacttcctcttcaaagagccctattccgggctgccctgagctccagagggcagcgagggagccgggcagcgccagggatcagcctcttccccagaccctgatctacgggtgactcattctaggaggggatgaggccaggagctgaggatggtgggaaactgagcagcggcccatccatttcccttggttctggggtgttatgccagcaaacccctcctgccctctctggtctacagctaaggccctgtgcagagggcaggggattgggctacgggctatttggggggtggcgagggttccctggggaggtttggtggg

SEQ ID NO: 136001 - DNA, 343 bp, Homo Sapiens
actggggcccacaatttaccaatgaggaaacagcatttagaaagttaagtgacttgttcaagggtccgctggtgggagatgaggggtgcggtctgggagctgcattctgactactgctgccctcaaggcagtgtctaagctcttgtccagctggagcatccctccctcagggggcgcagatggaccataggaagcagggttttctgagtctacctatttacacttcaaaacaaaacaacgtaagcatagcatgcacagtaagcactagtccacgttcagcaagagcttccttcaacagttgaatccttcactctccatttatagacacatgggagttctgggc

SEQ ID NO: 136002 - DNA, 1371 bp, Homo Sapiens
tggagaggatgtctccgtgtcactgagccactcggcgtccccggcatagtgggtaggggcagcgagcaggggctgggcggagaaggccaccaggtcccgtggccagaagtgtgccttgtactgctcgctcttcccagatggagtaatggctgaggaagcagcccacctcgcccttggtcagagtgcggcccgagtaagggtcctggtagcccgggagcaggtctacgccgaggttcctgatggcactgctgttgagcatccagccatccacagcgtccaccaccctcccagagatctccatctcccagagcgaggcgagcatgcgttcccgacggtcaggcctgcgagccaggctgatgacaaagacctcgtcaaaccctatcttgctgggcctcttagagggccgagtcacatgagctgaggcctgcatgcgggggccgtccactagtgcttctaagatcaggtggatgaagttgaccctctcgtcttccagcccctggtgggatttcaccggcacattcatgtacccataacggtgctcattgcacacgtggacggagaccccagcagcctggcaggcataggcgaagacgatgatgtcgtcgaaaggccaagtgtagttgggatgtggcgggtagaaagcaagctggtctgccccttcagcccgcagggatgcaaggaaggtggagtggaccatggggacacggaagcagccccggcgctggcggttcttggtggggaagtactcggctgtgcggcggtagtagccctggggggtgatcccacaccagaagttggagtagtaggtctgggagtccagcattggggccaccactggaagcccctgccccatgagaagccgcagagtctgattgttggtcagaatgttgtctgtgtctgcaaacaggatatagtcggccccccagttcctggcaaaggtgagggcttcctgcttcagctccatcagaaactggtgcctttctttggtccagtgcttgggaccctcttcatctgggtagaacctgggctcgccctcaggcctccagaccacagcagcatagtcatcgcccacagccgccagccactcctgcagcatctctgtggtgttgtccacattgtggtccgtggcacaccagagggccatcctggcccgggggtagtccagccgctccagagcgcccaggtagtggggcagcgagtgttcggcattgcgggccaggatggcaaggaccacggcgggcagcggcgactccgcaacgcccgcagcctccagccacggccccagcaggagcagcagctggagcagcggcgcggcgcgggcagcgcgcatggcgggcgcttgggcggctgcagcggcccccggagctctcg

SEQ ID NO: 136003 - DNA, 616 bp, Homo Sapiens
gcggccgctgtcatcatcccatggagaggatgtctccgtgtcactgagccactcggcgtccccggcatagtgggtaggggcagcgagcaggggctgggcggagaaggccaccaggtcccgtggccagaagtgtgccttgtactgctcgttggggtgctggtcgaacatgatgggcaggaactcgtccacgggcagcatgcggcgcagaggctgtgaggccagcagcttgcgggcacccgccagacgcagggcataggccagcgtccagtaggagtacccaagacagtttctctgcctccacatcctccatcagccgctccagccgccccctgaagttgctctcaaagcgcacgtcatcctcaaacaccaggacccgggccaggcccctggcaaccacctcttcccagatggagtaatggctgaggaagcagcccacctcgcccttggtcagagtgcggcccgagtaagggtcctggtagcccgggagcaggtctacgccgaggttcctggatgcactgctgttgagcatccagccatccacagcgtccacgacactcacagagatctccatctcccagagcgaggcaagcatgcgttccagacggtcaggcctgcg

SEQ ID NO: 136004 - DNA, 580 bp, Homo Sapiens
gtagacctgatccagtgcttcatggcccatactcagggcagcactatgacaaagggcgaggtgggctggttcctcagccattactccatctgggaagaggtggttgccaggggcctggcccgggtcctggtgtttgaggatgacgtgcgctttgagagcaacttcagggggcggctggagcggctgatggaggatgtggaggcagagaaactgtcttgggacctgatctaccttggacggaaacaggtgaaccctgagaaggagacggccgtggaggggctgccgggcctggtggtggctgggtactcctactggacgctggcctatgccctgcgtctggcgggtgcccgcaagctgctggcctcacagcctctgcgccgcatgctgcccgtggacgagttcctgcccatcatgttcgaccagcaccccaacgagcagtacaaggcacacttctggccacgggacctggtggccttctccgcccagcccctgctcgctgcccctacccactatgccggggacgccgagtggctcagtgacacggagacatcctctccatgggatgatgacagcggccgct

SEQ ID NO: 136005 - DNA, 427 bp, Homo Sapiens
ttttatgatctacgcatactaaacagtcttttataagcatgtgctttgctctctgaaaggaacgctcaacagtgttgggtgagtgggagctctttatagcagcttgtccctcttgcttcagtctttgtgggtgtcgttaaacaggatgaaaggcctgtgacgatccaagacacttggaggttgatccacagaggactgggacacaccacgagaatctcccagagtgtcattacagtggaagacttcgagacgattgatgcaggatattacatttgcactgctcagaatcttcaaggacagaccacagtagctaccactgttgagttttcctgactctcactctagctctgtgagcccatgaccaactctgctgttgcagtggaaattcctgggaaatataaactaagaggagatacgacctttactg

SEQ ID NO: 136006 - DNA, 829 bp, Homo Sapiens
  misc_feature (114)..(114): n is a, c, g, or t
  misc_feature (124)..(127): n is a, c, g, or t
  misc_feature (129)..(129): n is a, c, g, or t
  misc_feature (131)..(132): n is a, c, g, or t
  misc_feature (135)..(135): n is a, c, g, or t
  misc_feature (137)..(140): n is a, c, g, or t
tggaaaaccagttatgggcccatgtttcacttaccttaccggggccccgcgcgcccaaaccgaatgggtgttggaaaagcttttcgaggggccgaaggcgcccgaccatgtggnggggttttgnnnngngnngtngnnnngggcaaaaaacgtgctcatttaatagaaatgattgattatataaaattgtttacacatgtataaaaactaggaacacgtatgtaggtaagcaatcaaaatcatgctttctgttagaaaagttaacacttctgtgaatagactggatgacttccttttagtttggatgtctgggtcggactcacgagacgctggggttggggtgtggtgcttgacatcagcctctggcaaagcactaataaaaggaaccccaaagctgactgtgtacacaaatgggctttccataagttcattacatttccttttccaagtcaggaaaactcaacagtggtagctactgtggtctgtccttgaagattctgagcagtgcaaatgtaatatcctgcatcaatcgtctcgaagtcttccactgtaatgacactctgggagattctcgtggtgtgtcccagtcctctgtggatcaacctccaagtgtcttggatcgtcacaggcctttcatccttctgccctgggaagatccaggtgaactccacctccacatcgggctcccccaggacagtgcagagcacactgatgtcgtccccacttttcactttgtttgaagaagccaagatggttgttgagggagggccactgggaaccgccacgtagagcagctggtacttgacggagatctgagatctgccccccc

SEQ ID NO: 136007 - DNA, 925 bp, Homo Sapiens
ccattccagagtccagaccagtccctgcccaggctgactgccaggacttggtccaaattgaggccaaggtccaggagaacactcagagatgggtcactgcgaccagacgtggaggaccgcctgcacgcccagcacttttaccctgcaccgctcgattctcagagctccaagccgatgtggacaccaaattgaagaggctgcacaaggctcaggaggccccagggaccaatggcagtctggtgttggcaacgcctggggctggggcaaggcctgagccggacagcctgcaggccaggctgggccagctgcagaggaacctctcagagctgcacatgaccacggcccgcagggaggaggagttgcagtacaccctgtaggacatgagggccaccctgtcccggcacgtggatgagatcaaggaactgtactccgaatcggacgagactttcgatcagattagcaaggtggagcggcaggtggaggagctgcaggtgaaccacacggcgctccgtgagctgcgcgtgatcctgatggagaagtctctgatcatggaggagaacaaggaggaggtggagcggcagctcctggagctcaacctcacgctgcagcacctgcagggtggccatgccgacctcatcaagtacgtgaaggactgcaattgccagaagctctatttagacctggacgtcatccgggagggccagagggacgccacgcgtgccctggaggagacccaggtgagcctggacgagcggcggcagctggacggctcctccctgcaggccctgcagaacgccgtggacgccgtgtcgctggccgtggacgcgcacaaagcggagggcgagcgggcgcgggcggccacgtcgcggctccggagccacgtgcaggcgctggatgacgaggtgggcgcgctgaaggcggccgc

SEQ ID NO: 136008 - DNA, 765 bp, Homo Sapiens
ttttcgtatacaggatatatatttattaacagtgaaaaagcatttacccaaagtcaatgttacaaaatacaaagagtacctccacagtctggccagctcattattttaggcattatctcaacctgcataaagttctctctcactcattttgaacttttctccctctatctatctgtaaccaaaatttttaacttcaaaattaggacaaataggaatactgaatgcctaacccttcagcaatagttactagagaaaacagattaaataaatatatctgctctcaaaccctacgtattttaaaactaaattatctactaaaatagaaaaacaatagacttagattaatagcagctgtaacaccagtcaagcaattctgataaggttcataggtactatggtaataactaagatataaatacaatttttccactttaatatgcatgcagacagagagagaaacacagtatgtaaggctgggcttgagtaccaaaacagtttttaccctttcctgcttaaagtggagaaaataaagaatttgagtgtgcatgtaacataacttattgttccaatttccctgaagttagttagagcacctggataagaactccgaattctgaattggtaattttctgaataggttttattaaagttgaagatatattgtcttccataatttaagtagcactacagtaaatgtcctcgcagggaattcctcatttaatactccttgaatggacattacactgaggtatacagcaagttaac

SEQ ID NO: 136009 - DNA, 558 bp, Homo Sapiens
ttttgagtgggggaaacatttatttgacttccaggaaagctacaaacaaataccaaaagcgaatcactgagacaggccccgcaaagacagatttcacacgtagcacagcatccactcgctcactacaaatggtcttggaagcaagatgggtaagggagagatgggtctgacccagactatccccatatttacaagctttgggccctctagccagacccatggattcacagagaaatacacaagacattttgcactgaggatcatttttgtttccgtatactcccagaccaggccttgtggggcctacccaggcagcaggaacttaaatctcactatcttctttctctcttctcaataccatccctttggtcctccctagccccttcccaccctaggaccaagcccctaggagacttgggcctagggagtgaggagggaggaggaggagaatgaaaagggactccatctccgaagccagctcagcttgaccccactgcggcgctaccccacctcaactgctgccccttacagaagtttccagctgaaactcaaaataca

SEQ ID NO: 136010 - DNA, 817 bp, Homo Sapiens
  misc_feature (100)..(100): n is a, c, g, or t
gggcggcccaaagcgaatggtgtttaggaaaagcttttttcgaaagacccgaaggggggccggacaagggtactcgagtcggcgtggaaaatggctgggnagggtttccaacgcctttattaagaaatatcaaaagttgattacaggtccatatgcagttttacaaagttcaagtgaagaagactgtagggatgccatcaatgtgcgtgtctgaagactatggaagcttgtcaaaggggtaaccctacaactcctgtcactttaacaatggtccacagcaatgcttttcccccatttctactaggctaggccattgcacaataccttaagctacttaaaagagttttaatacgttataaatacgtacatatttgtccttctagtttgttaccatccttccctgaaagagcggagctgtttataggaagcacaacatttgagtcccattcactgctgtttgtattacattttcacaaagcctgctttgaaagctggcaaacactgcaagttacatgttaccatattacacatgggaggacccatacacattgttatttttaaatttaacattgaacaaaaaaaaggaggaatcacttaacttggaaacaaaacaccaaagttagtcagtggaatggtcaagagcaggacaagcctgccagggccactgaactccagtcacaagtggtcaaaagtatgaccgagaacaactggatgcaggaacatcagcacaaaatacagatgggaatattctcgggagtggtacatcaccatcttgtatgtgagggatattgtgtcagaggggaattacactttcaaa

SEQ ID NO: 136011 - DNA, 426 bp, Homo Sapiens
  misc_feature (197)..(205): n is a, c, g, or t
ttttttacttcaaatcatatttattttaaaaatctgtgatgggacagtggcctcactgccaggaagcccaagttctgttttatgctcggtacaactaagtggaagttgattcactttgtctcaagctacataaaataatcagaaaatcaagaagatctcatgctagacaggttagacttgcacccaaaaaagcatcnnnnnnnnnaacctgctgttttggtttgctgctgaagtctttgaagagaattatgtattcaaagtagctctttgcccattggcatttccccatcttctatgtcttctgtagggcacatcccccccaaagtaagaggccttagtagaaaagcacttcccacctgcagttttcccctaggtctgcagagagaaacagtgcagagtgcaatgccacagtcaaggaccaacttt

SEQ ID NO: 136012 - DNA, 562 bp, Homo Sapiens
  misc_feature (201)..(437): n is a, c, g, or t
ctttcttccagtttcttgtattttttaaggtattcaaatacatctattttaacatttttctatatatacatttgctacggaaaattgaaatcgcacactgaaatatccttttattgcaactcaaattttcaaaaaccagaaaatcaaattattatgctctagccaaattatgtaatgttttctttttcttttctctgtcannnnnnnnnnnnnnnnnnnnnnnnnnnnnnnnnnnnnnnnnnnnnnnnnnnnnnnnnnnnnnnnnnnnnnnnnnnnnnnnnnnnnnnnnnnnnnnnnnnnnnnnnnnnnnnnnnnnnnnnnnnnnnnnnnnnnnnnnnnnnnnnnnnnnnnnnnnnnnnnnnnnnnnnnnnnnnnnnnnnnnnnnnnnnnnnnnnnnnnnnnnnnnnnnnnnnnnnnnnnnnnnnnnnnnnnnnnnngtgtgagccactgccccaatggtatctttatattatttttccttacaagttacttcaaattcttgatgttgaatttcatctcactgacttcaggcttttaaaacacatgggaatacttgagacct

SEQ ID NO: 136013 - DNA, 790 bp, Homo Sapiens
  misc_feature (439)..(468): n is a, c, g, or t
  misc_feature (490)..(537): n is a, c, g, or t
  misc_feature (625)..(676): n is a, c, g, or t
tccaataatcaagggtcttttggaatcctgtatggatttggcccccccatttcacggggaaccctattctggagctttctttcttgctggaattttatggaccagttaagaagctgctcttgtgttaggataaactgtatacccataatgggtgacaacccgtgatggagtggttgcatttaacctcttgtatcttttcccgtcctacctgatggccgtaatctataagggatctttatagtttgaatgtatttggataacttccgtatactttaggttctacttttttatttgactcaccacccttcttaggttctccagtattcccactgtgttttaaaagcctgaagtccgtgagatgaaattcaacatccagaatttgaagtaaacttgtaagggaaaataatataaagatacccttggggccgtggctcacacnnnnnnnnnnnnnnnnnnnnnnnnnnnnnntggaaggatcgcttgaagcccnnnnnnnnnnnnnnnnnnnnnnnnnnnnnnnnnnnnnnnnnnnnnnnnaactttaaaaattagctggctgtggtgttgctcaccccatagttccagctactcggggagctgaggccgtaagatcacttgagccccnnnnnnnnnnnnnnnnnnnnnnnnnnnnnnnnnnnnnnnnnnnnnnnnnnnntgacagagaaaagaaaaagaaacattacattatttggctagagcataattatttgattttctggtttttgaaaatttgagttgccataaaaggatatttcagtgtgcgatttcc

SEQ ID NO: 136014 - DNA, 513 bp, Homo Sapiens
tcccgacccagcatttggcgagaatagacatcctctaaactaatctgttaaaaatgtcatcatcttctcctccccagccccaataattattaggaaatccattgatggttagaaactgttgtttacttagagcagagacacctccaaaatactgaacataaggtaggctgaatccaaacttatccattgcaacggaaatgtgccgtggctgtgaaaaacacctgtacgcattatggtcattcattggaatgaggtccacgtcactaaacacaaagcaggtgtagtcatagtccttcaaggcttcttgaaagccaacattgaggagcttagcacgattgaatatagtgtctcccgcctggttgataacatagatgccatagtccagctgctggcgctgcaggactgggtgcaaataatatagccagtacttgaggtgctcctgccggttgcggaatggaatgatgatggccaccttgtgaggagagacgcagtccctgggggcatagcggccgc

SEQ ID NO: 136015 - DNA, 390 bp, Homo Sapiens
actcttctgtattttttccaagttccctagaatagggataaagaaaggaacatatctttctgtttttaatgtaggacagaaggtaacatgttaaagagatttccatctgtgcttaaaggaataagtttctacaagttagaaaactcatatttgttagatttctccatgatgataaacaagatcatcacagattctacaaccattcaaaaacctctgataatcatttttcgtctttacaagaaagtcaagtacataaacacagatatgatgttggttgccatcaataatttaacactaataatacatagagtaaataccagcatgtatccactttaaggtgatgattttctaatgaaacccagtttagaggttacaatgattcataagggc

SEQ ID NO: 136016 - DNA, 837 bp, Homo Sapiens
  misc_feature (197)..(210): n is a, c, g, or t
ttttttcactttatagacatgatttttattaatatggtatccctgagagacagattaggtgtaaacattattttgctttacagaaagggaaatggaggcaggttaacttacaagacatctggaaccagaatatctgttgataccacaaccaatgcttttcccacgagactatacatagatatactaaagacaatacnnnnnnnnnnnnnngacattacagcacacttcctaaatcatctgagatcctgaggcactgcttcagactggtgtttcttgtagcttcctgtctgcttaggcaacataacagaagtaccatcttcccttaattcctaataaatattagatttttttgtactaagattcaacagcagaatcctaattaatctctaacacaacaagctatgaattatagaatactatatcttcctactgctctccctgatcttattccagccacagaattttaattgaatgtgaaacggctacttatcccagtccttggccatttggccatgtttatctttcttctcacctgctcatcaaaatatcttcatcagatactacgatttctgacctttatctcccataggagctagtcccctaaaactgcttattctttcagtggcagtcagctgtttccttatcaatagttatagcgtagtacctgatttactatagatgatggttctaccacctcatggtctgctcctaacacccatgtttcagctaaggtgattctctctgcctgctgcacagcccatatcatactattcctcaagttctcatgctactccaagctttatctgggcttccttacagtctatcctttgccctttg

SEQ ID NO: 136017 - DNA, 427 bp, Homo Sapiens
  misc_feature (313)..(352): n is a, c, g, or t
agggactgggtcactattgtggtttttactataactttgtaaattaacttaattttgctgacttgactcctgtggcttctggacccctcctctgccccgcaggaggaagttccacggcaggtggttcgttcccacgcaggcaccaagtggaagcttgcacggtgggccacggccgtggcgggtgccctgtgggtgaggctgggtgatgacctgaggaccagagacacgcgaccatgttggggctcttggactcctctggatgacccgtccccaaagttgacattccatttcatgttccactgtgattaattcnnnnnnnnnnnnnnnnnnnnnnnnnnnnnnnnnnnnnnnnctataaagtagtacatgtacattatataaaaaaaagttcaactagtatgaaagggttataaagtaacagaggaaa

SEQ ID NO: 136018 - DNA, 1362 bp, Homo Sapiens
tattccccagttgggaaacaaggaaaatggaaatggtccaacctttgggggacgggggtcatcccagaggaagtcctaagagccccccaacatggttggcgtgtctctgggtcctcaggtcatcaccccaggcctcaccccacaggggcacccgccacgggcccgtggcccaccgtgcaaaggttccacttggtgcctgcgtgggaacgcaccacctgccgtggaacttcctcctgcggggcagaggaggggtccagaagccacaggagtcaagtcagcaaaattaagttaatttacaaagttatagtaaaaaccacaatagtgacccagtccctcccacgcagtgtgagccctgggctgcgccacacccgcaggtggcccgtgctggcacctcacagggcaaaggtggtgaagaagatgtgcatcttggccaggaaggtggtgacggagccctgcctccagagcttcatctccacatccagggcaaagtcccggggctccagcacggcccgctgcaggtagaccacacccgtgtaggcattgagcctgcgcgtgccaaagtagccctcctcattgcccttgatgatgttcagggcgatggtgtcccccgtgaaggctggcgcggggccaatgcggaagatatgcgcaggcaccaggaggcccgtctggaagttgagctggtagtgcgtgatgcgcgctggcgagttctggcactccaggaagtcatggcacgtggtgcgctcgcacttcgttttggagacttggacatagttgggaggacactcgaagcgcaggcagcggaagctaccctggatgttgtggcaggtctcagcctcggaacagttgtgggtacccagtgcacactcatccacgtccttgcaggacctcccgttggccgtcatggtgtagccctgctcagggcatgcacactggtagctccctggcacgttgagacagcggaaggtgcagaggatgccggcgccttgagcacactcgtcgatgtctgtgcaggtgtgcccatcctcagccagctggtagccctggcggcagtagcactggtaggagccatagatgttggcacactcctggctgcagcgctgggcctcacactcattcacgtcttcacagcgcttgccgtccgctgctagcaggaacccggaggcgcaggaacagcggtaggagccgagtgtgttctcacacgtgtgctggcacaggcggcctggcgaggcccagcactcattcacgtcgatgcagccccggccgaaggcatcccgctgaaagccggctttgcagtcacagcggtaggagccagggaggttgtggcacacttggccctcaccgcagcggtgcacacctgtctca

SEQ ID NO: 136019 - DNA, 1401 bp, Homo Sapiens
  misc_feature (43)..(43): n is a, c, g, or t
  misc_feature (365)..(365): n is a, c, g, or t
agagctgcctgcccttcaacccacacacacctctgaagccgcncagggcagttccccaaacacagcggcttctgaaacagtcaatgaccagtaccccccaaacctgggctgtgcacaacagaccaagaaaaaggtgttccagtaagaaaacagatatatgcggtattttaaaaactgattttacaaaatccagccatgagatgtacaactcattccctaggaaacagcccaggaatggccatcttctccagccccgtacgctctccccagtagcccagggcacccagcaaccatcccctaggagaacaggcaaggaccctcgtgggaagatcccaccacagcaacacctttcttcagtgcgggcntcttccgcaatgtgtgagtcaagacaatccattccattcaagaccaatttactctcaaattttgccaacacagaaatattatccttaaagaaatgtgcatttaaatcttttaattcacttcatcctgtattttaaaataaatgttttccatatagattttccccttgggggggaaaagaattcagggtcttaggttccaggcagttcaaaaacagccacgcggttcttttttctccaccagaataccacaatagcagaacttaagaatcgggatatgaaaagggaggcgtggtcctggcagtggcccctggccggcaggaatacacagcaacacccaggcaggggcagcggctgcccccatgccagcctgcccatccctgtaatgacagcagggcaggagatgcagctgtggccctgggggcaggtgggctctgaggctgcaaacaccctgagtgccagtggtcccagagggggtgaggcctctatctgtacctttattccagccagcctcctggcacagggctgggcccacatcctggcctctgcatctggatcagggctggtgctggtcagcctggtcactctggccagtgctcacactggaagtccatcacaggcgaagtcacctccttcccgtgttaaataacaagaatgccaacaccccacgcacgtgtcatctccagtgagcagacgtccaggcttcccgaagcttcctggctggaaaccgcgcagggccggcagcgccctctccaccaagggacacagcagcggcgcctcctccgcggcccgggcccccatcccgcggctcgcgctgccaggacgccccaggtcggagcctgcccccaccccgcacccggaggccagcagcccagtcccctaggccgcgcagcgccagcgagagcgaggctgcagggcgaggcccggtgaggcgctcgagaactggccgggaggagaagtcaggcgcccatcccgagaatgccgatcccaggcgcaacacggggggggcgggtggtgatggaatgtaggtagattggtg

SEQ ID NO: 136020 - DNA, 493 bp, Homo Sapiens
ttttttttgcatttaaatcttttaattcacttcatcctgtattttaaaataaatgttttccatatagattttccccttgggggggaaaagaattcagggtcttaggttccaggcagttcaaaaacagccacgcggttcttttttctccaccagaataccacaatagcagaacttaagaatcgggatatgaaaagggaggcgtggtcctggcagtggcccctggccggcaggaatacacagcaacacccaggcaggggcagcggctgcccccatgccagcctgcccatccctttattccagccagcctcctggcacagggctgggcccacatcctggcctctgcatctggatcagggctggtgctggtcagcctggtcactctggccagtgctcacactggaagtccatcacaggcgaagtcacctcctttccgtgttaaataacaagaatgccaacaccccaccgcacgtgtcatttccagtgaggcaacgtc

SEQ ID NO: 136021 - DNA, 494 bp, Homo Sapiens
ttgtgagtgagaagcaccaggtttaatattaaaatctttcccttaaaaaaaagtacacagatagaaaaacttaacagcatacaaaatagcatttctgctgtataaatgtgagttaacgtgagtcctaaaaatatttgtaaacctaggtgattatatctttggtaccgtattgagaacccactctccctccttggaccaactctggggatcccagggaagtaaggtgccaacctgcaatgcagggttggtgcccagaggggttgagcttcctgcacccccttcccaaccctccccgtgcgggggcgtcttggctacaaccctgactcccctggcacctccaatgcccactgggctggggacaatgagatgtcactgctaggtctgggcagtgacaaaaccatacccccatggagcgctgcctcagggatggggcagctggtgggtgaggggcaaacctccaaagcgcccacctctcacatccttcttggggtacc

SEQ ID NO: 136022 - DNA, 968 bp, Homo Sapiens
ggttgaggagcgccttttctccttggtgaaagagtgacgacttttcaggtacatctgtggaagcatcccagtgccagagggatccaccttcagagcaggtaaaaagatgttctggcttggatgggtgaaagtgaacttcccacatttcagcttcatgagccttcagcagagatacaggcatagtaccttgtctaacatcccaaatactcaacattccatcttggccaccagtagctacaacatgctgttggttgggatgtctatcaacacagtggagtggcactcggtcaccagtcagtgacaatatctgagaaggctcatttccttgttgtctgaaatcccatattttcaactgtccaattgaatttacagtaagaatctcaggagttcgaagaaaggttacagcatggagtgtactactatctgcattgtctatggttccttacagcttccttgtgatcagctctgaagagatttattcgaccatcctctccaactgtaacgatttctgggttgttgcacacaacacctgtacatggtgcactgctataggaaggactgccagggcctgtgtggtagtgagctgtagtccactgctggttgactgacagagtctggttatttggatggtgaaggaaaactgttacacatcctgttgatgaagcagcgacaattctttcctggtcaaaaaactgtaaatccattacatcaccatggtgtctgatatcacacaataactgatggtctccttcaaaccctccatcagagtccaagtttccaaaatctccaatagaccacagtgaaatataattttcctcattgtcccaagatcctgtagcgaacgtctccgcggtctgtaaacttcccggaggcagcggtcgccagcgggttttgctgattttctgggacacaaacttcgcataaatttcctccatgccgaaagcggccgcagcaggtactgcaaaaaa

SEQ ID NO: 136023 - DNA, 1049 bp, Homo Sapiens
acgcaccgccgcgtgtttggtgtaccttataagagccatgtagtgtagaagggggtaaataactggcccacaaaagggtatttgcgcccccgaggggcccctctatggaaaaaagcggggcttttgaacccaagtttccggtttcccgaaagggccgggagggggtttcccagggaggttcggggttaaagtgaatgtttttgaggaccccccgttcttttagggcccgctcatcattggaggagtcctggtcacggttagcccgcttgcgctgtacacggcgccgaggctgctcttcttcctcctctttttcctcctcttccttcttcctctgagcggtcatggactcgattttcatcattaatggagtaatgaccagtgtcctccatgctgtcagagtccttatcttcacctgagctctctgtgtctgtgcctcgactttctgtgctggtgcggttggggccaccatcatccccagtcaagctcaaactcaggtctgaggcctccacttcaatgcctgaggatgtctccctcccctcttcagctccagacatctcctctggactgctagacaggcttccattagctaagtctgttctgccatctgtgctgctccctttgctggacatcttgaatgatgtttgctgtagccagcctttcctccttttatcactgaagtaaggccaggctgagctcctgagaaaataggtctgtagattcactgaaggactgaggaaagggcaaccagtactcccagcgatgacttcgggtcggcggaaggaaaagacctgagcgctaagagcttgggatacgggtcaggcccatccttaggggaaaccggctgggaagcgagggggggcgcaggccgagccggaacgagacacagaccgggtaggtcaagggagggggggtgtccggctggggcagttacaagcacgggaatcggcgaggctcagcagcccgcttcccgtcttgggtcatccttctgctagcggctgctccgactgttccaggcccagccgccatcccgggaattccggaccggtcca

SEQ ID NO: 136024 - DNA, 977 bp, Homo Sapiens
  misc_feature (464)..(513): n is a, c, g, or t
ttttggtgaggggggcccaggctggctggtgtacatggtgcccggcccacatccaatgtggacaggcgcattggattttgtgagttgtgctggagtagggatgccttggttgtccagtggagatgcaggggatttagtgatcagaggtcttgacatattgggccgactgtcctgggtgggggaaacaatagcaggtgaaactattgtgggagaattggtgcttctgtgcccattggcttctggaagaagaggcagggggtcgtgtttcacggaaaccaccaccaccgcatccacaggctccgaggggcggatacaaagtcttttgggggaagtggggccgcagatttcccccgacccgaacacagactcgtacagggcgcgcttgggcgcagcctcggatttcacgtcgggcccgacctggctgtctttggggaggatgtaagtgttccccagcgagggcggcnnnnnnnnnnnnnnnnnnnnnnnnnnnnnnnnnnnnnnnnnnnnnnnnnnccgtgccgccccgttcagagcctcggcgtagcagccctgcggggcgggcgagcccagcttggtgccaatgcccgcgatgctgttgagcgtggcgatggagacggcgccgatgcagtggttggtgtaggtcttggagagcttggccgccttggagagcatctgcatccgagtgcctagcaagttcttgccgatggctttgttctcgtaccaggtcacatcgccctcgctgcagtggtcccggggccgctggaagaacgccttgcagagagggttgcgtttcgacaggtacttgacgaagctggcgtaggggcagaactcggtgcccgtctcatacatgcggggcaagttctcctcgtcgctgctctcggcgcgcttcttgctccacgacgacgagcgcgacttgtggtagggcccgagggacttgaagtagacgaacttgcgaccgtcctcgtccatggccagcc

SEQ ID NO: 136025 - DNA, 781 bp, Homo Sapiens
cttgtataccattttattgtggaaggaaaagagaatcaatgaattgtacaaatgtgaaggctgtaacaagttgtagaggctttttccagacattcctatgcaatgttctccacagtaaatacctgggggcagccaagagggaagatttcagataagtgcaaacagtgattggatgttatctacctacaatccctttagacatttttgagagaactctgtttaaatgttgtttaactctcccaccccgaccaatgaatccctacggaccagcagtgccctgggagactgagtaatgaaaacatcctgtcaagcttcaagacctttgggcagatgggactctgcagacccgtgggagcacaaaggactaaaaagctgcaggtaaccgtatttggtaaccgagaccacacctggccacaggataacttgcaaaattcccagaaccctgcttctggctcttaaagccattgcacatgtggaggctaatttctgaattcaggagatatcaggatggacatgtatttttcacccaagggacaggaatgtgagctctgtgggctggttagccagcacacccttcttcctaacttcccttctcaatacagccttgaaaaagccgtgctgtgtagcaggagtggcgacccacagtagtgactccagaggtacagtaatggggtgggggccagaggtatccggctggtattaggtccagggctacccttttagaaggaactgcttccaacagtgtctatatgttaacgtgaactataaagatgcctgtgac

SEQ ID NO: 136026 - DNA, 1329 bp, Homo Sapiens
  misc_feature (50)..(50): n is a, c, g, or t
  misc_feature (88)..(88): n is a, c, g, or t
  misc_feature (153)..(153): n is a, c, g, or t
  misc_feature (209)..(209): n is a, c, g, or t
  misc_feature (216)..(216): n is a, c, g, or t
  misc_feature (218)..(218): n is a, c, g, or t
  misc_feature (265)..(265): n is a, c, g, or t
  misc_feature (367)..(367): n is a, c, g, or t
  misc_feature (386)..(386): n is a, c, g, or t
tgagcactgtattcgacgcgtgattgcgctggtgccgtagcgttgatctncggttactcgaatgagtggcgtcgttgtatgtcgggtngatatgacctgggtacagactcagtggtccgtgtgttgtgggtaggtagtctgccactgtgcggncgcggagatgctatcgccctgacccccagcttgttctctgtcgcctccgatagttnttgagtngncgcgtgtgggagcggccgccgccgccagacgtcgtacgcctgtcagnctgactatgaatgtcagcgtcgggcggcccgtgtagggatatgtgcccgcggcggcgtgtggacgttgagtggcgagtgcgggccggtggtgtcagacggancgccggttggtctgggagnggctatcttctctgttgccgtcgcgcggtggcgcgtgttgtggttgtaccgccctacgcgcgctcttcgttagtgtatcggtcgcgtcctgtggtgcccgggtgtcttgtttctgtatgtgcggtccgagcgtcgggcgtggcacgtcggcggtgttcccaagagacggcgcggttgtctcgctcggtgtcgaacccgggtgcgtggctcccggggtttctcggttgttcgattggcggccccaccggccccgtggcgttagggctgcttgccagtgttcttctctacgcgcgggggcggggcacccgagcggctgcctttctttcttgttctccctcgctgtcagccctcgccgcttttcgttgcggtcttgggttggctttgccggttgcctgcgttcgccaggtctttctctgtggtgttttgttgtcgtttctgtaggatttttattggtggcacctggggccacatggagggagtcctcagcacaggcgctggggtgtgggaaatttcagaggcccctcctgggatgtcacccttcaggtcctcatgagtcaatcttgagtttctccttcactttctgaaatgtctctgaaaaccactcccgcatcttggcagaaagttcactctgtttgatgcggctgatgagttcccgagccttgtcctccagtgtgtttccaaactccttcagcttatccaaggcactggagacgtctggggtcccctgggctggggctgggccttccaagacgatcgacagaaccaccaccaggaccgggagcgacaggaagagcctcatggcgaggccggaggggcactctgaatccttgctggagggcttggttgggaggtcctgtcctgcccgcaggacctttatcaggctctcaatcttcgtgactctgtggggtcctcagaccaccttagtccctttccccactcagaa

SEQ ID NO: 136027 - DNA, 309 bp, Homo Sapiens
caacgatggtcctcagctcaggcgctggggtgtgggaaatttcagaggcccctcctgggatgtcacccttcaggtcctcatgagtcaatcttgagtttctccttcactttctgaaatgtctctgaaaaccactcccgcatcttggcagaaagttcactctgtttgatgcggctgatgagttcccgagccttgtcctccagtgtgtttccaaactccttcagcttatccaaggcactggataagctgaggaccatcgttgtgtctcagtttcgggacggacggacggaagctgaggacaatcgtggggga

SEQ ID NO: 136028 - DNA, 928 bp, Homo Sapiens
gcggccgctgcttctgcttgcctcgttggccttggctgtgtctagcagagggtgggcggcggaacggtttagtgatcgctgttctgtttctctctcatccacgcctgaatctgctctttcagttctggcactggttccagcatgctctctgtcagcgtctgccggttgaaggggtccgtgggggagttgagcaggtgccgcaggatgatggagcggtccatgatggtgccagagggcagccgcacggggtctgtcatgagggtgtccatcagagggtctctgaactcatcaggagcgtcgctgtagtcgatttctgcgcgtgcgttcttggccactatctcctccactttctcggcgagcagcttaaatttttctattgctattgtggatttgatccctgccttccgcatctttgaaataacttcttcaaacaattccttactgtaggatctctggtcgtcagcaatggctttcgcgaaccgagcacagtccagctgtaagtaaatatccgtcagttggtccaacagcttctttggttcaaagccgtatttctcagggttttcaactttcaggtcacggcacttggggccacaaagttgctgaagattaaagttcagcattgcagccaatcggggtccaagctcctaggaaatcacaggataataggacaattcatgctgttgagacaagtgaaaaggaccaaaaactcccatttcagtggaggaacaggaattggttggattaatcttcaaagaatccttacaggtgctgtgtatcataagctgaagaaagacaacattatatttcaactttactccccatttctgatctgataattctaatacttaatggaatgttgcaggctgatgaaatatttatttataaataccaaaagaagccaaacttttctttacatttaagcttttaa

SEQ ID NO: 136029 - DNA, 408 bp, Homo Sapiens
ttaaacaaaatcgttcttgttggattttattcagcagcatctatcatgtagataaattcccaggtgtagcattacagcttctgactaatatagctgccattcagacaattaatgttcaaagagttttctaaagtgataaaaccaaagaaaagcatgtggaaaagcagaagcttagaaagttgtggtcactgaatgcactccctggtttttatttgtcagtgaaatctttatgcattcattgttaatattttaattccatggctttgtaggctgtgctgtgtctgaaggggtaacacctagggaaacatgaggccccttatgggaccccccaaatggaacaacttcactttctcttttatgtattgagccctgtgttaacatttcacttaagaagagcaccagtgcttt

SEQ ID NO: 136030 - DNA, 745 bp, Homo Sapiens
  misc_feature (69)..(69): n is a, c, g, or t
  misc_feature (101)..(101): n is a, c, g, or t
cccccaaaacggaaataggttttaaaaaaaaccttttttgaggggcccaaggccggcccggaccaaggnaaacatattcgagaagggcgatggttggttgntggttccattttcccttagccaacctccccttaaaggctggggagggaggagaaataatctttcccaaggtcagaatgtgacgggacttcgggttttcgataaaggacccaccccccggaactcgttcttcctttcatgagagtggcccctttctcctatgatcccccccagagcttctttctgtcacgttcttcaatattcccaagcctttatcatcatcttttttatgtcgtttcctagaggattcaaaagcttcatcactatcattatcttcatctgaactgatttcagcatattttggcttttcattaactgtgctacgcttgcgtttgttcattttcacacgttcacaaagtggcatggtggactcaatttctgccaggagttcagggggtaattcttttaacactgattgatctatactacctttatttgactttgatggtttattcttgataggtttaagggaacttcttgatttgtcctctctatctttaataagtttctgaacatcatccaaagacagtttttgtagcacaactacaggcttagctcctttatttagatcttcaactaatcctattttttctactttgtctttcggctctcctttcatttccattttctttgtctcctgagtacc

SEQ ID NO: 136031 - DNA, 1031 bp, Homo Sapiens
  misc_feature (56)..(57): n is a, c, g, or t
  misc_feature (83)..(83): n is a, c, g, or t
  misc_feature (87)..(87): n is a, c, g, or t
  misc_feature (97)..(97): n is a, c, g, or t
  misc_feature (147)..(147): n is a, c, g, or t
  misc_feature (191)..(191): n is a, c, g, or t
  misc_feature (217)..(231): n is a, c, g, or t
  misc_feature (237)..(237): n is a, c, g, or t
aaggggcggaagtttcccggggcttcaagagccaaaattccacaaaggttccagannctgcccacaaggccccagggccctcncttntgaaagccangggaccagaggggagcccagggcagcttgtgtaccagtgagaaggggatnccggatgggggaagcttctgtacagaggggctggtgattgtaanaatttctttttgtaaagtagaagttnnnnnnnnnnnnnnntgctgnctgcaaaaatttctggcttttctcttaccccttattgcccccggcaataaattgtttctatatgccagagccatgcaaagttcttggtggggagggggaaagggcccatgctggcttaggggctctaaaggcgcccagactcacaggtgctgtgaagagctcctttattggggtgatggaatcggttccaaagagctggtttactgctgtgaagggatcgcagctttgaatttcaagctctggttctcagtcctcgggcacctgtgcgtgaatcgctgccgcaaggctgggccaagttaaggccccacgcactttggcatccgggccagggatggtctccagaccccacagggtgaagcggctgaagttggcagtggctccaatgaagcggtcgaagtcccgctccagcggctcctcctcttggtcgtcagtcccggaatcccgcaaggggtctggcttccccatcgacaccttcttctcttctgtcaccatcacgtatcccacgaggccaggcggcaccgccacctcctctccccgtagacagcggccccgaaacgacacttcgagtccctcggggccctggcggatggcgggcgtgaagaagcgccccaccggggcgggcccgtccaccgcaacctcgcagggcagcagatgcagtgtggcgggtacggcgtcgcgcaatgtggcggagcgcaagtggacgcggtgcctctcgatggccgcttcgtcgccgctctccatcctccctcctacgcgacgccagggctcgcgagctgacactgaagcctcgtgcc

SEQ ID NO: 136032 - DNA, 1115 bp, Homo Sapiens
ttttttcatcttataaggaacatttatttggtaaactatctcatagaaatagactctaaaatcaaacagtttcttaaacaacagagagcataatcccaatctctccccatgaaaagcctacttcataactgaagtacctaaagcccatgaactgcattactagaagaaaggagggaaaaagacatttactaaacttccacaggaagactgtataaatctggaagtggttaagtacacatcagcctgtatccaagaatactactcagtctcaaaaattaactgaaaatctaaacttaatatggatacttctttgttcttggtaaggctcagaaaattaccatctatttaagtacgcatggtactagttacatgtcaactgatataataaaaaaggtgaagtggacaatcagtatttcaaacccaatacagggaaatcactagatgtaaataagaacttttaaaagctattcttgagctccactttaaaacaaacattcaggactggaatcttcagaattttctaatatcttgaatatccccatcttctctttaattggtcctgaagcattcatttgatcaataagatcacttcgatctaacaacaactctagatctttatcactaatgaccttctctcttgatccttttatttccctttcataatctctagattttaataattccattaattccttaggatctaagaaattcttagacagatttaatcccagactgaccacctttgaaatgatttttatggatgatcaacttttccagtttccgttttagcagctgctctttccacaattttctgatcgatagtatttgctgtaacaaggcgataaacaacaactggctttgtctgaccaattctatgacatctatcctgggcctgaagatccgactgggggttccaatcactatcataaatgataactgtatctgctgcagtcagattaatgcccaggccaccagctcgtgtactcactaagaagataaacacctctggatccgtgttgaagctgtgcatgtttttttctctctctgagtaagacatggacccatcaagcctgctgaagttgaaatctctgagatggcagtaatccatcaaaaat

SEQ ID NO: 136033 - DNA, 736 bp, Homo Sapiens
ccaaatctgaagttgttttattgtgtttaactcctaaagtttaacccctaaaatgagccgttctttatagaacaattcctttctcttctcttgaatgtggcagtcattactgccaacataaagaaatgtaactatttttagtaacttcacaaagcatccctgaagctttctaaacatggagaaagcttcctttcaagaaacccaagttctgttctccaaagatcaaagatcacgtaattctcagagatttatttcaggtcatttgactaactattatgtataatcatatacgtttcataattctaaatgaagatttgcaactcacctcaatcactctgaaagtccattcagcagaggccaatagccacgcaccctgccccaccacggaaagttttgataataggacggcacataaataacggcctcctttgtcttcttcctgctccttaactgtgccccacggtgcacaaataaggactctccttattttgacacgaggcgtttagaatgtattacctgttgtgtgctgaaagcgactattagcgtattggcaataacaagtttgcagaagatgcacgccaccctagagaaagggttgtgtaccctctaaaaagcaaaattcataagccgctatccgtccactcggagttcccgcaagcgtagaagtccacgggcactccatcgcgacgccgatctcgagccggcaggcttttatttaaaggcgaagggcggactg

SEQ ID NO: 136034 - DNA, 825 bp, Homo Sapiens
tctgaattgaatgctgcgtttattatagtgtttttattaacaaactttcaccagaaagttccgagtgtgttaatacagcaggcacattggcttccatgtttggcatttgacagtccacagaattgcacttcactctcacaattctgccacaactttgtgaattatttgggcaagacctacaaccagcctcccccattaaatgattaaataggacttttggttcattctgattgaaatgttctgagttcacacttgcatccgtctgtgacaagctcagctccactttccctcctgccttgttttcagtccctccactgctctccagattgctcacgtctctatttttacagagttccctttgtttattctcggggtcgcaacacgttttgagtaacgatccagtgcttctgcagacaaatgacgatggctctgccatctttggaagatgctcttctatgctcctctgaagactgtgtacattggtcttgccaattttttcttgggcctgaatgtgctgcactgggtggaggaaaaaattcctaggcagagaattctgcattccggctggctttactctgccctgcaggcagggacagtggtggatgtgcgtgatggggtgcacaaagccctcgacagcttggtgtgtggccttcagaggtgccacgccgttttggatctggacaaagctgctagtggtaggagagcactggtggcacaagcagtcccccatctgctggcaagagtgtgggccatagttcaagtgtttgtaggcatcggggcagctacatctctgattcagagagaagaagtgacacacggtatgct

SEQ ID NO: 136035 - DNA, 744 bp, Homo Sapiens
agcgcacttgagacagaggtaatgatggggacgaagtgagaacagagacccagaaggagaatcaatggaccctatttgtaagagctttgaaagccagcctgagaattggaggatttattcataagaaagtgtagagacccctgtgtatttcagagctggatactgccattaccacagatgaaagttgcaatgatctagcagttgtgtgcaaaggcaaggcttgcttttcctgtctttcaaccctatcttgcttttcctgtctttcaaccctatcttgctttcattgtcttcatcttcctgccatactttgtgcacttattgctctccttctgagtcaggacatgtgtacaggagaccaagaacaatgagtattagaaaaaaaggagacagcaaaggtggtttgaggtagtcacctgcttacagataacagccaaagatagaattccaagttataaagcataaaaaagagccaacagaagtaactaatccgggaaaagtgaacatatgggccctttaaagactacaagatttgctagataaactggaaatggagaagttattgcagacagtcatgaaccacaaatcactgtgattaaaattttcttctgatcgtaatccacgaatgcattcattttttggacattgcttacttatcttttaaatgtttcttttattacaaagcctattttgagtagcttttaaaactgaatttcctttaattggtttgaagcctagagatgaatt

SEQ ID NO: 136036 - DNA, 947 bp, Homo Sapiens
tggggccaggaacatttgggtcacaagcccagagaagtccggaacaggttgcctgccttcaaacaggcccattaaagagcccggcccaacccagcacagccaacaggatgacaaatgcccaggctgcatagatgcctccatatcgcccgtgcatgctttccatgtgccaaaggcaaggcccgttggcagtgactgccaaaagccaagccaagcaagaagcagcagatacatctcttacgtgggtatctgcgccccaatagatgacactttcctgcagtgaggacaacgtgccaaagtgcggtctgtgaactctgtccacagaaaagtattcttgcaatgtccacagataaccctgacacccatggtctggggttctggactcagaggtccgggatgcacaggccccaggttgatgattcttttgcagtagggccgagggcatgcaatccgttgggatgtcactttgcagataaggagacagttacaggggcatcgaacatattttttccctgggggtgcattcttgattggggtggcttcattgcagacaccacatttgactacatgctgatgcatcttgccttccacgttgatgagagattggcagactcggcaggtgatcataggggcactcccactgtccgggctagttaagggtgaataggggggtgggtcctccccaggcaacacggctggatgcccctcgggaaacgggggaaatgcggctccgtacggtggtgcggagggggtcaggcctcccccgggcccagccccactcccgccgggccccactaaaccgttgccgcccgcgccaccgtcgatgggctcagacagcagcggggaacgctctccatctgccgccatggccgccaccgccgcctcccgctcaggtcggcgatccggctcccttcgcctctgccgtcgccgcagccaccgccaccgccgcc

SEQ ID NO: 136037 - DNA, 475 bp, Homo Sapiens
  misc_feature (42)..(55): n is a, c, g, or t
aaaactgtaaatgctattttattttaaacattttagtttacnnnnnnnnnnnnnntcaatgattggtaccttttttacactctcagattcctgaatatggacagatcttcaaagggaggaaggagttctcatatgaaatttaagatagactgtcctgaaggttgtggggtggggttttttgttgtgttttaattcgcttttgtttttaagacacaataaagctaaaatgtcaagtctctgggagagatccccttaaagtttcagtcaaggagcatatcagagcacagccaaggagaccccagcctggtgcccgccggcccgtcccggctgcccaggcgtatttggtagcgcatgggttgagagccactgggacaatcacacctcacattccctcgcgggctgctggtggcaggtacacgagccatactcgttgatgatcaccagggctccctcaatgggttcggtttgtaatcaa

SEQ ID NO: 136038 - DNA, 726 bp, Homo Sapiens
acagcgcttgtgggcgttcgggaagagtccgcgggcacgaagaactgtcctcgggtggagcatgggacctttattcgttaagacatcaggctccagatatgaactttcagcagaagcgcttgccgggagcaaagggacagaaaagctgagatgaacagtgcctggcagcaatcacagccgggcaagggtgctccgagcctcgcatcccccggccgggggcagctggaggtgcctcagaaggtgcattctgcttcctgcaggggcttgaaacaccaaggcactccagggatcctggagtcaaagcagcagccccggttgttgcactccttgggggtgacatgggggtagccgcagtccaccctgtccttggctggcacggcacactggtttgcagacaggcccacgtactcctcagcagagctggaggacagcaaggccaggaccagccccagcatgcagagcgctctggcagccatgaccaccgtgggctccgggacgcagctcaggactcgcttcatggtccaggaggcctcatttatgcaccgttgtttgcacagctgctctggattgtttgcttggggaaggctctccctcctggctgtggctgctcctgttctctcctgcatgcctttgtcaagctcccagacagtttttctctcccaaaggggagaggtcagttcagcccccactgtttggcagcaagcggtatcccgggaattccggacc

SEQ ID NO: 136039 - DNA, 863 bp, Homo Sapiens
  misc_feature (47)..(74): n is a, c, g, or t
atttttcccccgcaaacccaccctgggggcccccaaaccttttcccnnnnnnnnnnnnnnnnnnnnnnnnnnnntctaaagtcataccccatgagatcattagtggcaggtagagccaaggcatctgcatctatagagaagggagcagagaggagaaagctctgaaacagctggcacagccttccattccctccactgaggagagccagggaagaaggtggtcagtaagaaccccactgctaagacttggtctgggcgggttccttctaggtggaccgtccacagtattcaggaccatttccaccatactgccctacatgcaggtcttcgcgtgcagaagggatctatttcataaacatgctaactagaggtgtaactttcattaccccgggaggctcaaagagttggtggttaacgatttaccagaacaccactagctggggctagatgtaaggatcactgaacccaacagccaagcaccctaaatgatgagaacaacaaaacatccttgacttctctgagctgctagcagaagagtgggaggagaggtctatcaagtggcccgggtcccttgaccaggtcactgctcattcccaccctgctcggagggaaagccagaaggaactgtaggacagcccagcagtacctatgactcattcagctaaaacagaattgagcaagtttagctaatccctttcccacatttaacacctgaaatgtggactaattaaaatacccgtcatttttgaaatgggaaagtgtattgtgaatcacctcgataggcaggatccatgattgctgtatgtgcacagtagggattcatcattcccaaagaactgggcttcattagtgggacatggtgg

SEQ ID NO: 136040 - DNA, 324 bp, Homo Sapiens
gcggccgctctgcaggaagcagtaaccgagaccctgtctgactacgaggtggctgagaagatctggtctaatcgggccaaccggcagtgtgcggactgtgggtcctcccgcccagattgggctgctgtcaatttgggggtggtcatctgcaagcagtgtgcaggtcagcaccgggccctgggttctgggatctccaaggtgcagagcctgaagctggacacgagtgtctggagtaatgagatagtacagttattcattgtcctgggaaatgatcgtgccaaccgcttctgggcagggaccctacccccaggtgagggactacat

SEQ ID NO: 136041 - DNA, 434 bp, Homo Sapiens
caagagggatggccctttcaggacgggaacccacgtctggctggagagataagaccgattataatcagcaagacatggccaggagctaaattataaggaagaaactgctactgagggggatcaggaaaggatgcagaaggatgtgctggaaaaacagaggagggtttctcagaaaaagcatcttccgtccaaagaaacagtgtttgtacaggatgaaaagtctgaggaggtcatcttgggcaaaggaaacggcagctataaatatttgtgaattaacagatatgcttccctgcacaatgaattaccctttttgtctccagtaagcacccagatcttaatgtcagcttttgcaagttttgaaatggtttctggaactccatcctgtagcttgtcttcaatagctgtagctcccaggagctagaatgtatattaaa

SEQ ID NO: 136042 - DNA, 1588 bp, Homo Sapiens
  misc_feature (1461)..(1495): n is a, c, g, or t
  misc_feature (1499)..(1544): n is a, c, g, or t
tttatcattgacaatgtttattatcaagaaactttaggttttttaaaagaatgctcgttttagaatacaccaagaggacactctgtgacaggacatatacaaacaaggataattaaaatattaaatactatctaaattaaaagaccataattcaaattgctaattataatatttgtgtcggtagaaataactatagttccccttcatgaaattcacccccacgttctcatgaagactatgacgtctcaccacaatttcagttatttaatttacaataatcaatgctgagttttctgtgctgaagcatgcactgttacagaaagcacaaaatcctatttacagggatttttagttttctttaaaatgtatctcaagcatcttttaaagtgcgagctacaaataggttgtatccttaatgaaaaaggcttctttctaaaagaagtatgagatagctatccaatactgcaggaacagttatataactaaccgaaggaaccagcagcactctgctaactctgttttagtgtagcaacctccttcttggtgttctactaccagccaaacatgtactccattgctttggatacaagactttcatctttttttggcgtttgtctgtcagaaataacctgataatcactagtagaggctttgtatgctgtagcaagaggtctcatggtagaaatcctaggagtacttccaggttgtgttggtgtacctagagttttgattggtggtgtaaaggctaaagatggagatgataaagcacatctgtcactgctttccataacacttttgtcaatacatggttttacaccaatcatgatggattctccaaaaatcctcccatctttgcttaaggctttccgagcctgcagtttagattgataacgaatatgcatccaatttcctgtattagacatcacatgttttaagatattcccatactgtgcaaattgtagtaatatgtaggaagcagatgcttgaggaaacccaaatacagtcacccaagagtcatcgaggtgatcttctgaagtcaaagaatctccttgagtataaaaaggatccaactgggcaggagataatgtcgtctttcgtggctgaccgatacttgctggactaaacatactttgccctgttccaggagtagatgtaactccaacaagaggactctgcattactgaaatgtttggctgtcttcttgaagttaaaggtgttgatccaagtcctgggctagaaatgtcatcatatatacttctaactggtggagcgccacttttatctttatgagctggtacaactggttgtggtggtgacccacctgcaagtaaaggtgatctcatttccattactcctactgaagggccactaattgatcgaggttgtggagtcaccggagctggcaaatcccccggccgtaatggccgaattcccgggcatatgtccggtaccgtcgactgnnnnnnnnnnnnnnnnnnnnnnnnnnnnnnnnnnncggnnnnnnnnnnnnnnnnnnnnnnnnnnnnnnnnnnnnnnnnnnnnnnaagagcgagcgccctatagtgagtctatacaattttctccctcc

SEQ ID NO: 136043 - DNA, 766 bp, Homo Sapiens
  misc_feature (722)..(722): n is a, c, g, or t
  misc_feature (732)..(732): n is a, c, g, or t
  misc_feature (744)..(744): n is a, c, g, or t
aatgggaaccagtctttcaaaatggtgcctgtgcagcagtattcactgtgataggaagtgagaagcagtctgagtgttcattgctgagggaatcaagggcaaaatatcatggatgcactcatggacaaataagcagcagtttgaagcaacaccctagatggatgtacagccatcaagaggatcttaaagtgtggtctttagtggaaaaaaagcagaagcaatgtatgggagactgagtaattacatatgagctcacatcactatctcttccaccactggtcatccatcatgactgatctgggagatgaaacagcacagatctaaaggaccgttggtaagaatccgagattcaccagagatcagtagatacttgcatacttggaggattaacactgtctggattccaacgatcagctgagtatgttcaagataaagctatagtacatattttagattgggaattggcaacaaatagctgtagactaccttctgaggaataagtgttttcacatgtgtggggtgtcatttctaatcccagcatcacagtcaggtccagatacctgtttctgatctttggtcctatgcctaatctcctccaagagtccttccctggatctcctatctaagcaagatgctcgatgcccaccaatgagtactgcaccaagttcatttccactagcctgtgttacaatttgtggtttctgtatgtttcccttacttgntattctttgncttccccattanactgaaagcaccgccacggggg

SEQ ID NO: 136044 - DNA, 631 bp, Homo Sapiens
tttttcttaaaatagtcaccagacggctttaacaaggaaagctcttctgatcttctaatattcaggattttgcagatatcactgacagctttaaaaaccacagctgagaagctgactcgcaacctcaccatcttcaaattcggcagacgaaggcgcacatttttatgctgaggggtgaagagaagctttgcatctgcctggaccccatatttgtccagggtccagtgggttttcaaaagccagcaatgcttctgttcccaccaaagagcaaagtctgaccagtcttgggatatattgatctgttctactaacttgagcatcactcctccaacgtgaaggtctccagatactctcagtgtgacgtctttctgctgctctttattgggatggtcaacgcggaccacaagctcccaggaagcaaatgtaaagtcagtggatgacagcattgtggcaaatgctggtgtctgctcctttccaggagcccgtagcgtccagcctcgcagtcgcgcacgtggagagctgcgtccctacaaactaccccgggccgagccgaggagcgggcgctggcgaagtggggagcggggggcgcccagtggcggcggctgctcagctaaggctgcggcaggtgagg

SEQ ID NO: 136045 - DNA, 495 bp, Homo Sapiens
gccgcaggtatccaagctagtggcggtcccagtgctatcctcgctgtgagtggagcaccggtcatccacagagtcaggaaaggtgaggcctggaagctggacacctgcgaggcccacatctgcctcgtgggataccgacagcaccttgatgctggcctctaatgcctctttctccttcagcaggcttttataggcacggaccacatccttgagccgtgcctggtactggagaagctgcttcttctgggtctctatagtctccagcaagtccttcttgctcgggccgcccccgaaattcatcccaaacttctccatggagggtctgaacggattgccccacgtcagctttccagcagaacgggagagggccgtgaagacggaggcgggggcttaaagaaacagcgagcgggctgtccggcggcgggccgcacacctactccacctagttatcccggacctaatgcggaacggccggacggactggcgaaagcggcc

SEQ ID NO: 136046 - DNA, 837 bp, Homo Sapiens
  misc_feature (698)..(698): n is a, c, g, or t
  misc_feature (772)..(772): n is a, c, g, or t
tttaagaagtttaaaggagtttattcaaaagttgaacatttttaaaatttcacaaaactaaccagcaaagacagtaagccaatcctccatttaccccctttctgtcttggttaagggcagagacacatgtcagagggagactgcgtcccatgtagggagctaatgtgttcactagctattgcttctcgcagggtcgcagcatctacactcacttgcctcatccacactgtcacgttcaaagacaagaaataatcctgaaagtagatcccaaggccagaatgcaaaggaatagccagaagcccagaccagatcagtgggctaagggtttgtcaaaggcagaatctggtgacagctagggtgaggggggctttgtcattggaagcgaatccatcgcccatcttcgttgtcatcacggtttatgttttccttggcccttaggatccagaagttgccacggctgctagttgcgtcatccagtggacacctttatatgtacaatttggatcctcaggatggaggagagtgtgtcttaatcaaaacccacaggtgaagagactgcttttcaaaagacagcctttcgagagctggtcgtgtagagttgtcccttcgccaagaacgacaagcttcagtgcccttgcattgatttgttcttcactggcagtctcagtggcaaacctctagtgggcaagtgctctgcnccgggctctgtgtcaggtgccctcagcatgtggtaatcatctggaaaagtgccaggattaataacacacaaganggtctccccctcagcctatgctcctaacacagccctgagctcacagtgggtgttcaaaaatattc

SEQ ID NO: 136047 - DNA, 1347 bp, Homo Sapiens
tcccgggatccggtttcagagtcctgggcagcgtgcgcgctcttcctggcggctgcgcaggtgtgaaaatcacaaatgtcaaatgatggaagatccaggaatcgggacaggcgctacgatgaggtcccaagcgacctgccctatcaagataccaccataagaacccacccaattcttcatgacagtgagcgggcagtgagcgctgatcccttgccaccaccccctctcccattacagccaccattcggcccagacttctactcaagtgacacagaagaaccagctatagcgccagatctcaaaccagtaaggcgctttgtccctgactcctggaagaactttttcagagggaagaaaaaggaccccgaatgggataagccggtgtctgatatcaggtacatctccgatggagtggagtgttcaccaccagcctctccagcaagaccaaaccaccgttcgcccctcaactcctgcaaagatccctacggagggtcagaaggaacctttagttcccggaaagaggctgacgcagtgtttccccgggatccctatggatctctagaccgacacacacaaacagttcgaacatacagtgagaaggtggaggagtataacctgagatactcctacatgaagtcgtgggcaggcctgctgagaatactgggtgtggtggagctgcttttggggggcggtgtctttgcttgtgtcacagcttacattcacaaggacagtgagtggtacaacttgtttggatattcacaaccgtatggcatgggaggcgttggtggattgggcagtatgtatgggggctattactacactggccctaagaccccttttgtactcgtggttgctggattagcttggatcaccaccattattattctggttcttggcatgtccatgtattaccggaccattcttctggactctaattggtggcccctaactgaatttggaattaacgttgccttgtttattttgtatatggccgcagccataagtctaatgtgaatgataccaacccgaggtggcctctgctactatccgttatttaatacaccagtgaatgcagtgttctgccgggtagaaggaggacagatagctgcaatgatcttcctgtttgtcaccatgatagtttatctcattagtgctttggtttgcctaaagttatggaggcatgaggcagctcggagacatagagaatatatggaacaacaggaggtaagtgatttcataatccctcatttgtgtgtgtatgtttgttttttctgttatttgctcccttgttaaaaaatgtatagcgctcaaaacagaaagctttcatagaaatcttttctttcttcc

SEQ ID NO: 136048 - DNA, 373 bp, Homo Sapiens
aacccttttataacaagcactcttagcaaactaggagaagaaggaaaatcctttaacctgatgagggagtctctcaaaagctaccagatgacatcctgctcgatggggagctgctgggcgttttcctcctgtgaccaggaaggggcgcctgccctcaccactgccacccagtctcattcaacacagagtttgtcccctgttagaaaccgagacgttggttacacgtggaggttgggagtggctcaggcaggcagaggggcttctgggaacctggccatgttccctttcagtctgggcgctacttagagcagggggcagttgcttcaataaaactttagattccacacaggccagcgtggtgtcaccctgtaat

SEQ ID NO: 136049 - DNA, 1208 bp, Homo Sapiens
  misc_feature (1133)..(1167): n is a, c, g, or t
tagtcccatgtccatagcgtgtttaaaatttggtgataatcccggtagatcccaattttgccagcgatccacaggcgtgccggaattgcccatgggaactgatgtttccacagagccttcatcactgaccttgtgtaggtatggcagctgtttgtaacttctcctggcttttgggattggacacctccgggctgctggttggcaggggtaagttgcaaagcaggcacgcgaagccattgtggggctctcaaagccctcatacaagagagagggttttcgaatccttttccctggtgctgctgcttcttggcccagccccagcaaccctgcattcccttccccagggagcttattgtggggagtcacgttttgcagcatcttgaccgcaaggaaccggcgctgccctcagccgcggaaagtccgggtggcctcggttcccctcaccgcccggtccagcataacccgctaagttggggggagccgttcctcttgggcctccaggcgacaaaccccctgcctggccggcacgaaagcagtctctttggggcctctcggagagctccgggcagcttggcgcgctctgcagacggcggacagcaagaaaatggcggcggcctcagctgaggcgggcaactaaggagggactgactcttcaaaagacggtccccgatctcagacaccgtcgtcaatatagcccgctgttggtctgcagggattccctcttcttgtcgggcccctacggggccgacgaggtcccgtttcgatctcggatggaggcggatgaacacgaaaagtggtttagggagccgccgcctccatctttgaaatcctcttgagggcggagtagagggggtggacagactccgaggattgggcggggcccgaaaaaggggagctccaggggcttctagggggtctgtactgcccgctgggaccagtcataggccgggacgaaggccatttccaagcggatggaggtggattgtaatggcggccccggacgactcgaaggctctgtatcggtaggcagaatcctccagctcgttctagaggctgctccactccagcacgaaatggcgccccccggccgtaatggccgaattcccgggcatatgtccggtaccgtcgactgnnnnnnnnnnnnnnnnnnnnnnnnnnnnnnnnnnncggccgcttcctcgctcataactcggtgcgctcgtcgtttt

SEQ ID NO: 136050 - DNA, 497 bp, Homo Sapiens
  misc_feature (36)..(36): n is a, c, g, or t
  misc_feature (41)..(41): n is a, c, g, or t
  misc_feature (44)..(44): n is a, c, g, or t
  misc_feature (305)..(305): n is a, c, g, or t
ttcggtaattaccgcgtgtttcccgagaccccaganggganganggctggtgaaacggcttccctctgcggtctttccacaggggcgcggatcctgaggccgagctctgccagcttccctccccacccccattcggcctgggtatggcggcgaggccccgcacagagggactcccacttcgactggagaggtgggggcgacgccagattccagaggctggcgccgcgtggtagggcggttgtcgcaggtctggccacaagtcggcgtggcagtcagctggaggctccgagagcggagattcccangtgcacccaccttacctcgcttacaccaaagcgccatctcgccgcccgggttgcgaaaaaccacgaccctcttaaacttacttgtaagcaaccactaattccccctgggaagcaagctagagaggggcacttggaaaccttcacgaagctcggtgcctgaaggtctctgaggctcttgccctcaagatctct

SEQ ID NO: 136051 - DNA, 622 bp, Homo Sapiens
atattagcagaataattttaatagtttatgttataatctctcattggaaggaatagaagcaagtacttagctttccacaattaagccttataatgatgccacaagaataaactaatccccaaagtcgagaatgtataattttcaaacacttttttaaaaagctggtgaataacaaagagctaggattaaataatttatttaaaaaaaacttttctcataaatctgtttcataagcatatataataacatcatatatattcttaattggagtagaaacgtttttaaaattactgtgaaaaacaagagtgagattccagaaaaaattgtgccctaaagaaatctggtttaggccaggtgcggtggctcacacctgcaatcccagcactttggtctgcaggtctgttgcacaggtcttctccacaatacccaggtctccttcagcaataacacgtctgactatcattcctgccttttgagcaatagaatatgcggaggctaccaaccgcatcaacacagtgttactggaagccatggtacactctggaacaacgttggaccaaagacacttcaggaggagcaaaagcgcgttatcgtagacccaggtccctcgttgtgtccagtc

SEQ ID NO: 136052 - DNA, 916 bp, Homo Sapiens
acaaaccccggggacttgcaaaaatacattaaggcagaaggcttttcccttcaaatcaagctgaaaaattcttattttccggctcctcttaactcgcagcacagcatcggggttcaatagcagccaacacagtccagtaacccaacttgttgctatgggatcgagtagttgtgataatgtgtttcccagcagggacttctttcagctgaaacccaaaggcgcctaaacctaaaactccccagattgtcctccccaacacagcatctggtcctgcctcatagttgtaatatggctggttaataactcctgttatgggttttctttcataagcaattccattaagaactgttacattgtcaagaagaccttcggtatattccttggttccatccagaggatcaacgcagaccacgagatcttcttctttaatagcactgtactgcgatgggcatggttgcttcagtatttcttcccactgactgtcttcaatcagctcttgatccacttcctcagaaggcagatcctcttcccctataattgtgagtttggggaatttccgggccaatgaagaacatatgctcatctgtgccaatcggtcagctttggtctgcaggtctgttgcacaggtcttctccacaatacccaggtctccttcagcaataacacgtctgactatcattcctgccttttgagcaatagaatatgcggaggctaccaaccgcatcaacacagtgttactggaagccatggtacactctggaacaacgttggaccaaagacacttcaggaggagcaaaagcgcgttatcgtagacccaggtccctcgttgtgtccagtaccgagctttggcactgtcaataagtcttttgagaaggatggcatccctacctcagctactgagcatgcgggaaacccc

SEQ ID NO: 136053 - DNA, 1190 bp, Homo Sapiens
  misc_feature (137)..(227): n is a, c, g, or t
  misc_feature (233)..(334): n is a, c, g, or t
ttcgtgtatgtcggagtgggccgcgtggttttgtccggctgttctatccgcggttgcctgggtggctggttcctcactcactgctggttcagcgttgcctgctgtagctcctgtattggttacagccggccccgtgnnnnnnnnnnnnnnnnnnnnnnnnnnnnnnnnnnnnnnnnnnnnnnnnnnnnnnnnnnnnnnnnnnnnnnnnnnnnnnnnnnnnnnnnnnnaacaannnnnnnnnnnnnnnnnnnnnnnnnnnnnnnnnnnnnnnnnnnnnnnnnnnnnnnnnnnnnnnnnnnnnnnnnnnnnnnnnnnnnnnnnnnnnnnnnnnnnnccaagattgagctccctcttgcaatgtttctcaaattcatcacgattggaacataccgacggaattcattttctgtctgaagcaatgagtgctatacatgaaagttttcctcacatataatattcatcaagtttatttacagtataagctttccgatgctaagggctgagatgtgattaaaggctttgccgtattcatcacattcaggaggctcctttctggaataaattctctgatgtctatgtgaactgtcccacgtatcacacgtcaacctctctatacatatttagcagtttcacttttatgcctttaatattaagtgctttacatatcaagatgtctcatagatcgataatctcaggttttagccttgcctgccaggctggagtagaaacaaataccccacaacctgaggattttacttctcttcctggcaagggtagggtatatattgaaaaactcttcaaaaatttccattaggacaactagcatgctaatggttaactgtagaatgtttcaactgttaacagacttcagcgggccaagaacttttgaatgactatcttgaacgccaattagatgttgcaagcgtttttgaccatgacccaattacactttgcactgagcatctgataaacgaatgcactgcaagtggttttaataaacagttgtagcctgttttcctcagaaaacacatcttcaaatagctgcttcaaggacagcatgtggctgaagatcgaagcaaccctagtggcagctatccaacaaagtcaggaagatgtctccatgaaacggaattaaatgtgagggcacaggtcacatttaaccttcatttaaaaacaaaactcaaaagtga

SEQ ID NO: 136054 - DNA, 549 bp, Homo Sapiens
gaaggaaacagatatccaatttttaattaattaaaactttacaatgtattacataatccatggaaggagagaaaggggatgaaactgaaggaaccaggactctggaggatgcaggatgctgtttctctggatgagatgtactctgccactgtgctctctgggcactttcagatgatggggtctgagatgtctcctcaggctgcatcagctgtcttcagtctccagaacagaaagagcctgacccaggggcatcttggtggccaccagaaccaggtttctgggagagagttcaggactgaagatgggcaggagctcagcatggaaaccctgttcctgaaggtacagcagccggtccagtagaataagcgtctccaccagtggggcaagcagtagagccaggctgaagaaggccaccacacggttctcctgggccaggtgggcctgaagggcagccagattcagtggcagctggggatctagccccactcgctgtagcccccgctgcacatattcttcaatcttgagctcgtggaccctggggataccctg

SEQ ID NO: 136055 - DNA, 1559 bp, Homo Sapiens
  misc_feature (13)..(13): n is a, c, g, or t
  misc_feature (130)..(189): n is a, c, g, or t
  misc_feature (1416)..(1416): n is a, c, g, or t
  misc_feature (1443)..(1443): n is a, c, g, or t
  misc_feature (1524)..(1525): n is a, c, g, or t
tacagggcagacnatacgggcgcgtgagcgaggccgggaggcgaaccggcacgagggcgggtagaacgcgccagaggcggcgcgcgcacacccgcaccgccccgaccccaggtaggaggccaggacccgnnnnnnnnnnnnnnnnnnnnnnnnnnnnnnnnnnnnnnnnnnnnnnnnnnnnnnnnnnnnatgcgctccccggtccctctagccccgtggtgtgtacaacgcgaaggtgtgggaatggccgcgataaaccggaactgcagcccgtcggtacacctccggcttcacttccgtaagaggagaggagtgtacggcaaggggcgggaactggaacttggaccgcctcgttgtgagctgagctcagcggcacgctttagtggcgtcactgcactgttaccccgaacctacgtgtctctgacgctgacaccattctcacatgtgaaacgtcgcagactgtgacgtctggggggcgcctcaaatcttccactccagcatcggatcccggaaaggcagacgtcggagaactggacccaaaactcttcctgttctgcctgcagagttgagccccgtccgggtcctggacccgcgtagtactgacccttggatccctgttcactgcgtttctcgctccccgcgctccctgctggaccccgggatgccgggcatctccgcccgaggcctctctcatgaggggaggaagcagctagctgttaacctcacccgtgtcctggcactctaccgttccatcttggatgcctacatcatcgaatttttcacagacaacctatgggacacactcccttgctcatggcaggaagcattggatggactgaaaccaccacagctggccacaatgctgctggggatgcctggggaaggggaggtcgtcaggtacaggtcagtgtggccactcaccctgctggccctgaagtccacggcgtgtgccctggcctttacccggatgcctggctttcagaccccctcagaattcctggagaaccccagccagagctcccgactaacagctccattccggaaacatgtcaggcccaagaagcagcatgagatccggaggctgggagagttggtgaagaagctgagtgatttcacaggctgcacccaggttgtagacgtgggctcaggccagggccatctctcccgcttcatggctcttgggcctggggttgatggtgaagagcatcgaaggggatcagagactggtgggagagagcccagcgcctgggaccaggagcttctgcaggctctgggagaaagagggagaagaggaacccgcaggtggtccaaaccagccctcgtcactccccacaccacgtggttagatatgtgcagcgggggctacagcgagtggggctagatccccagctgccactgaatctggctgcccttcangcccacctggcccaggagaaccgtgtnggtggcttcttcagcctggctctactgcttgccccactggtggagacgcttattctactggaccggctgctgtaccttcanngacagggtttccatgctgagctcctgccatcttc

SEQ ID NO: 136056 - DNA, 608 bp, Homo Sapiens
  misc_feature (482)..(500): n is a, c, g, or t
attatttcactgcctaaattccagaaagcaacaaaaaccaaatcacaattttcaagaacaaacaaatttagcaagactgcaaaatagacaaacagcaatagcaagactgcaaaatagacaaacagcaaggttatcccagtcagaacttcatagctatgtttgtggatatctgctaatcagcgtaacacaaatgtaagtgatcgtcagaaagaatcagacaggagcaatcagggtgttgcaagtcctgattacgcagagacgttaatcacgtttcatgcatctccaatcatcatgttctaatctgccctccggaggaggaacaggtaaggattatcccacctgacgatacaggcaaaccgccgacattctgcactcagtgaaaaagattccgttacaagctagggtgagttcataacgcgctggtatgagcaatcctattatttagcgtccttccagttgttttgccatattagctcgcacannnnnnnnnnnnnnnnnnncattcggctgccgaaaaggaataaattacttcttcccagaatgctccgatcagttacgtgccggacgttctaactgtacgcactttctatttacatatctccgcccac

SEQ ID NO: 136057 - DNA, 512 bp, Homo Sapiens
  misc_feature (497)..(497): n is a, c, g, or t
cagtttcacatggtacaaataagtaaaaccaaatgagcaaacacggtctttgtttctgattccttttaggggaattgcatgcaaactagactgaaatgatacaaacttccatctggtctgaccgcaaacagtgtttatttggggacaggggttgggatgggggtgtgggcaggggaaaacagagaacgggatgctttgaagataccatgaaataaaacccacagaggtatttgatgtatttaattgtgaaaggagactttgcagataaatgaggccagaatggcatgttttataattaactgaataaagaaggaagcattattatatattattgtggggaagaaccagccagttcgctttttctcctaaggtgtggaacttttattttgttttaaaaatatgaatcaaaattcctgtgttgtgtgccaaggtataaagtggagaagttagatgagtgcaaggagctcctttgtgttgtgatgatgtgttttaaaagntgcactatcttaatg

SEQ ID NO: 136058 - DNA, 670 bp, Homo Sapiens
agcctgacattcttctacacttgtattttggttagagaagtttaacaaggggtgatttcagaacagaccctgaaaatattttaaaggtaaagctttataatgtctaaacacatcaattagagcagttgtttattaaaatacaaacaagggagaaaccacaccatcttttaaaatacaggcgcgaattccacatcacgcagaagacaacgcatttcgctaagggccacagcattcactggttaataaagccacagctacaaagtaatgagatgtcccacatgaatactttttaaccacttacattcacgtcaacatataaataatggaattaagtaaaaacttcattataatgctattttgttagaaaagtatttgtaaagtggcatttttcccccaagagctgtttcacttaagctttatttcctcggcctggcaaggggagggcttttcagtattgttatttggtacacacttacctgaagaaataagtaagtaacttaaacataaaaaacatagtcgacacacatcttgccctgcattctgacatttgctggaatggtctacagcaggctacaatgctcccttctgaatggcaaatgtctgaaaatgtcagtttattaactgttcacaaaggcaggcatttgaccttgaaggtgttaaagggaatttt

SEQ ID NO: 136059 - DNA, 697 bp, Homo Sapiens
ttttacacaggaaacttgggctttattggttgggagagctctgccctcagtaggacacaagacatgccttccaaacaactaaaagcttcccttgaaggagtgaaatctgggtggggcctgcagctctcaaggcaaagctaaggcaggaagtttatatacagaacgtcagtgactctgatgggctgtgccaagctgctggcacagagatagagggccgagtcccccagcaacaaggcgttcacattcagctcagagctatagttagggaactggtgacctgagaatcgatcagggaagttgcctctctgtctctcttcctcctcataatactgaaagataaactggggcccctgacccagggccctgttggtaccaggacacagtgtcatgcccagacttaggagagcatctcagagtcacttgctgtcctctcgttttgatcaggtgtgtgggactttgggtgactccagtgtccactgagcctgctcccaggagacaaagcagtgcccagcagaggagcccggggcccatggcacagtggggcaggcagcactgcatctgattcagggcttggtcctcctggggaagagccgagtgaattctgggccttgattttcctaataggaggggtatcctgtgatgtcactgtcctgagtcctccccatgcagccttccttatgtccagtgctcagtggat

SEQ ID NO: 136060 - DNA, 833 bp, Homo Sapiens
  misc_feature (719)..(753): n is a, c, g, or t
gttctgatttgggattaatctgaggttctttgattccagaagacgtaggatagttttctgccgatctgttctcagattcacattgtgtttggcttaggtcatctgacacacaagactgtctcattccttctgcagcaggggattgaccagtttttggttttgtttaacagagttggcgtggacctggatgaaaatctgaaggaggacccctcctcacgacaccaggcaagtcaaagaaaccaatgcacattatatagagatatgattgttctgttccataggctgttccatgtttgtccagcatgtgaccaaggagctatttctaaacggagcttcctctgctgataaaacaaatgagattacaataaaatacaagggaattcagggtgttgataacttctagcatatgaatgcttagaactagcatgtacttgcaagcctctctatggcagcaggaagcctggaaactttacaaagtatatgatggctcttggaatgaggcacttcatagttcaaatccctacccagcaacttgctagctagccaactcagtgaaatttacacaaagtatgtccaatgcatgttgcacaaacaacaaattgacttatttctcctggatagcttctcatttatcaggtctaaggcccaaaaaacagtttaggtgatcccccggccgtaatggccgaattcccgggcatatgtccggtaccgtcgactgnnnnnnnnnnnnnnnnnnnnnnnnnnnnnnnnnnncggccgcttcctcgctcaataggctcgctgcgctcggtcgttcgaatgaagaggatgcgccatatgaggtagatacgttt

SEQ ID NO: 136061 - DNA, 831 bp, Homo Sapiens
tttatcaacttagtgtttttaatagccatactttaaaaatgctataagcttcacagcttagaaattattttaaataccaatcaaaggctatcctcaatcttctgaagctcaatttctgggtagcagttaagaacatgaaaggaatttgggaaataaagggaaaactatgtcatttctctcaaaagaataaaacactgtcacagtcagtagcaaaatgtgctatcctgattttcagggatttgaaaaagattcttttagaagtctttccaaagtcattccacgacaaatgtcaactttcttaagcagccccaatgtccaaccaagtgaaaattctttcttctttcattactaatgctttctcctaaagaccaacaaactaagtaccattttgttaggacattgttagtcctagtgtgtctctctcctctggtctctgtacaccaacagcctaggcaaacttacaatagacaggtgtacaccttagtacaggcagggttatgtaggtgacttgctcagtcacatgcaggcttcctgttctgagtcttatcactctagcagaccatttctttcctgggtaaccatatttcctctgagatagatattgagtcttcctggttctctgaacaggtatgactgcctctccataaaccagtatcatgaattctaacttggtctcctatttcattcttagctctgagtcacctcaaagcttggaagaatcaggaaagaccttcaccctgataatgaaagaaagccttctttactggcagatctatagaggtcagcccagttgttgctttatatctcatttttttaatgaatggatatgga

SEQ ID NO: 136062 - DNA, 759 bp, Homo Sapiens
ttgacttaaacaacagaaatttattttctcacaattctggaggccagaaacctgagatcaaattgtctgcagggttggtttctttgaagggctctctctgtggcttgcaggtggctgtcttctccctctgtgttcatatggtcttccctctgtgtgcatctgtgtcctaatctcttcttataaggacaccagttatactgtattactgcccaccctaatgacctcattttaacttaattacttcttcaaaggccctgtttccaaatacagtcacattctgaggtactaggcgtccatatatgcatggcggcggggcacaggaaggggacacagtccagcctataacactatttttagaaactagataaattatcactcacagcagatgaatcccatatgcttgctggcttgtttctgccccagcatttttcaaagtgttgtccaggaccacctgcaccaggactgaacagaacaggcaggaggtattttcttctgaagagctgtcaagagccaatacagcacctgaggtctttcatttcacacgttgttccttgagtcaccgtgagaactggaaagggaaacaggaagagtgcatgggaagggcgggagaagctgaaggagagattaacagaagccatttcctcctttccctgtcatgccagatcctctgtctgtgtgagtctccccaagcgctgcacacgggaaagcaccttccctcttgttcctcatgacttctgtctggaaacgagtaccgtgacg

SEQ ID NO: 136063 - DNA, 680 bp, Homo Sapiens
  misc_feature (467)..(528): n is a, c, g, or t
ttttaagagagttttcacctttaaaatttattacataagctatacacacaaaatgaaatcctagttataaaagatgcatctagaagaataatttataataaaccaacaaaaatgagaatgtgtatctccaggaatataaatatatttaaatgttctcagtgactggcattgctttatgcattacataagatagtatgtactaattaaggtattgaattcactgggttttagaaggctttaaaaaaaatccagataaatcaacaacaaaaatacagctcaactttgaactgcattaaaatccagaatctctcattttagatgaccgttccttattcccctcaaaaggtttccaacagaagctatttcacaaactgattattagaatgtcttctccccactctccccaaaagcaagtatgcatggaagtgcatgcttttaaccttaagaaatgtatttttggtaccatnnnnnnnnnnnnnnnnnnnnnnnnnnnnnnnnnnnnnnnnnnnnnnnnnnnnnnnnnnnnnnacctaaacagttttagaaagatatcaacagcttgcaaatataaaaaccttgtgctattaaaaggtgtttaacaaggtaattatatacacaacacatgtattaataactaccttgttaaacaccttttaataactaccttgttaaacaccttg

SEQ ID NO: 136064 - DNA, 732 bp, Homo Sapiens
  misc_feature (708)..(708): n is a, c, g, or t
ttcaaacagctttctgatttattaaatactgtcaaaatactcatgttagaaatatatggattatggcaaataaaataattcaaaaatcagtacattaacaaggatatcatcaaacttatgataacttaatgaattttaattctatactaagttatcaatttgtgtctttacagaaattgcttcagttttatggttaaaaaccttaataagagatgagcagtgaaaacaaaactatggtagcagtattatcagatgaacttttaaacgtttcattttctttgaaaagatgaccagcagaaagtcaaatctgaaaacctggggttatcctgaaagtcgaaggtaacatctcactacatgcttcagcagacgggcagaaggctctttggatagctgcaggaccatcttacccaagatcatggcaacatgggagaaacgctcatacgtctgacatatataagccaaaccagtgtcatctaacaagatcttctggaggatgaatgtggcaactgttttagaaagttcacttccagattccataattcgcaaacataaagggataatttctgttgttaataaaaagttgattacttcttggtcatctgttttcaccagggccccaataactccaaggctggtgagccggagatactcaaagggacgtgttttgctgacagtgtgcaaaaaggggtacaaaaaaagtggggatgngtgctgcgagaaacgctgacctgg

SEQ ID NO: 136065 - DNA, 1173 bp, Homo Sapiens
  misc_feature (1065)..(1099): n is a, c, g, or t
ggggaatacccccggggaattgggtgaccttggcccttctggcaggtttcttcccccagttgtgcaagcccagggttttcgtggggggtgtcatcttttagcccctggggcgaaggttgtgtctttcagctggtcagggaggcactgtctgagtgcttcacgtgccctggggttatctgaaagtcgaaggtaacatctcactacatgcttcagcagacgggcagaaggctctttggatagctgcaggaccatcttacccaagatcatggcaacatgggagaaacgctcatacgtctgacatatataagccaaaccagtgtcatctaacaagatcttctggaggatgaatgtggcaactgttttagaaagttcacttccagattccataattcgcaaacataaagggataatttctgttgttaataaaaagttgattacttcttgttcatctgttttcaccagggccccaataactccaaggctggtgagccggagatactcaaagggacgtgttttgctgacagtgtgcaaaaaggggtacaaaaaaagtgggatgtgtgctgcgagaaacgctgacctggtttctggatgtgatgctacacattgcagtaatgccagagcattgcaaactctgttagactggtgtgctgtcaaggtgggtgggttgatagatggataaatatttacaatttcctgtaaaagtgctgcaatagtaccaaatgaatgccacagcatgggtgcaaggtcaggaacagattctcgcttcttacttagctccagcaaagcattttccctagtctcaggactggacagctcattgatccactgatagatcttttctctatccacttgtgccagtgtagtaggcacaggcgcagccgtcgccaggctgtgcatgttgtgagcggccgccgctctcttccacagccggacgcgtccgacccgcgtccccccttcagcacccctgcagcggaaaataatgagccgccgtagccgccatccgactccggctcccccggccgtaatggccgaattcccgggcatatgtccggtaccgtcgactgnnnnnnnnnnnnnnnnnnnnnnnnnnnnnnnnnnncggccgcttcctcgctcactactcgctgcgctcgtcgttcgtgcgccgagtagcgcctatatgattacattctt

SEQ ID NO: 136066 - DNA, 2182 bp, Homo Sapiens
  misc_feature (329)..(338): n is a, c, g, or t
  misc_feature (1238)..(1238): n is a, c, g, or t
  misc_feature (2039)..(2039): n is a, c, g, or t
ggcgcgacaagggcgacggcgcctggtatagtggcgcgggtgggagaagccgcgcggcggcgcggtttgggttacacgccgccgcatagtcgtttctctagggatagtgcgaggttcgtccgcggggggggtgttcaaaacaaagtggcggcgggtggcacactcgagtagccgaggacaaaaagggtgttctttaaaaaatatcttttttcgcgggggtccagggggcgcgacccgaacgaagcaccgggggccctctagcgaaacacggtaggggggggcgataacgcgtagagcagacgtaatcggtgccccccaacgagggtaannnnnnnnnnaaaaggggcggtttaggggcgggaacgaggacggggggtgggggtgttgttttggaacacggggggtttaattatccaaactggggaagtacgcagggtaaggtgggaaacacgaaattgcaaaaagcttccgggtgggtccaatcttaaaagtttgatttcccccatttagaattccagcagggcaaattggtttcaaccaggcctttgttgctgggggggaaaatgaagtaaccctccgaaacgtgttggcagagcttcgtacaaagccttgtcactcccagaggagtttatgtttttcgaggatgtaggaaaagattttccaagtgtggagaactaaatatatacaaaagcaatacattttgttattagttaaataaaatgtgtctttaaatatggaattctttgaaaaactcacttcatcgtccaaaattatggagactatttcacttttttaatcaaagatggaatattcatcacagttccccaagggattttctaactggcctgggcaaggagttcacttgtagagtgtagttagtgaaaacatccagtggccaagcctcatcaataactgtatccaaaaggagacgctgcttggggtgtacccagagaaaacaccaagctttcctggcttcccggccctccctctccccattagtctttggggtgcatacataagtgttgtgtgaaagtctcttggggtttagaagatcttgcactcattgatggagaagagcctccttctgtttcgtctcctggcctggttgacggcagttcggacggcgcactcaaacacctgctgtactccccgattgctaagggctgagcactccaggtacccttggctctgacatcctgggccagtttcttcccttccatggcattgacgcagggagnctgtggggccccatctcccgctggtcagtctgggtggccaccaccagcacaggggtacagggcaagttgctcctaatttcaccaatccacttgttcttcaagttcaggaatgagttatggttggccacagagtagcacatcagcaccacgtctgcctgctggtaggacaggggccggatgcttctgaaggcgtcattgccggctgtgtcccagaggcccaggctgatctggatgccatccatgaagacgtccacccctgtgttctcgtacactgtgggcttgtaggcctccgggaaggtctcggaggtgaagcgcaccaacagagaggttttccccacagcagagtcgcccaccaacacgcacttgatggaactcagcatcttcccagcctgctgtcctactctgaagtccagaatcccagggaaaagagccctcagtgggcagctgcagcacacgccattcagcaaggggaatgcaagccaggtaggtctgtgtcctcaggacctctgacggcgatttgcagaatgttacttctccctgcccatccaagcaccgtctgctttgaaaacctccaaagcctagtcttcaactggtgtgtgaaggagaagtttccaaacagctctctgtcggcttctactccaagaagtggcaaaggccccgagagcgttctccacggcttcagtttctgatggatctggccatgttggaaactgttgcagaatgccgaagaaatgtcttgacagtaaaatgactgactccgggaaatcaaatttgttcaacaaaaggaggtgaaaacaaaangcggcccaagccttttcactgtggttgatttcctcataggatcaacctctcgcctcgttcccgagaatattaactgattcacactggaagaactgaaaatacaacagttgggctggcagggagtccaccccaagatggttggg

SEQ ID NO: 136067 - DNA, 469 bp, Homo Sapiens
tttgtgttccaataaaactttattaacagacaccaaaatttgaattttatataattttcacatgctacaaaatattattctccttttgattttttaaaaaccatttaataaggcaaaaaccattcttagcttgtgggccatacaaaacaggtggcaggccagattcgccctgcaggctataatctgccaacccttgccttaatctcatgggacctacatactaaagagggaaaagaagaaaataaacaagaaaacaaatacatgaacagatagataattttgtgctatgaggaaataaaatagtaagctggtcagagaatgtgtctctgagggaccggggaaggtggacctgaatgatgacaaggagccagccatgaggaaagttgagtgcagagtattctagaaagagagaagaccaagggcaaatgtgggaggcatgcaccagtatggtgaattagaggaaccaaaa

SEQ ID NO: 136068 - DNA, 1200 bp, Homo Sapiens
  misc_feature (1045)..(1102): n is a, c, g, or t
cttcttagataatatatattaaaaaataaacctccaattcagggtataaaaacagagcgaaggcacttgggggtgggggtggaggggtggccccccacaggcaatactgagatggcccgggtcaccgtggtgccctccagaatggagccctgagtcccccaagcagagggcaggagggagagatggccgaggctcatgcggggccagtaaccccagctgggcccctcccaggcgtggcccacagctccctctcctcaggccctcggggtgtgagatgctgcggcagctgtgtgggtgggggtggtccctcacgtcctctcccccattcctctccttcttgcaaaaggccttcctgggcgggaacctcaagtgcagccaggctgggggacagagttccccccaagctgagacaggaggggtctcaggcggcaaaattcctcctccaactcctccagctgcttcatggtctcctccaagctgagcaggttctcctggatttcctgggtccgtgctgggctcagggggccgccccctgggaccccatccccatctcgaggaggccccgccccattgtcttcctccgccggaaacagaagctgcttcagggacagcactttccgaagggccgtggcagcgagctggccctcggggcctggtctgcagaagggcaggaggtcactgaggattctctcggtccgggcatcagctggagacgtctctcggccaccattgccgttctcagagctgctgaggaggggttctcgggtgctgctcgggctgggccggggcttagggcgagaggcaggggcagggactttcagggatccggcagtctcagtgatgagagcacaccagtttttccgctccgacacagtctgtgccaccagctcgtatatctgggcctcctggtcccaggtaaaaaggacgtagaaggctttgtgatcggtggccacctcgcgggtcatggcggaggtgagccgcagcacgggccgcagcatggtcttgccatcgggcgtgggcgtcagtgtccggctatgggacttgnnnnnnnnnnnnnnnnnnnnnnnnnnnnnnnnnnnnnnnnnnnnnnnnnnnnnnnnnncatgcacctccactgccttgtccttagtcacccgccacgtcagtgggccctcgtggaccaatttcttcttgcctcgtgccgaattcgccacccaggcc

SEQ ID NO: 136069 - DNA, 1256 bp, Homo Sapiens
aggggcggaagagtatgaagtcgacggcgcgccgaattcggcacgaggggattttgagaacgagctggagacaaactcagaagagcaaaacagccagttccagagcctggagcaggtgaagcggcgcccagcccacctcatggccctcctgcagcacgtggccctgcagtttgagccaggacccctgctttgctgtctgcatgccgacatgctgggctcactgggccccaaggaggccaagaaggccttcctggacttctaccacagcttcctggagaagacagcggttctccgggtgccggtccctcccaacgtcgcctttgaacttgaccgcactagggctgacctcatctccgaggatgtccagcggcggttcgtgcaggaggtggtgcaaagccagcaggtagccgtgggccggcagctggaggacttccgttccaagcggctcatgggcatgacgccctgggagcaggagctggcccagctggaggcttgggttgggcgggaccgagccagctacgaggcccgggagcggcacgtggcggagcggctgctcatgcacctggaggagatgcaacataccatctctaccgacgaagaaaagagtgctgccgtggtcaacgccattggcctgtacatgcgccaccttggggtgcggaccaagagtggagacaagaagtcggggaggaacttcttccggaaaaaggtgatggggaaccggcggtcggacgagcctgccaagaccaagaaggggctgagcagcatcctggatgccgcccgctggaaccggggagagccccaggttccagattttcgacacctcaaagcagaggttgatgccgagaagccaggtgctacagaccggaagggaggcgtggggatgccctctcgggaccggaatatcggggctcctgggcaggacacccctggagtctctctgcaccctctgtccctggacagcccagaccgggaaccaggtgctgacgcccccctggagctgggggactcatccccgcagggcccaatgagcctggagtccttggcgcccccagagagtaccgacgagggggccgaaaccgagagccccgagcctggagatgagggggagccggggcggtcgggactggagcttgaaccagaagagcctctcggctggcgggaactcgtctccccagacaccctgcacagcctgcccaagagccaggtgaagcggcaggaggtcatcagcgagctgctggtgacagaggcggcccacg

SEQ ID NO: 136070 - DNA, 781 bp, Homo Sapiens
tcggggttgccgcatgtacaggccaatgccgttgaccccggcagcactctttcttcgtccgttagagatggtattttgcatctcccgccaggtgcatgagcagccgctccgccacgtgccgctcccgggcctcgtagctggctcggtcccgcccaacccaagcctccagctgggccagctcctgctcccagggcgtcatgcccatgagccgcttggaacggaagtcctcccagctgccggcccacggctacctgctggctttgcaccacctcctgcacgaaccgccgctggacatcctcggagatgaggtcagccctagtgcggtcaagttcaaaggcgacgttgggagggaccggcacccggagaaccgctgtcttctccaggaagctgtggtagaagtccaggaaggccttcttggcctccttggggcccagtgagcccagcatgtcggcatgcagacagcaaagcaggggtcctggctcaaactgcagggccacgtgctgcaggagggccatgaggtgggctgggcgccgcttcacctgctccaggctctggaactggctgttttgctcttctgagtttgtctccagctcgttctcaaaatcctcatcctcagccccgatgatgctgacgggaaccaggccaggccgggaggggcctggggaggccgcccctcgggcgaagtcttccatctcactgggctctgcagggctggtgtccgcgcggaggtgaccggcggggcgcccgaggtcgggctcggcgatcccgggcctgggtcccg

SEQ ID NO: 136071 - DNA, 1317 bp, Homo Sapiens
  misc_feature (131)..(131): n is a, c, g, or t
ggggcttagggcgaaaaggcaggggcagggactttcagggatcccggcagtttcagtgatgagagcacaccagtttttcccgctccgacacagtctgtgccaccagctcgtatatctgggcctcctggtcnccaggtaaaaaggacgtagaaggctttgtgatcggtggccacctcgcgggtcatggcggaggtgagccgcagcacgggccgcagcatggtcttgccatcgggcgtgggcgtcagtgtccggctatgggacttgagcagcagtcgctcgtcctggcgctggagcagcagcagcaggtcgtccagcagcagcacatgcacctccactgccttgtccttagtcacccgccacgtcagtgggccctcgtggaccaatttcttcttggtgatgtccaggttcttgaactcgctcagcatagggtcgctgctctgccgaaggtgggacaagtccaggcgccgctgatagtccttgagcctcagcaggtcctccatgtcacgcacggcttggttgacgtggtgtagaatttcccggcagcactcggctgccagctccactttctcccgttctgtgggctcttctgtgttctgcccgatgctctgcaggagcagggggtacttggtcagccgctgcatctccgtggggatcatgtccttcagctgcaggcggcggcaccgcgggcggctctcagcttcctgcacgaaggcacagaaccgagggtccttgcgttgcttggctttgagctgctctaaggcaaatgactggcggctgcagaagcgggaggagattttctggaaccaggagccctcagcaccatcaaaccgggccagcagcacgtctccgatctcctcgatgaggtagccactctcctgcctccgcttcatcaggcgatcgaggaacagggaatgcacctcgatgagctcgtccaggctggggaagatgttctgcagctcctccaaggggaagaacaggcattctgccatgggctggaagaagaggtcgtgcagcacccgcagcatgcgcacgtgggccgcctctgtcaccagcagctcgctgatgacctcctgccgcttcacctggctcttgggcaggctgtgcagggtgtctggggggacgagttcccgccagccgggaggctcttctggttcaagctccagtcccgaccgccccggctccccctcatctccaggctcggggctgtggacagaggccttgttagggccccagcttgggccatcccaagaagcagccttcagcctcttagagcgttcaaccccggtcagtgtcctgctccacgggatctctagacta

SEQ ID NO: 136072 - DNA, 417 bp, Homo Sapiens
  misc_feature (324)..(324): n is a, c, g, or t
gccagttgataaaacttttaattaagacacaatagcgcgggatataaaaacacaagaaccacataaatatcgaagaagttgtataccattttcatgtaaacagttttgcttacgagcaaagccctaattagattctggcctgaaacttttggcagatgacgcgtgttcagccaggctctgtagcgatggtgacgtggaagccaggtcagtccccatgttgacaagcatgcaacttgaaaacattgcacaacaagcaacacaaagagtggagaagctcacaacacttcaaggagacctcacaaccttcacaactgcgtaagccangagacccacgctccctcctttccacgcactgtcttacacatgggagaccttctgtgactctctagcttgtttgatgtatataccattgatgat

SEQ ID NO: 136073 - DNA, 425 bp, Homo Sapiens
  misc_feature (182)..(191): n is a, c, g, or t
  misc_feature (350)..(350): n is a, c, g, or t
  misc_feature (369)..(369): n is a, c, g, or t
aattaggagtcttgcttttcttctgtagaacaatcctatatttctctatagagtctaaagtttagaaaaatacctcacaatgctttctttgagcactaagttcaatgatggtgataatacaatttggacagtctaagtattcttgaaactttacccaaagtggcacacaaaataatcttacnnnnnnnnnncaaagacagaacaatttcacagcacactcaatttgaagatagacattatatttgaattcggaagtgaggcttgacttactctgtccaaattctaatgcatcacagtcattggtgtgaagctaataatgaaagaagcaagaggaggctttcatttctatnggaggacaaattgacatanaagccagattagtcttttcttcctgaactaagaactgcttttgttagaaaacaaaa

SEQ ID NO: 136074 - DNA, 679 bp, Homo Sapiens
  misc_feature (364)..(364): n is a, c, g, or t
  misc_feature (533)..(533): n is a, c, g, or t
gatattctccaggcagtgttcagctgtgtgggcaccaggaagaaaagctgcagcatggattcacaagggccaaggttttacacagcaagtaccactggactttagaaaagggggcaagccagggagatgagggtgttttcaaagggatgattatttaagcctggcagaatatttatcaaatgcatgatctgctcctagtgaatgtattttagtaaagcacacatttcccaggtctgtgtatctacatatttctgtatacattcttatagatacggtttaatgccatggtttcattcaggcttattttctaaagccttttggtttgggtttttgggaagcctactctatttcccccccctggaanctaatgagcgagcaagcaagaggttctgtaagcaaaagtaaaagctgcagactttgttatggttggacctgtgtgtggaaattctgtgaattgtgttctgtcagcatcctgctcacggaataggctatgtaaacaacgggcgctgggagggtctgtgaatgagcagccntccttcccactcacagacttaaccactgcaattctccaggtttctgagtgtttatttcatagtaaaaagggctctaaaaataccagggcagttaggtttttattgtagatcatttcacttaaactgcaatgggacatataaatttt

SEQ ID NO: 136075 - DNA, 590 bp, Homo Sapiens
tgtaactgtaacctaaatgtattacttctgataaaactatatatcaaatgtcactgcaaattagttttatatctgtcatgtgagatttgtcttacttatttttcttttggttgccatggaagttatggccctgaaaatcgtctccctccccttctcttgctgtacagcatgcgttctctttttgtggttgctggctgggtactgtatttaatgaagtagagaatagcacttgcaaaaatacagtcttggtacctagagactgtcatgcagatagtataatttggtatatgtgctaatgcattgagtagaggattattttaacacactattttgcttttgtattttagttaaaataatcgatggggatgtgtagcccccccgtgtgaggatgacatcaccacatttctagtttcatggagctcaagatgtcttgtgtctgtgtggctagatggcctctgcttggtaatcttatttttaggcctaaaattcccacttaaatccaaagtaaaaatggttatactgaagcataaaccttgcctgtgtaattttaaaaaattaatagagctgtgcaaaccctgttatttttgtaa

SEQ ID NO: 136076 - DNA, 161 bp, Homo Sapiens
aaaaagcattaactcccaaacaaacaggcaaaatatccacattttataaaaaagaattaatacaactaataagcaaatagagtgggaactatcccagcccttcttagtgatgaggaaatatgaattaaagactgtagggttccgctgggcgttggttgtca

SEQ ID NO: 136077 - DNA, 722 bp, Homo Sapiens
gcggccgcggcgcttccgatcgcgacgcggcttctggcccggaggcgccgatgcagccgggcttccccgagaacctgagcaagctgaagagcctcctgacccagctccgcgccgaggacttgaacatcgccccgcgcaaggccacactgcagccgctgccgcccaacctgccgccagtcacctacatgcacatctacgagacggacggcttcagcctgggcgtgttcctgctcaagagcggcacgtccatcccgctgcacgaccacccgggcatgcacggcatgctcaaggtgctgtacggcaccgtgcgcatcagctgcatggacaagctagacgcgggcggcgggcaacggccgcgggccttgccgcccgagcagcagttcgagccgccgctgcagccccgggagcgagaagccgtgcggccgggcgtgctgcgttcgcgggccgagtacaccgaggccagcggcccctgcatcctcacaccgcaccgggacaacctgcaccagatcgacgccgtggaagggcctgccgccttcctggacatcctggccccgccctacgacccggacgatggccgggactgccactattaccgggtgctggagccggtcaggcccaaggaggcctccagctcggcctgtgacctgcctcgagaggtgtggctcctggagaccccacaggccgatgacttctggtgcgagggagaaccctatccaggtccc

SEQ ID NO: 136078 - DNA, 831 bp, Homo Sapiens
  misc_feature (709)..(709): n is a, c, g, or t
  misc_feature (716)..(716): n is a, c, g, or t
tttgaatttctctctttattaagtctacccccagccacggaaagaggagtagaccatgattactgtgaacccccccttaccccaggacactgtgaatctcttcttgcctgtgccctccccctccccctgcccaataaataaaaaggggacaaggaagtacacagcgagggaagggaggagtgtgcacccaggacagtgtctgtgtagagggtgagctgggcgagaataaatagaccatggaccccatggtggggataaggaaggacctcgcattggccaaggcaggggcaggcgaggcgctgagtgcccttgcccaaggccaggagcagagggtgggagcccgcctgcagctggagcctagctttgcggggcaggggaagatccctgatggcagcttcctggtcaagcttgcccttgtcaagtcctgccacgaggggctgagcattctgttgccaagaccaccattgcctctcctcgtctccccccagtgaaagctgggctgggcagggagtcctcagaagccactctggcaaggccaggggtaggtgtgtttctctctgggcccctggacaggagaagggatagagggactgacagctctgggtttagcttttccccttctgaggtgctgtctagctctgacccccactggcggccacctggggtgtaagccgcttgagggggcctccttggccccctgggtcccctngtaagcncgtagccgcagctcctccagaccttgccataactcctgacgctcctgggccttctgctgctcctgctgcttttccagcttgtaggaggctgtgagctcatcaaacagcttcccat

SEQ ID NO: 136079 - DNA, 649 bp, Homo Sapiens
acagcaccttgttcactgatagtgttttttttaataggacataaaggttatagaatgtttatataggtttttaagtaatagtggtatctttcaaatattgccgaatgttatttcaataactacctctcaagttctgtttttaaataaatgaatttcttttaatcaaagattaaaattaattgactcctgacttgactataggaagttttatgtcacacagaaattttcactacaatatttgttatcatggaaccttacctgtgtgagatgtagataaatcaaaagaaaaacataaagtttactagaaagaaaatgctataattgtgtccccctagaaattcagatgttgaagtcctaagccccagtagctcagaatgtgactgtatttggagataggacctctgaaaagttacctaagttaaagtggggtctttaagatgaacgttaatccaatatgactggtgtccttagaagaagagatgaggacacagaaaacacagggcaacggccatattaagacacagtgacaaagcagccatctacaaggcaagaaaagaagcctcagaagaaaccaaccctgccaacaccttgatctagcccccggccgtaatggccgaattcccgggcatatgtccggtaccgtcgactg

SEQ ID NO: 136080 - DNA, 508 bp, Homo Sapiens
cctttaagaacctttgggaaaaaggactttggtttctcaaagtgttggtttcctcattcaagtcctcctctggggacgagtttagagttgtctgttcctagagagagacaagcacctgtgggttgactacagtccctttgcgtgagtcttttgtcatcgggggtttcaagtcaacaataaaatccttatcacccctccccccaagagttttggttcagtttttgtcttcttttaaacacaatgtacaaaaatagagcttcttccttatttttcatgtaaaaatattcctctgatgcagttttctgggagtgtgagtgtggccagggcgacctgaggggccgcggcggggtggcctaggcagggtgtgtgggccggatccgacgggacctcttggtcaccgtcgtgtacttgaagggcttctgaagctccggctgccccttggggtagcgcttcatgaaatgcacgtcctgctggttctcccgggtcttggggcccttccgcggccgca

SEQ ID NO: 136081 - DNA, 156 bp, Homo Sapiens
ctttttcggggcaaatacactttattcagtcctggcatcagactggcggagtcctgctgtgggtgccagtgccccagacagagggaccccacccctcagctacgagactagttctccaagaccacagacagtgacatctcttcactcacatcgacg

SEQ ID NO: 136082 - DNA, 462 bp, Homo Sapiens
  misc_feature (19)..(19): n is a, c, g, or t
  misc_feature (26)..(26): n is a, c, g, or t
  misc_feature (146)..(206): n is a, c, g, or t
cacggaacgttgggcagancctgcangacctgggcagggtccggagactctggaccgtttgttcctgaatttgtgtgtgtgaatgagatgtgtgagccacccgggaggtgaacacacgccggtgagatacaggtagtgagggcaannnnnnnnnnnnnnnnnnnnnnnnnnnnnnnnnnnnnnnnnnnnnnnnnnnnnnnnnnnnncacagcaacagggacagggctcccgagggcaccctgaactggacacaacttcctcctaacagcagcgttctccccatttctcacgtggaaaaaccgaggtgcaaacggcccatcactactcggaatccattctcagtctcactggccaagtcgatggtctctcccaaaccagatgtttaaaagcgagagtcttcctgccatcacatctgctctccacgcctcagtcccaaacccctacaccaaagtgcctcagttt

SEQ ID NO: 136083 - DNA, 245 bp, Homo Sapiens
tagagcgcaagaaaggcccagagccggagcaccaagcttaaaggaggcagctggtggctttgtcagcgacgggaacgcgtggggcagagacctgcagagaccctgggcaggggtccggaggactctgggaccgtttgttcctgagatttgtgtgtgtgaatgagagtgtgtgagccacccgggagggtgaacacacgccggtgagatacaggtagtgagggcaaggggggtgtggggcggccgca

SEQ ID NO: 136084 - DNA, 1016 bp, Homo Sapiens
  misc_feature (194)..(218): n is a, c, g, or t
  misc_feature (745)..(745): n is a, c, g, or t
tttccccttagtgcaaacaaacatttattgtgaaatattcatcctaccctttattaggtattacatcatcaaagcactttgtggcaatgaaaatagctttttttacccctctaattcacccaatattccattaaagctgcaaaaaatgtgcaatctgcttgaaaaataggttgctcttatttactcatttgtgnnnnnnnnnnnnnnnnnnnnnnnnntgatactagcatacagggcctctagagccaattcacctttccatttcccaactactccccaaaataattaacaaagataatttgttttaaatgcctttttataaaaccaatgcacctttccccatattataatcatacaaattttaaaaagccgttatttactttcttggaaaaaaggtggccagccgttgttttttgattgggagcatgtgtatttcctgggagttcactttctttaactttatgctccggtttttgatgggtttcctaaggggctctgcatttcccatggactcttccccttggctgttgatgtcatagccctgaagcacggagtcttctcttttgaaggagaagtttttggtggacacccctgagaggcctttgatcttgccacagaatatggtaggcacagcatcttcgacagagacaatgaccttggccgcctgggactcgcccaccatctcaatgttattttcagccttgacttcgccgctggggtggttgggctggctgagcatctcggntacgcatcactgctgctgatgtgactatccatcatggctggggcctcatgggacgtggcaggggcaaaagaaatttccatgccactgggaagtttctccatcactgtgtgacctgagctgtccactgatgcaccactgtcatacagtgtctcagggggaggctcggatttccggtgggctgccactgacaggtctagggctgcatcttcctggaagattgggggactgacttcaccagccttgagccagggcactgacttcatggagagat

SEQ ID NO: 136085 - DNA, 405 bp, Homo Sapiens
  misc_feature (251)..(346): n is a, c, g, or t
ttcaaaatgtaaataaattgatatcttttcataaactttttataaatatagacattctattttttactacaagttttccacacacacagctcaggagtgaaataactagatttaaaatggtggcaggtcacacccttcttcaaatcattagctgtgtcagatcgccctgatatttctcctcgtggtacttaacacattttacaatgagataattctgggtttattccatatcctgtgtttgtctttgattnnnnnnnnnnnnnnnnnnnnnnnnnnnnnnnnnnnnnnnnnnnnnnnnnnnnnnnnnnnnnnnnnnnnnnnnnnnnnnnnnnnnnnnnnnnnnnnntgctaaagggaattactgagtgaataaacccatacacactggcatttttggtgctggcc

SEQ ID NO: 136086 - DNA, 1124 bp, Homo Sapiens
gggaggagaaaggggtttttttgggacagctgaaggcggcgtgtttattcaggcttccaatgtaagtgaactctcgattacagtaagggcagatgtgagaggatgactcacaagcatttttcaagtcggccttctgctttgcagatttgtttttctgaagaattgctttctgtactagctgatttttttcttcaatgcatttaatttgagcttattcgacgacattttgctgagctcaacactaaagttaagccttttgggctgtcccattcgtcggaaggcatttttcccagagttatctaaaaccaccacgccatttttgggttgcacagtttgttttaatggtactgggtttttcttaggcgtgtacctcttcttgtcacttgcagaagcacaagccaggatatgtttgtgcaactccggcatattgtcgacaccttttccacactttgtgcagcgaatggcggtagtgaaagtctgtggaatattgtgtgtagtgaaatttgtggctgtcacaccaatccccatggggttacggtgatggtactgaaatggaggtggtttaaagcttgggtaatgctgattgaggcccaatcgaacatctggatcttttgtctttattccagaagccattatttttatagtcgtgtaaagctcttcagaggaatcatttaactcctcttcttctttagaagtttctaaaggatcttctggcaagctctgcatatgctctacatgggccttgctgggatctgtaaagttctggggcctcagagtcccgctttcaaactcgtgatgtgtgcacaccttatctgggtggagatctcgctggtgctgctgcaaattgcacaaaaaagcaaattcttttttacaaacagaacacacaaagatattcccaactccatgaagcaaaaagcgatgttctgacaagtccgttttatccttaaaaagctgcacacaaaattcacatttgaagggccattcttcagcatgaatagataaatgtttggttaggtctttaatggaaagaaaaggtgattcacagacgttgcaaacaaagtttttgttgaatgtttcctgaacaacaacatcctgttcagcagcagactggggctcttccctcc

SEQ ID NO: 136087 - DNA, 539 bp, Homo Sapiens
  misc_feature (408)..(408): n is a, c, g, or t
cagttgtttttatacttctttttcaagtgaaaggtaaaaacactggtttattctcttctgaacaaggtgagcatctttacatgttaaaggtcatttacatttctttttgtatgaagtattcttaattattggaatcctgtcaatacattgtttgccttgggttatggtggggtttttcttgtcctataaacatttttatgtagttaaaattgatcaatagttttatttatttcttctaggttttaagtcacatataatgtcgttttcctccattttcttctaagtatttgtatgctttactttttacaattagatcgtcaggcggcttggaatatatctatatgcctattttcagttatcttagtatcattaaaaaccccatctttacccccacttttaccatattcntgtaactttccatatgcattgtgtctgctattctgttcatgtgtcaaccccaattacagaggcataatgtgtttcagtatttacttatagctatcctatacataaactgtttctgtattttaaatcctaaa

SEQ ID NO: 136088 - DNA, 736 bp, Homo Sapiens
gtgccgttcgtttggctccagtcctgggatagatgacacttattcgctttttcaactctgactgctggactacatcgcaaagactctgctttcagcggcccactgtgaatgccgccctccacagtggccctgcaactgtttgagtgcaatggttctttcgatccagggacatctgccagcacacattatctcccacggcctggatcatctgttgcagatcatccactccagtcccagatgctgcagggataggaacagccccatccaggtgggcgtcctctttcagccttgtttccttcaaaaagactgacatcctgcttggcactcctcttcttcccaatgtgtctgcagatactctttaacattttcttcgatgtaaggaaataaaatgtccttcacgaaagcaatcggggttgtggtaccttcgatatctaacaggatcacggtgacttcggcggggaccgaaagcacgaccatttccctaccggatgctacgggactcggcctgctgttggggagggcggagggcggcgccggctgcggctgcggcccccggtaccgtcttgggcttccgcggccccgcgcgatctcggagccagcgaccaagtgcagcccgccgcgcgtggggagaggacacttctgcacacctggaactggaaaagcgccgcccaggagcctgaactcggagcagacgggcagcctcgaccgaattcaaacccagcctcgtacctagcca

SEQ ID NO: 136089 - DNA, 746 bp, Homo Sapiens
  misc_feature (598)..(607): n is a, c, g, or t
  misc_feature (731)..(731): n is a, c, g, or t
tgacagcagcacccagcctccaaattttaaatgagccccttgtgagaaggaaaagaatctgctgtccacagaagcccaggcgtggagctacttcaaccagaaactgtcacccatgacactctgtgtgggttcagtcacacagaccacgatccattatggaagggagggagaaaaggatcacatcaaatctactgtatgcctcatagaccatcccttatttcaaaaatagaaattcctatttaaatgccgcccgtgtgcgacaggcctgatatttgcttctgcatgtggcagatctgttattgcttacactgtggcctcctggcctgtgctgctcagctggccctgttagagaacatgggaaccacatcaaaatcctaagtcacaaaacaagggctctgtccccagtctcggccaggggcccacatgcccacctccacagcccagtcaagtgtggggataaggcactcctctgtgctctgagctaagatatggtagagtcccttctgaattttgagttgcaaagaatgattttgtgctaataaattcccagtgcatccaaaatgtacaaaaaccctagaatttccagtttttagattgnnnnnnnnnntttttttctgtagatccagaagaaactttcattgaaactttaaagacctcacctgcacctgctctagtaatgcactagttactaatatacaaacgtaaatctttgatgagtatggtcgggaaanaactgtctgtccttg

SEQ ID NO: 136090 - DNA, 597 bp, Homo Sapiens
ccgcgcccggcctgtcctggcccacttctagctagttatatatgcttgggtgagtcacgccctcctctgtcagttttccttaatgaggggattgactcgtttagcaacttacaagtgttttctcccactgaagagcaagctggaccaatacgttctgcagctaaaatcaaacaagggtctctccctagacccttgtaaaataacaacagcaataataattaatgtacagaagtttcacaatgtaagttctccccccataaatatctccaaatcagtggtacctgctaccctgtatattagactataatacaaatggagtctgagtctgaaaacaactcatatctaataaatttaagattaagcgatatatatgctattctgcagtaaggaacgtggctttcagatgtttttccacctgaagaattctgagagacatggggccaggtggacaccaaggctcttgcagtgtgaagtctgattcctctctgggttttcagggaactacggatgcaggtgcaaggacacagcttccaggagttggggcagtcacgttcccactgactttaacattcctggtgactcagggaatgcggccgc

SEQ ID NO: 136091 - DNA, 717 bp, Homo Sapiens
attccccaagccccttgtttcatggaccccggggtttttccttgggaaaaccaggtttatgagccccttgttcactttaccccttctggggcccccggggcccccaaaagaatggtttttgaaaagctttttgaggggcccgaggcggcccgacaaggttttgtttgtgttttgggggggttgttgcttgttttggattcattcagcatttattgtagcaaagagtgggtagggacaggagctctaggactggccagtgggtgttctagaggccagctggggttggaagacaatggtctggacacttcactgggtggcaggctgtgttccaagttccacgaaatagctcaagaagttaaccagttccgttccagccttcttgatcaggggtgtcagctgctcctttgacttttcaaagtaagacttggcctcggcctgaagctctgggctcttgaccttctccatcaggtccttgccatagtcagtcacggtctggaagtactgagaaaccaggctctccacacatggctcctttgcctgtctccgaaccaaagctccttcaaggctgcagatggtgaggagtagcacagttgctgcgagcagcttcatgttggtaacagtggggagggcggcctagccagcgtctctgtccttggtgtctgtgcctcccggccgtaatggccgaattcccgggcatatgtccggtaccgtcgactg

SEQ ID NO: 136092 - DNA, 447 bp, Homo Sapiens
  misc_feature (433)..(433): n is a, c, g, or t
tttatagtaagcactgatgtgtttattcgatgaaataggggtgggggtgtagcagccctagtcccacattgcatgggctggtgactgagttaacagcaaagtgggatgcaaaaggttcctgattggagacccccggattcgggttctggatttgctggccacttactctatgacttggggcatgtcactgtcatggcctcagtttccccttctgcacagtgtgcttattggatagttccagctctgacatgctaggattatgtgatactgtcaatcaagactagggttggcctaagcacatggtgctgaaaacacctcgggctcatggacatattttctccgcatggggagtgggcagctgctgagtggcaaggctgccctccaaagctgtccatgccacgcccggggtgctgtgggtctcctttccctcgtngccgaattcttggg

SEQ ID NO: 136093 - DNA, 332 bp, Homo Sapiens
tcatttcctgggtactgggttgctcagcactggcctctcaagttgctaactttttgaaatcctgaggtatagaattctttgttctattcctggtctagctggtataactcagcccatgcaaactgtcctggcccttcagtctttttcatgctccataactttcacaagatgctgtacacctgctacagacattggtctctaaggagttattctctagtgaatctctttctcccactcaactccatgtggggatatctgacccttctatcagtacaacgataagactcagattgggtcttttgtttgtttgtttgttttgagacagagtcttg

SEQ ID NO: 136094 - DNA, 457 bp, Homo Sapiens
  misc_feature (386)..(386): n is a, c, g, or t
  misc_feature (398)..(398): n is a, c, g, or t
  misc_feature (406)..(406): n is a, c, g, or t
  misc_feature (411)..(411): n is a, c, g, or t
catttccaaaatattttatgagcttggacagcgagtgcttattcttatccctctaacaggatgcaccagtgtctcttgttcccgcttttgttggtttccttaacaatggttttacatttacatcagtcactctgctaatgatatatttttcgaataaataatacatcataagaacaaaaccaaaccaaaacgaacatgcctaagagggagatcaatgtaaagtgtcccaagcctctcccccagccacccaggcaaagctgttacctggcttatttaggtttaaaatccactttattgaggtctaatgtacctagaacaaaagtgtacagttcgatgagtcttgacacttgggatgtgcaccccccataacagccaccataatccangataccaaaacnttttacgncaccntcaaaatggcttcccttctcccccttctttaggctaatccccactc

SEQ ID NO: 136095 - DNA, 897 bp, Homo Sapiens
  misc_feature (136)..(136): n is a, c, g, or t
  misc_feature (622)..(622): n is a, c, g, or t
  misc_feature (657)..(657): n is a, c, g, or t
  misc_feature (757)..(757): n is a, c, g, or t
  misc_feature (842)..(842): n is a, c, g, or t
  misc_feature (850)..(851): n is a, c, g, or t
  misc_feature (856)..(857): n is a, c, g, or t
  misc_feature (869)..(869): n is a, c, g, or t
acactcaaaacctttattcattgatttacaaactgtacaatatttacaaagtttaggcattaatcccatattgacatgaatgctgtggagagtctaaaaataaatatgtggcacatagcttaatatacacatcatnggctctttacacttaagccattaccaatagtgagatgtaatcggagaatttaatgtggtagaaaagtcagagtggctgaccagtcccggaccttccatgtgaatgactcttccttggctccttgaggctggggatagtgagcaaataactttctttcaagagaattaaacactgccattctgacaggcacatgggacgcatgcagcaacatctatgcagagtctgcaagcactccctgggtggtggttgaatctgcaccactgtggacctgatccctgtacaccagccagggaggctttggtgtggtcactttcttgtttcttattcaatcacatgcagtacttggaagatgtcagtggagtgtaatcatgcacaaaaatggtacttgtaggtatgtacaacatcaaactttcattgtcttatagcatctttagatgcaacatcaactatctcctcttttagcaagagggatgaatgaggaagccnaaacccctactccccaaagaaaaaacatcacctgngtgacacatgcaaatagcattctgcaacagcagggtgagataaactccacatgataagatggatgaattcccgcagaaaacgtgaaaaagggctggtggngtgggtgattgggagatggccaagtcccaatagcccctcatctccatcaaagaagggctgaccttttgcagcaaaagggcccaanggtgaagnnttggnnactttgttgggncccccagccaacctgggttggccccacc

SEQ ID NO: 136096 - DNA, 718 bp, Homo Sapiens
ttaatgttagctcccctttccccatttcataaagaatcatatacccccctctcactcttcctaagaaagcatatgaaagttctagatataaaaatcttaaagttttatttcccctaacattatttgatcataaagttccctggtcagtagaacataagactttttcaagttatccatgaagtaaagtggttcagaaattttcagtggattaaatccatcttccaccaactcgatgcttcaatagtttgaatgttcctgttgcttccattttttcctgaattcttaaaaatcgtggacaagcataagctggtagaaatgttacaacttgttcataaactttttccaaatctaaagatgtatttggttttaaaataatagaagccattcctgctcttccttcataacctgatatagccacaccatagacgtttgcttcctgtatgaaatccaacattccaataacatcagcaacctcagtggttgcgacattttctcctttccatctgaaagtgtctccagtacggtcccaaaaataaaggaaattgtcctgatcctggactattaagtctccagtattaaggtaaacatctcccttcttaaaaacatcacaaagcaatttgtcttttgtgtgcttataaggcccagcatagccaaagaagggattttttgcattcactcgagaaatgagaagtccaggttctccttttttcacatgaat

SEQ ID NO: 136097 - DNA, 664 bp, Homo Sapiens
  misc_feature (481)..(481): n is a, c, g, or t
atggtaggagatgaagttttttgtcttttattatgtttttcctggtacacaactgttttcacattctgccactaacagcccatctgatctcaattccttctgtattttacaaggatgaagtggccccaagccttcccactccatttctttccttcctctccactagtctaaggaacagagttcacactgttattaccaagagttctgtggtttagatatttctgttctctaggcctactcccactttcatccacagttggcatttctactgctgcctggaaggacatcatagttgctatcaaggctggttttacaaatccacagagcagggtattcaaaaaatgcccatgacattttgggtgaataaactattatcacagctcccaggagaagaaaattatcatgaagctccttacccctctcatacacaggctcagtctctttatgagtattcctgctgagctgttcttgcagaccctcngtatgtattccaaaattcttcatcttgggatacgcccactggttgggactctgttggcttcagcccgaaacttgaggcctctgctgtttctcccaagagcactgcctcctttcccagctcatggactgcaacctagaaataattcccatccttgttaccacgagaacttacttttggtttgtg

SEQ ID NO: 136098 - DNA, 272 bp, Homo Sapiens
  misc_feature (240)..(240): n is a, c, g, or t
aaaggccctttgtccaaagtcaggatcagaaataggtcagctcatcatgcttggctttgttggtctggtagttagataaggtcaagggcttgttttcatgagggagagattggaacactcgcaggtgtacgaagtcctctcgccgacgtgcaccttgatgaagtagtttgttttctttctcttcaagctgggacctcacctggtcggcgatgtgctgggtcgtggcggtggccgggcatngtgcggaggcgccccgcacatcatctttggcg

SEQ ID NO: 136099 - DNA, 582 bp, Homo Sapiens
ttttaaggattttaaaaatatatctattttgaaaatattctgaaagtaattaagatcacctattgggaaggaaagaaatcaacacaatgaaatttaggaagagaaatgcaaaagcagctgcagaatcctgccccttccaccccaaggggcacagcccggagatgaagcttattttaggatcacaagtgcacgctctggtagacggaggatgactttgtcagtcttctggctgaagggccttgtccaaagtcaggatcagaaataggtcagctcatcatgcttggctttgttggtctggtagttagataaggtcaagggcttgttttcatgagggagagattggaacactcgcaggtgtacgaagtcctcgtcgccgacgtgcacctgggaagagagcggagtgagcgaagcctctgatcccaagtcaccttgctgcgcccctccaggtcattagcagccagctgaagacaatcttgtgttctcctgcatgtgcaggggatgcctcacatcccacactttgttccttggggttcttagctccccagaagccctagtcctcctgaaaggcgatggcacacacag

SEQ ID NO: 136100 - DNA, 884 bp, Homo Sapiens
  misc_feature (91)..(154): n is a, c, g, or t
  misc_feature (215)..(215): n is a, c, g, or t
ggatttactcacactcttttattttatgggagaaactgaagcttggggccaggacctaagagtcaaagcaccaacatgtaaagagtggtgnnnnnnnnnnnnnnnnnnnnnnnnnnnnnnnnnnnnnnnnnnnnnnnnnnnnnnnnnnnnnnnngccaggcagtctctccgccctccatgcccccgaggggaaggacctgcccggggtggttcanacgaagaaaaaagtctaaaacaaaggaggcaatctgtaaggattttaaaaatatatctattttgaaaatattctgaaagtaattaagatcacctattgggaaggaaagaaatcaacacaatgaaatttaggaagagaaatgcaaaagcagctgcagaatcctgccccttccaccccaaggggcacagcccggagatgaagcttattttaggatcacaagtgcacgctctggtagacggaggatgactttgtcagtcttctggctgaagggccttgtccaaagtcaggatcagaaataggtcagctcatcatgcttggctttgttggtctggtagttagataaggtcaagggcttgttttcatgagggagagattggaacactcgcaggtgtacgaagtcctcgtcgccgacgtgcaccttgatgaagtagtttgtccccgcgaccacctggctcttgaatgacacggccttaaacacagggaacttcttgttttctttctcttcaagctgggacctcacctggtcggcgatgtgctgggtctcggcggtggccggctgcgtggcggagggcgccccgcacatcatcttggcggcgacggagggaatctggcgaggggactcggcgaggggacgcggcggctactcatgtcaagtaggcgcgtgggtcac

SEQ ID NO: 136101 - DNA, 555 bp, Homo Sapiens
  misc_feature (327)..(327): n is a, c, g, or t
  misc_feature (337)..(337): n is a, c, g, or t
gcgattgggacccttttctggtaacatcttcctggtgaccatgaagggacaatactgaagagacccctgaccctaaggaaatagactgcagcaccaatgggccaactttggggcgatcatcttgcccagaaacatcatgttgaaactcttggtcagaggttggatgaaagctgacagggtccatccaggagcaagtttgagccttgccagttccattttgggtgctgagtggagtggcgactatagcaaacctgtgatctctggctgctgctcagaagaaacaagacgggagggatgaataatgtaaaactctggatcaagtattcntaattctgangcctcttattcggaatcagctagcaaccacatatcagcttggtttcaacagtttcccagttcatgctgctgagaagttcagagtcaaacctgaatctcacctctgcaaagagcacaggactccatggcaaacgttgtatatacgcaagtcatccctggcaccacattgatttactgcaccaggctttcttcattgtgatgatgttctctctcttttct

SEQ ID NO: 136102 - DNA, 482 bp, Homo Sapiens
ttttgatggctgttgcttgttttattttttgtccaagagaggtggtgttggaccgaggtagagaagacagtggtacaccagaaataacccaaaggattgccccttctgtagaaggcccttagactccatgatgcctttcagctgggtgctatacttgcacctaactctgggggcttcactttctatccctacaattactcaaacagataaaaggctggatgttaacatgtagttataaggggcgtgatctaatagtaaggaatatcacttcccacaagtccttcaaacaagatttgtgaggagctggatttgtcagcatgtcagatctttttgaaaaccagagagtagaatgtaagcaatacccttgtcgtaattaaagaccagactccatccttataccactgatgcctctggtaccttaatccttaaaatatttagtgacccttgccttctaattcttgacacaaatatataatgaccat

SEQ ID NO: 136103 - DNA, 689 bp, Homo Sapiens
ttttttcgagaaaagcaaaacttttaatagttttacaaaaataatcctctttatgaacatgctgacatcttagatatgatcatgtatcatgtatggtggaaaaattcctatacaacttcataaacgcaggaagcatcagggactaaaataacacaatctcagattaggggacttcacgcccatccttcccatacccatcaccaataaagacatttaggagttcagcaacaacaatgacagttgggcagatttgacacaggaaaatgtctaaaccttccatcacctagcaggataattctgaaaattcattgtgcagataagacaggtaacttttaaaaaatgcttatttctgaacactgcactgagggtagacccccaaaatcagtttcaagagtgtgagataagaggcctacaaatcactctgtcctttacaaactccctgctcattctctgcatttgcctaggatattcactctatatggaatatctttttcctagctgattctacctgttcaaattttaccgactacctgaagccatttttgattactctgttatttgcctcatctaaactctcggatcatttattctatgatatgcagtttagcactttataacatgtggtagtcttatgccagtctaattattgtcaaagatgtcaatcctttgttctaactcacataggagac

SEQ ID NO: 136104 - DNA, 752 bp, Homo Sapiens
  misc_feature (78)..(115): n is a, c, g, or t
  misc_feature (259)..(268): n is a, c, g, or t
  misc_feature (684)..(707): n is a, c, g, or t
catcttttattagacattttaataccatatcaaaacaccttgactaatgaagaaagcttttctcccaagctttgaacnnnnnnnnnnnnnnnnnnnnnnnnnnnnnnnnnnnnnnaatatataaatacagaaacctatcttgcatgggctgatgccacgtgtgaacatcaatggctaaaatgttctcaaacatagtgcctgaaaacaggggtagctgtacatatttcttagtaagtctttttttgtttaagttttctgnnnnnnnnnntccacgagggcctaagaataatgttcaggcatttttgcaggacacttgtgattgttaaatcctctgaactgaccggaaccaggaggaaagaagggaaaagagatgggatcagtaggaagaaagttctcaatgggttgttttttggcaatgaagtcaagatattagggtctcaaggggagaaaagagcaaaaaaccagccagacaaatagagggaaaaaaccaaacaaacccaaagtagagaagttggtggtggagagggccagttggggcaggggaagagaccgtgtgctcgcccgccgtcagaaggctggcagcgaggccttagctgtgttcgtctgtcactgagtgggttatggctgggcagcaaacagcaagctgtaaacatcacgagggaaaacaccagtcgacactagacnnnnnnnnnnnnnnnnnnnnnnnngtaaccactttaaagacagacccacaatgccattaaaagatgaaa

SEQ ID NO: 136105 - DNA, 482 bp, Homo Sapiens
  misc_feature (182)..(228): n is a, c, g, or t
gtctagtgtcgactggtgttttccctcgtgatgtttacagcttgctgtttgctgcccagccataacccactcagtgacagacgaacacagctaaggcctcgctgccagccttctgacggcgggcgagcacacggtctcttcccctgccccaactggccctctccaccaccaacttctctacnnnnnnnnnnnnnnnnnnnnnnnnnnnnnnnnnnnnnnnnnnnnnnngctcttttctccccttgagaccctaatatcttgacttcattgccaaaaaacaacccattgagaactttcttcctactgatcccatctcttttcccttctttcctcctggttccggtcagttcagaggatttaacaatcacaagtgtcctgcaaaaatgcctgaacattattcttaggccctcgtggatttttttttttcagaaaacttaaacaaaaaaagacttactaagaaatatgtacagctacccctgttt

SEQ ID NO: 136106 - DNA, 261 bp, Homo Sapiens
tgagccaccacctacagcctggccaagaacccttttctctcccacattcccctgggagcagaggataggcctgatgattgttttaaacagtagaaagggttcagctaagaactacagtccactctcagccctgtcatgtactataggacaagtcttcattcacaacaaatggatagcaacaccaatctcgtaacactgggaaaactgcatacaatatttagaaggaacactaatacagcagaaatcttgcacacaacgggg

SEQ ID NO: 136107 - DNA, 1053 bp, Homo Sapiens
  misc_feature (1028)..(1028): n is a, c, g, or t
tcatttcttcctcacccgccaccagggagaacccttggcgtagctccccgcgccccgatgactctgattagggtcaaagtcctgcagcccaagcccctgagagattttgattccatccatccccatcgataaacggcttaaaggtcctcccgagtcgtctttaatgctggtcatgcttccgggatgaggaaatgtaagcaatcccatctgtctcctcggaaggaaggtcggcgtcctcgttcttgtcgtctactggaggctcttgggaaggcatgacagaatccatatgcttcctgcaggtcagcgggacgaggccgtggcagcgcttatggaccagcagtttgcagttgatgcacctgtagcctttcctcgcgaggccccatatcctctcgctgcactgaccgcagtacgctctcctgttaaagcgcttggcttggaagaggtggccgttggcacggtacagcttcctccatcttctggctccccggcggtagatagatttgtcttctcccggaccatggcaggccaggctgctcaggggtgctcgggaaaacatgaatgatgaggccttcatccctgcactgacgggccaggcggaaagcctcttccagctccatctgggaggacaccgtgcaagggtcaccttcgctgtccacccacttgagggtgagcgggtgctgctggtgcagacgacacatgtctctcacttcctcacagagctcctcgaaggtcgtggcggcgtccacgctggtgatgaagatgtcccccccgtaatgcgccttgaggcggacgcggccgccgctcccttccatcttggggccggtcctgctgggcatggcgcgctccccccgccgccgtcagcgctgcgccccgggagctccggccatggcgcggggcgggggctccaggtggggccgcggcggaacgcggaaggcagcgctcaggaccgacggcgccgaggcagtcaactccgcggaaccctcgtttggaatcgccacccaggctcgctacctttgaccgttacgganaaagttgcacgagagaagtaaaaaa

SEQ ID NO: 136108 - DNA, 1212 bp, Homo Sapiens
ctcagctgctggctacagcttcccgggggagccgggtaccacccgggcctggagacatgaggaggcagggatgtgaggggcgggggacaggacagccggccttccgttaaatatctgctcctcgcgctcgagcctccctgcctattgtcggggccggaggcgagccgacgcagcatcagctcgtcaacgggaaggaagatgcctccctgcacgcccgccgcgcacagagcataaagaatctgcgctgaggaggcaggagaagaaagccgaatctatctaccgccggggagccagaagatggaggaagctgtaccgtgccaacggccacctcttccaagccaagcgctttaacaggagagcgtactgcggtcagtgcagcgagaggatatggggcctcgcgaggcaaggctacaggtgcatcaactgcaaactgctggtccataagcgctgccacggcctcgtcccgctgacctgcaggaagcatatggattctgtcatgccttcccaagagcctccagtagacgacaagaacgaggacgccgaccttccttccgaggagacagatggaattgcttacatttcctcatcccggaagcatgacagcattaaagacgactcggaggaccttaagccagttatcgatgggatggatggaatcaaaatctctcaggggcttgggctgcaggactttgacctaatcagagtcatcgggcgcgggagctacgccaaggttctcctggtgcggttgaagaagaatgaccaaatttacgccatgaaagtggtgaagaaagagctggtgcatgatgacgaggatattgactgggtacagacagagaagcacgtgtttgagcaggcatccagcaaccccttcctggtcggattacactcctgcttccagacgacaagtcggttgtacctggtcatgagtacgtcaacggcggggacctgaatgttccacaatgcacgaggcagaggaagctccctgaggagcacgccaaggttctacgcggcgagaatctgcatcgccctcaactgcctgcacgagaagcggggaacatctaacagggcccctgaacgctgggacaaaggtccttcatggaatgcggaccgagccacatcacagctccacagaatacggcatgggccaaggacagtgctgggccctgggtgaacaaacgaagcagtactggggaacgccgaatcactcggcca

SEQ ID NO: 136109 - DNA, 1209 bp, Homo Sapiens
  misc_feature (41)..(75): n is a, c, g, or t
  misc_feature (126)..(163): n is a, c, g, or t
  misc_feature (183)..(475): n is a, c, g, or t
taacgacgagcgcagcgagtatttgagcgaggaagcggcgnnnnnnnnnnnnnnnnnnnnnnnnnnnnnnnnnnncagtcgacggtaccggacatatgcccgggaattcggccattacggccgggnnnnnnnnnnnnnnnnnnnnnnnnnnnnnnnnnnnnnntgagccaccgcgcccggccnnnnnnnnnnnnnnnnnnnnnnnnnnnnnnnnnnnnnnnnnnnnnnnnnnnnnnnnnnnnnnnnnnnnnnnnnnnnnnnnnnnnnnnnnnnnnnnnnnnnnnnnnnnnnnnnnnnnnnnnnnnnnnnnnnnnnnnnnnnnnnnnnnnnnnnnnnnnnnnnnnnnnnnnnnnnnnnnnnnnnnnnnnnnnnnnnnnnnnnnnnnnnnnnnnnnnnnnnnnnnnnnnnnnnnnnnnnnnnnnnnnnnnnnnnnnnnnnnnnnnnnnnnnnnnnnnnnnnnnnnnnnnnnnnnnnngtacatgtatagtgtctatttgaacattactgataatgttgaacaacttttcatgtttattagttattaggtttcttcaagtgttcttattcatacaaattttaacaatatgtacacaagttctttgttatatattttgcaaatatcttctgtggcttgtcttttcactattttagttctgtcttctgatacacaggagctttaaatttttatgtcaaatctatcagctttctctttttgatctatgtgtagatgtcttatttgagaaatccttctataccccaagatcatgaggatgtttcctgtgttctcttctgaaagctatatagtctttgtcatttaggtttatctttatacgtggtatgaagtgtaaagttctacttttaattttttgcatattttattaggataggatgggctttttctgtagtaataatccctaaatctcaggggcttaatatataaaattgtctcatgcaaaaaaccactgggtctagggcaattgctatctactgccgtctaatctccctctagtggcttccattggtagaccctaacaggaagccagctgataagggaatctgggaaatgtagtttacagagtggcagctacagtagaacagtagagactacaaggatgagcttgcagctgagaatagaaacgtgactggcacactaggtggtttgtttgtaggttttttcttttcctgtttgagacttttttggattcttga

SEQ ID NO: 136110 - DNA, 853 bp, Homo Sapiens
  misc_feature (221)..(221): n is a, c, g, or t
  misc_feature (225)..(225): n is a, c, g, or t
  misc_feature (235)..(235): n is a, c, g, or t
  misc_feature (246)..(246): n is a, c, g, or t
catgatttgcttattgctttattcagaagagaccccccggagtacagcttctttggttaagcacggagttgaggtggaggagagcagtagaaggctggaaatctgctggatgtctcattctgggtgggtatagaagggctcctgcctggcctctaggatgggtgagggatgctttctgcatggccaaggaacttggttagggtagggagggagggtatganatanggaaattcancactgggtggnagggtttccagggaaaaaggggactcacaacgatgggtgctccctctgcacgttttattggaatagtactgatgcttgtaattgtaggtcatgttggtactagcaaaacatgtgacaacagccttatcacactcacacagttgacttctgcaggagtcctgttttgcacaggtgattctgctccccgagttgctaaacttgtagctcagaaatttggtgccacatccacgtttctccagacgtttgtagcaacagtcatgagtgacacagcagcgatccgttgcatccttgggggatcctctgccacccacgccacagtggcagccatagaagccataactgagtgcggcttcctttcctgtcgtcaacttgatcattctgtggaaattcaccaaattcccatgggcctgcagtaggccaaagatcatgatcactgccaacagtaggagggtcttcatggtaagagttcttgggtgacaaatgcagatggactggcctagctcctctgctgggtggtctcaacttctgccccggccgtcgctcccctgctcctccttggtggctctctcagaggactccagagttgtatccccacctgtgccgaaat

SEQ ID NO: 136111 - DNA, 737 bp, Homo Sapiens
tttgatttgctaattgctttattcagaagagaccccccggagtacagcttctttggttaagcacggagttgaggtggaggagagcagtagaaggctggaaatctgctggatgtctcattctgggtgggtatagaagggctcctgcctggcctctaggatgggtgagggatgctttctgcatggccaaggaacttggttagggtagggagggagggtatgagagagggaaattcagcactgggtggaaggtttccagggaagaggggactcagcaacgaggggtgctccctctgcagtgtttattggaatagtactggtactttttattgtaggtcgtcttgtttctagcaaaacaggtggcagcagccttatcacactcacacagttgacttctgcaggagtcctgttttgcacaggtgattctgctccccgagttgctaaacttgtagctcagaaatttggtgccacatcccacgtttctccagacgtttgtagcaacagtcatgagtgacacagcagcgatccgttgcatccttgggggatcctctgccacccacgccacagtggcagccgtagaagccataactgagtgcggcttcctttcctgtggtcaacttgatcattcaaagatcatgatcactgccaacagtaggagggtcttcatggtaagagttcttgggtgacaaatgcagatggactggcctagctcctctgctgggtggtctcaacttctgccc

SEQ ID NO: 136112 - DNA, 1578 bp, Homo Sapiens
ttttgagttgtcatgctttatcttttatttaacaaatacacatgcatatctatatatgcaaattagatgtctaaatctatattcgttttctgtggcaaccataacaaatgaccaccagctggatggcctccaacagcagaaacattttcttgcccagttctggaggccagaagtccgaaaggtgatgaagggccagttccttctggagactctgacggagggtgtgttccaggttcttcccactcccagggttgccagcatccttggcattccccggcttgtaaaggcatttctccaatgtctgcctccaccatcacttggccttctgtttgtgcctccctccgtgccctttctctgtgcccatctctaccattttctaaattattttctttgcccatctttgtctaagctggataaaaagccaggacaacaggcatgttttctttcctagaatgtatggtcacccaagctctgctgtccccctgggtttcagttatttatcactagccagcagctctggcatattcatggcagctggtactcggccttctaattggacccttccctcttccacctgtttttggggactacactttgcaaaggagagtggcaaccatccatgtggcaagccccaagccccctttcctgactacttaactttgaggatgtaaacacagaggtcaggtgactcgggggagtcgtggtcacttggcgagggggcttggatttgaacctgggcatttaccttcagaatctgagtttgtatctatggtgctctagtgcctctaccctagttctaaatgccctgtgtttagaatgtgttcaggctgctctgatcagattaagagcactgctgaacacacttttccttcaatgcttttcactgctgtagggctcttacctactcccctggagaggaccacctaggttgtctccagtgctaggcttcccagacccccatgctgatgagtatcctcatacacaggacctccagggaaacaccccaggtgcacaggctcagagcacaaggttgcaggatattcctataattaacttctccaagcacaaagtgtgctccttctgtgaattcctgaagccgtgcaggctcctacttctaagctacacaacggcaaaccagaaggtgcttcgaggagctgtcatcgtgaagtgaccggctgatgggactgtgtactggaaaggaatctgcaaacggtttcatgctggacaaatgtgtgggccactcacattgttgctgaacagcaggatctgtctttagggtgaagtgtgggcaatttccattgaggggatgtacctgccaccgtctggtttgtggaggagagagtgcccctggaatccaacccacaggcaggagcctaggaccaaaatcaagcaagctcttctggcctgttagtatgcaggtcgagggaggggccttgattcacactggctcagtgctctcaccaccgggccctaatgcacaggctgaggcaagggcagcagggctcggattcttaaatccttgtggactctgagcacacaatccactctccacaagcaagcatagcggacttcctcagc

SEQ ID NO: 136113 - DNA, 980 bp, Homo Sapiens
  misc_feature (100)..(121): n is a, c, g, or t
  misc_feature (682)..(933): n is a, c, g, or t
tttgatattttaaagaaattatctttatttttatttgtgcatctagacatgccaatggctacttaggccacattttgagcaaaactcacaaggtagttcnnnnnnnnnnnnnnnnnnnnnncaaacctcacatgtgtatacaaaatgacacagtttaaaggatttgtttaaaagaacaaagcatgagaaatacagtgagatacaagctcataaccaaacctaaataagtaagcagatctgattcaacacgagaaaagattacaaaacaagacctagttttgtaggaagcactatctgaagacaaagttgcaggacacgctgcaagtccctttgcggggagccataagcagggagaaataacctggtttctacttagcctagcagggagttatgggtaggtcagggtttcctaaataaggtcctgacaattcatcactgttattaaaaggaagagcagatttttcctatcaggcctggcagtgatatgtattctctctctgtcttaatttaatcttaactttaccgtcagcttacgtacacacagtcctttgattcctttcttctcaagcaatgaaagaattaaacctggcaagtcaactattgatggtccatggacaaggagaacaagattgtaaagaaaaaatctgtggatgatccaatagctgtgggattttttgtttgnnnnnnnnnnnnnnnnnnnnnnnnnnnnnnnnnnnnnnnnnnnnnnnnnnnnnnnnnnnnnnnnnnnnnnnnnnnnnnnnnnnnnnnnnnnnnnnnnnnnnnnnnnnnnnnnnnnnnnnnnnnnnnnnnnnnnnnnnnnnnnnnnnnnnnnnnnnnnnnnnnnnnnnnnnnnnnnnnnnnnnnnnnnnnnnnnnnnnnnnnnnnnnnnnnnnnnnnnnnnnnnnnnnnnnnnnnnnnnnnnnnnnnnnnnnnggacgcgtgggtcgacgatatcccgggaattccggaccggtaccagc

SEQ ID NO: 136114 - DNA, 443 bp, Homo Sapiens
  misc_feature (104)..(227): n is a, c, g, or t
  misc_feature (379)..(379): n is a, c, g, or t
tacaacagcctgttttgtttttaaacatcataaaatgtttagaaatataatttctcctatgtaatgaaactaatacactgaattttataggtaaaagagaatgnnnnnnnnnnnnnnnnnnnnnnnnnnnnnnnnnnnnnnnnnnnnnnnnnnnnnnnnnnnnnnnnnnnnnnnnnnnnnnnnnnnnnnnnnnnnnnnnnnnnnnnnnnnnnnnnnnnnnnnnnnnncccacctaggtctcccaaatggtgagactgcaggcgtgaggcaccaccgtctggccccaatttgctttaaaaatagttggatcctcaggctatttgtgaaacaccgggtaagaagtaagaaccgtctgaaagttttttaatcctttaccttnggaaactttgcagttgatcaggtctgcgtaccctcctgaagccctaaagaagttctactcaagg

SEQ ID NO: 136115 - DNA, 964 bp, Homo Sapiens
  misc_feature (839)..(864): n is a, c, g, or t
ttttgtttggattctttttgtcgtcattgctggtgactcatgcctttttttaacgggaaaaacaagttcattatattcatattttttatttgtattttcaagactttaaacatttatgtttaaaagtaagaagaaaaataatattcagaactgattcctgaaataatgcaagcttataatgtatcccgataactttgtgatgtttcgggaagatttttttctatagtgaactctgtgggcgtctcccagtattaccctggatgataggaattgactccggcgtgcacacacgtacacacccacacacatctatctatacataattgctgaagccaaacttgtcttgcagatgtagaaattgttgctttgtttctctgataaaactggttttagacaaaaaatagggatgatcactcttagaccatgctaatgttactagagaagaagccttcttttctttcttctatgtgaaacttgaaatgaggaaaagcaattctagtgtaaatcatgcaagcgctctaattcctataaatacgaaactcgagaagattcaatcactgtatagaatggtaaaataccaactcatttcttatatcatattgttaaataaactgtgtgcaacagacaaaaagggtggtccttcttgaattcatgtacatggtattaacacttagtgttcggggttttttgttatgaaaatgctgttttcaacattgtatttggactatgcatgtgttttttccccattgtatataaagtaccgcttaaaattgatataaattactgaggtttttaacatgtattctgttctttaagatccctgtaagaatgtttaaggnnnnnnnnnnnnnnnnnnnnnnnnnngagtctgttctttgtaagacatggttctggatgttcgctcatagcggagaggctggggctgcggtagtggttgtggcgagagtgggtggtggctgggaac

SEQ ID NO: 136116 - DNA, 717 bp, Homo Sapiens
  misc_feature (603)..(637): n is a, c, g, or t
ttccctattcaaaggtcaaaaagccacataagttttgatgatgatcaatttgaacggaggctcgagatggactgagaggactgagacacagaagtggggggaccatggtttttactggctggaccacagggggaccctgtccacccgcctgggttgaggaaggtgtctggggtgctcaggtgggtttgttctcagcaatgcaggcatagtcagctcttggatcctccttggtgcctctcttgtctctgcccctgaggtcaggtccctcactgctgggcactggcagcctctgcagagatgcaatagtggagttcctgctctgaggagcctgggccatcattccgcgataacattaggtcagggatcagggactggcctggaggtcaggaactctagtccttgctcttttaggcgaaatgatcaggggctggtgacttgcctcaagttcctcatccagagcttgtggcctgcaggatggacagactccaactggccagtgctgtctggctgaagagaagtgttgccacctcagacattcctgcccctcctctccccggccgtaatggccgaattcccgggcatatgtccggtaccgtcgactgnnnnnnnnnnnnnnnnnnnnnnnnnnnnnnnnnnncggccgcttcctcgctcactgacttcgctgcgctcgtcgttcgctcggcgagctagcgccctatatgatctattacattt

SEQ ID NO: 136117 - DNA, 448 bp, Homo Sapiens
  misc_feature (397)..(397): n is a, c, g, or t
tgcaaaaaacaacctctaaacacaagataagaaaactcgaacattaacattcttcaattttgtgtaagctctgcagtacggaaaatatacaaacttcaaacagctgcaaaaatagtgtctttgggagaaaatagagtctctacatcgatacaagaaaaataggcatttttctaatccatccagccctggggcgggcggagagtatagagtcgccatttgccacctggaggaatgccagctctcctccccactacccacctggggctgggcgggctgggctgctacttaagacaatctttagtcagggtgaaagcgagatgaaaatgccacttgggaaaacacttgtttcctccctctgccagcagctgaattggtcaagtgttatggcccgttaggntctgctttggtcagctcctccaatgagagggaggcatgggaatagggctga

SEQ ID NO: 136118 - DNA, 570 bp, Homo Sapiens
  misc_feature (222)..(222): n is a, c, g, or t
cgcctgcgagtctgggttgtgtaaaggctggtcattttggggcgcttaggggtgggtgccggggggcgcgctttccctcgtgaaggtcgctccaggagtcatgcgtacattcgttcattttgctttggacgcactgatgttcccggctcgccgccgtgccgcagtcacgaggctctccgaacgcctttcactgtgtttctgtttacattcgcgtctgcaagnccccggcggcgcgaccgaggcccgaacagatggagatgggctgccatgttgtgagcttgcccatggggaagaggctcacatgtgaggaactgagggaggcctccagaaaacagccagtgaagaactgagaccctcagtccaatagcctatgaggaactgaatcctgctgacaaccatatgaatgagcttggaagcagatccttccccagtgaagccttcatgtgagactgcagcccacttgacactttgatttgtagcttgtgacagaccccaagccagaagagtcaggttaacagtgcctgcactcctgacccatggcaactggcatgataaatgttttttcccatg

SEQ ID NO: 136119 - DNA, 926 bp, Homo Sapiens
  misc_feature (17)..(17): n is a, c, g, or t
  misc_feature (120)..(254): n is a, c, g, or t
  misc_feature (260)..(260): n is a, c, g, or t
  misc_feature (263)..(313): n is a, c, g, or t
  misc_feature (836)..(853): n is a, c, g, or t
gaatggggctttttttngtacacatttttatccattttacattctaaagcagtgtaagttgtatattactgtttcttatgtacaaggaacaacaataaatcatatggaaatttatatttnnnnnnnnnnnnnnnnnnnnnnnnnnnnnnnnnnnnnnnnnnnnnnnnnnnnnnnnnnnnnnnnnnnnnnnnnnnnnnnnnnnnnnnnnnnnnnnnnnnnnnnnnnnnnnnnnnnnnnnnnnnnnnnnnnnnnnncccccnccnnnnnnnnnnnnnnnnnnnnnnnnnnnnnnnnnnnnnnnnnnnnnnnnnnnacgttagcggccgggtggcccccacaagggacccgaaactcccctacaaagaattccttggggggggcccggcccccggtttccgcgaaaaaaacaaaccccccctttagaatcccccgagggctgttccccacccaccccaaagagcactccctgacggcatatatagagacacctttccgcggggtgccttctaggggggggtccaaaaacccaaacacgggtccccggggtccggccccccttcctggcttttcttttttccggaacaattgcgcaggttttccccaacaacaagttggggccccctccacgagaacccccttctaacaagaggagtgtgtactccccccccaagaccaacaatgcggggacccgttagtttatatcccctctcgccgctatttatttcccccaccttggggcgcaaacgaagaacccccaacacatgttcccccccttttcaacacacaattttggggtcccccctcttcgcggcgaaggcccggcccaaaaaaagctnnnnnnnnnnnnnnnnnnaaaataaatctcctctctacacgagaaaatatttccccgcacatatggggcggcgccgttaaacaccaataaa

SEQ ID NO: 136120 - DNA, 531 bp, Homo Sapiens
  misc_feature (459)..(476): n is a, c, g, or t
taggtgaagagtttaacacaatttattttatgcttaaataatcgactaggtcatccagtgtatggtttttcatacatatgtcattagagctatgtgtcaatgaatgctgattttatgtgaatataatcaacaaattaaagaatttcaccaaaacccaaataaaaatgccctttaaaacacagcagccttattaacctaatatgacactgctagaatggttacaaatgattggcttactgaaaggtgtctacatcttatagccagtacacaatacagtaataattttacagcgtgctgccattctactagctaaggatttctgttcagtcctttttaaatacccccgactggggccttttatgagcaccatccacctctaaagcggcaagcatttacccccttttaagcactaacagatagcatccccccaccccctaaagcaactaccgtataggttannnnnnnnnnnnnnnnnnaggtcatttcattgaaaaattggcaatagcaacaaatattagcctcgtgccgaat

SEQ ID NO: 136121 - DNA, 792 bp, Homo Sapiens
ggactcaaaggcagcaaggagactttttcacattttaaaaggcaacgaaagctgttgaaagaattatgcttatatctcacattttggttatatttgtggtaacaccttaggataacgtaagccagagatctgtaaattggactgcagtctgaggtgcccattttagggtttttgtgctagtattcttttatgtcattttgatgcagaaattgtgtgactgttgaaaattaaaatgtagcgggaccccattttctgtacgcagaaccctttacctgtattcctggacaaggcctagagaacgagctgctcatcatgtttctaatataatttctggggtgaaatgaatgatttccttactggcttagagaaaaccaaggtcaataaaatgcagattgacttaactattagaaaagatgggatgacttctgggaaccacttaactcttcaaatgactgttgaaagagaaaaagcaaaactgaaatcccaccagaccattttgtgtgcctgtttctaatcgatacaaagttaagcatgagctaaaatcagacaaagcactttaaatttatcctttccagagcgctttgcacatgcaccctcctgagtttgggattctgccaaatgaccaacttgatcctggccctgaggagtcattggctgcaggaatagggcaagaatctatttcctaaactacacataacatgggagcctttttttcgttgttttcaggtatattaaagaatgaaatctttggttactaggtgctgactaataaataacaccttttatattctg

SEQ ID NO: 136122 - DNA, 719 bp, Homo Sapiens
tgcggccgcctcaggagcatttcaggcgctcccgagaggaagatttcaggcacccaccagatgaagacttcaggggccctcctgatgaagactttaggcaccctcctgatgaggacttcaggagcccccaggaggaagattttagatgcccttctgatgaggacttcaggcagctcccagaggaagaccttagggaagctccggaggaggaccctagacttcctgacaattttagacctcctggtgaggattttaggagcccgcctgatgattttagaagtcaccgcccttttgtgaattttggtcgcccagaaggtggcaagtttgattttggaaagcataatatgggaagttttcctgaggggagatttatgcctgatccaaaaataaattgtggttcaggtagagtaactcctattaagataatgaatcttccatttaaagctaatgtgaatgaaattttagactttttccatggttacagaatcatacctgattcagtttcgatacagtataatgagcaaggcttacctacaggggaagccattgttgctatgataaactattatgaagctatggctgctattaaagatctaaatgataggccagttgggcccccgaaagttaagtttactttgctgtagagagagagcatttctaaattcagttatcttccttgcagtattgatggagtaaaatacatttgttttaaaaaagtg

SEQ ID NO: 136123 - DNA, 1072 bp, Homo Sapiens
  misc_feature (140)..(150): n is a, c, g, or t
  misc_feature (293)..(302): n is a, c, g, or t
  misc_feature (423)..(423): n is a, c, g, or t
  misc_feature (431)..(431): n is a, c, g, or t
  misc_feature (440)..(440): n is a, c, g, or t
  misc_feature (443)..(444): n is a, c, g, or t
  misc_feature (447)..(449): n is a, c, g, or t
ttttttctaatgcccgggcgggagatttagacaggttattgtttgtcacccttttgtttccccgtaaaaaaatttattattttctcccccggaaagagttagaaatttctgtggggagagttttgtgcccaaaaatttgnnnnnnnnnnnaaaagaaaggtttctttttccaaaaagttccccaatgcgccagatttttttcccccctccccgggggttttataatacgggggccccaatggctccaaatttattttaagggtgctccccaatagggggcccctcttttttcnnnnnnnnnngggggtttggggttaaaattgggcccccccgagggggaattctttgaaggggcgccccttttggttcgtagggtttgggcccctgtgggggattttttgggtccgcggccctggggggggntggggtgngtgggtggnggnnggnnnggcctttcacaggaatgttttattgtctctgcctggacttctaacatagcatatgaggtgaaaacactgctttagtaaaaatggaatactcttggttacatgaaatcccatccctcgtccttcaggtccactggaggagaagtccctcattccttgggattggtgacgacagccgtggtggaataggagtaggggctcagcagggcggcaatggtgtagcggcgggggccggagtcgttggctgtgaataccacctctgcatgctcatggaatggggagatgccaagtgccttccagtaagatttggtgtctatttccactttgtatatcccttctacaaattcctcctcagttgtgagcccatgcagctctccagactcactggttttcccagaggcaaatggctcccaggtgtcatcagcagcctttctgaacacatgcacggccacattgatggcaggactgcctcggacagcatctagaactttgaccatcagaggacacttggattcaccggtgcccgtagggccagcctcagacacaaataccagtccagcaaggcagaggaggagcagacgatgagaagccatcctgccaagaatgatcccgggaattccggaccg

SEQ ID NO: 136124 - DNA, 447 bp, Homo Sapiens
tggaaattaagaaaccaaaatctttgctttcatgtttattaaagaagatcactaaagatattgactagagaatgctgtgtgctatttcaattacatttgtttttcttttattaacaggaattttgattcttcaaggaagtggctcaatttccatttcagggtgacccaggtttatcgtgacttttccttcttgtttacttttcgctaggaaggggagttgtaggggcagattcaggtattggaataggaaaattacgtctaaaccatggaaatcttggaaatggaattggtggaagtgggcgaaatggatatgggtaagggaacacaaaaaaccctgaagctaattcatcgctgtcactgatacttcttttttctcgttcctggtcttgagagactgggaaaccaacagccactgccaagatggctgtgatcaggaggagaactttc

SEQ ID NO: 136125 - DNA, 652 bp, Homo Sapiens
  misc_feature (150)..(150): n is a, c, g, or t
ctcaaactcctccttaaccggccaggtttacattttgatgtgaatctggacttctctccccttcgaagtcttgatcttcccatattcacattatatatactgtccattttgctcaatctgtcttctactcaagtgatttctgcatgtatnttatctccccactaggcagtacttgattaagtgccagatgactagcagaggcaagacatgctctgagttagaaggagtcatcatgatttttgaagttttcaccaagtagagagttaatttggtcttttaaggttggggaggtttctgcagtcaggaatagggggagagtaccagggacatggagtggtttatgcaaagcaaacaaataagaaagcaaaaatgaacagagattagacaactttgctatcaaggggagtagctgcgatctggctggaaaaactgtgaataagaggccaagtatttgttcgggagggcggtgttttctctaacttattcatgataaaattttgatatattgcattccatcacaaaacaaacagaaacgcttttgaagaaggaaaatggctatataattaattgacgtgcattataaaaatcacaaccacccgtatgtgcccatgagaaaaccaatctatcgaagtaaatatgatctgctgtggtc

SEQ ID NO: 136126 - DNA, 776 bp, Homo Sapiens
tcctagtcaaaaatttactacacagactcagtagcggaaaaacatatcccataagcagaggacaaatcacagatgctcctcgacttacgatggagctacatccgaacaagctcatcgtcggccgacagatcgcacgcaagtggtccacggatcgcacataagtggtccacagtcgacagaaacagaccgccacgatcagcaacttagcgtcgcctcccccggtctcatcttcttggcatgcccgtcgggcccaggcgggggactccggcgccgctgcttcttctctagctgctgctgcagtctctcctctttcttcttcaggtaggaggtcacgttgtcgaacgtggccttgtagagactgctgaaagctggcgtctgcgccggcagagccttccagcatggcccagttcccacgaagaacaccagagactttctttaacacggtgctctcaggaacagactgccactggtccccacaggcctgtagagcaccaggggggcttcctggcagtcctggagcacccacagcccctgggtctcctcgaaagccacgtcccacacttggtgctggaacgccagctgctgcctgtacaccaactgctgtctgcgggcgtccagctggaagatgtagaccacaggagtgccgtcgcacaggagcgccacgcagttctcctggcaccagaatgcaatcctggacgcggcaaacttctggggggcctgggggtccaccgagctcctgcagactggccaggtgacagcagtgcagctggcggtcc

SEQ ID NO: 136127 - DNA, 313 bp, Homo Sapiens
gcacgcagtgtcttccatttctcttttaatcataatcatgctttaaaaaataccctcgagcatatggagcaaatttaagataattgttccttttctgctaattcattattactgtcatatctaggtctgtttctgtcgactgtggaccacttatgtgcgatccgtggaccacttgcgtgcgatctgtcggccgacgatgagcttgttcggatgtagctccatcgtaagtcgaggagcatctgtgatttgtcctctgcttatgggatatgtttttccgctactgagtctgtgtagtaaatttttgcctaggaaa

SEQ ID NO: 136128 - DNA, 1372 bp, Homo Sapiens
  misc_feature (537)..(558): n is a, c, g, or t
  misc_feature (613)..(697): n is a, c, g, or t
agaattatttgattttattaaaaaagaatcattgtctacaaactgttttctaacaatgcaaatacagtaagcaagtcatctgcaatatcaaaatattgtttgtaaatcactgatggcaccaacgatttgaggaatttccaataggacacatattgagaaaaagcaacagattataggcattaaccaaattttaagatcagaaaattataaaaatcattaagtttaaattatccaattttcaatagcttaaatccaatcatcaggaattcagaagcacccaatatgtttgaagttgcacaaatgcatatggatgataggaaagtaatccccatgcaatatcttaagtgttgctatcagatatatttaagtgctactttacagattaagctgggtaaaatcaaaatatattttacttcccattagattttaaaacaatcacaataatttatcaacagttgccatttcacagcaattagaaaagaggagttgatacaagttgaacagaaaggtatcttttcttcttttaggaaataaacnnnnnnnnnnnnnnnnnnnnnnttcacatacacacataacattatctttaaaattccaagtggttacttttgtattnnnnnnnnnnnnnnnnnnnnnnnnnnnnnnnnnnnnnnnnnnnnnnnnnnnnnnnnnnnnnnnnnnnnnnnnnnnnnnnnnnnnntacattattgtctcagtggttctatttatttaattgattataaagtattatgactcctagtactgtactggacctgatggaattaaatacacccctttctcagtctccagaaaggatactcctaacccaccctaaaatatgataaaataaatgcccctattctgaactgttaaactgggaaataaaccatgccccacctggaaacaatataagtcataaaagtttatgaatctgtgggagagactacacgaatcagaaagcaattctttggatataagttaggagcttttagaagtatataaactcttttaggcatctagagtagagacacaaagaggatttctccataaataatgatttagccagtgcaatggttggttgcccatggtctgcatctgggatgtcatctgtttttgtaaataaagttttattggaacataactgtgctcatttgtttacataatgtctattgctgcttttgtggtaaaatggcagggttgactagctgtgacagagaccgtatgggctgcaaagcctaaaatatttactctctggcccttccacagaaagtttactgacctcctgatctagttcaccaagtactgctctagttacctaaaagagttaatgcacctcaagaagatttgagcatgtggtgcaagaataacttgcacc

SEQ ID NO: 136129 - DNA, 474 bp, Homo Sapiens
ataaagttaaattttataatttaattaagtgcttgtttttgtcactctacttctcaagtctcctgctactgctctggggctcatggcttgctctagggcagaaggaagttgctggaagcctggcctccaggctggaggggtgccaatgcaagggtcacactaatggaactatcaatgcacctgccttaaaggagcctgaagaatgcctccagtgggctgctgggcataagccctggactgtccatatactacttggaatattcaaacagagtccagagctcagaggcagggagagccaataggctgctgaaggcctagggaaagcaacacaggacagttgtccatttgagactctttctctatcaaagaggagttagggatatacttgtcagttcagagaccacagtgtgaccctggcagaagaacttgctctctatatttcctaccatcatgggggacggccaaactgattgt

SEQ ID NO: 136130 - DNA, 757 bp, Homo Sapiens
tggtgtgttactttttattactacagaaagtgctgttgcttgaatatgaatatcatttagtgtaataaaatgtagaaggacacattattgtgttccagctctggttcagtctggcagtgcccagcataaaccgtcaaaacttgataaaagactgtcttggggttatcttgctgtcatgattccgatgtgttttgatttccttctggagtcataaattgcacctttggtaccatgagggaagaattgttccttcggatagaattgttcctcctcatggaattgtttcttctcatggagttgcgcttcctcagagaattttgatgagacagttcactcttttggagggtctgaataaggatggaaggtttctcatccagctctcgggcactgcaccgtggagcagctactttaacagtgttgccaaatttggagtaatccacagaatacactccttcttcctcagtcacaatggacacaaagcggtggccccattggatctcctcagcaatgtaggaggttcgtgcttgtgtggtgatgccagtagtttcaaccactccttccagaataactatgacctccaagtcttggttggccaggtcagttgctgagatgtcatacaggggactgcgcttgtcaatcacgtggcagatgatcaaaggggccaccagaaaaatgttattgctctcgattgggttatcaacaggaatgtccagttggtgaataggaaccacctccccttcaggtgtagttgttttct

SEQ ID NO: 136131 - DNA, 868 bp, Homo Sapiens
aagagtctaacttaagtttttttaataaaaatgatataagtaatgaaagagctactttatgtaagtcacaacatttgaagacatattactttaaaagggtgtcttgtttctaaaggcacacttttcaaagatgcaccaggtagcaagtgccacttccagcgatagtctttgtgttgagaaaaatgcctaaacttttgttatatcagtggctgctgtgatcttgtctcataaatgagatctcagacacatttttgtcttcttacaatggagaagagtcctggaatagctggggcgctgaaggggagctgttcatgtatggaccactgcagcaggcagaggatcttgattgtcagaatcaactgttcatgctacataaggcaggcaaccgttaccaacatgttcatcaaatggcagtgcaaagatgatcagctacaaagtgctcatctgtaatccagtagcagacagatcttttattctcacatttgaaagcacaggttcagaatggaaaaacgatttaaaccaccaggtggattctgccacttcaggcaacccttgctgtggtttgtcgtcatctatgaagttaacagaatcagagctagttaaagaactaactgaagaaacactggactttcgataatactgatttctggctagaaggcaaccaatggaaggtacggatgccatggctttacccgtgagaaagcacccaagaagctgtgagcattaatcgatttgttttctccaattcgttcttttaaaataaacgtggttctaaagtttcttcagaaaatacatgctttgaaagaaccagttcttagggattgaagagaggctgcaccacatacgcagggccagtggtaggtccgtg

SEQ ID NO: 136132 - DNA, 529 bp, Homo Sapiens
gtctgatttgagagcatgctctgaacaaagggattttcacatgatctggaccatcatttcagggttagacaaaagttgtcgctgcatctgactctgtagttcagagaagttggtagtattcaaacccaagctactcagacctgtaagtcccccaaggccacctaaaccaaaagggttgctagtagcagaaccagatgtagagttactattaggagttgatgatgtagtaacattgcttccagctgtatttgtttgctgagctgaatgatcctgaggcctgttttgtgttttaatgacaaggtgaacagtaagtccatcatgaattccatgctgactcaaggtatcttgatctttcaaaatttttccagcaaatatcaacacaagttggtcagtatgtgatttaaaacgtttagagatttcttccttaaactgctggacggagctattctcgggcacggcgaattcctccttttcttcggggtcttcacggtgactttcatgattttgggtccgcggaggcagcggccgc

SEQ ID NO: 136133 - DNA, 1258 bp, Homo Sapiens
  misc_feature (1236)..(1236): n is a, c, g, or t
gcggccgcagtggccactttgagctttccatcaaggaaggcgaagacatgatcgcggaggagcacttcgggtcggagaagatccgtgagaggatcatttacatccgggagcagtgggccaacctagagcagctctcggccattcggaagaagcgcctggaggaggcctccctgctgcaccagttccaggcagatgctgatgacattgatgcctggatgctggacatcctcaagattgtctccagcagcgacgtgggccacgatgagtattccacacagtctctggtcaagaaacacaaggacgtggcggaagagatcgccaattacaggcccacccttgacacgctgcacgaacaagccagcgccctcccccaggagcatgccgagtctccagacgtgaggggcaggctgtcgggcatcgaggagcggtataaggaggtggcagagctgacgcggctgcggaagcaggcactccaggacactctggccctgtacaagatgttcagcgaggctgatgcctgtgagctctggatcgacgagaaggagcagtggctcaacaacatgcagatcccagagaagctggaggatctggaggtcatccagcacagatttgagagcctagaaccagaaatgaacaaccaggcttcccgggttgcagtggtgaaccagattgcacgccagctgatgcactgcggccacccaagtgagaaggaaatcaaagcccagcaggacaaactcgacacaaggtggagccagttcagagaactggttgacaggaagaaggatgccctcctgtctgccctgagcatccagaactaccacctcgagtgcaatgaaaccaaatcctggattcgggaaaagaccaaggtcatcgagtccacccaggacctgggcaatgacctggctggcgtcatggccctgcagcgcaagctgaccggcatggagcgggacttggtggccattgaggcaaagctgagtgacctgcagaaggaggcggagaagctggagtccgagcaccccgaccagcccaggccatcctgtctcggctggccgagatcagcgacgtgtgggaggagatgaagaccaccctgaaaaaccgagaggcctccctgggagaggccagcaagctgcagcagttcctacgggacttggacgacttccagtcctggctctctaggacccagacagcgattgcctcggaggacatgccaaacaccctgaccgaggctgagaagcntcacgcaccacgaggacatcct

SEQ ID NO: 136134 - DNA, 513 bp, Homo Sapiens
  misc_feature (301)..(326): n is a, c, g, or t
aaggtgctcaagctctgacatttttggttttcatagtcgtgaagtatttatcatttgcatgactaatggcacaggaaaaacctattcataagttttacaatcaagtatagaggggtcttcagctaacttagttatacataaatgctgaaaagattatcttgagctgggccttgggagaagaatttggccttcagaactgcaatatcactgagcctgcgatctatacaccaccccacattttgttggtttcacagtcttgtgcaagtaacctctggtcttacgtgtgtaactgagagaagannnnnnnnnnnnnnnnnnnnnnnnnnttattgttcctaagaatttggcacaagtcagagataattgcctatactaagaatctatactgcagaatatagtgtatcaaaaacttttttcttttaaattattaaagtgtcttttatacttttatgaaatcattggtagccccccaagtgtttaataactggcattaagcttagagggtgaaaaaaa

SEQ ID NO: 136135 - DNA, 855 bp, Homo Sapiens
  misc_feature (177)..(177): n is a, c, g, or t
  misc_feature (190)..(191): n is a, c, g, or t
  misc_feature (194)..(194): n is a, c, g, or t
  misc_feature (737)..(771): n is a, c, g, or t
attgtggtgagggaaatcccaaagccccgttgtttcatggaccacgggattttccgtaggggagacaggtttatggcccatgtttccctttaccttacgggggccccgcgccgccaaaacgaatggttctagaaaggcttctggaggggccgaggcggccgacatgaaaggaagggntgagtgtaatttnngangtggtagcagggttttaaactttattttgcgctccgtgacccttcagatagtgatttgaatgattaagtgaaactcttcttaggttaagtgtcctagtccacgctaaaatcatcttgttggtctctttggcgctgtcagcgaccagtatcagcgcccggcttgtccccgctgcccgccgcgtccctggcccggatgtgggaggcgaaggcggtgagcatttccagagcggtgagatgagcgccgcgcataatcaggcgatgcccgtctccgaacagcacgtccacgcagggctcggagccgtcatgcctcacgtccgcaatcactgagcagttgagattagtggagcggaccttctcactgctcaccgtctgcaggaaggtcctcgtcgattccacgtttttctcgaagggacagaactgaacccgaacctgtttgacaggccgcagaccaagccgagccaaggcagctgccatggtgacctccgccccggacccggccgtaatggccgaattcccgggcatatgtccggtaccgtcgactgnnnnnnnnnnnnnnnnnnnnnnnnnnnnnnnnnnncgccgcttcctcgctcactacttcgctgcgctcgtcgttcggctatagcgacgctacccctatatgagtctagtacatgctttt

SEQ ID NO: 136136 - DNA, 287 bp, Homo Sapiens
  misc_feature (262)..(262): n is a, c, g, or t
  misc_feature (276)..(276): n is a, c, g, or t
cccaggcagggcctgtttattctgagagcgcgcatgcgctatggcttacgaggcaacagcggtgccggtcgatcggtggtcggttcgggggtgcggggcccgggagggaagtgcaaagtcaacagggtgtccacgggggagcccgccaagcagggctgagccagaggccaggcgtccttcccgggtgccgctctcacacacctacgttccccaggcctgggagctgccgcgcggcaatgaggggccgctcctcgtgccgaantacttgggcctcgnaggcgccaaaa

SEQ ID NO: 136137 - DNA, 584 bp, Homo Sapiens
  misc_feature (32)..(32): n is a, c, g, or t
  misc_feature (60)..(60): n is a, c, g, or t
ggcctttcacaatattgccatagtgaaaggtntgaccctgaaatggtgttgactgggctnctaaaaagtacaggcattaggctgtaaatgtgcttttctgcaacatgttccgtaaacagctttataaggtcatcttttaagtctctgttaagcttggtttcgatgtaaaacttattcatatatatgaaaagaggcacaatgctctgcaatgctcccatatattgtccaagagctatattaaatctttcaatatagagatctggagggctggcctgcagctcctttgagactctctctaagtgattagttatctttttaatcagatcactatacatctgttccgagtgctgctggcatacacatttatacacacaactgtatatctgttcataggatatggggatatagtcaccaggactctgagttaaaagttgatctatggcaccatccaattttggccagtatgtgctcttataatcttcaatagttataacattcattaagaacttggaggtggaggtgttgatgttgatggtggagctggcggtgggggcgggggccgccttggccacggcggcggccgc

SEQ ID NO: 136138 - DNA, 457 bp, Homo Sapiens
aaaaaattctttttcggtttttttctacatttaaattttgtcagatgataggtgataaaaggatatttagatggtttcattagcattctttaatgtattagtgagctagaatgcattttcttgtgattactggccatttgcgtttcttcacctgtgaaccatatacatattttttcagttttgttattttgttataggagctgtacatgtgttaaacctaaaacccttcactgatggatgcatgcattatttcaacacatctttgttgggtgaatattatttatgagacactctagcaaaatccatgtcctaagatatctcttcctgagatcttgggctcttatatttaatgggagatgtcccccctggcagcaagaaaagtattagtgcccatgtaaacatgcgtggcttgtcaaggatcacatgcacagacagttcacacttactcctaaacccg

SEQ ID NO: 136139 - DNA, 728 bp, Homo Sapiens
  misc_feature (55)..(63): n is a, c, g, or t
tgcactcaaaaaataccaatgtttattttttaataaagcaataattcaaaacaannnnnnnnnctactcattcaaaaggtcataactcaggagtgctgtttataccagatgaatctacaaagccaagaacaggaatcaccgtatctccttcagtagacctgatactgtgagtcttctcttttctgttgacatatttgtgcaacatgctgtagtactggcccttcggattgaaagtatacagtgatgaaatttgctgccactctttcatgcttggagtgttatattcttttggatgcgagccctcaaagaaacatttaatattctcttttgccaattcagttgcatgctctgtggctttacttttaaggatctgctgctcctgttccaaatagattttccagaatttcagctgcagaaaactaactggagataggcatcgggtgacagatgtaaaaatcagaagaatgatgataacaactgctatcaagatccagcccaacacctgcgactgagccttcagatccttcaggaggtcctgcacgtccgacgccttggcctggttgcacggcaccagcggcagctccgcggcgcagctgcggttgcggccgaggcacaggcgctgcgcgaaggccgcgctcccggtggccgcgcactcgtaaaaggcgcccccgagcagcgccacggccacccaggtgaggggcgcgagcgcggcggccgccagcttattc

SEQ ID NO: 136140 - DNA, 208 bp, Homo Sapiens
gtttactcaaaagtcaaaaaagtttttattctctgatatataaaaccaagaaaactttaatacataatatgcatagttttgtttttttaaaaggagaaagtggcagaagtacagacctgtgtagaaaaatacacccaagcagctgttctaagcagtaattcctaaaattatgaatagcacacaaatctcagtgaaagcctcatttctt

SEQ ID NO: 136141 - DNA, 237 bp, Homo Sapiens
tttgaagcttttatcaactttaattgatataattataattggtatgcaatatgtcttacaacaaatgtggatacaatgacatcaaatatcaaagaattttcccacctttccatctttaaatgacttcagctaacttaccccaagagaaaaatctggcattgatctcttggttagcattattaccaatatcaactagcactattaaaatcaaagttgaaatggtacatttcatttgcc

SEQ ID NO: 136142 - DNA, 813 bp, Homo Sapiens
tgagccactgtgcccagccaataataacttataaaacatgaaacgatttagtgagaaaagcggccggttttttggggggaattactttctgtcataaagaagatagatgggttctcatgtcttctacattcagtctgttgtgcagtcacatatcatgtagactctggaaaacacctctgtatactggtgaaagaatgaaaagaagcaaataatgccttagtatgattatgaaaaacgttttgacttcacagtgccctgaatgggtcttgggaatctccagggatccctcaggcacactttgagaaccaatctatataaagtgatggttcacaatgattctgaagccttagtttcagaatcatttggggcagcttttcaaaaatgccattcctgccacctaccacaaagattctgattcactgtatctgtgatgggtctcagatctctgcatttttaatctcacgtgattcttaagtatgtggtggaagtacctttcttcaggaaattctgtcctaagcttttaccctgagaaaataaaacctgcatgctttcaccatggacggtgggagactccactgaaacacatctgctagaccactaagtttatccttgtcacccagtttgctcttggaaagagtctgttcccttttgtcactgaaccaatcatgacataaacttgtgctttacctcctatagcacagccgagacaaggctggaacatttaattaaggtttttactaaggactcaggaataacaacagggaaatatctatgtaactagatgacctgacataaaatctatcttctgattgc

SEQ ID NO: 136143 - DNA, 895 bp, Homo Sapiens
  misc_feature (313)..(337): n is a, c, g, or t
ggggtttcttcagccgcagtcttgtctgctctgaagaaaattcttgcactgctcagtgagaaatacagcaattcaaattcctgtagatagacatccagtcgcttctgagtgagattcatggtttgtaagagtttttcatcttgactggctgactgtacattctgttgcttagcaactgctcttatctccttcaggtatttctctctaacagactggaaccagtgaagtgaatcaaactcccgatactgatccaaaagctttagaatgtaagccacacccatggcaaagccatcatcagtaaaggcagctccannnnnnnnnnnnnnnnnnnnnnnnnccttgcaactaatggaatgctctacaaagttgagggtcagagggggaacaattatatagaaatttcggagatgtatattctttggccttcgaaattctggagcaaaaacgtctacaagcattttgaaatattctgtgccttcggcagaatttcgtgtgtgatcactgaggactgaatccaaatgccttgctgcttttaatgtttcttctgcaagaccttcttcttttactagttcttcaaaatttacaatatcttcaagatcaggaacaaatctaatggcattgctgctacaatgaagaccaccagatcttatcattcgtacatagcccatagcattaccttaaaaaccacacaaaaaaatcagatatttatataaataactctaaattctaataggaatatagttacatacagtagtaaattacaaggtttccactcctaagaaccaaaatattttgctatattttacttcagttcttatcataaaaagtaaaactgttacatatttctacacttaaaatataaacatacatacttatatataactatattaaatat

SEQ ID NO: 136144 - DNA, 1027 bp, Homo Sapiens
  misc_feature (52)..(86): n is a, c, g, or t
actcattacacatttattgtacattttcacaatctggatgcgccacagaatnnnnnnnnnnnnnnnnnnnnnnnnnnnnnnnnnnnacactgggataatatggggggtctagaacacagcacccccacctccagcatctctcctaccctttcacaccacagcttagatatccctgctccccctccacacagaaaaccagaagtgtggggggaagaaagtttgggggccccctcccgtggcaggttaagggactgtaccctcaaacccttaaaattgtgccatttaaaaagacaatagacccttcctcaatcagttcacccaatgagaggacagctctctctgggctcaatagtcctggagaggggcaagcatccccgttttccagcaagtcccatacacacattggcagtgactagtacccccaccctaaattcagggggggcagtcagaggagctgggcagtgatggggcaacaccccccaaattggggaggagggttttcagtccaacccccagcaggggtgaggccagagatttcaggcaggaattggggggattctctgccctgccccactcctccccaaggcagtgatgacccccacacacacactggtagccacccctctcacaagagatcaattgtggccaacccccaactctcctggtgggaggaggaggtggatcaggcagatgggagggaaaccccatgggaatgtcagttgagtaccccacatgaaaactggggagcaggaatgtagggagaaacccgaagtggcagaattattggtccatcataacatactgaacttcaagacacttacataccagctgggggagggagaggagggtacaagaggtttggaaaatgagggtaagggaggcaaactggactagaggggctaggaggaggcaatgctggggaccagagcagcctggttccccaaaagcccaggctccccaccacctgcgagtaatgtcgtgcaaatgaaaatgtgatacaagaactaatggggactaactcctcagt

SEQ ID NO: 136145 - DNA, 498 bp, Homo Sapiens
tttaatttcaaacgttaatatattttctattttatattggacatatgcatctgtaacccctcatttgcagcaactatcacatcctcataaaaggggcaaaatttgtaagatgcctcttaaaataaatattcttttttataaaataataaaacttcaaataaatattctttacactaaacaatatgttgaaaaaattagaaaataaaggttgaattttactgtaactgtacaatatacatgaagtccaaagggaaatcagagtcttacaataaaggctttctgtaaggcaaaatacaatctaaaaacatactgattgattcacattcttccgaatgtacaacatattagtataatattttgtgtctgtgccatgtagtatggcacaacttgtttttcacagttgcaaatattattgtatatacaaaaatatagcacattctctctggagaaaacaatggaaaaaagtcatctgctaatttacaagttttgcaagtaccc

SEQ ID NO: 136146 - DNA, 692 bp, Homo Sapiens
gaaccaagagaacattttttattgtcagtaagaaacagcaactcttcagagatgattggctagaaaagaaactggttggttgtataaaaaaatgtaaagtacaaaactgttaatctaaaataaaattaaaaagaatatttaaaaggcttccttttctgttaagttctgagacttaataaatgagataaaaacagtttcttacacctaagaaactgggttatgaaagctgtgcctaggatgttggggagagcacactgggagaaggcattcttgctggtaccttgagttcaggaatctacgttgaggcttcctcatccaccatgatcacagccccaggggatgctgggcttgttagcattcaagctctgggacctgattggcctctctgtctcctctaagtaaggacaactgatggggacagtctcccactctctgaggcttcgatgttccacgcatggctttcctcttccagaaactcccctccctggctctcccatgcagccctagtcagcagcagctcacaggtccgtggacagcgagtctgggatctgtttgccttcttcagccgatttgctggccagcattgtcttgaagaactgattgaccttcttccgtgtgagtgtcttcttgtcaccatctgagagttggaggaaggtctggctgaggcggggagatgtgttggcggccgcaag

SEQ ID NO: 136147 - DNA, 582 bp, Homo Sapiens
caaaacaaaattttcactccagctttatttgacgcttcagtaatcagggcaaaattgttctaagaaaacctttatataattctccaggaaaattaaaggtaaaaggcttttgtcccttaccttccactctataatttaatgttcacttttaagcccaaattatttcacatggttattcaatttttaaaatgcctgcaataaagctctgctacagcaaatacttgattttgaaagcaggttagccacgggtcacactacaaccatagcccttaaaggcgagaaggaatttgctgctttaatgaacttaaaaatgccagatattcgtactgtcctgtgaggtttctgcaaacgggaacatgtggatgcaacatggcttcatcttccttacatgatggtactagtttatctattagaatgcttcttgttagtaaggctaggtaatctcttcccatcacagttgcttccctcttgttcagtaaagttataaagaccacccctaacagagggcgggtttggggttttaattctgatcaaacccttgtgaaagcctccattttctgtggcaaagcaggtgaattaaca

SEQ ID NO: 136148 - DNA, 522 bp, Homo Sapiens
ggacgccactgcactgttaatgaatgaatgcaaagtttcgacgggcgagtcttcactgagtgtaaggacccggagctgagaagacacgggtttatctgcatcaatcacgggagtacgtttaatgaatgccaagctattggatttaaccccataatgaatgtctatgttgatgttataggaaatgaattctttttcttcttctccttcatcaccgacgtcctctttgagcgtggagcgctccaccagcaccgtgtggacctgcgggtccgaaaggaacttgcgcatctgctccagggcgctcttctcctccagcgccgcctccagcgcggccggcgcctcgccgccgtcctccagcagcagcggcaccagcttgcgcaggtgcttctgcagcaccgacacgtccgccacattctgcacggccgacacttccaatccggccgagccgtcctcgccgccgccgcccccgggctccgacatggtgtcgcgctcgggaccttccaggagcgatgagaaggcggccgc

SEQ ID NO: 136149 - DNA, 500 bp, Homo Sapiens
  misc_feature (238)..(238): n is a, c, g, or t
  misc_feature (462)..(462): n is a, c, g, or t
ttttgcaattataaagagagctagtataatcattcacatacaggtttttgtgtgaacacagcttgcatatctctgggttgaacacacaggagagggactcctgggcataaggtgagtgcacatacaagtctataagaaagcacccacctgtttccacagtggcatgttccctccagcaatgcatgactttcagctgttcctcatcctcgatgacagttggtattactatcagattttntttttattgtagtcatttttcaatgggtgtaagtgatatctcactgtggctttaatgtgcatttccctgatggctatgctgaacatcttttcatgtgtgtatttgatatctgtatatccactttggtaaagtgtctgttcaagtattttgccccatttttcaattggcttgttttcttcctgttgagttttgagatttctctgtatattcagaacacacactgnatatgttctttgcaatattttctcctaatcttagcttg

SEQ ID NO: 136150 - DNA, 476 bp, Homo Sapiens
ttttttcagagcaaatgttttattaacagatttttctccagtagtcttgaaaatctcccctgggggagaaaactggcaaaagggggcctgagggttgttggaagaaatgaaaagtacataggatgctattttgaagaactgatttgtcagaagccactttattttaacaataatgtgactgcacctggcacatgagacaggctctgggcctgtttctcaatgttgtgaaaagcaggacagtcagttcccatggagtagattacagcgtgttggacaaggacattcccccgcgtgaaggcacactccatggagccagtggggccaccattcacggtgtgcaagctgtggccttggagagaacatgggcagggcttccccagcctctactataccccagctttactccattgatcacaacaatggcacttttttcttttggtgcaaatatttccctcgtgccgaattcttggcctcga

SEQ ID NO: 136151 - DNA, 487 bp, Homo Sapiens
ctctcctgatttgatccattcggcccaaactccagagtcgggaatgggagatgaaactagttttccacccacttttggacaagtcccacccctagatctgaagcaagctctaccagcagcgtgtcctggaagcctgcctgcctgcctgcccgtctgcacaggtgtcttgatccagccctgcgtcttcgagcccctgtgccaccggtccccacggcccgccaggagtctctttgtacccactaggcttccctgatgaccatctgtctgtccgtccctgtttttgctgtacataactcctgctgcaccctctccccgcacacccgtcacccatgagagagaaacctctctagggaaaggcagggtggctgcacccagcaactaatccaaatggcaaatattttgtaacaaaatagcccagaggtattttatctgttcaattcatagagttttagagattatattgaaagatgtcacttgagcaaaaaaa

SEQ ID NO: 136152 - DNA, 451 bp, Homo Sapiens
gactgttaactgctttattttcactgcccaaaagaaattctctcttttttcttccaactctaattatcaaacaaatactatattatgttttattgaaagatattttgttttaactttaccaaattctgtgcagaagtactggacgccatttccattttcccaatgaaggggatcccttttgaggagcagaaagacataaaactctgacatggcacacacagaggggaggagcttgcaaacgggggaaatctgaggcaagtctcaaaatatgaaaaacagttgctgcttctggccccctgatggatgaaccactacttcttacttttaagttgttcctcacagcattcctggacccagctcacaggtcagtggttactcagctagaaagagctggagtttaccatccaaggtagctgtggcaagctggggcgctgatgggttgaaggccact

SEQ ID NO: 136153 - DNA, 428 bp, Homo Sapiens
actgtaactcttgtttctaggtaatcgttctctctcaacaaacttctcaagcgtctgtgtaacaagccacatgttctaacaaattgtctccatcgcacttcaacagccaggtccctattttttataacgtattaaccttattattttcttattattttaaaagaatctatgcacattagcaaaatttaaaagatagagaaaaatataaacagaaaaaattatgtttacttctaccaccctaaatcaactattatcaattttatacatattttactccatctttttttcaaagtttcttacattttccaatgtcattaaaattctctgtgaatgtaaattttaaaaactgtacctactgttttttggaaatctgtaacaagctatgtgtaatcattcttctaatattaaacatattgtgtccagaattt

SEQ ID NO: 136154 - DNA, 238 bp, Homo Sapiens
  misc_feature (144)..(144): n is a, c, g, or t
  misc_feature (179)..(179): n is a, c, g, or t
  misc_feature (219)..(219): n is a, c, g, or t
cactgttcactcggtttattgagattcggggagatccttccccaagagacaccacagtgtgaaagggacaccacctcccacccccataggtccatctgtctatcccaacagtcaagggtgccttcctttggtcaggattctcantcaactatccactggaagcagctctccaaacctgncccccacttatttttcccttaattcccctcaaaaaaacancaaacaaaagggagcagtc

SEQ ID NO: 136155 - DNA, 968 bp, Homo Sapiens
gaaaatagagtgaggcttttttaccgtatatacataaaatacttatgaaaattagaagataatttggcattcctactgtttcactgtacttccattgaaatactctttccattaaaatattctgaaacaatatagtaataatggaattgtgatcttcagttgcacctcaaccattttttttgcttatgaactaaaatttctaacattaacatttcggcatgtaataaaacaagggcctatctcctttaaaatttaacattccatgtaacttttctgacttatcattcataagttgcaaatattactattttcctaaaccagggtacacaatttaagttgccacttattgatgacagaatttctggatagtaggattttaataggcgagcaaataaaattcaaatcaatttcaaggaaaaacatctggccaggggtagcttgatttcgcccccaaaaatactgaagactaatccattgacattcataatgggacagctaagtaccaaatagctaactactccctatggaggtttatgcaagcagagtaccaggggttccatcatatcaacctggcaatgcacttggtggttgtgtgaccttgagaaagtctcttactcttgtttatgtgttcttactttagaaactgagactttatttgtggttttcacactatttcagcagcaaaaactttttcaaggaaaatcttacagaacctttaaacacgtgtgcatacacacataccctataccccactatataaaaagtcatattattataaatttccttattatataaactttatatactataaatgtgattaagtcaatgaataagaacattaatgcattggtgatattcaggatgtatgaatttggtgagtaacccacatatagtgggagtcgttcaattaaaaaaagtttgaattaaatccaagtcaaatatgacgaacatgtatctcctccatagac

SEQ ID NO: 136156 - DNA, 414 bp, Homo Sapiens
ggtggaagacagatgatgctcaaatttcttttccattaagcagttgtttctggtgatgaagaatgatttggtaaagcagttaacaaaacattttccaaagacaccagagggtctgtatagtactgcaaagcaggactgaatcccttctgctgcaaatactggattcgaccttggtcaatcagcaatttacaaagatgccctattttcttcttttcttcaacactaagaagcctaaattgaataaacacacacaaaacattgttaaaattttgcaaaagtttataaaaaattatttttgtcactatttattgagagactgttaactaacccataatgtactaagtactttgtcccatgcttccaagacacattatatttatgaccacaataaaagatgtgtatattttaaaaaaa

SEQ ID NO: 136157 - DNA, 492 bp, Homo Sapiens
gcaccaagctttcttgtatttttagaaaaatcaaataatcttacttcaagttcgtgtcatttttacatggcaattacttttaaataccttatctaatgttccatagatttccaaattcacgttttgcttgacactttgtatttctaaatgtattttaaatatcaaatattttatttcactgatttctatttaattttatgaatcctagcttttttaaaaacacaaaacataccaactcagagtgactttctgaaattaggcaaagtgaccgaggcacttggcaacactccttcctccagcatcactgtcactagtgccttctgtcattcaatcctcacaactcagggtgaggaatccccccatctccagtttactggataaactcaggcacagaaaagtgaaatgtctcgcccaagggcacacagttacacgtgggccaccaggaaagaactggctggagtcctagttcctgcctggtggccactacattcc

SEQ ID NO: 136158 - DNA, 616 bp, Homo Sapiens
ttttttttgaggtataaaaaggaatatttatcttttaaaaatacaactttgaacactactggcatctcatttacaaagtatttttgtgaaatactctccattggctttgcttgctcagtacattcttttatcttcaattgagactcaagggagggtatgcttgcattattataaataccacaaccaccaccacacacaataaagaccatctctgcctcaggacattcgccccaaacctccatcctctctgtttactttccaccaagcagaagtttctgaatggtccactcacatgctgccattgcgatttgccgatgggcactaccaaggtgtctctggcaattcgcactccaggtggagctgacctatttgtagaaagcctcacaaaccctagctcattatttattcattgattcattactattaatacttatatcaagtctttgcaaacattcagcatgaagtaaacatagtatttacagcagtactcggtttgcaattcaacacactgacaacagaagcaaagggaccaacagactgtaagaaggccagaggggaaagaatattaatataaatcccttctgccactgtgtgcgtgcgtgtgtgtgtttgtgcg

SEQ ID NO: 136159 - DNA, 1375 bp, Homo Sapiens
  misc_feature (703)..(703): n is a, c, g, or t
ggatccaaactttcctttaaagagagtttttcataaagttgctaatgtaaactgatatgggtgttccaaggtccctcggcagggaagatttgctggtgattttcttcactccattttcctttgggtgagcctgcctgggaagggccatgaagtcagaatctccactctgcaaaaggaagaattccaggcagaagaggttctgacagggtgacatttccgtatattctctaggttcggacaagagccaggaagctggaagacagtttatcttaatatccaaaactaagtgggaatttttaaccttttcatgcacctattcatggccctacctggaaggaacttggcagttgggttgagccatcagccttcccagctattcagctctgttgagtagcccagagacaggcgtcacggtcagagattcagaacggtctgtgtcagtgaggcctgactcccaaagatggtagcaatttcccaggcttgcgctgtgctcagtcagcaagatgtggggcactgtcctatgactgaataaatagtaattcccatctttctatcgccagttaaaaataaacaacctaccaagtattattctttaaaactaagcatggatgttgatggctaacttctgcggcatataagctacagatctcaagttacttctctaactgtaagcatgtaaatgactttaactcctttctataangttatgattttaaattttcagataagaattgcattttaatatggatatgtgtgcccttaaaagctacagataccaaattttcctcgtccaggtctactcggacgaattttcccccttaatctggccttaaactgagactcggcccttgagagccagggcctggccagcagtagttgctcatagacctgggaagcaggggcctgctggaaggaatcactagattgctgcaaaaactcacataatccacagtttcctctttttctttttaaaataagttatcaaaatgttttaaaaacactttatgagaccatagtactcagtgccttttgtgagacagtgggtcatttagccttcagcttccctgtttttgatgtagagaaagcttctatttcactggcctcatcccacaagattgtgcgacctttccccgtcatagcctgtcgtgacaatcacgctattgaaagtggctttctagttaaaatgcaattggaaacttgacagtctctaaatgaattaaaagtttcctttggggctatttagcttaacagcagtctacaaataattaaagtgtgagcttaagaaaagtatctttgcggggagaaaaatgtcagatatttttaatgcccagctataaataattttggtgtcttgatatttatacatgcaaaatag

SEQ ID NO: 136160 - DNA, 483 bp, Homo Sapiens
  misc_feature (11)..(11): n is a, c, g, or t
  misc_feature (209)..(250): n is a, c, g, or t
  misc_feature (439)..(439): n is a, c, g, or t
  misc_feature (459)..(459): n is a, c, g, or t
tttcgtagagngggaaaagaaagtttttattttttgccttgttgtgcattcattctttcaaaagctgtttagaggaaaaaacattttctatcttctcatagtagtaagtagcaactcaggtgcctgaagaccccatcatattttactaaaactctccactccaaaagagcatcagttgtgtgtaggtgaatagaaagctggtgtgtagnnnnnnnnnnnnnnnnnnnnnnnnnnnnnnnnnnnnnnnnnnccacaggcatgagcactgcgcccggctggaaaggttcttttaagagttccacaaagtggccaaaagtttattcttgcattttatcatgcgtatgccttggagttatgtttttggaatatgacttaagaaaacaaactttccagggtaacacgtagccggttcccatctttctagccatctctgcctttngctggatgtgacgcctacgntcctgacagttaatgttggctctg

SEQ ID NO: 136161 - DNA, 1370 bp, Homo Sapiens
  misc_feature (574)..(591): n is a, c, g, or t
aaccttggtcataagtgtgcctggctggtttgcagatatttgttctgctttgtaaaaattggccattagtgcatttattgagatgatctctaaagagctatgccctgacctacccctgattctatgacattggggcccttcttttgctgaaactgccttacgtaatggttttactccttgaaagagatttgacggaatccattttatgccaagtgctgccctgcactgtttctgcaatatgtggtgtatgctgtggtgatcttgctgggaatgattataagtgtgtgtgtggtgggggagtgggtattacatgcattgctgaagagtcatcctggtgttcctcattcctcccaccttcccgtggtcattttaattacggggcagtgtcaccgcaaagggaggaaactcaaagccgaaagcaaaattccaggcctgattctggcttttgaggttcctggttcttgaagccaggcctgacccgactctcagatggggtcagtcccgtcgctttgcagactgaccctggaaatctacaaaatgcagattttcctgatttcctcttctcttgcccagnnnnnnnnnnnnnnnnnnaaagcctggattgtaaccagattttcttttttcccccttctcagctgtagatatgatatctcctttcagggccccagcttaagggcaaagtgagttaatgtgtagacaaaggcgagggacaagagagagttaacatctagacagtggaaaaagccatggtgtgtggtttctgggaaccaccaacacttgcaggtttagctttttcccagggttgactacaagaaagaaaaccatgtttttgcaagattaaaatgtggttgagtgtgcctaaattaaccatccccatttttatcatatttccaccatcacttcagggttttaagagtcagtgctcacctgggcggagctggtagtacattttgcttcttagaaagctaagtcctgggttccgtctgattttaggttccaggaacttcctgagaacacccgatcgcagagggtaattttctggagtttgttttgcagggatagctgggagtatggccaccctgctccacgatgcggtaatgaatccagcagaagtggtgaagcagcgcttgcagatgtacaactcgcagcaccggtcagcaatcagctgcatccggacggtgtggaggaccgaggggttgggggccttctaccggagctacaccacgcagctgaccatgaacatccccttccagtccatccacttcatcacctatgagttcctgcaggagcaggtcaaccccactccggacctacaacccgcagtcccacatcatctcaggcgggctggcaagggccctcgccgcggccgc

SEQ ID NO: 136162 - DNA, 778 bp, Homo Sapiens
  misc_feature (17)..(17): n is a, c, g, or t
  misc_feature (69)..(103): n is a, c, g, or t
  misc_feature (198)..(198): n is a, c, g, or t
ctgacctaggtaaagcncgggaaaaccggaacccgagcgcagcgaagtagtgagcgaggaagcggccgnnnnnnnnnnnnnnnnnnnnnnnnnnnnnnnnnnncagtcgacggtaccggacatatgcccgggaattcggccattacggccgggggggctgccttcagcaagattcaggcaggagagacggaaatagcncaccttccaggcgtgagtcctggagataaaaatggattttaacctaggactgccgggagctggccctccgcggctgctcagactagggctgtgtgtgctggctctcgcctgtttccggtgtctaactggcttgtttctctttatggcttggcttcattccgacctggggtggggccacatccaacccactgcccactggctgtccgtctggcctgccccgcggttccaaccacagtggtgaagcagcgcttgcagatgtacaactcgcagcaccggtcagcaatcagctgcatccggacggtgtggaggaccgaggggttgggggccttctaccggagctacaccacgcagctgaccatgaacatccccttccagtccatccacttcatcacctatgagttcctgcaggagcaggtcaacccccaccggacctacaacccgcagtcccacatcatctcaggcgggctggcggggcctcgccgtggccgccagaccctctggaagtctgtaagaccctctgaacactcaggagacgtggcctctcgctggcaacatcagaggccggctgacgggtatggca

SEQ ID NO: 136163 - DNA, 416 bp, Homo Sapiens
gcagcgggagcgtgggcagccaggcggtggcgcggaggatggatggggacagccgagatggcggcggcggcaaggacgccaccgggtcggaggactacgagaacctgccgactagcgcctccgtgtccacccacatgacagcaggagcgatggccgggatcctggagcactcggtcatgtacccggtggactcggtgaaggtaatgtggactgtggagctctgtgctggtcactttcaaccctgaacctgatgctacttattttgcagttctaagtgcaaagtcggcctggtggatgcttcccattataatattaaatttgcttcttcgtgaggtcacacctcacatccccagtgtcactttaataactagtgttttttacatggtgggccatgacccattagtggactctgcatt

SEQ ID NO: 136164 - DNA, 1557 bp, Homo Sapiens
  misc_feature (415)..(415): n is a, c, g, or t
  misc_feature (553)..(566): n is a, c, g, or t
  misc_feature (642)..(676): n is a, c, g, or t
  misc_feature (759)..(802): n is a, c, g, or t
  misc_feature (811)..(811): n is a, c, g, or t
  misc_feature (1178)..(1250): n is a, c, g, or t
gcggccgcggcgagggccccggctagcccgcctgagatgatgtgggactgcgggttgtaggtccggtgggggttgacctgctcctgcaggaactcataggtgatgaagtggatggactggaaggggatgttcatggtcagctgcgtggtgtagctccggtagaaggcccccaacccctcggtcctccacaccgtccggatgcagctgattgctgaccggtgctgcgagttgtacatctgcaagcgctgcttcaccacttctgctggattcattaccgcatcgtggagcagggtggccatactcccagctatcccaaacaaaatgatttcagcccttgcttgcagagagatgtagactcagacctacagaagagaactgggggtaaaattcccagatccccggaagcttaaggtgnggaaaggccttctgcgttgcgcgagtccttttgtcagccatataacttcttgaccttttaaagcttagttagatcttggcgttgtagagacctgttgtacccgtttttaaatagtctcaaagaactgtccagataacnnnnnnnnnnnnnngaatccagcattcaaaagttttgtttctattcagggtttctcctatgtctgatcattaattgcttttgaatgtttnnnnnnnnnnnnnnnnnnnnnnnnnnnnnnnnnnncccacataacaataaaaccaaaacacctctgtcactgatttctccccaggcttcagaaagcggaggggaacagaaaaaagcannnnnnnnnnnnnnnnnnnnnnnnnnnnnnnnnnnnnnnnnnnncattgcacnacaactctgagttctttattcgtgagcaagcgggccgaagtcgaggcggtctgggtcaacagggaggaccacccctggggagggacgttgcttgaagaagagaactttctaactcgcagacaaacgctttcaaaataccgttggctaggtggctgtttccttggtggtggaaaacgtcatttaaagtccttttcatgttttcatagcaggcaaaatacatggcatgggctggccctgcacccatgatcatgacgttgacgcctcgcaagggcctccagaagccttcggtccgcatgattttcttgagggctccgtagatacttgtgtactgggctttgggatctggactcaaactctgcatttcgtnnnnnnnnnnnnnnnnnnnnnnnnnnnnnnnnnnnnnnnnnnnnnnnnnnnnnnnnnnnnnnnnnnnnnnnnnctccgtagatacttgtgtactgggctttgggatctggactcaagactctgcattcgtgtcttcaccgagtccaccagggtacatgaccgagtgctccaggatcccaggccatcgctcctgctgtcatgtgggtggacacggaggcgctagtcggcaggttctcgtagtcctccgacccaggtggcgtccttgccgccgccgccatctcggctgtccccatccatcctccgcgccaccgcctggctgcccacgctcccgctgcgcagctccatccgccagctcggcggggcgcaggaggctgcaggag

SEQ ID NO: 136165 - DNA, 406 bp, Homo Sapiens
cggcccatgccatgtattttgcctgctatgaaaacatgaaaaggactttaaatgacgttttccaccaccaaggaaacagccacctagccaacgggatagctgggagtatggccaccctgctccacgatgcggtaatgaatccagcagaagtggtgaagcagcgcttgcagatgtacaactcgcagcaccggtcagcaatcagctgcatccggacggtgtggaggaccgaggggttgggggccttctaccggagctacaccacgcagctgaccatgaacatccccttccagtccatccacttcatcacctatgagttcctgcaggagcaggtcaacccccaccggacctacaacccgcagtcccacatcatctcaggcgggctggccggggccctcgccgcggccgc

SEQ ID NO: 136166 - DNA, 584 bp, Homo Sapiens
  misc_feature (519)..(542): n is a, c, g, or t
aaattctcaagtatgaatttcttttctagcaattgcagagcctgtttttgctgtggtcaaagctgactgatagactgtggtttaagtcaacttattcaaaaatgtcttcaaccctgctggtcgagacaagaaatctttatggggtagttggagctgaaacaggttaggcacctattaaaacatcacagaacaggttagattgtggtttgaagaactggatattccccaatgttttaactgagtttatgtgcctaagtcttcaaaatggggtttatagtatcaagtgaggctgtttggttcttctgaaaacacacttattttctgacacatggctagactttatgccaggtacatgctatttttgaaaagctcttttttaagaggtaactgtttattaaaacaatctgtttcaccaaatatgttagccctgtaaaattgccatttccaaaagtttgaagaaaccaaatttgggaaagttaataattcgcctttctatcttcaaggattcaaattgaccgnnnnnnnnnnnnnnnnnnnnnnnnaacttactgtaattatgccccaatagttcgggtgcaggtgca

SEQ ID NO: 136167 - DNA, 795 bp, Homo Sapiens
  misc_feature (118)..(118): n is a, c, g, or t
gtgacccagagaaatgaagaaaaccaaagaaaatcatgtgctattttaatgtaatttatcctatacttttttcaaaaagtcacactcacgtctgcttgagagttttagaggaatatanatgtatgaaagaaaaattccaataacataatgtacaaaaatgttgtcacatacagaagagcaaaaatctacgtattggggactattgctgtgggaagaagggcctgatcttcatactcatcttcttcattgagtaccatgaccccttccaattcatccatactacaccatcatctgtgccatgctttgccatgtcccaggtgtactgtccaccccagtagtatctgccgtttggattggctgcatgacatctattataccaccatccaccaccgtcttctttagaacactgttttctgggatctgatgttaaccagccgtcattgtctctgtcatacgtgctgaagaacatgccgttgtgaatggtcatggtcctgttttctcccatcagctgagatgctccatccatgagggcattaccggctgttcctctatatttgttcactgagatctggtatttgttggcttcattctgtacagtgaatcctccatagtgagcctttactttgtctcctttccagtcctccatttctatcaaaagttctgtgggtcccatcctggtaagctggctaattttatcatttccaagccaatattcacctggtaggccacagtaattcttcccatccccggccgtaatggccgaattcccgggcatatgtccggtaccgtcgactg

SEQ ID NO: 136168 - DNA, 859 bp, Homo Sapiens
  misc_feature (611)..(632): n is a, c, g, or t
  misc_feature (648)..(658): n is a, c, g, or t
  misc_feature (774)..(795): n is a, c, g, or t
gtccggaattcccgggatgacaagagctcagatctccctcccgatctccctccccacctccgaagtctcctccgtggaccacaggtggatctttgtgcgaacaacttgcatttcggaagccactgtccgtctttaaacagaaagtcgaaggagccacgaagcaagcggccgtccgggcgtccgcctccgtccccttccatgttcctcctcttccttcgcttcagcctcttctgttatgttttgtcttgaattttatttagactttttcagtgggtatttttctgtcttccaacctctactgtaaactttctggtccgagaacgagccgaacacagcgcgacgcagggactaggacggcccggtgaccgcgcggattcaggattgcggggacgcagaaaggttaaggcacttttaaaaactatagcaaggctcctgtttatttattctactttctttccctaataatcaaaacaccgcgtaggctcctccgtttatcagtattaatggtgtaactttgttggcaatatttgccgtgtagaattttttttagatatccattgtaaatttgaaacacagaccgatctgtgtaaaaacaaatttccatatgtttnnnnnnnnnnnnnnnnnnnnnngaaggactaccctccnnnnnnnnnnngtattttggctgctagagtgcagcatttgtgacacgtatttgaaatttgaaatttccttctgcactgtataaaaggaccatttgaggatgttttgccttttgtgtattttttcctnnnnnnnnnnnnnnnnnnnnnntgtataacatttgtacatggcctttaaaattgtatcaactagaaataaaattgcatgagtattt

SEQ ID NO: 136169 - DNA, 775 bp, Homo Sapiens
tttttaaggattattgcagtttatttaacactaaaagtagtcatgcttcatatacaataaaatatattacaatgatcatttttaatgctttattcattgattaaaagaatatacatttaacataaaccatacaacatcagtcatcaggtcaaacattcagctggtttccttacagtttctgtcaggagttattttatctgatcacatttataagataaaatctcaccacatctggcatttacacacactgtgccagtggattcacactactgatgtacatataaaatccgcatggtatgtgctcactggagacaaaacagtgcacacctgtcaaaaggtcattttaatataagatggtaaaaccatttgtaaaacacatataaacttttttccataaatagaatcatatctggacatctgttgcataaattgtgtttccaaagcttacaatagagcagccaggtctcagcactgctgggcacccaggttggctacttactttattattgcagactgtcctttaacattaaatgcacaacattcgtaccacttaaaactggggtcaggtggaagtctcacagagaccacgtctgtaccgcggttgccctgaaacagttaataggcttttaaagcctctcagatataacaaggttttaaaacatacttcatggaatgttcttcatgtatcatagcagctcatacctgtgatagaacaagctttcagtttttcctttctttcctttacattcactattcacagtgaaacaggtgcatg

SEQ ID NO: 136170 - DNA, 459 bp, Homo Sapiens
cttgaaatgttttatgggaatgtattagaactcttttcttctaaggactgagacttccaggggattgccatcttacctgtctcttctcccatgagggagaaggaaagcagcttagcttatgtccctagctgcaggaagcccctattttttccaagcacgaagccaccagttctcccccagggagcatcaggaagggacatggatgtgcttccttccacagggcccttcctacctttggatctgtgagaaggtgaatacaaagcagcaggcagagtaaaatctgctgggactgcctggagatttgtcaggagctgcagacaagtaccttggagcattctgttatttttggaaagttcaaatatgcagggacaaggaggttgctgactgtactgacaggctctaagtcattttctccaaaaactatctattcaattatcaggggctggtcttgaggaagga

SEQ ID NO: 136171 - DNA, 1313 bp, Homo Sapiens
caactctgacacagtcaaacgcttagttcattgtgttctggcaaaatttaccacatctttggccaaagaggggggaacaagcaagagggagtcacatctgagcacagcagctcatcccacaagctacaagctgctcagaggctcgaagcccccaggggcctccacttctcccctcacattggattctcccagcccgcgtccttcctccccctctcacatccgccatcctttcctctcgccggccccctgacggtgcaggccggagccggcacctacgtcctgatcgacatggttctcaacaagatggccaaaggtgctaaagagattgatatcgcagcgaccctggagcacttgagggaccagagacccggcatggtccagacgaaggagcagtttgagttcgcgctgacagccgtggctgaggaggtgaacgccatcctcaaggcccttccccagtgagcggcagcctcaggggcctcaggggagcccccaccccacggatgttgtcaggaatcatgatctgactttaattgtgtgtcttctattataactgcatagtaatagggcccttagctctcccgtagtcagcgcagtttagcagttaaaagtgtatttttgtttaatcaaacaataataaagagagatttgtggaaaaatccagttacgggtggaggggaatcggttcatcaattttcacttgcttaaaaaaaatactttttcttaaagcacccgttcaccttcttggttgaagttgtgttaacaatgcagtagccagcacgttcgaggcggtttccaggaagagtgtgcttgtcatctgccactttcgggagggtggatccactgtgcaggagtggccggggaagctggcagcactcagtgaggccgcccggcacaccaggcacgtttggcatttctctttgagagagtttatcattggggagaagccgcgggggacagaactggacgtcctgcaagcttccgggcaagtgagacaatcacaggctcctcgctgcgtttccatcaacactggggcgggtaccatggacggcccccgttcacccacaccttgtcgcccccagaagaaacgattcgggggctccccggggggcagaaacttgtgccccccctggaatatcgccccccttggagggtgggcatccccctggaccctcaccttttgccaaggtacaaaatgccaccccaccctttggaaatgggggtttttaaatggtaacaaaatatgggttttccctcaccctttggaaaaaacgaatggcccccccgggaaaggctttacacctggagaagataca

SEQ ID NO: 136172 - DNA, 744 bp, Homo Sapiens
ttttggatttttccacaaatctctctttattattgtttgattaaacaaaaatacacttttaactgctaaactgcgctgactacgggagagctaagggccctattactatgcagttataatagaagacacacaattaaagtcagatcatgattcctgacaacatccgtggggtgggggctcccctgaggcccctgaggctgccgctcactggggaagggccttgaggatggcgttcacctcctcagccacggctgtcagcgcgaactcaaactgctccttcgtctggaccatgccgggtctctggtccctcaagtgctccagggtcgctgcgatatcaatctctttagcacctttggccatcttgttgagaaccatgtcgatcaggacgtaggtgccgctccggcctgcaccgtcactgcaatgaacaattattggacaagaacggcccctgtagcacttgtttacttttctgcggaagtccaggagggaccttgaggaggaagggactcctcggtcataccaactcaggaagtggaactgcgtcacggtgcgcgtctcgttggtctgcaggttcttcagatagaagctcctcaccaggaagtcctcacaccagatgtgctcggagaccaggttcacctcatagatgtggtagagattggagccttcatccggccagtagtggtagcactgccggacgccgttctccgcgaggggtgtcagcatgacgatcaccacgcggccgca

SEQ ID NO: 136173 - DNA, 727 bp, Homo Sapiens
gcggccgcggggctgcgcggcggtggcggcggcgctcctcctggtgctgctgggggcccgggcccagggcggcactcgtagccccaggtgtgactgtgccggtgacttccacaagaagattggtctgttttgttgcagaggctgcccagcggggcactacctgaaggccccttgcacggagccctgcggcaactccacctgccttgtgtgtccccaagacaccttcttggcctgggagaaccaccataattctgaatgtgcccgctgccaggcctgtgatgagcaggcctcccaggtggcgctggagaactgttcagcagtggccgacacccgctgtggctgtaagccaggctggtttgtggagtgccaggtcagccaatgtgtcagcagttcacccttctactgccaaccatgcctagactgcggggccctgcaccgccacacacggctactctgttcccgcagagatactgactgtgggacctgcctgcctggcttctatgaacatggcgatggctgcgtgtcctggctcacgagcaccctgtggagctgtgcagagcgctgtgccgctgtctgtggctggaggcagatgttcttggtgcaggtgctcctggctggtcttgtggtccccctcctgctagtagccaccctgacctacacatacctgcactgctggcctcacatgcacgctggtactgcagatgaagcttggatggaggctctgact

SEQ ID NO: 136174 - DNA, 461 bp, Homo Sapiens
  misc_feature (36)..(36): n is a, c, g, or t
  misc_feature (282)..(282): n is a, c, g, or t
  misc_feature (284)..(284): n is a, c, g, or t
  misc_feature (286)..(286): n is a, c, g, or t
  misc_feature (288)..(288): n is a, c, g, or t
  misc_feature (298)..(298): n is a, c, g, or t
  misc_feature (311)..(311): n is a, c, g, or t
  misc_feature (398)..(399): n is a, c, g, or t
tcagtgctggagtccagtgtgatctgcctgatcttntgcactgagaatagggcaatcttgatcccaatacaggggctggatatgaacaggcaacagctgggtttctgaatcagaaagacttggttaattgctaattgcttaggtgagtaatttaattttgttgagtcagattcctcagctataaaatgcagatgacaatacttattcctccaggttgtggggaaaatggagactctaagcacgatgtccatttcacagaaagataccaatttggtggcttanantnanttctaccttnagaagtggctatncctgccacccaaacagacccttgactctctctctctgctggctagaggggattctggcttttcctgccagagccacccctttccctnntcctaaagttgatggtggttctttaaggaaagggagaagtgcacggtgtgatagggcaggaa

SEQ ID NO: 136175 - DNA, 582 bp, Homo Sapiens
ttgtcttgtcaagctttattgggcaggtgacttttgctcatttcactcacatcttgtgggcttctcggcggcaactcagggcttgagcatttgatgtaggggagttgctatggcctcactcggtgtttcttgggcaggtgacacctagattagtgttttattgaatagctgatgatataaactggctcatttggtgccaagactgaccattaccaccataccaaggtcatcactgatcagaggcctaacccaaggagggggtcatgtgcaggcccagcggtggggaggaaagatgctgcagaggagacggatgcccacagaggcccctgagcggataccatgctcactaagtggtaagtatagactcaatgtaggctgtaaggtctccccctgtgcaaatgggaccccgtccacttgagagtcaagggtctgtttgggtggcagggttagctacttctgaaggtagaaaggaaaataagccaccaaattggtacctttctgtgaaatggacatcgtgctcagaatctccattttccccacaacctggaggaataagtactgtcatctgcattttatagctga

SEQ ID NO: 136176 - DNA, 1228 bp, Homo Sapiens
  misc_feature (63)..(98): n is a, c, g, or t
  misc_feature (1091)..(1099): n is a, c, g, or t
tatgatcactaggggctagttcgagcgaagacgagcgcaggaagtagtgagcgaggaagcggnnnnnnnnnnnnnnnnnnnnnnnnnnnnnnnnnnnncagtcgacggtagcggacatatgcccgggaattcggccattacggccgggacccacacggtggctcccagggacagctgctgcatcctggtgaccacaaggcccaggcccacaacaaggcactgcccccaggcctgagcaaggagcaggcccctgactgtaggcagcagtgatggttctgagaggagctggatggatgactacgattacgtccacctacagggtaaggaggagttgggaggcaacagaaagagctatggaaaaagagaatatcatgaaacagaacaagatgcagctggaacatcatcagctgagccagttccagctgtggaacaagagattacaaagcccgtggagaatgacatctcgaagtggaagccctctcagagcctacccaccacaaacagtggcgtgagtgctcaggatcggcagttgctgtgcttctactatgaccaatgtgagacccatttcatttcccttctcaacgccattgacgcactcttcagttgtgtcagctcagcccagcccccgcgaatcttcgtggcacacagcaagtttgtcatcctcagtgcacacaaactggtgttcattggagacacgctgacacggcaggtgactgcccaggacattcgcaacaaagtcatgaactccagcaaccagctctgcagcagctcaagaccatagtcatggcaaccaagatggccgccctccattaccccagcaccacggccctgcaggaaatggtgcaccaagtgacagacctttctagaaatgcccagctgttcaagcgctctttgctggagatggcaacgttctgagaagaaaaaaaagaggaaggggactgcgttaacggttactaaggaaaactggaaatactgtctggtttttgtaaatgttatctatttttgtagatattttatataaaaatgaaatattttaacattttatgggtcagacaactttcagaaattcagggagctggagagggaaatcnnnnnnnnnccccctgagtggttcttatgtatacatagaagtatctgagacataaactgtacagaaaacttgtccacgtgcttttgtatgcccatgtattcatgtttgtttgtagatgtttgtctgatgcatttcatt

SEQ ID NO: 136177 - DNA, 674 bp, Homo Sapiens
  misc_feature (74)..(113): n is a, c, g, or t
tttttttagttgtaaacaccaggcggctttattggtagcattgcaatctgggggtggagcagctttactctgannnnnnnnnnnnnnnnnnnnnnnnnnnnnnnnnnnnnnnncccaggccctgtcctggctggtcaggtctggtgcagaggagctggaagcctggtccttccttctggtcctcggttccccaggttaggtaataattcacaatgcttgactcggactccgggctccctctgcacggtcataggttaactgctgcggcgcttcatcttggctgaggtcctctgcagtctctggatgatgcgttctacccagggctggtctgggggtgcacagagctggcggcccctcagtgtggtgaacactacagcaggcaccctgcagccatccttgatgagaaggtagtggaagttcctcacgatgtacccagggatgggtttctgggtcacagacaggcagcagtcttcagcatcattggtgccactcagagttggggctggggaagtccagagaaccagcaggctgagggccagtagcagggccatggagggtgaacagaggcaggccaacggtgaatgtgtgagcgccagctgtctgggtgtgtgcaggatctgtgtgaggctgcagggcgactgggatgcaggggtgaaatgcaaggtgtgagtgat

SEQ ID NO: 136178 - DNA, 452 bp, Homo Sapiens
  misc_feature (62)..(62): n is a, c, g, or t
  misc_feature (151)..(173): n is a, c, g, or t
tattcttatttttattttattgttattatactttaagttctagggtacatgtgcacaatgtnagcgttagttacatatgtatacatgtgccatgctggtgtgctgcacccattaactcatcatttagcttaggtatatctcctaatgctannnnnnnnnnnnnnnnnnnnnnnacaacagtcccaagtgtgatgttccccttcctgtgtccatgtgttctcattgttcaattcccacctatgaggtccatctgttaccaccatgttcccaacattacccaggatagggctggacttagagcaggcacacagagatgtacaattgaagatcaaatgggtgcgcaggttcttgaatgccatgtagaggggctggtagctgcaattggggatcagagggagccccaggcttccaggagcagggggagggcagtagagggctccatttagggattc

SEQ ID NO: 136179 - DNA, 759 bp, Homo Sapiens
  misc_feature (533)..(533): n is a, c, g, or t
  misc_feature (651)..(651): n is a, c, g, or t
  misc_feature (710)..(710): n is a, c, g, or t
gcggccgccaggagcctcatgctgaccggaggggcgcggcgtgggagcagggacatggggagggcgctggccgtccggagcggcggcccggagacgccacccagctctgctcggctttctctgcccggggcgcgccttccggctctgctggctccggctgcgccgtcggtggatgcccagggctgtctgtggccgtgcgctgcgctctgcgttttctccgcgctctctccacagcctccctccgcccgccctggcctcttttaaatccgctcctgccctcgcagcgagcgagctcattaatatgcagaaccactcggtgactcactgagatttctcaatgtggtgaggggaggagaccttcccagcccgcccgtcgcccgccccgggaaaggacccgctatcgcagcggcgcacacccggagccacgcgcgcacacgcacacacacatccgctaccctctcgctcacacaacacgccgccttcgcacacttgcacacccataccacagcgcgcacacatttcgcaggtcccgntctgcctttggggagcccagacggtggagaggctgctgaagggcactgcttttctgaatcgtgtggttctctcgtctgcccggcaggccagcttttccgagccggcgggagacccagnccagggctcagatcctcaaagacctgaaagggttttggagcaggtgccaagtgtgagtnctgcaggcctgacccctcatatggcctgctgggcccatgtatagcgagg

SEQ ID NO: 136180 - DNA, 658 bp, Homo Sapiens
  misc_feature (171)..(271): n is a, c, g, or t
  misc_feature (273)..(282): n is a, c, g, or t
  misc_feature (323)..(383): n is a, c, g, or t
  misc_feature (435)..(435): n is a, c, g, or t
tttttgaagtccaacctggccatcgctttatatttctgcataagacaagcacagttgagatgctggcttctggcttcatacctgtgctaaagcaaggcttcttttttccttatgttacttttttgagacaaggtctcactctgtgacccaggatggagtgtggccacacannnnnnnnnnnnnnnnnnnnnnnnnnnnnnnnnnnnnnnnnnnnnnnnnnnnnnnnnnnnnnnnnnnnnnnnnnnnnnnnnnnnnnnnnnnnnnnnnnnnncnnnnnnnnnncctccggtagagatggggtctcctatgttgtccagaatggnnnnnnnnnnnnnnnnnnnnnnnnnnnnnnnnnnnnnnnnnnnnnnnnnnnnnnnnnnnnngtgtgagccaccatccccggaccttttcttttcaaaacatacataaaaatgngaatgaataggaccaaccagtggctgtgatgcagacaaaacgccctgtctggaaagcatgcgtctaggtaatcttcctccgctttaccaggcggtctgagatctgggctagagcagcgggagggacagggtgcccaattagtgatcatcttcactgacggcgccacagacacccttcttttggagatctacagcctacaagctttggctatctccctcgtgcc

SEQ ID NO: 136181 - DNA, 1247 bp, Homo Sapiens
  misc_feature (670)..(721): n is a, c, g, or t
  misc_feature (940)..(940): n is a, c, g, or t
  misc_feature (958)..(958): n is a, c, g, or t
  misc_feature (969)..(969): n is a, c, g, or t
  misc_feature (1020)..(1020): n is a, c, g, or t
  misc_feature (1034)..(1034): n is a, c, g, or t
  misc_feature (1040)..(1040): n is a, c, g, or t
  misc_feature (1046)..(1046): n is a, c, g, or t
  misc_feature (1083)..(1083): n is a, c, g, or t
  misc_feature (1117)..(1117): n is a, c, g, or t
  misc_feature (1174)..(1174): n is a, c, g, or t
  misc_feature (1194)..(1194): n is a, c, g, or t
  misc_feature (1224)..(1224): n is a, c, g, or t
  misc_feature (1235)..(1235): n is a, c, g, or t
gtgaagttctgtacaagtcactggtagaaatgtggattgtgttagccgtggtaactgaaatacgagagtgagacaggagctacacgtaacataggtaattaatagcaccgtacttgttatgatgagtgaaaataactgggaacttggaagcttgtgttaatggcagataaagatggttcacctgggagattaaaacttgaatggttgtacagaaaagcacagagtggaatggcacatcaatgacagtaagggagttagttctaggaacagctcctgacagtaagattcccgcaatagtctccgcctcgttcgtctatggtatgcatcccagttcattttcttcttctgattattgtcatctttccctttgccaaatgggcagttattgtttcagggagagaagctgctcattggccaatcattctggtgtgcagtgctccatcggattcgtacatgtccaacaaggcatgtctggatgatgcaatgtctgtctgaccccctttgtttaactaaaagaaaattatagcactgagtaatctggcacttggataaatctccaaaaagatacagactaaaagaaaataatgataacagacccacatagtgcacattcttctctggttctgatgtaggttagagagtctcattctgaggtagccttctagatacnnnnnnnnnnnnnnnnnnnnnnnnnnnnnnnnnnnnnnnnnnnnnnnnnnnnacaaagtgctcaaatacaatgcttgcaaatgtttggtctcttggatttcactctgctagcaatgggaaaatgtggaaaacaaaaatccttccatgcagaacatccatgaagctaaaattaaaccaaagtagtatactcataccaaaactctttaagagttccttgggtattttgaggattatttaaaatcatgtaatatgtggcaaacttatgccatgncatcatccatggcttccnatagaaattcngttggaagaattggggggaagatacatatatatatatagtttatttccccntttagaaaaatccnaatggnatatcnaatatattccaaagttggccatgggtatttgggtacnaaaataagtttggggcagttaccgcatggttccngagcggatttgggaggggatataattaaacagtagccttttccgatgtgatgatgantataaaaggaagaagggccngattatccagtgccttgggccgggacatcnctacatccccncttggctgaaac

SEQ ID NO: 136182 - DNA, 554 bp, Homo Sapiens
  misc_feature (490)..(490): n is a, c, g, or t
ttttttttcagttcagcaaatgtttattgggcacctacaataggcaaggcacagtaccagctgctgtgggttacaaagacaagaaggctaggcctcaccctcgagaggcttacagtctaatagggagagacacactcacaggtaacaaaaatacaaggcaaaatgaggtgagctctatggcagaggcaaaaacaacgggagaacagcgagcagagatagatcagacatatctcagcagatcagatgttggatgcagggagtgacgtttcagccaggctctgggaggtgggtcggattcgcacaggtgaactggaaaaaagaggacactaaggcacaggcaaggtatagaggtgggaaagtgcaatgaatgttcagagaacagagatgcctgccttgaccaatacataggaggccaacaggataacagagggacctaagctggggaagtggtttcaggccagatggtgtgatcgctcgtagtaggatttcnttccttccttccttccttcctttttttccaatgaaacaagccttgatctacccccaggctggag

SEQ ID NO: 136183 - DNA, 942 bp, Homo Sapiens
  misc_feature (726)..(726): n is a, c, g, or t
tttaacaggcaggaatgactccatcaccccccaaggtttatttaaaagttatagaaaagcatagcctgggaggggcatccttgaactgaccagagttttggagggacccagagggacacactggcatggcccggggtggacggcaagaaacagaaagtgagagaggtatcctaagtcttctctacaagagccactggctgcccaggattgctgctggtccccggagcggcaaaaggcttaaaatcaggccaactccctctttccagttgccagacgggcaggaggtggtgggggtgcagagggaggaccaactcaggtgcagggattaagacttgacccaaaagacagaggcgtggggacagctgggtctgtagggcgacggttttatcggagaaagatccggcccctcctgtgccgatgtagcccagaaatgagccgggtcacagtcctgaattagcgtgttatcaggagggagacattcctcttgctgctgctgatgggattgctaaacttggatgatgataacttggagtttccagaactcaacttctttacagcatgagggcctgcttggaaggtctgcgtgttgtggtggagctttgcaaaaaccttatttcgagcatccaggagcttcatggctctctgcacctccctgcttttgggttcccacacaccttcctgtgtctcttggggaggtagaatatcgcagcaggcagattgcagctnccgctcacctcctggatccggtaagtccaggcgcgccggagcacagcccacccaatggggtagtggtaggccaggcagcagtcctcaaagacaccttgggtgtggacagcgggggcccaggctcccaggaagccggccaccaggcaggccaggagccacaggttcatgctgcaggcgggtcctcctccctgggcaccggacgaataacggggccac

SEQ ID NO: 136184 - DNA, 773 bp, Homo Sapiens
ttttaccaggaactgtgtatatatttttaatcttcataaaaatcatagcaaatcatttcaaatgtgggtaatacaaacattctcgtagtaccagtggctgaaccatcatcttccccatgtcatctgaacaggaaccgatacgatgtcacttagtcccaactggatcctttacttccaccaccaaaattccatcatgacagaggactgcagacaaatctttgatttccacaccatctggtagtttgtactgtcgggtgaagcttcttgagataaaaccgtgctcatccattctggttccgtgttgtgcttttatcagcagccagccttcgaaggtctgaatgatgatgtcttcagggaggaactggaccacgtccagcaggatctgaaagtgggatttgccttctcggggtggcgtctctgccgctgagtccactggaggagactgcgctgccctggttttcctcaggtccacgatggttggcccaggcagtgcatataaagcatgatccagcctgcagtcttctagacctcgagcttcaaactcttcctggtaacgcactggaatctctatgaggtgcctcaaaatgatttttgccatagtgaaggcaaaaacagccttgaacagcctccttctgccaaccttccactgccttcagtcagtggcgagcccctgcagttgcctactgactggattaccagttgaagcagctagtggtttatagccgtgcccagacgcaatcacttaattaggcctgaatcatagcacggaatgc

SEQ ID NO: 136185 - DNA, 314 bp, Homo Sapiens
tgactcaaagaggaattttattataagtgtgagagatggaaatgggacagttagggtctctcagtttcattttttctccattctttcaccattcttctgtacaaattgaatataaaaattcattttagggtcctacgaagtgttctcttattcctttttactctacaggttggatgtacaaattccttcagagaacatgcattgaactacattcaaggcagtgcgtagatactggagaaatattgtaagcctcaaatgtgactatagtaatgaaaccacttcccaaaccacatgtcaaattagtcttattactt

SEQ ID NO: 136186 - DNA, 526 bp, Homo Sapiens
  misc_feature (59)..(67): n is a, c, g, or t
aatatagccgctgccatagttttctaacttgaacagccatgaatgtttcatgtctcccnnnnnnnnngtctatagctgttaccctattttagtggttgaaatgagagctagtgatgacagaaggatgtggaaatgtcttcttgacatcaattgtgtattgctggtaaatcaagttggtaacggactacttctagcagctcttaccactatgacttaagtggtcctggaaggcagtaagtggaggtttgcagcattcctgccttcatgagggcttctaccactgaccactttgcacgtacctggctcccagatttacttaggtaccccacgagtcgtccacataagcagcttcatctttaccttgccagagttgacaattatgggatactctagtctacttatacttgtgttcccatctgtctgccatcctctgaaggccaggacccagtcatacatccttagaaaccaaagtatggtttttgttttctcttggaatgtcaggtcttaaggcatttaattgagggac

SEQ ID NO: 136187 - DNA, 480 bp, Homo Sapiens
ttttgctgggcacatgtgtctattgttatgaggggagtccggaatgtttgagggttgaccagggatgccccaccccctcctaggggctgggcttgggcgtttctgaaagaggtgtctgcaggacagagcccagtatcagggaccaggctgtgggagctggaaggcagaggcagacctatctgggccggccggggcagtgggctgatgggtatcacaggcagcccaatctctggccactttggcacaggcctagggcatacagaggccccagacccagcgctgacaagcactgagaagggacagctttgggccccagagggtagcagcctgagcccagggcagcagggggaggcacgagtcttactcagaggccggggtggccagcacagtgctgaaggctcaggggtgtgaccaccctcagccatccaagctgggccagaggagccttgagtttggcagtggctcctctgccagctcccg

SEQ ID NO: 136188 - DNA, 582 bp, Homo Sapiens
atcagccatccttggggaggggagtgctgacacagaggacaggaagctcccggtccctggcgccgacgtcaaggtccacagggcacgcaagaccatgccgaagtccgtcgtgggcctgcatgcagccagttaagatcccagagaagttcgagaagctagagatcataaggaacccaaagaggagatcgaccaaaacatttctgactttggacgacagcagcttttaccccccttcccatcccttcatcagtcgctacctcagaaccagtgctacatggccaccacaaaatcacagacagcttgcttgccttttgttttagcagctgcagtatctcggaagaaaaaacgaagaatgggaacctatagcctggttcctaagaaaaagaccaaagtattaaaacagaggacggtgattgagatgtttaagagcataactcattccactgtgggttccaagggggagaaggacctgggcgccagcagcctgcacgtgaatggggagagcctggagatggactcggatgaggacgactcagaggagctcgaggaggacgacggccatggtgcagagcaggcggccgc

SEQ ID NO: 136189 - DNA, 1103 bp, Homo Sapiens
taagatccggctcccatggttgcaaggggaatgagtatgctctaaacatctcaatcaccgtcctctgtttaaattacttgggtctttttcttaggaaccaggctataggttcccattcttcgtttttcttccgagatactgcagctgctgtctgtgatttggtggtggccatgtagcactggttctgaggtagcgactgatgaagggatgggaaggggggtaaaagctgctgtcgtccaaagtcagaaatgtttttgttgatctcctcttttggttcccttatgatctctagcttctcgaacttctctgggatctttactggctgcatgcaggcccacgacggacttcggcatggtcttgcgtgccctgtggaccttgacgtcggcgccaggggccgggagcttcctgtcctctgtgtcagcactcccctccccaagggtggctggtggggcggctggcgtctggggaaaaagcggcttggagtcctgcctttgccagcccctccaggaaagggtttttgcagcatggccaggcagcgaagaggccagagtgctggtagtcctcaagggctgtgcctgtagggccggcttatttaagatgtatccgttgctgccgatgacagaagtctgcaacaaagtcgtcggcagtgacgtggttttgcttcgccgcttctgagtctctttctgaaaccccattttccgctatccgagttagtgtgttggtgccatcctgggggttgacccttgcgctgtcctgagtgtgctttgcagcatttgcatgactgctggcatcgctgttttcacaagacccattggtctcaccgtccgcagccatgtgggcctctcctgcctgtttctctgctgagccttcatcggcagccataggtgtctcttctcccagcagctcggttttcacacagcaatcctgctgaggctcccccctcgccggaactgcctcggcatcggcggcggccatggcccgggcccgcagcgtggccccgcccctcccgcgcgcccggacgcgtgggtcgacgatatcccgggaataccggaccggtaccagcctgtttctgcaacggtctttgttgttcctctctctccccg

SEQ ID NO: 136190 - DNA, 518 bp, Homo Sapiens
  misc_feature (20)..(20): n is a, c, g, or t
agctcccggcccctggcgcngacgtcaaggtccacagggcacgcaagaccatgccgaagtccgtcgtgggcctgcatgcagccagtaaagatcccagagaagttcgagaagctagagatcataaggaaccaaaagaggagatcaacaaaaacatttctgactttggacgacagcagcttttaccccccttcccatcccttcatcagtcgctacctcagaaccagtgctacatggccaccacaaaatcacagacagcagctgcagtatctcggaagaaaaaacgaagaatgggaacctatagcctggttcctaagaaaaagaccaaagtattaaaacagaggacggtgattgagatgtttaagagcataactcattccactgtgggttccaagggggagaaggacctgggcgccagcagcctgcacgtgaatggggagagcctggagatggactcggatgaggacgactcagaggagctcgaggaggacgacggccatggtgcagagcaggcggccgca

SEQ ID NO: 136191 - DNA, 460 bp, Homo Sapiens
tgggtggcaagtctaatctattcgaatctttacaggcacttttctttttacaagttggaaacttgagggatccttgaggaaagcccagggcatgaatttcagttccggagtccccgactcagtggcccacctcagggatccgtcagtccttcgtgccaaggtcaggctcaactccagcctgcggtgccgctcagccgcactcctcgaagatgtctgggtagtgccggaagagcacaggcgggtcccggtcacctcggacgggggcccgaggcacagcccggatcccaggcctccggccccgccgccccccggagcaggagcggtggatccactggtgcgcttccactgcgaacttcctcttgaagcgcatgccacactcggggcaggggaaaggccgctcccccgagtgcatgcgcctgtggctgaccagcagtgaggggtaggtgatagcggcggtcgc

SEQ ID NO: 136192 - DNA, 377 bp, Homo Sapiens
  misc_feature (169)..(169): n is a, c, g, or t
  misc_feature (190)..(190): n is a, c, g, or t
  misc_feature (329)..(329): n is a, c, g, or t
  misc_feature (353)..(353): n is a, c, g, or t
atgtttcacaatttgtatggctgattctacgcacatttaaatgtgtttatcgacaattgtagatttcggttttcctctggttaaaccaatgtggaagtacacaggatgggagctgagagacaagcatcctgggcccagccatgctggcctcagtgggccaagctggggncacagatgacctctgctccgntggatcctgctggctcagggtggggaaggggcctcaggagaaggagtcaggctctcttctttattctcctcacagccatgggtgaatggcattcctgggagggctgggtttgggagaactcgctgaaccatgctcttgnatccagtctaaggtgggctcctancgggggcttggttgggttcctcca

SEQ ID NO: 136193 - DNA, 811 bp, Homo Sapiens
cctcccttttcattacccacagtataatgctttttaactatctatccacttgacagcccaggattgccgcagtccatcagtccatctctcatgtaaggtcttgttcagggttggaagcacagacaggatgcctcgggaagactctctcacctcagaacactcaatccaaagaatgcccaatataccaccaggcacagtaaactcaaacaacagaagcaccgaagttcaactcagatatcattcttgcctatcattgaaaagacactaagtggaatggcctggggcttatatttggatggaaaaacagactctgaaagaatgtactggaaatatgcttgaagttcagcttcatgaaacgattcccctcaagtcaggtaccctgagagcctgtttctctcagctctaccatgctgccagtgggaaccaatgggctggacagtggtgcttcagggtaaacagaggcttcctatgtctgtttacaagcccagaatgcccttgagaggagccaggctaagaaaggtgtgatgagtcagtggacttcagagcaccaaggtggtttggactcccggtcaggtatgtactacacaggcagtgactcaagaaggcaaactgctcatggggccaggggcccagtaccagctccaggcactgagggaagagaagaaggtgcaaagagggaggactataagacaaagaaatgaagcaggagagtaaaattcttttcataaaaaaattagcctgatagataacaaatatacaaagttaaaatttgcggacgcgtgggtcgacgatatcccgggaattccggacc

SEQ ID NO: 136194 - DNA, 1240 bp, Homo Sapiens
tggtaccggtccggaattcccgggatatcgtcgacccacgcgtccggcaggcctgaaggatgatggttttgtcctctttggttctcacctgcttgagaagtaaaacagtaactttgttcttctgggcccttaagctttttgtggttaagtcttccttttcagaagtagatgtcattatatgccaaaagtctagctctttgctttaccatacagggacctgtcccaaagaaaaaggctctttttttagccagcatatttccccttctacccttttactttgttgttctgattttaggactctggctggccatgtgcttgtggttgcctctcctgcatttgccactggatttgcactgcatcgtttggagatacaaagcgagcagttcttggtcagaaccctcctctgcttttcattgtgtttgataatggttactgggtccttctctcaagggtagcaaggccaagctgatggctgcttgtttaggaggccatcagttccttcctgtggagaagggtctgaaatggaagtcagtggtagaaggggctggtctgctgggcagggcttacatccactgagttctaagattcctttcctgatctgcacctacgcctggtctgtatggtggaatttgtcagctggaactcagaaacaacaacttgaaacaaaaaataatcattagaacatatttgcataagatagctatttactctggaaaccaacaacttttgagatttcccttgccctgtggacgcccagctcctgtcatccttccttaggtcctgcagtacagtcttcccctgaatgccaccggggacccaggggactccacccccctaagcaaagcacacacaatactcacagttgatgagttgctggtcttgagtcccagctctctttacctccctttactcaaccagccgacgaccatgactgaggagggggttctacagtctaaggattacaaagtcgtaagcatccatgctccagcaagcacgaccgtagagttgcaaaacacctccgaatgtgagttcaactgaaagcacgcgactgggggagccggaacggcccgacagggaggaacagcatagactacagagcactgaggccgcgcgggcatggaggctggacggcctgagccagcgtagccaagcacgagaggagcaaagccgcaccaaggagccacgcaacggcgggaacccggacggcgaaaaggggccctggcacgcctcaacggcgaca

SEQ ID NO: 136195 - DNA, 414 bp, Homo Sapiens
  misc_feature (164)..(164): n is a, c, g, or t
  misc_feature (218)..(218): n is a, c, g, or t
  misc_feature (343)..(343): n is a, c, g, or t
  misc_feature (347)..(347): n is a, c, g, or t
  misc_feature (370)..(370): n is a, c, g, or t
  misc_feature (376)..(376): n is a, c, g, or t
  misc_feature (387)..(387): n is a, c, g, or t
  misc_feature (403)..(403): n is a, c, g, or t
gatgttaatgttccatgtttgtctttaaaatggggtcaacgtttaaagggggacaagaggcagggcaatgtgaatgttaaaatcggtccagctcggctttcatctcattttgttcagtttctgtgttggatagatccactggaatttcagttttctttgttgcntgacatctcggatgttctgtccatgtttaaggtaccttttactgggtggcactnagctttaattgctattggagtagctaggtttgagttgtattttgataaaagcgctttcctaggctgtccagcgctcgctgcagccgggccgtctcgcagtccagcgtgctggccagagaccgcanttcncgcagaagctccggatagggtcncatgantagcacagcgnggaaggactcagatgngtacgcagacc

SEQ ID NO: 136196 - DNA, 645 bp, Homo Sapiens
agagaataaaacttggatttattcagaccgtatgcttcccatttggggtgcagagtgggggacagtcatggggacagagaaaggcagtgcatttggcttctagggacatgctgattgctgactctttgggtgacctttgggccaccagatgaccagctgaatgatggagatggtgatgaaggggctggcggccaggtccttctggagacctcacagtgattccaaacagagaccaacgctgtgtccagttggctctgttcctctccagggattaaggagcagatggctgggaacactcagactaattaaagaaataaaaactctgggtagagggacactctggggggctccaattcaggcagtggtgtgcaaattcacacatgtcgatgcgtgggccaaggccctgtgtggaaaaacatgtgtgtgtctgtatatattacatcctccacaagcagctgggagcccccatcctacccccacgcctgtgcaactctgtgggcctcttccagacctttctttttccatttggaagaactgggcctattgaaagaactgcgaaagggaaatggcccacagtaatcctctgaagatgccatttcctgcttggtccttgctaccagtgtacaggaggcaggtacccacttc

SEQ ID NO: 136197 - DNA, 1022 bp, Homo Sapiens
cctttttgccggcattctgcccccgctttcgaaataaatggggcgtgggcaacccctcgggaggaaaaattccctcctggtttactaaaaagataaaattcttttgggggcagatggtagccgctctcactctttttttaaaaaagttcaaaaggccaggaaccaaacccaattgtccaaggaaatttttccccggaaagcctacacggggaaaaatttcaattttgaaaaatacccggggtttagccttttagattaagagttttcccctatcaaagtcgaaaatccccccttttagtttttaaaattagtaaagaattcctcaattacttagccgccattttctatgtaaaatcagaaaaacaagtcttttatggctaacttcactagtggccaatgagttttttaattaacaaaaccgtaatatatggtagaaagtattgactttattaacctcacttacgatactgaatacaaagtaaaattaggtggtgacccttaattttcagtctatttcaaagcatggtccctcagatttaagaattaaggcatacatatgtcaaaaaaggaaggcgaatcaaacaaccaaatccaaaaagaccccagtgatttatgtattatgaagtttgagctacagcccttatgatattccttttagtactttcttttacgttttcattaattccttcagtaactggatttttaaccaaaccctataatccatcataattcttccaattatgagttgaaaagaaacataggcagatatgtataccaagtaccttacgaaattcaccacatacatggtgaacttcacatataaactttgaaaatcaaaaggactatgatattcttgaaatccaaaggctagataagatctaccttccaatcatttctgcattttaagatatggtttcatctagtgatgttaataaagaaacacattacatatttaaacacccagtaagatatgaccggacgcgtgggtcgacgatatcccgggaattccggaccggtaccag

SEQ ID NO: 136198 - DNA, 685 bp, Homo Sapiens
cccctcgtgctcgattatttatgattacgttatctgttcgtgtcttgtccagttcctttattgggggcagggcaccaagaagaggccctccgctccccaaacccagaggcaaaaggggttggcacgctccctcccagcctagtccttgcgtcactgtccatgggcaattcctctgccctgcatcttcaggccatgtcaggtagaggtatccatctcagggacctcagtggacacttccgtgggcactgccagccgcctggggggcacataggatcccatacccgctgccctctccgcctcttcctgactgtagggctcgacgctcagctgcttcagccttttcttgtggtctttggatcggaagtgggtcttcaggttggtggaatcgatgaagtacctcgcgcaggccagacagcggtgcagaccgccccctggcaggtcggggtcgaactcggcgtttgggtcgggctggggtcgtgcggatccctgaggccgcagctcgcggtgaatctcatccaagtccggccgccgccgcttcgccttcatctgccgggctagagagtgcgctcggtgcgcgcctgtccggcgggagcgacccatggccagaaacagcccggccggccaaggggccaggagcagggcagggagcacacgtgtgagcacttccgggccgatcagctacccc

SEQ ID NO: 136199 - DNA, 798 bp, Homo Sapiens
  misc_feature (531)..(531): n is a, c, g, or t
cctctcactcagcgtcctgtgattccaaagaaatgagtctctgctgtttttgggcagcagatatcctagaatggactctgacctaagcatcaaaattaatcatcataacgttatcattttatggccccttcttcctatatctggtagcttttaaatgatgaccatgtagataatctttattgttcctctttcagcagacggtattttcttatgctacagtatgactgctaatacttacacgttagaaccattctgagtcctcaagaatctcatttaactcttattatcagtgaatttatcatcatccccaattttacataaggaaatggggttagaaagaccaaataacattttttcaacatcaaaacactagcttgagatcaagcccagacttgatctgttgtctgaattccaagctttttgttatttattgatatgttttgttgttttcatgcaataatgcaaatcttagcccattttgttagtagtaccaactgtaagtcaccttatcttcattactttgtcgtttantgtaaacctaaattagatctgtttttgatactgagggaaaaacaagggaatctaacactaaccagcccgtagtgtgtggtcaaacactttcggttactttagtatacatcaccccagttgtttgtcttcaccacacactttggagttaggtagtagtatctatttttacaaataagaaaacccaggcacaaaggggttgattagcaattatcttttgaaaagcctgtagttgctcatctgaagaagtgacggaccacctcttattta

SEQ ID NO: 136200 - DNA, 818 bp, Homo Sapiens
  misc_feature (505)..(505): n is a, c, g, or t
  misc_feature (692)..(692): n is a, c, g, or t
  misc_feature (773)..(773): n is a, c, g, or t
ttaaagtgttttaaaatatatttaatttttttaacaagtggaaaagaatgtttcttaaaagacatttaattttttagtggaaattaatattaccaaaaacattctgtgcataacaatttgaataacaatttttttatcttcaagaaatgggatttttatataaaatacacatgtagcactgaatgccaaagtgatgggtatccatggtcagaattcaaaattagattcgctattaaacctgtctggtttgtgtcctgagtgaagaatgatctcgagctggggagggaggtgcattgggtaatcagtgcttttgaaggtgaatttccttgctgtgaaataggcttgggttactggtcaggacaaccattcagactgacaggcccctggacttccaaggcttcagtgacagggacagggatgtgattgacatgaatattcctcagacagccaaagaatgatttccacacagggatcctcagtgtcgtcaaattgggctgagcacctncaaggtgtagtggctcttgagtgcctgcaggtgggaaggggatctgtccagctgtgtagctactgtctgtgtccagttccaggtgcaggatgtgttgttttatggtgactgccaccgagtgccactgtccatcacacagagactgctttggtgtgaccgacgttgaggtcccacctgccccactgtncatagaggccgtgacctttcctgccttcacgtaaacacataagtgctttccgggctgactttcgatgtgtattaggatccnagtgagacttctttggccgatgctgacaacaagcttaaattctgg

SEQ ID NO: 136201 - DNA, 577 bp, Homo Sapiens
aaaaatgatctcttctcctttattgccacattcacataaaacgttttgatatatttgggttggtaaaagctaaagaaaattgaagttaaaatatatatggttttagtgttccgaaaagcagttacagattgcttccttggtttaattatcgaagcggtcgaaattctgggtttgaaactcttggaagtcctcagggatggtgtcattgcagcgatacttgaggttggaccagatgatgttttcttgagagaagcagaaaacgccaagtcggcctccacgcattgtggtgtctatggtgacgccagagtcagccaccaactcagagccttcataaaatcgtaccctgatgtagcccaccttggggccttgtgctgtaggaaccagcggtaggacaccttgtccttccagcccacattcctgggagtccttccacagcagcctgacctggtcactggtgtcccccgtgtgccacagggagttccggagatgctcccctggacctgtcttagacttcacagccttgagctgaatgccaggttctgcaactgctcggaatggggtggcttgccaatatagt

SEQ ID NO: 136202 - DNA, 545 bp, Homo Sapiens
gcggccgcggcggtggctgctggatacgggaagcctggcattgcagaagtatatacaagtgaactgggggcactgtacatggaagatccctcctggttggcctggcacaacaggaccgtgcctgcatagaattcgggactgtagactgcacccacaactggattcaatttccagccatttgtataagggttgacggtctttttatttgtcattacacgtgctgtggcattatttacctcgattttacggccctctaccacggtgccgtgtaatttctccctcgccctgtccgcatcggcactattttcgaaagttacgaaaccaaatccctttgagcctcgctcattaaaaataatttcaacatctaagattttaccaaattgaccaaacatttgtctgaggtccggatcccggaacctgaaggggatattggagacatgcagccgcttgggctgagacttgtttttcgtgttttcagaaggttgtgtctggggctggccatccgtcggtgctgcgtcatctgtctgtgtggcggtgccagagac

SEQ ID NO: 136203 - DNA, 910 bp, Homo Sapiens
cccaatgagccctctgcactcctaaggaaattttatttgatgaggaccaactggtgacataaaatagattccaagctgcaatgccccactgactccatctccctgaccagggaattccaggtgctaagcagctttgtttaaaaaccactggaccagatggtatccctggttcctgcgtatttcacaaggtccccagggctaggcatcttctacatgacacatatggctgcaaacacttagattctaattgtaccccaaaagatgttgttaaaaggctggctagcctgggttgggggacagacgggggctgggggctgtttcacggcataagctcaggtcaaggggccgtagctgcagtagagctgggataaggtcctgctcagagcaggccccagattcctctgtagacgcccacacttaatggtgctcagcagtgtctcttgttccttgggggtggcacaggcatcataggcggccaggaggctggcaggggtgctgtatcgatccaccagggctgctgccttctccccactcactccgcgcacctgcatcagctgccgggcaaacacttctcgcaccgactgggccttattcttgatggctcctgcgttgaagtcactgaaggtgaggagtgagcagagagggtttggagaggtcatggcccctgattcagggttcccaggggttccccaggggcggctgcgtagggtgtggccctggtagagtctctgcaggccccgagtcaagagggccaggtaggcggctgactccttaatgtctgctgtgcgcttcacaaaaaagccatcaatgacctgagtgttggtgacagcctgcagcagtgtgctctcaggaaggctgaggttgtggacggaaccatgctcttccaccaggtatacccggcgctccagac

SEQ ID NO: 136204 - DNA, 808 bp, Homo Sapiens
  misc_feature (493)..(493): n is a, c, g, or t
tttggtattttataattctttttattaggaaccagttacctaaacaatgtaaatgcattagaccaggagcatactagatccccgatctagttactgaagcacaaattctattggcaaaacatgcataaacatacacattctagatgcaacacagcaaaatgctgatgtatagtaaacccattcaagaaaatattgtaaatatacaaaactgattataaaactccaaactacctttgaaataatctactccaaatccttcattccataaaggaaactaaagcttaaaacagtagagttttctaatgtcacagagtggcttaataacaattggattagttcagcccaatgtactttccattccataacatgatagtgaaaatttaaaagatttcaaggcagtttctaaatccactctgattcttcagtacttaacaaaaggacaaactaaagtaaatatctcccctaaatttatgatgttcctagaattgtcatnttgccaggatgcagtctctgatgtttgttgagagcagagcgatatctgaaggattttccacaatcattacatccaaaaggcttctctcctgaatgaattctctgggtgctgaatgagatatgtgctctggctaaaagtctttctgcattcattacagttataaggtttctctccagtatgagtattctgatgttcagtcagatgagtgctccggctaaaggctttgtcacattcattgcacttatagggcttctccccagtgtgaattcgttgatgctgagttagatgggagctctggctaaaggtctttttcac

SEQ ID NO: 136205 - DNA, 1389 bp, Homo Sapiens
  misc_feature (1296)..(1329): n is a, c, g, or t
ccactgcgcgcttcgctctccgccgcccgaggcccgcgcgctcgccatgtcccggccaccgccaccgcgggtcgcctcggtgctgggcaccatggagatggggcgccgcatggacgcgcccgccagcgccgcggccgtgcgcgcctttctggagcgcggccacaccgaactggacacggccttcatgtacagcgacggccagtccgagaccatcctgggcggcctggggctcgggctgggcggtggcgactgcagagtgaaaattgccaccaaggccaacccttgggatggaaaatcactaaagcctgacagtgtccggtcccagctggagacgtcattgaagaggctgcagtgtccccaagtggacctcttctacctacacgcacctgaccacggcaccccggtggaagagacgctgcatgcctgccagcggctgcaccaggagggcaagttcgtggagcttggcctctccaactatgctagctgggaagtggccgagatctgtaccctctgcaagagcaatggctggatcctgcccactgtgtaccagggcatgtacaacgccaccacccggcaggtggaaacggagctcttcccctgcctcaggcactttggactgaggttctatgcctacaaccctctggctgggggcctgctgactggcaagtacaagtatgaggacaaggacgggaaacagcctgtgggccgcttctttgggaatagctgggctgagacctacaggaatcgcttctggaaggagcaccacttcgaggccattgcgttggtggagaaggccctgcaggccgcatatggcgccagcgcccccagtgtgacctcggctgccctccggtggatgtaccaccactcacagctgcagggtgcccacggggacgcggtcatcctgggcatgtccagcctggagcagctggagcagaacttggcagcaacagaggaagggcccctggagccggctgtcgtggatgcctttaatcaagcctggcatttggttgctcacgaatgtcccaactacttccgctaggcccatcatggctcaggctgcccaaggcttttctgtcacctcttttgttctctcacactgaccagtcttggccttaagctgacttagaagggtttttctgaattgtctagatccatgcattatttttctagcttcctgccttgctccctattcactttacactgtgaaaggtggggggtgagtcccacttgagcgcttcctgttgaataaagcaggcacttgacctggctgtagcctaggtcttgagtgaacccccnnnnnnnnnnnnnnnnnnnnnnnnnnnnnnnnnnggccgcgtatgcggccgcaagcttattccctttcagtgagggttaattttagcttggcac

SEQ ID NO: 136206 - DNA, 506 bp, Homo Sapiens
  misc_feature (56)..(81): n is a, c, g, or t
ttccaggtgtttttacattttattagctacagtatagatcctagagctgcctcatnnnnnnnnnnnnnnnnnnnnnnnnnnaccatggggtcaggccttgccaggagcccctgcctttgctgcctgggcccgctggaactcctgctgcagctgagcaagggtctccctctgttgctctgactgccgctcaagatcccgaagctgggattcgtatcgcttactaaggagagacaagggagacaagcagaaagggagaaattagtaggactcactatggagagtgctaaacgcaagaaagagataggtggaaaacttgagatccaggggagggagaagaaggggggttaaaagggaaggaaagggttgaggaactgaggactaggggccactatggagagctgttctgcaatggttcaacacctctactccaatggttcacttgcatcacagggtgcagcacacggtggtggaataaaaactcacatttcagctgtgatatagtccag

SEQ ID NO: 136207 - DNA, 888 bp, Homo Sapiens
  misc_feature (56)..(80): n is a, c, g, or t
gccaggtgtttttacattttattagctacagtatagatcctagagctgcctcattnnnnnnnnnnnnnnnnnnnnnnnnnaccatggggtcaggccttgccaggagcccctgcctttgctgcctgggcccgctggaactcctgctgcagctgagcaagggtctccctctgttgctctgactgccgctcaagatcccgaagctgggattcgtatcgcttaatttcagctgtgatatagtccagcctcttccctactgtggcccgagcctcccccagctcctgtttgactagcaccggacccagaagtttaaagaccacgttggacccatccagcagggccagttcctctttcacgatattattttctgttagttgtgcttcaagtttctgcctccccgacatggatttacttaagtccttctgtagctgttgatatttctccacttctccctgtagcttcttctggatcagctccgccatggcggggatgaaagcctactgggtgcgagacaagggcgctgggtctcactctctggaaggtacctgagctcccttttctgatctggcgttcttccttcagtagtaataaacccggaagtaaacaaggaatgctgggaaaagactgtgccggaagtttctttctgacccttgatgggaagtgtagttctgacatgtttagggagtggagttctgctaaaaagactagactaggacatttttaggcaagatggggaaactaatccagaaaaagaaaccgcaccgctacttagcccctggccccggacctgcctttcttttttaagtcactcttgcataagctgccgctcgcgataaggtgccaaaaactgttccgcccctctaaggagagcgtgccctcactcaagatccc

SEQ ID NO: 136208 - DNA, 308 bp, Homo Sapiens
  misc_feature (13)..(13): n is a, c, g, or t
ctttcccgggggnctttgtttccattaaatgagagtaattaaaatcgcttgtaaatgagggcatacaagcatttgcaacaaatattcaaatagaggctcacagcggcataagctggactttgtcgccactagatgacaagatgttataactaagttaaaccacatctgtgtatctcaagggacttaattcagctgtctgtagtgaataaaagtgggaaattttcaaaagtttctcctgctggaaataaggtataatttgtattttgcagacaattcagtaaagttactggctttcttagtgaaaaaaa

SEQ ID NO: 136209 - DNA, 424 bp, Homo Sapiens
  misc_feature (249)..(249): n is a, c, g, or t
  misc_feature (257)..(257): n is a, c, g, or t
  misc_feature (295)..(295): n is a, c, g, or t
  misc_feature (335)..(335): n is a, c, g, or t
  misc_feature (342)..(342): n is a, c, g, or t
  misc_feature (362)..(362): n is a, c, g, or t
gttgttcaacaacaccatctttattcaaaaatatatatctatgagacatttcagaatatactgctgccgccaacgacagcctatacttctaaatagtcctaaattaatatacaaatttaagctttgaaaatattctttaagaaaaacaaacaaacaaaaacaagggaagattgaagactttctgaggaatatgacctaaaggaaaggtcctttgaggcctacagatgccctgccctaggaaggaaaaancccaaaancaaaaaccacccaccccacccaccaaggtcacctcatnccttccaagggggaaagttcatttaaattaaccaaatgangtaggcncactttggggaggatgtggncagcagatttaagattttaaaaaccgaaagcatttcatcaaaccaaaaactaacttcctcac

SEQ ID NO: 136210 - DNA, 382 bp, Homo Sapiens
tggggctccctccttgtagcaccccccttgcggctcagctctggtttcctctcccaggctcacccaggctctgctcaggctgggaggcagagggcacaaaccttataattttttaaatgaaaaaccgctgctgctggctgtggctagagcccctggggctgctggagctgctgcctctgttctggaggacgagccttctccttatctgctgcccatctttccaggaagtcaggatggagtcagaacaactacagtcatcccccgtggtgtctgcacatcactccagccccataaagagtgtcatgttagctgagtcaccatttggcttcggcctggaaatagtgtgattagaacactgatcgtgtgcgaggccaggagatca

SEQ ID NO: 136211 - DNA, 576 bp, Homo Sapiens
atattccagaccaacatcagaatcttggcatacggaacccaagcatcgatgtgtcttccaacattccaaagtgactacaaagtgtatacagccaacactgagaaccactggtttgaatgatttacactcaatcttcaggcgcaactgtcttctaccgaaatgctctcctcagcaccaatgacaaagatattccatctccttgagcactgcagcagtttaagattttgtagagctactactgggttttagtgacaaatttacgtaaatgaaggccctcatgacccagatgctcatgctgctcacttcaattgcatatgatttggcgaatgggacattcgggaatttaaatctttgagataagaatggcttgttgttaaatattgaggcaattatttcattctaggtccaatacgcaataaccatgtgtttcggttttccactcagcaccttcaaaactgttgcaaatgaatgtttactaacaagacaaaagagacaattataaaccaaactctcaacaaaattcggacccggccgtaatggccgaattcccgggcatatgtccgctaccgtcgactg

SEQ ID NO: 136212 - DNA, 406 bp, Homo Sapiens
  misc_feature (203)..(212): n is a, c, g, or t
aaataaacgaagggtaaagttttctttaatcagttttgataattgaatcagtaattcgaatagattttttcttggtagagttggtatctacgcatttgtggtcccttgcccagtgttaagcttttgtagttactgtttgcatcactggtgctttgggggttttctgttaaattgacagctcttactataagagacaaagtcgnnnnnnnnnntcttaataaaaattgacagatatcattatttgtgacagatacagtaaatttgaaaattgccttcacataactttataattagaggactgagattttacattaggaatccaattaaaaaaaattagccggacataatggcctgtgcgtgtagtcctggctagtcaatgggctgaggcaggaggatcatcttgggc

SEQ ID NO: 136213 - DNA, 201 bp, Homo Sapiens
gagaagtagaaaacaaaactttatttgatgaaatctttttaaaagttccagtatgaagtaacaaaatcaacaacctacaaatctctttcagtcctttgcatttcaagcaaaatattctcttcagaaaaatgaccatttcataatatatatccccttctgtcgtcttctcgcagccgtatagtagtagtagtaggcggccgc

SEQ ID NO: 136214 - DNA, 270 bp, Homo Sapiens
taggcaaagatcttttatttgtggttaggcttacaccattccaaaaagtaaacataattaacaaaacacttaaaagtaccagaggaggtgccccggtatcaacactaatcagaccacagaagaaagcttgacaaggatcttcatatacggatgccagcttcaatcatgtcaaatgaacatgttgttctctcagtggtaacagttagtaggccagagcagaactggagactcttttccactggtgtaggcagccagggctctccaggagta

SEQ ID NO: 136215 - DNA, 249 bp, Homo Sapiens
  misc_feature (11)..(11): n is a, c, g, or t
attggtagagnactttgaactggaaagaaccctaaagaaatctcctgtctacccctgttattacagattagaaaccgaagtccaggaaggttgagcaggcaagtctccaggctgagttcctgatgtccaggctggaggtgtttcttccctgacccttcccctgcctaccctggccactgagaagggctgaacaggagctaaatctggagggtacaaatgttatttcccttgttctttaagattaccacc

SEQ ID NO: 136216 - DNA, 506 bp, Homo Sapiens
tttttccattaaaaagttgtttatttaaaaataccttctcccaattctgattccatatcaaattaaatcaagaagtgatgttacagcaataactcatcaaagtcatgagtagggaggatggcaatgaccccattagctcattagtataatctagtaagtgaaatacaaattcaactcatttacttcttcacaaaaggcaaacataattgatatacttcatatcaaaaaactagtttataaagcttgtcttcatatttcagtttaaggttcaactgatataaaatgccttaaaagaacatccaagcaatgctttggattttctttctttgcaaaattcaaggaaaacatgattggttgaagtttcttcactgctggcgaattagttaagagctacctgagattccttcgcacttccactcttccactctttgagtttccagtgattaaaatatgccagagacataatttagagagcgctagaaatgccacacagatctcatcactta

SEQ ID NO: 136217 - DNA, 928 bp, Homo Sapiens
ttttgaaaaacctgcattatcgtttattgtgatcctaattcggtccacagtaacaattgaaactgcctcgactaaattttaagtttctggggcagcaccacctgaaggcagcgactgcctttttaaaagacagggttctgacattcagagatttctgtttctctatccatcatttttgggcatcttgaatcacctgatttagagtcagtgacatcctgactggattggttctgctctcgctgggcgggtgagacccccagacccacgtccacagtgcacctgatgttctcccagcggtcgtcacttccccaaggaggccaggtaggcataccagaacagagctgccaggttggcgaagagcacccggaacttcagagggacgtagttgatgttgatgaactgtagtggcgtccacacccgccagttcatcctcagcgccggccagaagccccccctcatcttggcggcgaaggctgaggcgtctttcccctccagaaagttcatgatgaggaagaacaacatgaggaaggccggtgcaaagacgaggcggtccaggagaagcctcctgagccctgccagggggacctcaggagggatccaatgttccatgaagaagtagaagaagtgactcagcggccctgtgaagaaagaacccgtaaacggcatatctcagaggcccaccgacatccagacttctagagttttcttttttccgcttcttctcaatcatctgggccaggaagttcccaagtgctgacaaatgccactggtggccgccttggtgagcaccgggtagagccgcaggaagagcaggtactgggcgagcgcccgccgcggcagcgccccgagcccggcttcggcccgcagcctggacgcggccggcgccatcgcctcgtgccgattcaacacccgcctcgtactagcccta

SEQ ID NO: 136218 - DNA, 217 bp, Homo Sapiens
ttccgcttttcatggtcgaaataattttatttatccagaatatacagtttaattcctctatctacacttatttacatggctaaaataacattgaaaaaagtcttttgaaaagttgaggtcatagatttcaaggcaccattgaaagtgtccacagttgcgcaaaaaaagtcctctgtaaaaaaagggggggtcttttgaaatgcaataacttacatgc

SEQ ID NO: 136219 - DNA, 567 bp, Homo Sapiens
  misc_feature (379)..(395): n is a, c, g, or t
aattcccaaacccctattttcagtgccccaggattttccttagggaaaccaggttaagggcccatgtttcctcttaccctactggggggcccggggcgccaaaaggaaatggttttgaaaaattttttgaggggccgagggcgggccggacatgggtttttgtttggtgctggttggggggttccatataaatcttttacttaaaagtcatataaaagaataaaaaatgcagatttctgaatcaactgtagataaggaagcaaatgatgttgaaaggtgcccattaatttaaaatttcatcataggaatttgggtgaccttttgcactcagtattaaaaaaaaccatcaagttgctctttggaacagtagcatttaggnnnnnnnnnnnnnnnnngtcacacttgtttatttctttgggatgttgctgtgtgtcgtggaagaaacactcccctgaaaactgtaaccaaacaaagtttggttaaaacaaagttggttcctttgttttcatggaaatgtcagacaactatgaaaagctaaggaagcatgttgaactgaaggtctggccc

SEQ ID NO: 136220 - DNA, 1229 bp, Homo Sapiens
  misc_feature (154)..(154): n is a, c, g, or t
  misc_feature (684)..(693): n is a, c, g, or t
gccacctgagggttagaaaaaaacttgggccatattctataaaggataatttatttaaagaaatcagagaaaaaagaccagttcttttacctctagggctattgataaaaaccatctggggagtgggaacagctttcaggaatgttacaggggnaatgaggggagggcaagagaggatttgataaaatgaggaaaaatgttctactctcctttctttcctggagccttaaaattaaaaatctggaattgaaaaatatactttcacacacatatctgtttcaatgggtgctgtctttctcaattttggagaagaatcactagttagtggtcagggtcaaaaattgcaaataagttcccaattttagtctaggttagatcactctggttaatcatagggccatgatgccctcagaactcaagcaggagctgctgctacttgtgcttaaagctgaggcacgaacgcaatatcatttactggagaactgaagatgctgcgcaatgctaacagcccctctcagaagttctgtgtggctctgagtccttacagtgcagttgttgtattaacccatcatccagtgagctggccagtagttcagcccctccacttgctgcagctgccgcaagacacattcaccaggcagttgcccaggcctctcacccatggggggaacacatctggccacnnnnnnnnnnctgtaaacctcaaatgaaacagaatctcacagatgtggggtccccctccctaattgtaaataaacgtttagagaaatgctcccagaaaggaaacaaagggagaccctctcagatcagcctaaaaccagagtggaatagggctcctctgggcggtttaagggcacagaaaggaccctcagctactcctggcctccccgggtctctttcccagaagacacaactttccaggctgccaaaagtaatagaagtcaaaaccctcaaaaccaccactgctctcgggaagtttttgagtaggatgaggaagaaagaagagagccctccttcattttgttacacgatctcaaggccaagagcaagtagaagatgtctaaagagaacaaaacgaggtttcttcctggtactgtactacagatcagcaacagtttcacagggaggcgttggctcaggttctggtacatttgaagataactgaaggccaagacttagccaaggaaggacaccagcagaacaactagatacactatcactactgcgag

SEQ ID NO: 136221 - DNA, 495 bp, Homo Sapiens
  misc_feature (467)..(467): n is a, c, g, or t
  misc_feature (478)..(478): n is a, c, g, or t
tgcattaaacagagtcatatatttatttcaaaacattaagttgacttcccattaataaatactttaacactgagtgtagaaaaacttgtgcatattctataaagataatttattaaagaatcagagaaaaagacagttctttacctctaggctattgataaaaccatctgggagtgggaacagcttcaggaatgttacaggggaattgagggagggcaagagaggatttgataaaatgaggggaaaatgttctactctcctttctttcctgggggcctttaaaatttaaaaatctggggaatttgaaaaatatactttcaccaccccatatcctgccttccaatggggtgcctgtcctttcctccaattttggggagggagggatcccctaggttaggtggggtcaggggggtccaaaaatttgcccaaataggttccccccattttaggtctaggggtagggtccnctctgggggtnatcctggggggccctgg

SEQ ID NO: 136222 - DNA, 1042 bp, Homo Sapiens
  misc_feature (11)..(11): n is a, c, g, or t
  misc_feature (318)..(343): n is a, c, g, or t
  misc_feature (548)..(548): n is a, c, g, or t
  misc_feature (550)..(550): n is a, c, g, or t
  misc_feature (552)..(552): n is a, c, g, or t
  misc_feature (556)..(560): n is a, c, g, or t
  misc_feature (1008)..(1008): n is a, c, g, or t
  misc_feature (1017)..(1017): n is a, c, g, or t
ccgccgcgtancacccagaggggaggattggtatttcgtcgagggggcagacttgggggaggtggtcagtaaggggacatcgcgaagcgtatatcgagcccgggtatgggcgggtggttttcctatagccggcttaaggcgcatccacgcacggagagtgcttattgctgggcgaaggcactgacactcccattgcggttttccccgtgtatcctttcggctcccatagcgcggcgccgcggcgtaaaaggccgatgtggaggccctcgcagcggtccgaatggagggttgttcgcacgtcgagcgcggtcgcacttnnnnnnnnnnnnnnnnnnnnnnnnnnttcccccccgcgtcgggcgtttcccagggacttcgtgggaagacccttgcggccctttggggccctgcgctcacgggggcaggggggtatataacgatttggtcaggcgaggtttttgggcggccccgcccaagcacaaccaggatggtgcatgctatgcatgcctcgcgcctcggggttttcgtgtttgtttgttttttctatntntntggnnnnngtgcattaaacagagtcatatatttatttcaaaacattaagttgacttcccattaataaatactttaacactgagtgtagaaaaacttgtgcatattctataaagataatttattaaagaatcagagaaaaagacagttctttacctctaggctattgataaaaccatctgggagtgggaacagcttcaggaatgttacaggggaattgagggagggcaagagaggatttgataaaatgagggaaaatgttctactctcctttctttcctgggagccttaaaattaaaaatctgggaattgaaaaatatactttcacacacatatctgctttcaatggggtgctgtctttctccaattttgggggaaggaatcacctaggttaggtgggtcaggggtccaaaaattgccaaataaggttccccaattttaggtctagggttaggatcnctctggggntaatcctaggggcccatggtgccct

SEQ ID NO: 136223 - DNA, 1274 bp, Homo Sapiens
aactttagaaagcgaattttattagcttcatgagaaacagctgccatgagtcaagacctggatggggatagagctctggtagcttccaaccaatggcgtgaatacagcccacctgttctctctacatcctcagaccagggtcttagtgggggtcccaagaagaacaccccacctccttgccctctcagtgcaggcacagattcagggaatgcattcttgttggaccttaggatctccgtctctatgatatctcactgaacaggaaaatgaatcaaatccacattctagacagccagatgctgacagatttgggatacgagccactgttctggatcatcagccaggaacacaacactttgaatcaccaatcagaaagtcaagattctggaatgcaaaataagaaccccctaactttctagcagatttcatcagtagctccacatcctagaatgactgtgttacaaatcaaccagaaatctgacattctaggttgtcaactaagaacccagtattctggcagaccaaatgagaaccactcctaactatctgaagggctaacagggagttcagcattctggaagaataaacagaatcacaatattccagataatgggtgagacttaaagttctaaatgtcaaccccaacactcaccatgccaaaccagaaaatgagcatttaagaccatcagccctggcctcagcactctggaatgacaagcacaaagctctcccctccagaatgctgctttcctgcccctcagagctctgtggatggtcgctccacagcaggcccatcatcctgactggcatccggcacacggaaggaaacgtagggacaggtcttggtgttgaggcagaccagcttcttcagtgtggccgtcttgacaatgttaaagcccacctcgccgccaaatgtgctcggcttccagtactccggagaacagatgggattccctaggagacccttgagggaaaagggagccccaatctctatcatactctccccaaagatagagtttggatggcacttttcaagaagcagtccggggtagaactccaacgcatcaatgtctccatacaattcctccaactctgctgccatctccttctctcctacgagctcctggaaggaggtgtagggtttcatgccaaacctcttgcggtactcattgaagggctgcagccgcatctcccgagactcctgatgacatccacagccacatgcaggatgtggcctcgtgccgaattcaccacccagcctcctattcgcttta

SEQ ID NO: 136224 - DNA, 1739 bp, Homo Sapiens
  misc_feature (1141)..(1158): n is a, c, g, or t
  misc_feature (1176)..(1605): n is a, c, g, or t
  misc_feature (1649)..(1649): n is a, c, g, or t
cgcgtctggaggaggctgcagcagcggaagaccccagtccagatccaggactgagatcccagaaccatgaacctggccatcagcatcgctctcctgctaacagtcttgcaggtctcccgagggcagaaggtgaccagcctaacggcctgcctagtggaccagagccttcgtctggactgccgccatgagaataccagcagttcacccatccagtacgagttcagcctgacccgtgagacaaagaagcacgtgctctttggcactgtgggggtgcctgagcacacataccgctcccgaaccaacttcaccagcaaatacaacatgaaggtcctctacttatccgccttcactagcaaggacgagggcacctacacgtgtgcactccaccactctggccattccccacccatctcctcccagaacgtcacagtgctcagagacaaactggtcaagtgtgagggcatcagcctgctggctcagaacacctcgtggctgctgctgctcctgctctccctctccctcctccaggccacggatttcatgtccctgtgactggtggggcccatggaggagacaggaagcctcaagttccagtgcagagatcctacttctctgagtcagctgaccccctccccgcaatccctcaaaccttgaggagaagtggggaccccacccctcatcaggagttccagtgctgcatgcgattatctacccacgtccacgcggccacctcaccctctccgcacacctctggctgtctttttgtactttttgttccagagctgcttctgtctggtttatttaggttttatccttccttttctttgagagttcgtgaagagggaagccaggattggggacctgatggagagtgagagcatgtgaggggtagtgggatggtggggtaccagccactggaggggtcatccttgcccatcgggaccagaaacctgggagagacttggatgaggagtggttgggctgtgcctgggcctagcacggacatggtctgtcctgacagcactcctcggcaggcatggctggtgcctgaagaccccagatgtgagggcaccaccaagaatttgtggcctaccttgtgagggagagaactgagcatctccagcattctcagccacaaccnnnnnnnnnnnnnnnnnncctcgtgccgaattcttnnnnnnnnnnnnnnnnnnnnnnnnnnnnnnnnnnnnnnnnnnnnnnnnnnnnnnnnnnnnnnnnnnnnnnnnnnnnnnnnnnnnnnnnnnnnnnnnnnnnnnnnnnnnnnnnnnnnnnnnnnnnnnnnnnnnnnnnnnnnnnnnnnnnnnnnnnnnnnnnnnnnnnnnnnnnnnnnnnnnnnnnnnnnnnnnnnnnnnnnnnnnnnnnnnnnnnnnnnnnnnnnnnnnnnnnnnnnnnnnnnnnnnnnnnnnnnnnnnnnnnnnnnnnnnnnnnnnnnnnnnnnnnnnnnnnnnnnnnnnnnnnnnnnnnnnnnnnnnnnnnnnnnnnnnnnnnnnnnnnnnnnnnnnnnnnnnnnnnnnnnnnnnnnnnnnnnnnnnnnnnnnnnnnnnnnnnnnnnnnnnnnnnnnnnnnnnnnnnnnnnnnnnnnnngggcgcgtgctgggtttttcataggtcgcccctgacagatcaanatcgagtcagtcagagtgggaaccgacagacaaagaacagcgtccctggagtctcgtcgtcctgttcactgcgtacgaactgcgcttccc

SEQ ID NO: 136225 - DNA, 324 bp, Homo Sapiens
ggttctccagcaacttttattggccaaaggatgcagaaggatatatggtgtctgtggtttaattaacaggatcgtttataaaacaactttacatttatcttatttttaaaattcttgcttttgaataagctgatgtgttagaatagacatgctcctatcccatgcaaaaagctgttcaaaaatgagcagcttgcaaatctatcataaatgagacattgaataaaatattcttacagtgaggtctaagaagtagttcagtctgagaatttgcttcagatactttttgaaataaaatattcaaggcataaaaaaagcaaaactccc

SEQ ID NO: 136226 - DNA, 486 bp, Homo Sapiens
gaaaggagttgagtgatttattgagtgcttacttggtgccacggcatgtgctaggtgcttacctaaatcaactcattggatcctcacaacaaccctgtgaggtgggtttcataacccccactgtttaccgatgaggctcacagaggctatgtaacttgcccaagattctgcagctggtaaaggacggaatctgtgcctctgcactaccaatgcctgctcctgaaggaaggtttgtgagggtgaatttctcaaagtcacttcaggtccttactgtagcgacagtgttggcaccttctgtgtcctctctcaccttgcctgtgagccttccagtgggtgggaaaagaggcatgcctatcagtggccattctgtgaacacagaagagagctgcgctggccacagagaagatagtccaatgatccttaaagttcaggcgtgtgggttggagccaaaggggcctgtcccctggatataacttgagagtagct

SEQ ID NO: 136227 - DNA, 660 bp, Homo Sapiens
  misc_feature (32)..(32): n is a, c, g, or t
  misc_feature (198)..(198): n is a, c, g, or t
  misc_feature (366)..(366): n is a, c, g, or t
  misc_feature (505)..(505): n is a, c, g, or t
  misc_feature (606)..(606): n is a, c, g, or t
ttaggaattgcatcaggcaaccggaccacgtnccacggtttcttcccataggtgtctaagtgcttgcttgggcagatagctgagtggtgacagccattgccactaagtgtgaaatgaaggtggggaagaggatggataatctggtggcagttcaaagttcagcacaagtggaggcagaaagcaaatggtgtattcaangccactattctggagacactcatttgaattgccggctcacaaatatcttgaaattctgtggcaaatccaaatagatcctggtttctccaccttggacagactctgcttttctaaattcatctccatcggtaaatacttgccagggccagcaattcatcctcctgagcnttctcggatcttctgacgacataaggacctgttaataacaatcagaagaaaaggatattaacaccgcagtctgtatttcagctcagagtggagttcatgcaaatcccatttattctctaactggtggagctgagacttntgaagctggggtaagaggccaagatgtggaactcatactacatatattatgaaaatcctgccatttggtgatgcagaggctccctttccctcagcagcgcnattgctgcttggacagcagcttcccatctggcctgtcgccggagccgcggcccc

SEQ ID NO: 136228 - DNA, 1053 bp, Homo Sapiens
  misc_feature (882)..(882): n is a, c, g, or t
  misc_feature (888)..(888): n is a, c, g, or t
  misc_feature (946)..(946): n is a, c, g, or t
  misc_feature (950)..(950): n is a, c, g, or t
  misc_feature (952)..(952): n is a, c, g, or t
  misc_feature (960)..(960): n is a, c, g, or t
  misc_feature (1009)..(1009): n is a, c, g, or t
  misc_feature (1016)..(1016): n is a, c, g, or t
  misc_feature (1039)..(1039): n is a, c, g, or t
cggtccggaattcccgggatctggtcggctggcggcgatggcaggattttcataatatatgtagtatgagttccacatcttggcctcttacccagcttcagcagtctcagctccaccagttagagaataaatgggatttgcatgaactccactctgagctgaaatacagactgcggtgttaatatccttttcttctgattgttattaacaggtccttatgtcgtcagaagatcgagaagctcaggaggatgaattgctggccctggcaagtatttacgatggagatgaatttagaaaagcagagtctgtccaaggtggagaaaccaggatctatttggatttgccacagaatttcaagatatttgtgagcgctatctgctctatgcaagcacttagacaacctatgggaagaacaccgtggcagcgtggtcctgtttgcctggatgcaatttcttaaggaagagaccctagcatacttgaatattgtctctccttttgagctcaagattggttctcagaaaaaagtgcagagaaggacagctcaagcttctcccaacacagagctagattttggaggagctgctggatctgatgtagaccaagaggaaattgtggatgagagagcagtgcaggatgtggaatcactgtcaaatctgatccaggaaatcttggactttgatcaagctcagcagataaaatgctttaatagtaaattgttcctgtgcagtatctgtttctgtgagaagctgggtagtgaatgcatgtacttccttggagtgcaggcatgtgtactgccaaagcctgtctgaaggactactttgaaattcagattcgagatggccaggttcaatgccttaactgcccagaaccaaagtgcccttnggtggncactcctggtcaggtcaaagagttagtggaagcagagttatttgcccgttatgaccgncttntncttcagtncttcttggacctgatggcagatgtggtgtactggccccggtcgtgctgncagctgnctgtgatgcaggaacctggctgnaccatgggtatttg

SEQ ID NO: 136229 - DNA, 1442 bp, Homo Sapiens
tttgtggtattaaaacatatatttatattataaatttccattctgaaaagcagatcaaaatgacactggaccatccagtcagttatggagtaatgggcttcctccaaagagaactgacttggcagaaatttaggttggtaggaatgtgattaacatggagtaaacgagatcaggttctcagtataattttcataaggcttctacccactccagttgtaaggaatagtactgagggaactccaacagaatgtcttagaaggatgcttctcagagacaaagggtctctaagtttaactcttgacccctcttctccttacctaaagcttggggaagaaaataaatatttaatttttaactattcagagctttgggcacattataatatttaatattctgtagtttaattttctgaacctttggcttataaatttttctcaacttacatttaaaaatgtatcaatgcaccttcttcagtagtaccacatgaaaatataaacctcgttcttccatatcttctacgcaggaagagtgaatgaatagtaccctaaatatcccgcaaagttactttgtgtacttgacggaagattagggaaaaacaatccacttccatatcttgagcagtagttaactagtcttctacctcatcttcccaaatatcgtcgtcaacatccacagcataaaacagccggttaaaacatggtgaaccagggtcattgaaatgtttgtaagggtttgctctagagagagaacccatgcaaatccaacagaaatattgcatacagccagtacatgtcatcttgttacatccgtctaatttctctatgggagttccacaacatgggcagctctttgagttcttctctagccactccttactttccatctcttccagtgccttctgaatcactctcttaccatacctttgatccaaaagtcttttattagcctcatccgcttgcaggtattcatttcgtaagtccattaatttctctgcagtcaccttacatggggagaccccatggtaggtcaacctgcacaaagtacagaaggcaaaattgcagctggagcagatacccatggtgcagccaggttcctgcatcacaggcagctggcagcacggccgggggcagtacaccacatctgccatcaggtccaaggaggactggaggagaaggcggtcataacgggcaaataactctgcttccactaactctttgacctgttaataacaatcagaagaaaaggatattaacaccgcagtctgtatttcagctcagagtggagttcatgcaaatcccatttattctctaactggtggagctgagactgctgaagctgggtaagaggccaagatgtggaactcatactacatatattatgaaaatcctgccatcgccgccagccgaccaggcatcccgggaattccggaccggtccagcctc

SEQ ID NO: 136230 - DNA, 1045 bp, Homo Sapiens
  misc_feature (14)..(14): n is a, c, g, or t
  misc_feature (24)..(24): n is a, c, g, or t
ccattgaaacctgnccccttctgngatttgggatttccaaaagtaatcccttagagccaaggttttgcaattacacaggctgccacttccaagaaagtacatgcattccgctgccccagcttttcaccagaaaccaaattgtggcacagaaaccaattggtaataaagcatttatttggcggaggttgatcaaagtccaagattcctggatcagattggccagggattcccacatctggcgttctctttcatccacaatttccttcttggtctacatcagatccagcagctcctccaaaatctagctctgtgttgggagaagcctggagctgtccttctctgcacttttttctgagaaccaatcttgagctcaaaaggagagacaatattcaagtatgctagggtctcttccttaagaaattgcatccaggcaaacaggaccacgctgccacggtgttcttcccataggttgtctaagtgcttgcatagagcagatagctgagttggtgacagccatttgccactaagtgtgaatgaaggtggggaagaggatggataatctggtggcagttcaaagttcagcacaagtggaggcagaaagcaaatggtgtattcaaagccactattctggagacactcatttgaattgccgctcacaaatatcttgaaattctgtggcaaatccaaatagatcctggtttctccaccttggacagactctgcttttctaaattcatctccatcgtaaatacttgccagggccagcaattcatcctcctgagcttctcgatcttctgacgacataaggacctgttaataacaatcagaagaaaaggatattaacaccgcagtctgtatttcagctcagagtggagttcatgcaaatcccatttattctctaactggtggagctgagactgctgaagctgggtaagaggccaagatgtggaactcatactacatatattatgaaaatcctgccatcgccgccagccgaccaggcctagaaacgccctgctcaaccggcgatcccgggaattccgga

SEQ ID NO: 136231 - DNA, 1363 bp, Homo Sapiens
  misc_feature (692)..(774): n is a, c, g, or t
ccgaggcccgccgctggagagcgccgagccgctggggcccgccgccgatctgtgggccgacgtggacctcaccgagttcgaccagtacctcaactgcagccggactcggcccgacgcccccgggctcccgtaccacgtggcactggccaaactgggcccgcgcgccatgtcctgcccagaggagagcagcctgatctccgcgctgtcggacgccagcagcgcggtctattacagcgcgtgcatctccggctaggccgccggcgccgcccgggtccctgcagcgcttcctcccgcagcccccgcgaccgatccgaccgcgtcgctgccgctctgctctctcatacgcgtgtatgtttggttccatgtcacagccccctaggagccagtgatgctcggccttgcgcccgttccacctcccaggccacccttcctgggcttctgggccacctgccctcggggggcccctgcgagggtgcctggagttcccacgtgtcccggggcttttccaggaagcccgagcccaggacctgttggcagagttgccagggttacatttttgaagcacctgctccttttcttgcagtgtattttctacaaccagattgtattaatattttttactttgcccttttaaaaaatatacctaatacaatatatttaatttttaattaaactcttaaacttttcttccnnnnnnnnnnnnnnnnnnnnnnnnnnnnnnnnnnnnnnnnnnnnnnnnnnnnnnnnnnnnnnnnnnnnnnnnnnnnnnnnnnngagaagaggaggcggcgcagcggaaaaaatctttcccctgcggggggccgcactattatcgcagcaccaccccgttagtttagatagaaagagggggccccacaaggaggagcgggtaatatattatatcacacagcgccgcagcggcgccggcgtgatgttatacaacaataactgctgtcgtgtgacaggtagagcacaactatgcgccgatctcaggtggactccctttttgttcaatagaaccacaaccctacttctttatgggcgggggaggtgcaaatcacgaatcgttgggagaacaaaacaaccccctactaacacacaaggagagatattaattaaagccgcctcccacctctggagagctggagacatcaaacaataacaaatcctatctagcataataggatgagtcataatctatgaggtgaatgacagacacacaaacccaaccccttgaatactattatacgcgattgcgagctagcgtgaactagcagaatatgaatatacttcgcccacgacacccgcggtgcgttatctgtatatcctaggaccaccaaccactttatcatctacaccgggg

SEQ ID NO: 136232 - DNA, 736 bp, Homo Sapiens
  misc_feature (426)..(426): n is a, c, g, or t
cacaaaggccgcctggaagccaggatgcaaatcctggaaagaccacaataaacagctggagtcacagttacacaggctaaggcagctgctggagcaaccccaggcagaggccaaagtgaatggcacaacggtgtcctctccttctacctctctacagaggtccgacagcagtcagcctatgctgctccgagtggttggcagtcaaacttcggactccatgggtgaggaagatcttctcagtcctccccaggacacaagcacagggttagaggaggtgatggagcaactcaacaactccttccctagttcaagaggacacaatgtaggaagtctttttccacatgggcagatgatttgggcagagcgatggaagtccttaagtatcagtcatgacagatgaagaaggagcagaataaatgttttacnactcctgattcccgcatggtttttataatattcatacaacaaagaggattagacagtaagagtttaccagaaataaatcgtatatttttgtgaagggtagtggtattatactgtagatttcagtagtttctaagtctgttattgttttgttaacaatggcaggttttacacgtctatgcaattgtacaaaaaagttataagaaaactacatgtaaaatcttgatagctaaataacttgccatttctttatatggaacgcattttgggttgtttaaaaatttataacagttataaagaaagattgtaaact

SEQ ID NO: 136233 - DNA, 349 bp, Homo Sapiens
gtttgtttgtttattagatgaattatcctatttcagtacttcagcaagagagaacctaactgtatcttgaggtggtagtaaaacacagagggccagtaacgggtcgtaatgacttattgtggataacaaagatatcttttctttagagaactgaaaagagagcagagaatataacatgaaatgatagatttgacctcctccctgttattttcaagtagctgggattttaaactagatgacctcattaaccgatgctttaccaaacagcaaaccaagagattgctaattgctgttgaaagcaaaaatgctaatattaaaagtcacaatgttctttatatacaataatgga

SEQ ID NO: 136234 - DNA, 492 bp, Homo Sapiens
  misc_feature (360)..(360): n is a, c, g, or t
  misc_feature (373)..(373): n is a, c, g, or t
  misc_feature (378)..(378): n is a, c, g, or t
  misc_feature (383)..(383): n is a, c, g, or t
  misc_feature (403)..(403): n is a, c, g, or t
  misc_feature (408)..(408): n is a, c, g, or t
  misc_feature (414)..(414): n is a, c, g, or t
  misc_feature (440)..(440): n is a, c, g, or t
  misc_feature (478)..(478): n is a, c, g, or t
ttcagaaacagataaacagtatatttattaaatgagttaagacaaataaactttacaaatagacaaataataaaaggctcagtggctaaaatagatggtaagcatcattgaaagaaatcaacaccatcacggtatctcagttggcttacacgtgtaaaaagaaattttcaaagagcaatttcacagaaatgaagccagtttttttcttataaacaaatcaccaattcttggttcaaaactgacatctgttatgaaaattaccatatcacatatttgtaagatgacaaggagtaactcatcttcaaagtgcaagtaagtctatttacaaccacaaaaaaggcaatgatgaggagaaaaggntttttaaaaaatnttacnaaggntaaaaacctttggggtgccnaattnaaccantttttggggtagaggggttaaggggnaaaagtggttggaattcccggtttccgccctacccacnatatatggggtccc

SEQ ID NO: 136235 - DNA, 964 bp, Homo Sapiens
  misc_feature (276)..(276): n is a, c, g, or t
ctttccctatacacgttgggggggcccccggcaattctgggggcgtgcaagggggctcgggagggaatggattaataaaacgtgtgcgttcggtaaaggatttcaacaaactggccagggtaaactgaagaaagttgggagcagccttcggacaagtgttggggggtatagtggctccaggggtcttttcgctgcggtagtcctctaaggaatcagcccacagcagttcacacactggcccaaaagcaggaggctcagaaaacctatctaatttcntaatgtcctctaaacaagtaatttcaggagacattcctccatgtacacagagaaactgctggtttaagagggcagcaagaggaagacagtcaaatgtctccatacaggcatcatacacctgttccgaatatttgattcgacattcctgtttgaaggtgacatagtctgtaagatgcctgcattcatgatttccccgaagcagaaacaatgttttgggatgattaatctttaaactccataaatacagcacacactctatactgaaatagcctctgtccacatagtcacccagaaagaggtagcgtgtgttactaggtgatcctccaacttcaaataacttcattaggtcaaagaattgtccatgaatatcaccacatactgtgattggagcatctacttctatcatagtcttctcttgcctcaggatggcagccccatcattgattatctttaaggctacttcctcttccagtcgtccttcctttaccaaatggttttttaaaacatcaactttaggtttcccattctcaaatacttccttgaaagtaagccgttgggttggaggaaaggggacagctttgatgacgcggtcggtggtggagaggtggaagcgcctcccggacatggtcccctcggcctcctccaggctccaggagcccgccggacgtgcgcctacgccgcggccgca

SEQ ID NO: 136236 - DNA, 527 bp, Homo Sapiens
ttttttatagtttataattgcatttattattacagtgtgctttaaatgtttctctacattttgcttccccacccaacgacatttggagctcctttattgggttctagggcctatcatccaataatatttgtaggaggagttgatctcgggctgggctagagttaacttgaattgaatagacttgaattgagccaaaatggctctcgggaaacacagggcagtaaattctcacaagcaacaatgttaagcattacctcaacttcctcattaggggtctccccagagacccaccacctccagagtctctccctagctccccagccacatcgcccctcctccactgggcagtcctcattgcttcttgtggaacagagctggggatggctcattgctgggctcggccatgacctgcatgggctggttgttcagggcagcctcgcgcatcttgtagtacatgaattcgttctggcggaacatgcgtagctccatctccgtctgcacccgcatcacggccatgcccagttggg

SEQ ID NO: 136237 - DNA, 502 bp, Homo Sapiens
aaaaaaggaaaaggccagggcaagtctcatgggaagaaacagaagaaaccagaagtggacattctcagccccgcggccatgctgaacctctactacatcgcccacaacgtcgctgactgcctgcatctgcgaggcttccattggccgggtgctcccaaaggaaagaaagggagaagcaagtgacagcatttcacaacacatctctgttacagacaacaggacctggggaagagaagtcaggataacacaactgttgccagcaacatagactttactccagacgacttgagatgcaaattaagtgtgcttttctgtgatggtggaagatcaggaaatgcaccttacttcctctgttatgccagatatggttagccactttggttttttaggagctataggatgggaaaagcctgagtaattcctacacagtgtgctgaaattaatagaactttcagaaattattataattctgggtcaggattaaactttgctctcagaaggc

SEQ ID NO: 136238 - DNA, 738 bp, Homo Sapiens
tgcacttcgtcatttggttcgctgtcgctctcttggagtagatcattgattttattcttcggtattcatgctttctccatctgcagtctctcacattttcttcatcttcatcatcatcatgtaggtcttttgacattaatcgtctggctagtttgatattgagtccttcattgtagtgaagcttccttttcatttcaaattgtcgctttttttctcgttcttcaggtgagaggtcactatcctcctctccactgctttcttgttcctgaatccgatactttggctccaagccttcagctgcagctaatttcctggctaagatgtctggcgccatggcttcagtggcctcggtgtcactacaggcatcttcatcatcccccatcatactatggtaaggagtgcttggttcatctattttcattaaaccatagtctttgtctgctggatgatacgtcgccaagatgttcatttcatcccacttctgggattttttgctcagctcctcgtcgacattcccgcggggctgttcggccgacgccaccatagaggaagtcgtagaggtcttgttcttcaagatccccttgatgggccggtgcgaggccgtcgaggccgccattgccgggcgctccggctgtcggctcagggtcgctgcttggcgtggggtccgcgaagagaagggtcggcacagcagagactcgcaggcagccgcagatcccgctcagggctaaagcggccgca

SEQ ID NO: 136239 - DNA, 415 bp, Homo Sapiens
  misc_feature (182)..(191): n is a, c, g, or t
aaaggagagccttttccataaccaaatacagacaatattgactaaatctcctgagcatattcaggcagtcaggtctgcactgtgatagcaacctagagaaggagaatgctttataccgaaaagcatgtggccctttgtgactctgttattccgtttttaatgtctaatgattcattagaggnnnnnnnnnngtctaagtatttatgtgtcatggtggaccagagggatgcaagagaagttcatgtggggctggcctcacctcctaagaaattagtgttcacaacttccttgtaatagtatgagcctttggcaccagaatggattgccgttgcattactgcaccaagaagccaatagatcaaaacttgtttgctaaaatgtatgtaaaaattctgaaattccctctctctgtgtac

SEQ ID NO: 136240 - DNA, 847 bp, Homo Sapiens
  misc_feature (193)..(217): n is a, c, g, or t
acccggggggttttttgccataggagaaacccagggtaatgacccccggtgtcccatgttgccctaaagagcacccggggggcccaaaaggaaaaggtttagaaaaggttttttcaagggccaaaggcgcccgacaatgttttttgggtgcggtgccaatatggggggtgcgtaggtgtcaacaaacttgtgnnnnnnnnnnnnnnnnnnnnnnnnngcacatgccatacacacgcagtcccattccagtgtgacaaatactccttcaccaggagacagcgctaccactccgggatcttgaagactctctacagagagcctaggcctggcagtcttcacagatgacacccaacagggagcacgtttattaaagtgggaaggggtggggtacaccccagggtgtatactgacagggacctcatgcaggcccagagctctgctgcaccctcttcatcagctcttcatcctgcatagacaactctgtcaactttttgcccatccgctcatggatgtccaggtacttagagacacatcggtccaggcacacagactcgcccttggagagctctgcttccttgtagtgaggaggcacacacttccggtggcaggcactggtcattctgttgtacatatcggccatcatctccacctccagctccgcagccagctgttgggccctgagaggatccatctcagcctagcaccgtggaagggatctccttctggcctcctaatccactgcctgggacggatcacaatgcccacggagaccccaacttctgacaaatactataacgttacccgcctcccgagaggctccagcggaagcacgtgggttacttccccc

SEQ ID NO: 136241 - DNA, 528 bp, Homo Sapiens
ttttaatgatatttactctcattctcttgggattggccctagtgttctttctccagcggaagcatagacagattccctgccacataaagagtcctagacagacactatccaatagccctgaagcagatggctccgtcctcccagagtccaatcttctagtggctggagaaggtcatgcttactcagagagactactatcccacagttttcctgcatgacatattctccataaaagtctgtctgagaggggtccaggctccgccactcctcctgagagaagcacagtgacacatccttgatggttaccaggccctgaaacaaaatgtagcatcttctgtcagcagctgttttttaaggaaaatgtgattcagtatgaaaggctaagttagtagaggagagagggtgagaaatgatctgagaaaagagctgcccagaagtccctgggtagggcacatagttttggtaacagggaaatgaggagaggagtaaaggcagatggtcaaggagtgagtgagtgtaatgttactg

SEQ ID NO: 136242 - DNA, 467 bp, Homo Sapiens
tgcttgaaaatcacgaatttagtcaaggatgaaagatacagaatagtcaaatattttgcacaaggaaatcttgttgatgatccgtagaactgatgcttgcagaacgcagtctcttaggggttttgtttttctcttttgagagaggccatcattatcattgctggttcagctgggggttccttccttcacgttgagaacctttgccttttgaacctacatctttgaagttgctgctatcctctgaatcccacgaaggctgctgattgcccagggccttgggttgaggtggctggtggtttctgttctcctttgcttctatgagacccagcaaattccttgcagcttcttcccacctgatgtactctctcagctgctgcttcaggctccctctctcagaaacagaagaagactcccctgtgctctttttccccattaagtgccccaccgcccagtggttggcggccgca

SEQ ID NO: 136243 - DNA, 891 bp, Homo Sapiens
ccctttggacaatgtgtttaagcttttattgtgaatggtaacagctcggggccttgaatctaaccaacaggtagcctagatataaaaaagcattaattggaagactcttttcgacaattgttcacagcaaacaagtttaaaccagaagatgctgcttgaaaatcacgaatttagtcaaggatgaaagatacagaatagtcaaatattttgcacaaggaaatcttgttgatgatccgtagaactgatgcttgcagaacgcagtctcttaggggttttgtttttctcttttgagagaggccatcattatcattgctggttcagctgggggttccttccttcacgttgagaacctggagcagagagtctaccaactttgccttttgaacctacatctttgaagttgctgctatcctctgaatcccacgaaggctgctgattgcccagggccttgggttgaggtggctggtggtttctgttctcctttgcttctatgagacccagcaaattccttgcagcttcttcccacctgatgtactctctcagctgctgcttcaggctccctctctcagaaacagaagaagactcccctgtgctctttttccccattaagtgccccaccgcccagtggttgccgcgcgggtacatcttggtcagcacggtccctccgcccgcaggcagcgggaccgctcgcccccggggcgccaggcagaggaccagcgccagcaggaccagcgggagctcacggccgcgcatggtcccgacgggaagcccttggagcgcgccggagaggctgggaagagcagagactggtgacccggacctcggaggagctccgccgccgcagccgctgtcctcgtgccgattcacaccccaggcctcgtacctagccgt

SEQ ID NO: 136244 - DNA, 1284 bp, Homo Sapiens
  misc_feature (49)..(49): n is a, c, g, or t
aggggaagggtgaatactagggcggacggcgagcgtgtgcaactttgtncccacaatagagccggttcgtcgggtgaaggtgtaaatatccgtctaagacgcgtgcagccaattaggtgggggtggactgtcttaagcctctttttgacgccgcttaaaaaacagttgttatgttttgtccctggtggcgggtttaaaatagtttaggtgagggatagttgtttccacagttgtggccgccccccccgggaagggtaaggttccctttccaaagaaggttcccaaagggtcgcagatttttttccaagttccggagcttttataaaaacggccggccccggcccctaggttttttaatccggctccccctatttggggcccctttttttcaaaaaaacacggggtacgggttaaactttgggccccccggggggaattctttaggagcgggcccccccttatggttgagttttgttcagcaaccagagcttggtggggatgtttggatggggtttgttgtttggttacataaactactttatttaaataaaaccaggaaagaccctttcccccttacacaccagcacatgcacacacgcacacccacaccctccctccctttcggctgtctgcccatggccacctcaaaccccgaggttctcattgtgaccaacctccctcaacctgtagacccccgtgcagagtccagttgcccacgcatcccggttgctggcagaacatgggcctagaaaagagcactccatcttcctggggtgggtcaaaaggaaggactggttctcccaaggcacccagatctggtgtggcttccctacaaactgggagcactgccaggcagctggagctgctccctgcggagggcagaacttttcaccccaagccaacccctccctgtaacaaaggaagtaagagggttggcagccaagcttcagtgtgccccgagggatcctgcagtaggtattttcagtttggggaagagcaagggagagcaattgagcaccaaattccctaaccccgtcctgcaggagggtgctgagtcagttcagcatcctctacccagaaaaagtaaacacaactgtgcagcaagagtgagggtgggaatgacagggcctaagccttcaggacctcatgacttcacccccaacatgggccctcttagggacccactagcaccttggcaatgttgaggacccagcccagcggaaacaccatacccacaggagccagtctggagttggtgatgctccctatcgctcgttccgaagc

SEQ ID NO: 136245 - DNA, 265 bp, Homo Sapiens
ctttaaatatttacagttcagaaagattagtccgtgtgaaacgtttgcgaaaagttaagaatgagtgtagagtataagggcacaggccctcttaaatggatcgaatatgtatattcacagtggcagagtcagatccaaattcattccctaaactcagggtataaagtccaccatcttgtttctgtacgtccatgatgatcagggttgtcaggtcatctgtgttttcaatgtggaacctcccctgttcttgactgtggattttttc

SEQ ID NO: 136246 - DNA, 888 bp, Homo Sapiens
agcttcttggtgatcaaactttggcaagctaatagaatatactaaaatacccgtaatttggcttagaaagttacacaccaaagaaccaagtgtttaaaaaaaatctttgttggcatgttaaaaggagtcacccttcagcatgaggtgagaaacacaaattaaaaatgtctctaaattacaaggtttaataaaaagcttcaaacccattaacattcttatttttaaaaaagtcacccaaattaactctagaggtttgaaggcatgatctataaactaacaggctccttgcttacataattttaatcgctatttttaaacatatttaaaactaaatcaaagtggcttttaaaaattctagaaaacaccaaattcaaaaattacacaaaatcttatagccaaaagtcaagaaaataattataaacacaatttgggatgtaaggacttttaaagtatgttggtaaactcaaatatcttccaagttccatcacccatctctgtccccacgatctacatgacatccttagttcctggcatggggctggctctggtgatgtcagaagcacttgcaaataaaacaaggagtttgcaaatcacatcttctgttataggggaggagtgggcagcagcttttagacaaggttgaattcccttaggtttagctgtagaattgtgtctttgacagcagcaaacacaaagcgaatattgtctgtatctgtagcacatgtgaagtgagagtagatgactttctctttgtcaggattctgatcttggtaaagcttcaggataaagtctctggcagctctgacatcctgtttcggtcctgtgtattctgggaaatcccggccgtaatggccgaattcccgggcatatgtccggtaccgtcgactg

SEQ ID NO: 136247 - DNA, 610 bp, Homo Sapiens
  misc_feature (497)..(515): n is a, c, g, or t
aggggtcatgggctttgtcccttctaaatatagccctcttcttggctccctacataggaggccatctatttgtgccatcacatagcctgtatgtctccaaaatgaatcagtcttgtattctttgatatttttccgggtccacttatcttgcttctccataaaatcctgcactttatccatgatggaaggtttcgtgatcagctgtgggtagaggtttgtgtagtggtcattcatgtgtggggcagtgaggtaaccctccaaaaagccagccacaaacatgatgatctcattgctcagggtttgagagccatagccagctctgatctccaggatgccccagcctgtggttttcacagagttattgtaaaagccataggcgtccccattcttgtccattacatttttgacttgtactgtcttttcagcaggcatccagtatgcagttgcatagtagactcctgcaggtttcggcgctccgcggtgactaacaacagcgnnnnnnnnnnnnnnnnnnnaagcggcggcggctgtggcagtccgcgcccgcccggaccgccgcgggtcatcgctccacggccgcgaccttcctctgcgggatacaggcggcccc

SEQ ID NO: 136248 - DNA, 640 bp, Homo Sapiens
  misc_feature (601)..(601): n is a, c, g, or t
  misc_feature (604)..(604): n is a, c, g, or t
gggtttatgttatgttcgtttattgttgtaacattttgttttgaacatcaaacactgcaccaaaatattagccattcatcttgcaacaattgctttactgtaactaagagtactgtactgatgatgtttacaattaactttggacaacttaaaacttattagtgacattgctgtctaataatcaaatacttcatcataggctgaacataattattaaaagagcaaagtttcccctccctttcttactttcaaacaaaaccaaaagagtagttttcatctggaaagagcacttacttcagggaaagactcaatttttaaccagttttattaaaccctggaagctctacaacacgggaaaacatcaaaattccccggaagtctgtttttgccaacttgtaaaaagtgaaagagctgacttccttgtttattctttaaagggttggcctgcacctgcagtgccaactgtggaagggctgtgtgcaggccccacagttgcaggggctgttccgggccagcgcttcccagtcatccaatctcctttgtccctcggttgttctgtgactttgagcagctttcattttaggacatcccatttttaagncanttctttttccagttgaaaactatgcagatgtttttc

SEQ ID NO: 136249 - DNA, 500 bp, Homo Sapiens
tggaattttttaaaatttttattacaaaaataatacatactgtaaaaaaattcaaacaatatagaaataaaagcacaatatcccacccagcatacataacaaacacagaagccccctcccctccaatcccattcctggggggttatcattgtgaacagttagcatatatcctttcagacttttacctttgcatacacaagtatatatataaacacatataaacacacatggttcttttacaaaaatgcgatcacatatgttacatgattcttcaatttctttcttcattcattcattacacagatttctaaaacacaaacctgattatatcactcctctaagagcttatttcccataatataaaaatcatacacattaacatcaaacacaaagcttgtgatgatatacttcctgcccatctttcagtctcatctcagcccttccagcattaaaggactggaatataaaccacattaaatccttcctggaacaaggcaggt

SEQ ID NO: 136250 - DNA, 648 bp, Homo Sapiens
ctcacgtgtccttcgttcactagattctgaacgagtcttctggggactaggatatttcttttttctgccatctcgttcttcctctgctggctcctgaaatacctcttctttaatttcttctttttcttggactagtggttttggctcaggctttactggttccaaaagtggaaggtagttcttagtatagagactttcaaatagtttgtccacaaaacctgaagtttctttttgtaaaaagacatcaagttgatcagcacaaaaggcttttaattctttctcaggtttgtccttcttgaccagtgctacaacatagttggctaaggctgaaggatcagcatcacatatcggctccagtaacttggccagccaggacttgagggcatccacatcctctatgagcatggtgcagggaaggcgggctcggccgccgctcttcttcaggcctgccgtgggtctccactacgccgccccctcacgttcccttcacagctcccggtgccccagcccaccgggcatcttaggagacttcaacctactcccccgccggggcctaacaggaactaacccaagcgacgcgtggtcgacgatatcccgggattccggaccgtaccagcctgctttttgtaccccttgtttagtccatgg

SEQ ID NO: 136251 - DNA, 302 bp, Homo Sapiens
  misc_feature (59)..(231): n is a, c, g, or t
tgatctaacaacaaatttatttcagtcagcatttattgagaaatattacattcacactnnnnnnnnnnnnnnnnnnnnnnnnnnnnnnnnnnnnnnnnnnnnnnnnnnnnnnnnnnnnnnnnnnnnnnnnnnnnnnnnnnnnnnnnnnnnnnnnnnnnnnnnnnnnnnnnnnnnnnnnnnnnnnnnnnnnnnnnnnnnnnnnnnnnnnnnnnnnnnnnnnnnnnnnnnnnnaattcagataagatttttggtcatgaatacagacacaaatacctaaatcctactttcaagcaactgagatt

SEQ ID NO: 136252 - DNA, 469 bp, Homo Sapiens
  misc_feature (294)..(294): n is a, c, g, or t
aaaaatgatgaatattttatttttcagacgtccatattttaaatgtaatagttttataaaagaaaaggttggcaacctgttaaggagatcttcatgtgaaaaatacatgtagaagttttaaaaatttgtggatataattgtcattcagaattaagcaggttgattgctgttatctagatgggtctcttcctttatgtttttcagtcacataatcttgatttccatagttatcacatgtacttaaagaagttaatcaatgcctatatggtccaaggtataatttgcacacagtangtttttggtttttatattgtgggatcatatgtatcaaaggtaatattcataaagaacaatgttatagttggctacaaagggacaatttccacatttcctatacaggggaatattttaaggggtagaggttatatcagccatggtggattgaggtttaaatatccccggcagggtc

SEQ ID NO: 136253 - DNA, 159 bp, Homo Sapiens
ttttttcatttaacacagcctttattttctgtttcaaaacagaatttccaggaaacaaaacaaaatacttacaatgggttgggtacaaatgaaataaaaatcacagtttcaaagaaccaaaataagacagttgctgaaaggcagatcacttggtttacc

SEQ ID NO: 136254 - DNA, 727 bp, Homo Sapiens
  misc_feature (29)..(29): n is a, c, g, or t
cagcgtgaggaatatgaacgtgcacaganagctgtaccagtatatcggttcagcttgaactagctatgaggaagatcagccgatgcaggaggacactgataagcccacaagcaatcatctgtacttgagagagataatcgaagaatggaaatacaagtaaaagatctgtcacaacagattagagtgctttgatggaattgaagaagcaaggggtaaccacgtaattcgtgatgaggaagtaagctctgctgatataagtagttcatctgaggtaatatcacagcatctagtatcttacagaaatattgaagagcttcaacaacaaaatcaacgtctcttagtggcccttagagagcttggggaaaccagagaaagagaagaacaagaaacaacttcatccaaaatcactgagcttcagctcaaacttgagagtgcccttactgaactagaacaactccgcaaatcacgacagcatcaaatgcagcttgttgattccatagttcgtcagcgtgatatgtaccgtattttattgtcacaaacaacaggagttgccattccattacatgcttcaagcttagatgatgtttctcttgcatcaactccaaaacgtccaagtacatcacagactgtttccactcctgctccagtacctgttattgaatcaacagaggctatagaggctaaggctgcccttaaacagttgcaggaaatttttgagaactacaaa

SEQ ID NO: 136255 - DNA, 503 bp, Homo Sapiens
  misc_feature (202)..(216): n is a, c, g, or t
  misc_feature (403)..(403): n is a, c, g, or t
ttttattgcattctgtgcccattgtcatttcctaaagttcgtgctgttttctgttttacggatgcaaaaacttctcagatatttttaaggattttcaaatttttaagctgtattctgttccttcaaatatttccttgagagtcaatttttcattctatcttagacgatttgggttatatttcaggctttccacaaatgctgnnnnnnnnnnnnnnngccacccatttatactaaaagatgaggcaatggaaagaatgagtggcaagtctgcatgcaggagcggagttggtcgctttgctctagggtgggtgagcaggtgggtggaagtcagccatcctgacgaggagcccccaaatgccacaaagttagtggctctaaatatatacctgcaggtgggacgttngagaatcaccgaggccagaatatagaagtaaaagaaagttcttgcgcagccgccaggccaggtcgaagaaggtgagcagcgtgcgcgtgagcgtcttgca

SEQ ID NO: 136256 - DNA, 522 bp, Homo Sapiens
  misc_feature (218)..(238): n is a, c, g, or t
  misc_feature (415)..(415): n is a, c, g, or t
  misc_feature (469)..(469): n is a, c, g, or t
  misc_feature (476)..(476): n is a, c, g, or t
  misc_feature (488)..(488): n is a, c, g, or t
ttttttttaaagctccaacatttattgtgtcaatgttaagcacactttttaaaagacaacatagaatgtatagaaacaaggggttggggactcatgcgcatttccacaatacaggtaattaggttggctggtttcagaagggccagggcatcactcatgacagcgatggtccacgggccctctctatgggactgattcactgttccaatgtgggtctnnnnnnnnnnnnnnnnnnnnnattaaaaaatataaataaaatggcgctgcaggcctaggctggaaggactctgcaggactctgtcttcgcacaacggcttcttggaggctactgtcagaaaacatcacaaactagcaggatgacagaccacgctgacgtcgactgggcggcacgttccaccccacccctggggcttcnaattttctcagaacttaagggctctcgaagcttccatccgaaactgccacacanttgagcntctgggtatacncgaatgggggtgtgtgaagaaccgcgggtcaggg

SEQ ID NO: 136257 - DNA, 515 bp, Homo Sapiens
taacatgtatttattgagtcatggctctgtactgttaggcatttgggaatacagagatgagaccagaccaaggccctgccccccaaggaacttacagtctagcacaaaaacagaccaaaaaagtgtagtttcaatgacgtgtaacagagagttaagaaggaaatgcaaggggccatgggaacactgtgcagaaatatttaacttagtctagggggacagggaaggcttccccaaaggagaagtgtggatacctctgacagggcgagatttagcatggcctctcttggtgctatgtgttccttcatgatcggcttcacttccggcctcatctgccattttatagctcttgctttcaaatgtggagtctcctctgttgtaactcgtgctactagtaaattgtttgctgtaacttgaagatttaccacgggaagggaattcagctatcccagggtgatgagaactggattcctttgtatttgtgaagatgccagtaccaatctgaagtgggagcgtgt

SEQ ID NO: 136258 - DNA, 358 bp, Homo Sapiens
  misc_feature (183)..(183): n is a, c, g, or t
  misc_feature (335)..(335): n is a, c, g, or t
atattagcaaataaatatatttcttaacatagtgcctgattcaagcgtctgtctggttcagatataaatacccatgtgggtacctaggtgctagtctccccactaactgagggaaaaaggttcccaggtggggtcctctgcccacttttggcaaccacattcacattccaaaggggataatgncctgaggggccaagagtggtcaggctgccctggggtgaatgtcaccctgatgaggcccatcagctcttgtccactcagtgaggccagacttgtgctctaatccactctcctgtgggtccctggcctgtatggcttatactggggagcttggnctctgggctgtcctcatgccgaa

SEQ ID NO: 136259 - DNA, 119 bp, Homo Sapiens
tttttttgtcagtcacataacttttattacagcacatcgttacgtttctatttcattattagttattgttcatatcttactctgcctaacttataaactttaacatgcatatgtatggg

SEQ ID NO: 136260 - DNA, 450 bp, Homo Sapiens
accggctaaggagaaggctgaggagaaggggtcgcaggtttccaccggagccccccaaccctcctcctccctggcccagctcgcaagccagcgccctcagatccacacggtggtcttcccgtccctgctgctggcactgcccttctcggagccagccctgggcttggctcctggccgctcgtgggtgccgggccggccctgctccccgacagtgcccgcagaggtagcactgcccgtccgggacgcgggggcgcctgctctggggggcccccgggaggccgcagggaggccgacgcacggcgaactgtcccggtcgcggtccccagccgctgccccgtcgcgcagcgcctgcagggccaggtttgccaggttctggtcatgcgcccgagcgcgctcggccgcccgcaccaccaggctgtagtcgggcgggcaggccaagccagcggccgc

SEQ ID NO: 136261 - DNA, 466 bp, Homo Sapiens
  misc_feature (45)..(45): n is a, c, g, or t
  misc_feature (151)..(151): n is a, c, g, or t
  misc_feature (223)..(224): n is a, c, g, or t
  misc_feature (250)..(250): n is a, c, g, or t
  misc_feature (425)..(425): n is a, c, g, or t
  misc_feature (439)..(439): n is a, c, g, or t
gatttttttaacccttttattcaatacaacattttgtttgcaatngtaaaagatcttatatttggtccaagcctaagtcatgccactttgaatctctcaaggccttaagtagaaagatatttcctgaaaagcacatataagactgctagtngaatcttctccagcaccaaaaagtctgccactgtcaaagcagaatgcattttaaaggcacaaagtcagcagnntctgaccattttccagcgtcacaaangaagcattacagtatagaagaatcaattgtgcatttaagaaacaaaacccatttagggttatcttaaaaagttcaaattgcatttgttgatccatatcattattagaaagaagaaaaaaacggaggggtatatttaacttcccctggataaagctgtttcccttcaaaaatttcntttttaaatttacntttgggcctccataccctccaccccca

SEQ ID NO: 136262 - DNA, 963 bp, Homo Sapiens
  misc_feature (331)..(331): n is a, c, g, or t
  misc_feature (561)..(813): n is a, c, g, or t
cttgtatttcctaaatttttctacaatgaacttgtattaataagaaaaaaccataaaatttactgtttttaaaaagctgctctaagtaatcagacagtcaaaagagcaggaatcagctctccaggaggctctttggtctggggccgaggggatgagggtgggtcctgaagacgtctgagtcccttgttacaggagggtgttcattgtgtcctcctcacagctgggagaacagctgaagcagctggtgcctgcaagcgggcctcacagtcatggactctggaagctgagggcacgtgtttgcggttcagccctttgatgaccgcaagcaggntaaaaccaggcttggtggacatcccttgctttttgttctggggctgctgggtagattagcttgcccttatgatactccattctcctagagttattagcagctctttttggaggggcattttcttttcttttgggctaaatttaggtagattagcattcccatgtaacttaccagaatcagaatgagaattcagaagtcacctgaattggccgggcatggtggctcacacnnnnnnnnnnnnnnnnnnnnnnnnnnnnnnnnnnnnnnnnnnnnnnnnnnnnnnnnnnnnnnnnnnnnnnnnnnnnnnnnnnnnnnnnnnnnnnnnnnnnnnnnnnnnnnnnnnnnnnnnnnnnnnnnnnnnnnnnnnnnnnnnnnnnnnnnnnnnnnnnnnnnnnnnnnnnnnnnnnnnnnnnnnnnnnnnnnnnnnnnnnnnnnnnnnnnnnnnnnnnnnnnnnnnnnnnnnnnnnnnnnnnnnnnnnnnntctatctccaaaaaataaaataaaattcagtttagaaccgggaaaagaagtacatgaaggagaagatagagaagcatttaccatctaaatgaaaaagtatacacacacataaaataacttcccaaaccaacccacgattaaagaaaaatc

SEQ ID NO: 136263 - DNA, 1682 bp, Homo Sapiens
  misc_feature (66)..(66): n is a, c, g, or t
  misc_feature (1182)..(1191): n is a, c, g, or t
gatcccccaacgatggtcctcagctggggagcacccagcgttggacttttagcatagtgtgtcagntcttcatagtttgggcacagggcacagagaagtcacagctctccggcatcctgtgacctttaccctctttgccaagggaaaatgtggcccaccaaagcaagaaacttgagggcatgggtcaccccagccctggcatctgcccagagcccgagaaggaaggaacaatgatcctccagctacctcacggggctggcacaggtgaccactgccctggcatcacccagctgtgtccggcagcctgaaccccatctgtggggatgcgaggaggaaaatacaaaggtccttaggtgaacactgagaaggcagatgcagcagaaacctccaggccagaactacccagtcttggacctatggtggagatagagcatagctggcgatcatgtgtacttacactctaaggtcacctggttgcactatggcctcatctgtggctctgaaaatgaagatttggaaggagatcatcacagctaatgttaacaagcccctcctgtgtgccaaatcattcacccctcaccacaaccgaatgagctaaggattctcattatatatagtttatggagagggaagtgcagacataaagaggtgaattatcttacccagatcacacagctgataagtggtggaggcagaatagaatctaaacagtgtggctccggagcccacatgcattgattcgacaagtgtttattgagcacctgccgcggacaaggccttgtgtgattaaatagggttataattagtaatataaaaatgagaaatcactaatgctttttagacttaacattttgtttttttgtaggtttcaggcacagaactgtatatccaataatagtgaaatggatcccactaattatgacagaaatgatgatacatttaaatgacttggatgttttataggtatgatctcgtgaaatcttgagagaaactgaatgacgaatgaaactattgtttctgtttcacacagaagaaaactgaggttaaaaggggtaaagtaattttgcatggcatgaagtagaaattcaaagtacaggaatttgaacttggttctgtccttttctgaagcccttgaccactatagactcaaacatcaccttgtttttccactcattcaacacnnnnnnnnnnaaattatctaataggttggcactcatcatgagcccctgttctcattctgcaaatggtgaagctctctattgtcctgaccccacagttcctgtcccatgaccagggccagctcaccaaggagctgcagcagcatgtaaagtcagtgacatgcccatgcgagtacctgaggaaggtgagtgagtgcagacagatggggcctggtgcccttgagcagttcccgggtctcagctgccacacatctcatagcgggtgatgctgggggaagcttacgcagtcacagtactggcttcttcctctttttctttccatacaagtggcttagggatggggtagagtaggttgacttatttggatgaaaaccactatcttctgtcagaaactcaaaaggaatcattgctggcatggtaacctaaagaaaaacaaccagacaagtgcccaacgacacttaaaaaggttatttattatcttgccaagtttaggctgggcatggt

SEQ ID NO: 136264 - DNA, 910 bp, Homo Sapiens
ttttcggcttggctttctaaatgtactttaacatcaatttataatattaagagttcctaaggagagagatttcttagaagaataatcgtggcttgtcttagagccacagcctttcacaatctgaagtgaatggtgcagagagctttcttgtcaagtcgtatgtttcttcctgcagctcggcttgcccttcccctgcttgtgccgtgtaccctgtaacactatgtttggatcccagcatcagatggtgagttctacttttggtttgtaaaatcatgtgggattgtgtttggaaactgcctttcaagtgaagttctttttgctggcctccagataattagtaacttactgatgtattgcttggacccttgcattgtgtaatatatgcttctgttaatatgtgaatgtccatgaaggttggttggtatataggtcaggagcacctggcttttaaggagtcttgtaattactgtatcgcctgctttaagtagaaacatggcagctcaattaagcaccagaaatttcttctgaagctcctacttttaatgagttagcactgttgcctggatttatgaatgggcagattttgaaaatgaggttcttcattgtcatcgtggaattgagttctgcttaatttcagacatgcaggtgataaatctctccttaatgattccagaaggaaaaggaagggatggattttagagttttttatttcttttgtcaaggtagttttattttctagttcaggtacatcagtgagtaatagtagagatacattcatggctgttttaggagagttaagagaacatttcatttaaatgtaaatgtttaaaatcaaagaaatgttcctgcatatgtacagtttttacctttaatcttgtttaactgatttttctagtcttcaaggaattcc

SEQ ID NO: 136265 - DNA, 981 bp, Homo Sapiens
ccaacatttgcaggatgagaacaggggctcatcatgagtgccaacctcagttttcttctgtgtgaaacaggaacaatagtttcattcctcattcagtttctctcaaggtttcacgagatcatacctgctgcggtcatcaaagggctgaaccgcaaacacgtgccctcagcttccagatccatgactgtgaggccgctcgcaggcaccagctgcttcagctgttctcccagccagcgattcagcgcatcacacgagtgcctctcccggccgactgctgaaggtgtcatgttgggcactgggacggctttaaacaccggatctgagcctggtaattcctggaaaaatctgaacaccaccactggggagctgagctcatcttccaccaagattttgatgtaattcactttcttcaaactttcctgcaaccgttgactcagttgacaggcatgcttgatcctctccacaaacccatcaagtcccaagtattgtaaagataaccacagaggcagggcacggagtttgtctgtgggcttatttgatgtaagaccagcaactaaagtcaaggcagggtcatcgtgtttatacagtgtcaccgcaggaacagctggcaaacccagccacgggccaggagtcatcgtcatgctatcacatttggctgcagccagcactgatgaggagacataacccagagccaatgttgccagattcacaccctccacatgaagccatatgccatactgctcacagagttctttcaatctcccaatcttgtctgtgtgtcctactgctgccgttcctgcatttgcgacaagcaacaggggcagtcttcctcgctctatatcatctttaatcagtttctccaggaaggcaacatccatctgatgctgggatccaaacacagtgttacagggtacacggcacaagcaggggaagggcaagccgagctcctcgtgccgacttaacccccggcctcgtcctgcc

SEQ ID NO: 136266 - DNA, 1331 bp, Homo Sapiens
catttggggccatggggaagggcttaaaacccccggattcgaagccttgtaatttcctggaaaaattttgaaccaccccccactggggaggcggagttaatcttccaccaagatttggatgtaattccctttcttcaaactttcttgcaaccgttgactcagtggccaggcatgctgaatcctctccacaaacccatcaagtcccaagtattgtaaagataaccacagaggcagggcacggagtttgtctgtgggctttatttgatgtaagaccagcaactaaagtcaaaggcagggtcatcgtgtttatacagtgtcaccgcaggaaccagctggcaaacccagccacgggccaggagtcattcgtcatgctatcacatttggctgcagccagcactgatgaggagacataacccagagccaatgttgccagattcacaccctccacatgaagccatatgccatactgctcacagagttctttcaatctccccaatcttgtctgtgtgtcctactgctgccgttcctgcatttgcgacaagcaacaggggcagtcttcctcgctctatatcatctttaatcagtttctccaggaaggcaacatccatctgatgctgggatccaaacacagtgttacagggtacacggcacaagcaggggaagggcaagccgagctgattacaaaggtattggcccaggccaggtctagcagcagcactaagatatatgacaggcttcttgttatataacacattgaagccatccactacgaagtcttcatatcgagaatgaatggcaagcctacatatctttgcaagtccttctctttcctcttcgtggaaataagcacacccattttcatatctgaaaattctgcatagccataaggtggtatctgaaagtatcctagttgtaagttttctcagcttctctttgtccagagttgaaatataagctcccagactatgtcccaacaaagccatatgaccttgttctccaatattttggattctggggctctggggctcctcatcttcatctccatgcatgagattctgaactaactggaggatgctcaccatatcttgcccactgccctggagtgggcctggaatatctccggatatgagcttctttccattttcctcttctgttcttctctgactgtcctccagcatcttcactgcctccttcaagttttttcccatttcagctaacgtggggtctgctatcttctccagggacgcgtccatggctgaggcggccggtggtggcctggcggtcccgggctctacttcctcctcccgcgccccgcagctccttccacgctg

SEQ ID NO: 136267 - DNA, 1423 bp, Homo Sapiens
  misc_feature (42)..(84): n is a, c, g, or t
  misc_feature (88)..(122): n is a, c, g, or t
aagacctgtatacgatcactatagggcgctagggcgttaatnnnnnnnnnnnnnnnnnnnnnnnnnnnnnnnnnnnnnnnnnnnccgnnnnnnnnnnnnnnnnnnnnnnnnnnnnnnnnnnncagtcgacggtaccggacatatgcccgggaattcggccattacggccgggggcaggtgaggcacgtttagcctgagccggccacggactccacttcccctgctcttcccccagtggcaaatccgcgccacctcgcaaacccccaactcaggcacttgggccccttttgggccccctctcgctcctccctttaggcacctccctgggcccgcccacggtctccccccagtttgggactgcgtcataagtatcccagacctcggcttgcagtagtgttagactgaagataaagtaagtgctgtttgggctaacaggatctcctcttgcagtctgcagcccaggacgctgattccagcagcgccttaccgcgcagcccgaagattcactatggtgaaaatcgccttcaatacccctaccgccgtgcaaaaggaggaggcgcggcaagacgtggaggccctcctgagccgcacggtcagaactcagatactgaccggcaaggagctccgagttgccacccaggaaaaagagggctcctctgggagatgtatgcttactctcttaggcctttcattcatcttggcaggacttattgttggtggagcctgcatttacaagtacttcatgcccaagagcaccatttaccgtggagagatgtgcttttttgattctgaggatcctgcaaattcccttcgtggaggagagcctaacttcctgcctgtgactgaggaggctgacattcgtgaggatgacaacattgcaatcattgatgtgcctgtccccagtttctctgatagtgaccctgcagcaattattcatgactttgaaaagggaatgactgcttacctggacttgttgctggggaactgctatctgatgcccctcaatacttctattgttatgcctccaaaaaatctggtagagctctttggcaaactggcgagtggcagatatctgcctcaaacttatgtggttcgagaagacctagttgctgtggaggaaattcgtgatgttagtaaccttggcatctttatttaccaactttgcaataacagaaagtccttccgccttcgtcgcagagacctcttgctgggtttcaacaaacgtgccattgataaatgctggaagattagacacttccccaacgaatttattgttgagaccaagatctgtcaagagtaagaggcaacagatagagtgtccttggtaataagaagtcagagatttacaatatgactttaacattaaggtttatgggatactcaagatatttactcatgcatttactctattgcttatgcttta

SEQ ID NO: 136268 - DNA, 856 bp, Homo Sapiens
  misc_feature (561)..(561): n is a, c, g, or t
acaaaaccaggcttacaaactttaggatcccccaacctggaaaacccaagttttttcaactttccataaggttctcctcactctcattagccaccgtaccctctttaattgcccgaaaccaatccactttgcctacaatttccttctttctctggttctgatgataaccttaagtattctctggatctatgtggtttaaggttcatctttgtatacagtctttcttgaagactatcaaataatacattcaaagttcgaggcagaatgccgctattttcttctgtcccttgaaatgtatatgtttttcctgaattggttagcccgtaagtaaaaatcagacgactctgtcctttcaagaggtcttttactggttgcataatgcaaccctgaaggaattccttctgtgtagttgctgggcccaaaaaaccttggaaaaactgaatttctgtgccatctgccctgagcttttttcacttaaccgaccaaggatgcattgaggctctttcaagcacaacagtctgtgaatccagaatatgcacacagccctcagactcaagttcntttttctgactgtgtaaatggtcttattcgaagacaaacctggagataatctttagattcgaaactgtttgcctcagtatttggagcaactaaggaaaattcatgagacagatcaagcttaatgccatcgaaatttatttctgaaggccttgcaattgggtcagcactaaaaacataagatggtcgaggtactccctcttgattaaaattagattccattctgcaaacttcgcctgactagccagacccgcgagcagcactgcgatgttaccgttttcaaacctcatgccgaaat

SEQ ID NO: 136269 - DNA, 483 bp, Homo Sapiens
tttttgaggaaataaaacgtttattgagtaaatgtttatttagtaacagcaacacatagtttctcaagaagaggatgaactgaaaactcctctaaggcaggacgaagcaactttccattattcttagtttagaccagaatctttaattttatattctcctttaataactgtcaaaatacaccaaatacttagaggaaaatattcacagtataccaaaacattttaagataaagagcagtgtaagagtagtattctctacataccacagtatacaatgatgccttcctgcaggtttagaactattactactcaaaatattaatacatttatgcaaaatgattgagaaaattgaaatacctgcaaccttttccagtttgacttcaggaacaggtgcaaaccaccatcctcttcacagatcttctggttacggcaaccatccaaaaaccattgggttcagctctccaatactgatggaccatgcct

SEQ ID NO: 136270 - DNA, 143 bp, Homo Sapiens
tggttttacatttgtgagctaccaactagcacaaaacatgttcatcttccttttctcacaacaataggaaattgttagaaaagtatagaaaaagttctattttttcataaggcaaatttaatacagattttgctatgaagttg

SEQ ID NO: 136271 - DNA, 2032 bp, Homo Sapiens
actgcggggggagagaaatcgcacaaaccgcggggggtcgaagaacccgggaaatagtgcataagggaagcatcgctgtctggaccaagattttcagacagaccctatgcggtgtcccggtagtggtccagaagcggaagggtgtctaaaagaacttttccgtaaaggcccgaagggcgagggagagaaggggagggtgtatccggtatggcggaatgatctcgcggtgtaaaagtaagaaatttatttgatcaaatggcaatatatgaagatattttaaactataaggctctatccagacaaaaagcatctttttataaagtaagtgttatcaatttaaatggcacctaaaatcaaagaatgagtttcctataaatgtctgtataaagctttcataaaatcctcatgtattttaaaactaggttgcaagtataacagaaaaacctataaatagtacttaaaagcaggtttcttaaaatttatgacacctacagtgtgtcactatagacagagtattcggggggctctgtgacaatcaaacatggctgccatgagtaagggagcgtgtcccctgatgagcagaaccgaagcagtgattatgcctcagcctcgagctccccgcacagcatcctaccattccaatattcttgcggactttgcagttgacgttgagaattactacaagaggaggttaggaaaccaggattggaaagagggaagggagaggaaaccaaggcatgccaggatcaaagatatctataaagcagctttataaatgaccaagaaaatgggtttcttaaaaaacgcaaaatggtgaggccttggggctgcaacgtggcatctgtgaagaggacgacgccacgcccgctgggaagggctgacctgcatgccaggtgcttggcttggagccaccacacgcaacagcatgaaactttctctggagtgccaagtcattacctggaaacactggggacaggtcagtgtgtagcttataccagctttccccaaagatttttccagcaaccaagtgactcagcaaccaagtgactctgtctttggggccgtgatgggagctgacatggaggaatctgcagctccaggttctaagatcaggagagcttcagacaagtgggaaaaccagatataaagagggtgacatacacacactgttagcagcaaaacgcaaaggtgtccaatgattaaaatgaaattgagtgatagggagaaatggagaagattccagagtgtcagggatagtaactgaaaataattatatagcacccattattactaatttaagatatataagcatcactgcggatttatatagtgtctatgctattagtttagtaaatataaatatttatgagggctttcaaaatattttaaatgacatatacattctaatataaatattacactccagattcatacaactgagttgatgttacatttaaagtagtagatttggggttgtatatggagtaacttttgcagaccattttctgaactttgatcattcagctaagtaaaggccaaaaaacacaggaagcatcttattgggaactttggcagcaaacatgtttttatctatgtatttatgcattatacaaagatacacttattcatttgtataaatgaatttaaagtactccataggagatcttacacttaaaacacttttctgtcttcttatctgcttctttgagatcaagtctatatgggaggcttcttccttagaggtgtgtgtttaaaaatagtctcacgtttcccattcaggctaagtggctcttttaagattcctaatcttgaggttacaatcttcacattgagacactgatacacacacatactttaataaaaacagcaaatggtcttatatcacctacttttagcagtgtgcttttaaaacaggtttgttcccagcattacagaaaataatctccaaacacatgcattactttctactcagggaaggatgttacacctaatgactgtatagagtgattttgtaaattagtcttatgcgcgt

SEQ ID NO: 136272 - DNA, 732 bp, Homo Sapiens
catcattcaaacttttttatttacaataatatttaacagtctttatgggcttaaatgtagtagatatcacctgtgcatcaagcattacacttcattcctttaagatgtgcttcatcctcactcaagctgcttgccaccctccgatttctggtccagtctactcttgttactcttcaccatgtagatgaagtaggcaagggtctctttttcattcacaggtatgttcctgaagtgtcgactcacagtttctgctaactgggccttattgaagcctggtctggtctgcaacttgtagtgtcgtttataacgtcgtagggtgttcacctgcagctggaacagatcaacctagggagaagaggagaaaaatgttatccatcacctgaccacccaggactcaccaagagcccactatgtgcctagcactacactaaggtaggggtgaggatggggagggcttcaaaagaggtcttagaaatggtctattgaggactagtaactggctaggagggcaaaaataacagtagaaaaacagttctggctggggtgggctgatctcaccaaactggtggaaaaggtaaagcttaagctaaggaggagcagggtctgataaagcactgagaaacggtagggaataggggaaaagatcacagcacagagagctgggagaggcacagattggcaagggggtcacaaggccactgtatccctacgctgtaactgaagtcctctagg

SEQ ID NO: 136273 - DNA, 596 bp, Homo Sapiens
  misc_feature (31)..(31): n is a, c, g, or t
catgtagatgaagtaggcaagggtctctttntcattcacaggtatgttcctgaagtgtcgactcacagtttctgctaactgggccttattgaagcctggtctggtctgcaacttgtagtgtcgtttataacgtcgtagggtgttcacctgcagctggaacagatcaacctgcctctaaaagagctgttcttgcttcaggcaggtggagagcactcaggaatgtcagtgtcgtgctcgggagaatctccgccatcgtcacttgtcttcctcttccttttatttcggacactctggatgaaatttttgtgaaaatcacagatatataggtgccttacgctcttgtcgatgtccagcttgagtttcttctgcgagatgctcttctggaccctcttgctgaaggaggcgttgcccgcgggccggacgcagcgctcgccgtcctcgatgaggcagcagctctggccgtagcccggggcggcggcagctggggcggcggggggcccttcgcggctgtcctcctccgtgctgaagccgttcatctccccgccccgggccggtccctctgggggagggtccccggtaggccactccgcggccgc

SEQ ID NO: 136274 - DNA, 1170 bp, Homo Sapiens
ccctccgatttctggtccagtctactcttgttactcttcaccatgtagatgaagtaggcaagggtctctttttcattcacaggtatgttcctgaagtgtcgactcacagtttctgctaactgggccttattgaagcctggtctggtctgcaacttgtagtgtcgtttataacgtcgtagggtgttcacctgcagctggaacagatcaacctcaggaatgtcagtgtcgtgctcgggagaatctccgccatcgtcacttgtcttcctcttccttttatttcggacactctggatgaaatttttgtgaaaatcacagatatataggtgccttacgctcttgtcgatgtccagcttgagtttcttctgcgagatgctcttctggaccctcttgctgaaggaggcgttgcccgcgggccggacgcagcgctcgccgtcctcgatgaggcagcagctctggccgtagcccggggcggcggcagctggggcggcggggggcccttcgcggctgtcctcctccgtgctgaagccgttcatctccccgccccgggccggtccctctgggggagggtccccggtaggccactccgcaggccgcgcttgccgcggggcaaggtcgctgagaccccccgcaagccgatgggtcccagagtccgtctccagcccgggccggttccctgccctgcgtccgcgaggtccggctccctgggcccctggccctccgcctccggaagcccccttcctcccggctcgaggccccggggtcggctcccgcggctcgcagggccccgccgggggtcacccggaggagccttctgccgggggcccagaaccgtaaccctgcagcgggggtgtccgggagggcgtcccaggaaacagccgctccccaaggactccgggcctgggttgccagggggtttcgaaggcccctgccggctcccgccttctttcggcagcggggcaaactcgctgccgggcagctcccccggggtggcgcggcctcctcgcgcggggcccggcctcgaacccgcggcacccgggccccgcggctcgtccggcccactccacccctgcagccactcggctgcgccccgagtcccgcggcagcccctgggccgcccggccgccgcccgccgaacgctccatcccgggaattccggaccggtaccagcct

SEQ ID NO: 136275 - DNA, 538 bp, Homo Sapiens
  misc_feature (54)..(54): n is a, c, g, or t
tgctttggtggttccccaggggtctgcctgtgctggtccggtatcctgctgatntggtggttcccgaaggccggccacgcttaccagatcggttgagattcttctttttctttagttcatcttttatttctatgcttctgccacttgtagtctgcaagtgtgtttcatttaatgggtcttgcctctgacaaaccattggtttgtggttgactgtgtggctgtatttgctttgctgggaggaatatatgtcaaactgatcagcagctctcatggcatcttcattgaggcaggaaggcttgccaggcccacagaaagctggattactgctggcaacaggatgcatcattttctcagccgctcgtagcccggcccctcggcgcgtctaggggcttcccagcggctgggaacctcgtgctggcgccgctccctccccagcccgccgcctctgcacggtgcggagaacgggccaagacggagtggcaggcagcgagggcggcggcgaggcaggcgctggctcccagcacccgccgcggccgca

SEQ ID NO: 136276 - DNA, 644 bp, Homo Sapiens
  misc_feature (58)..(58): n is a, c, g, or t
  misc_feature (150)..(150): n is a, c, g, or t
  misc_feature (514)..(514): n is a, c, g, or t
  misc_feature (517)..(517): n is a, c, g, or t
gtttaagacagggaagcttcaatttgtacccccttccttcctatttgaagcttccctntcttaaacttagacttgagaggagagagtttacctgctcttaattttttaatctttgtggcttgctgaaacgtagcagaaggtgtccttttnatttttttcaggctatcttctttgtttccctttggtaactctgaaatgtcctttccatgtgttattttgatttttactccagggaaggtgggaggtcttcctctcttcttttctatacttttagaatctttcttcttgatcttatctccagatttggtctctgatttatttagctgaatttcggtcagagccacttctaggtctcccacgaggttttcgaggactagttttaactgaaggagaccttgtgggacttcgcactctgacttcttcatctgagccaaaacctaagaattgctcatcctcgtcctgccgcctcccccgccgctctccccaaacacggcccggaaccggcgcagattgngtngatggcggccgagacctgcagcgccgcgtcgagatgccgggcccacccggaagcagggccggccctgaagaggctgaggacgatgacgaagacgaagacgaggcggacgacgaggaggctgctgtag

SEQ ID NO: 136277 - DNA, 538 bp, Homo Sapiens
ttttccacggttatcttctttgttccccttgggaaacccggaaagccctttcccatgtgtattctcgatttttactccagggaaggtgggaggtcttcctctcttcttttctatacttttagaatctttccttcttgatcttatctcgagatttggtctcctgatttatttaggggggaaaaacacaggttggatctgaggggttagctgaatttcggtcagagccatttctaggtctcccacgaggttttcgaggactagttttaactgaaggagaccttgtgggacttcgcactctgacttcttcatctgagccaaaacctaagaattgctcatcctctccgctgccgcctcccccgccgctctccccaaacacggcccggaaccggcgcaggttggtgccgatggcggccgagacctgcagcgccgcgtcgaagcccgggcccacccggagcagggccggccctgaagaggctgaggacgatgacgaagacgaagacgaggcggacgacgaggaggctgctgaggcggcggccgc

SEQ ID NO: 136278 - DNA, 895 bp, Homo Sapiens
tttttcacagctttagcttgcttctgcaggtaggctttggaaggcatccattgtagattctgacattttctcatcttgcagcactgcttctttatattgcgaccaccaaacttgggcttatctaagcaattagtacaaacaccacagtcctcaggcacctggcagccgggacactgcccacaccgcctcgatcgacgtcctttctttactggaggttcctggggtgccttgtttctagtgacaggtttaattggtttgatgggtggagcaagaggttcagcatcttctgagccagcaattgatgacttgtcatcattccccatggaagacaaaatcttttctcgttcttcccatggtaaggcactcagggtgggcatgtcatcaggaaacacagctcgttttcggccaagggcaacagctgctcttctgcagacatgtttaatccggggtcctcgcacagaggtctctgatgagtcactttcttgaccctgtgctttgggctggtcggtttgtttaagactcttactcttctcaatcttgcagagctgagctttggccttttttaggaggctggcaaccctcttgtcagtcattggaagcttgtctgcctgagccaacatggagcctgaaggagaccttgtgggacttcgcactctgacttcttcatctgagccaaaacctaagaattgctcatcctctccgtgccgcctcccccgccgctctccccaaacacggcccggaaccggcgcaggttggtgccgatggcggccgagacctgcagcgccgcgtcgaagcccgggcccacccggagcagggccggccctgaagaggctgaggacgatgacgaagacgaagacgaggcggacgacgaggaggctgctgaggcggcggccgc

SEQ ID NO: 136279 - DNA, 383 bp, Homo Sapiens
tttttattttcagatatagttctttttattataagaaattttggtcccccatatgacaagtttaagtggttaacttcattttgagctacatgctcattcaactacaaacttctactataaaactcagtttttttcttccgtttgttgttcttattctggcgcaaaagtcaggttacatctttccttctgggaagatgggctgttgaatgaccaatagtaatgggagtaagactgaggaatccacaacttccttctttctaaaggtaaacagggttatctctccataaagtcagtttgctgaaggagcagtgtaaaattagatgacaaaagtgaacattcttcttggcaaaataacactgaagcctccaagttggccaatgcaa

SEQ ID NO: 136280 - DNA, 1414 bp, Homo Sapiens
gaggagcctcacatcggtgttgaggtatcgcggagcggtcgcgttgctgatttcattgccacagctcgtagaacaggaggtccactcggacattggagaccagccatcgtccgcagagtcgctgggccaacagcgaggacagcattctccatcaggaactgtggcattggagcagggcatgatggggcaggacacctttttgcagatggtaactgagttctgacagtgacactcagtgcagctatcaacagtccattcctcgttatttctgtactgaactccgttgtgatagcataggggaggccgcctcagctcattggccaactctttgttctcttcagtcactttgcggatgctgtcctgcagcgtggtcacaatggtgcgcaggcccctgagttccaggaccatgctggacagctcatcacaggagatgccgcagatggcttgcaagtcctttgtcttgtggccaatgtagttagtgcggatggcagggctggaaccattcaccacgttgttgtcaagggtgaggaggacactggtagagctggagcagcctttgttcctgaggatgtcttctggtgtggttccaaagacaaacctcacattctgcagcaccccctggaaattgtcattgacgcccccctttgcgatgcggagtctggcgatgctggccaggtctctggtgaagacgctttggatggggacgtccaactcagcattctccatcttttcacagtcgatgtacagctgggccctgtcttcctgcacaaacagggtgatgctcttccactggccggttgccaggagagcttcttcccacagacaccacgtgctgctttccttggacggtcaggctgaggtccagggtgcccgccttgccattggacaccacgctgaagacctggccagagtggtctttccgctccagggccagcagcgtgccccgggtcttcttcatctgcctcagggatgccagaaggaggaaacccttttctgcccgcacagcatccaccaggtcttggaacttgtcatcaggcacaggggggatcaggttggcatcctcgatgcggaaagctgggctggaagggtcggggcccttcaccagtcggcgcccagaccccttgcgggcggccccggtgagttcaaagatgtcaaacacgctgttgtctccgccagactctggaatgcggttggtgccacacacatgcatcaggaacaggacgcctagtccccaggccagccccatggtggagctgttggtgcccagcagggatcctgtgtgtaccggagcgcggcggccgggagcggtggcgagggcggcgagggctggaggggcgcggggaatgcctgtgcgtccggagtagaggttgctcctggagagcgacaggagccctgaactcgcaggccacatgtc

SEQ ID NO: 136281 - DNA, 1421 bp, Homo Sapiens
  misc_feature (763)..(796): n is a, c, g, or t
  misc_feature (893)..(939): n is a, c, g, or t
agactgatgcagataacccggtgatcaaatcattaatttatgcaaggtagcagccagcatattagttcacaccattggtggatttggtttgctgtctcacatgcaaggtgaaatgggatggcatattgcaagctggtgccttcacagaaagtcagaaccatggacaaaaccatgtgggcatcaatgagatatgatgtgccattctaaaagctttctctcctgatggctttagaaattaggatctggaaggactttaacatgaattagttttttggcatgtttataggccagagacctgaccaggcaatgaactgatagatttaaataaatattcccctcctaactttttcctttagctacagaccagacagtccaaacacaaagctcagaattccagctccaacttatttactcagtgaatttattgtaaaaataaagaaactcaattgttccagttaatggatttcacgttaaatagtttaactttcaatgggctttctgaagagctgttcataggatgatatttggaagagtcctttccttaaggaaaaaaagggtgaacaataaataaagagttacttgcgttaacggtcacgttatttcattaaaagagaggaggagcagaaatctatgacatagttgcccaacatggcatttatctgctgcaacagaaagctgtaacactggccggcatttcacagtatttgcgcatagtaaacttctgccattgttaaagtctgagttagaattatcaatgaattcnnnnnnnnnnnnnnnnnnnnnnnnnnnnnnnnnnaaaaaatgtatttgtgttttgcaggttggaacgcaaacccagtctggccacgtcccgtgaagttgtggacaaaatgtttcagtttctgttcacctcnnnnnnnnnnnnnnnnnnnnnnnnnnnnnnnnnnnnnnnnnnnnnnnggggtgggggatggggtaggtatgtgcttttggctcatgtttgtgatgataactgaagtcttttgtgggtccgacctgttgtagggtgtgggggaaagtgaaggaagagaatgaaggtgagtccccgccgttgcaaaccttcaccaaaccacgcggcccagttttcgtgagtacccctgtgtcccagagaggaggacccagcgtcctcggctctgccaagcgtttcttggtctggtgggtactcgaggcagttgagaaccttgctgagctgagcgggcacctcgccttgcctgctggttcgacacctgaccccctccccctgggattatgtacacgcatcattgggcttcatggatgtggaaaggggagcaaaggatggtttggggggtacgtccggctttagcgagggcgtacgcttcagccccgaccttgtcagtgagttgtaggcgttgaggctgggctgcctcgagacagtcacggcc

SEQ ID NO: 136282 - DNA, 1579 bp, Homo Sapiens
  misc_feature (61)..(70): n is a, c, g, or t
  misc_feature (287)..(365): n is a, c, g, or t
  misc_feature (1114)..(1114): n is a, c, g, or t
cccctggggaggcgctttaaatctttttggaagggtgaattttgttccccattaattgttnnnnnnnnnnagaagagtaaagggtttctctctcaccaaaatatccccccaagtttagccagtttttccccaatcccggggggtttgttaaaaggggggggccaggtcccttggctttaaaaatgcgccctcccctataggggcccccctttgttaccaaaaaaaatggggtccggtaaagcttgggccccctggaagggatatttttgaggcggcgcccccttttnnnnnnnnnnnnnnnnnnnnnnnnnnnnnnnnnnnnnnnnnnnnnnnnnnnnnnnnnnnnnnnnnnnnnnnnnnnnnnntttcccaggtcaatagcaaggccaaggccacggttattatttagctctgaactggtggtatcttgaatcccgagcaacgccgaacactggccactcctgggcagcagaggggggaatcccagacctcggggtatggaggaggggcccagaatcaccaggcctggggtcagcagtcctgctctggcgatggagagctcctcagcaggcggccggggagaagtcagccccacagcggggccatctcagatggtctcatcatcgctcatgtcccagatctcagcagcttgggtttcttgatgcagcaatgtaagaccagtcaagtcttctaagaaggaatgtgaagaattaaacaccttggctaggaagttaaatccttctcgttcatattgatcaagaactttggaagaacaagctgtacatttgtcaaatgccaggctgacgggaaggacattatcaaaccgtgaaagaaatccccggatctggtgaggcacaagcccaagagaggttggaggctcattcatccgatcgtcactgctgctggcaatggcatagcccccttctggatgctgcaaaacagataccatcaattccacggccagggctcctgcaatcacggccagtcctggacgactcacagtgcactgctggtccaaggtccggtctctggttgaatctcttggggccaccacatcattgcagaagtagcagccaagcttgtaaccagggatgttggcaaaaagcgatgagcncaggaggtcagcagatgccacagggtggtttggacacaagtccccagctccttgctgctttggtttcttcagaccatgtctcatgacaacaaatgtgtcaaatcccaaagcagcattgatgaccagctttctcttgcttgcagcaatgacggcaggaagccaccggctctccctggtgtccatcaataggaagacgacatcatggctttcgatgagctgctccagttgctccacatctctgcgggcttgctccagagtgacactggagaagttcactggatgcccaggcataggtatgctcatgttgaatcctctggcattcacaccggggaatattttctggagccggtccgctgctgccagagccttgggcttaccaccccctaggcaatcttcaaactcatagagaggctgcctcacaggattggagtaggagatcttggcattgtccacaaatgtgatgtg

SEQ ID NO: 136283 - DNA, 588 bp, Homo Sapiens
gcggttgttttatcatgttgcaatttggttatgtcttttctaatagtgtttaaaagcaatcaaaggcaggaacttttccttttataaactattgttgagcttatattggacactgaactaagtgtcagtttacaaaaatgaataaacaaaaatcactgccagtagggaacacacagccaagatgggggagtagtaagatgtaaagagatgtaaaataatgtgatagattcggccagagttactaaagagtcagaaaagggcaagcatgtttcttccctgtcctgaagcagccaagggagaggaagatatctgttgccaatgctggggtgttggtttaggcatgtagatgctgtgatgcgcagtggaaccgttcaatgagcagacaggagaaccagctttatgcggggagggagagaattgctcccctcatcccccgtgagtcacaccctggagattataagtttaaacattttgatttcgggagattttgagttttgggcttaaaatgactgaagaaccacccaggtggatctacgtgtctcgagtccagaagtctgaatacagatttacgatttatgagcacacaga

SEQ ID NO: 136284 - DNA, 439 bp, Homo Sapiens
ggcttggcaaggagaatgggattggttacgattgtgagctcccactcttcccggcccaagatgccgaagatgaggaggcccactccgcacgagctttcaagaacccatgaccctaaacggtgctaatagtgcagacagcgacagtgacccgaaagaaagacggcctagcgcctgatggtgccagctccaaggccagcctgccctgcactcagaaaatccctttgctaaggcaaacggtcttcctggaaagttgatgcctgctcctttgctgtctctcccagaagacaaaatcttagagaccttcaggcttagcaacaaactgaaaggctcgacggatgaaatgagtgcacctggagcagagaggggccctcccgaggaccgcgacgccgagcctcagcctgcagccccgccgccgaatccctggaggagccagatcggt

SEQ ID NO: 136285 - DNA, 431 bp, Homo Sapiens
actttttttctccatttctatcacacagatttgaagagatcagtatctatcattgtaaaatataactttattaaaatttgcaatctgtctttctataaattattattccctaaatgtgtattttatgttaatttaactacctgaatatttattttgtttaaataaggaggcagctgtctaagaatttttgttaatattactttgtaaattgcgtaatgtaatttattttacattatgtacatttcctttttaacgcacaaaatgtctatgtacaattaactacagatttgcaaataatgtcactaagctttattcagtcaatacagatggcatgtgaagatgtaatatgcttttttacattttcatatgggttatttgtaaataactatattgctgacaaacataaatacggaaatcattttccttttaaa

SEQ ID NO: 136286 - DNA, 703 bp, Homo Sapiens
  misc_feature (21)..(21): n is a, c, g, or t
gcactcctgccttactttgtntatgtggtcagtggggtgaaatctgtaagccatgacctggagcaactgcaccggctgctgcaggtggcacggagcctatttcgtaatccgcacctgtgcttggggccctatgtccgctgtctggtgggcagtgtcctctactgtgtcctggagccactggctgcctccatcaaccccctgaatgaccactggactctgcgggatggggctgccttcctgctcagcccacatcttctggtagccactgggccttaaaacctgcgggtgggaattgctgccagagcccaagttgggttggggttaaggaaaatgggggctgaagcctctggctttgagagtctatgagaagatggggaaccttttccctaggagcgtcctagctggtgtgctgtgacacactgggattctgaaaatggattacaaatacgccaaggtattggttcttcagccctcaggtcctaggccagtcacccctggcagccttcttcacttaaccccagcactcccgagtgtgctgtacagatgctattctctttgtgttgtcttgtgccctgttgggtggcaccatgcctcattcccctccctaactgaatggtgctcccacaggactcatggggaccttgtaagtggcctctatcagcatatcctgctatccctgcagaagatcctggcagatcctgtg

SEQ ID NO: 136287 - DNA, 975 bp, Homo Sapiens
gtgagctcgtgagtgggcgccgctgcaccgcccccgccgccgtcgtctcggtagcagccttcgccacgccggggtcttcagctccactggggccatgtcagagcgagaagagcggcggtttgtggagatccctcgggagtctgtccggctcatggcggagagcacgggcctggagctgagcgatgaggtggcggcgctgctcgcagaggacgtgtgctatcgtctgagagaggccacgcagaatagctctcagttcattgagcacaccaaacgccggaagctgacggttgaggacttccacaggggccctcagatggagcagcgtggaggctgtgttgtggttacggatcccaggaggcattgcccatgcgccccgccaggagggtgaactctactttcctgaggatcgagaggtgaacctggtggagctggccctggctaccaacatccccaaaggctgtgctgagacagctgtcagagttcatgtctcctacctggatggcaaagggaacctggcacctcaaggatcgggtgcccagtgctgtgtcttcactgacagatgaccttctcaagtactatcaccaggtgactcgtgctgtgctaggggatgatccgcaactgatgaaggttgcactccaggacttgcagacgaactccaagattggggcactcctgccttactttgtttatgtggtcagtggggtgaaatctgtaagccatgacctggagcaactgcaccggctgctgcaggtggcacggagcctatttcgtaatccgcacctgtgcttggggccctatgtccgctgtctggtgggcagtgtcctctactgtgtcctggagccactggctgcctccatcaaccccctgaatgaccactggactctgcgggatggggctgccctcctgctcagccacatcttctggactcatggggaccttgtaagtggcctctatcagcatatcctgctatccctg

SEQ ID NO: 136288 - DNA, 561 bp, Homo Sapiens
atatatttttttccttccctaggtaaaggagtgatagaacttgtgccaaaaagagggaatctataaaacagaaaatatagtttcccccttaaggaaagaaaagctggacaagattgaaatgctctgtcttctaaccccatgaccagaagcaagaaaaacacattaagcaagttggtgctgggaggctccacagggtctgggaagcaccagggtgcccacttacttgcattgctgtgctcggcccttctataggtagggctggacgcccccgccaaccacggtgcagccctcgctggcatctttcttgggctcgtagccgccgcccggggaccggtagtgggactcgagcgggtgcgcgcccgccttgcccgcgtcgctggccgcctttggcgcggtgtgcagggcctcgccgggggccgcggccgcagagttgtaccgcaggagaccctggccctgcagcgccgcgttcaagttcccgtagtttgtgtagttgccgtagaagggcgacgtgtagtagagggggcggcccagcagcggcgaggcagggtagggcgagcctcc

SEQ ID NO: 136289 - DNA, 1755 bp, Homo Sapiens
tgcggccgcggcgcgaggggacgccgttgcagccgtctttcttgaggtgtctgtgcaggtggtcggagcggacgaaggtcttgcagcagctgtcgcactggtaggggcgcaggcccgtgtgcacgcgcatgtggttcttcaggtcgtagttgtgggcaaaggcggcgccgcactgctggcacaggtacggcttctcgcccgtgtgcttccgcatgtgcaccttcagcttgtcctgcctggtgaagcggaccttgcagatgttgcactcgtagggcttctcgcccgtgtgggtgcggatgtgtcgcggcagcttgccggcgccctggatgaccttctcgcagatggggcacttctggaaggccttggctcggatcttcttctccaccttctgcgaccaggccgggtagacgtcgccgtcgtgggcgccgctgaagtacttcaggtagtagtccatgacgcccttgtcgtcggcccgcgactcctcgtcgctgtcccccggcgcggcccccgcccggcccaccgatgacatcatctgctgcagcagcgtgctggccgccagcccgtccacgtcgggcccgtccccgtcctcgccctcgccgctcccgacaggaagcccggagagtcgcccggctcggggccgcctccgacagcgaggcggcctcctcctctccgccgcggccgtagtggccgttctgcgtggcggccggcggggccaccggcggcggaaagagacccccggtgggggcgtcctcatcccgctctggccacagacccgggttgctgtcgccctcgtccccgtcccccgtcgggggccgctcggccggggggcccggcccatagaagtctaagccgttgcagtcgcccgcggccacggcggccacagcggcggccacggcctccttggtggcatccaggtcatcatcggacgccccaaaggcggaccacgggaagctggcagcggcggcggcggccgcggggggcaggctgttcatggggttgctctggaagaactcgaggtactccttggcgcggaggaggttgcgctgatcaatttgatctacaaggtccagctgcccggcgtcggcgcccgcgtcggccgccaggatctgccggtccaggaggtcggcgcacacgtggctcacggcggggatctccagcaggcgggcggcgctgaggatgtcacccacgttggctgtgctgacggtgagcgtggccgtgtaggcgaagtccatgagcgcggtgagcgcctcggcgctgacgaagtcgatctcgtacacgttctgctggtccaccacggcgcccgacgtgaacagcttcttgaagtactggctgcaggcggccagcaccgagcggtgcgtggggaactcgcggccctccaccaggatcaccacgtcgcacagcaggccctgcgtccgctgctcgttcagcccactcaggatgtcgctgctgtggtcggggaacgggatcccgatggggccgtccacgccgccggccatcttccgcgccgagacctcgcggggccgggccggggcgcgcggggccggggcccgaagttgggactgggctccctcggccgctcgcctccggggtccgcggcgctcgctctgcccgcgtcgcgctgccctggtcgctccctcgcgcggcggcggcggcgtcactgcccctacagtaactgtacagtacagccggagccccgtatgatgctcgcgactcccttcctggtttctccctcgtgcggaattcgccacccgggcc

SEQ ID NO: 136290 - DNA, 484 bp, Homo Sapiens
  misc_feature (129)..(129): n is a, c, g, or t
  misc_feature (455)..(456): n is a, c, g, or t
ttttttttccaacaaaaccagcactggtctttattgaggtgtcagggtagattggcaggagcacagcctaaggacatgaaggtcagagtttctcagagaggaggggctgggtccctgagctaggaggangggcggtgggtgactcgggagctcatgagacttcaggaagtccctgtacttggccaggaaagggttggcaagagtgttcagctcttgccgaagctcctgcagagccttgtctcgctcttggggctcccctgtcacctgctgcctgtaatagttgatgtagaagttcatccagtcctccaccacagtcaccatgtcttcttcagagacgagaggatcattgaagacctgctgattcagcagaacgctgaactccttcaatcctgcggaaatgagatccttattggccttaagaagagccatctgccttcaggtctaacaggctgtanntgtctcacccacactcttgagggtgcgt

SEQ ID NO: 136291 - DNA, 1246 bp, Homo Sapiens
  misc_feature (106)..(106): n is a, c, g, or t
gcgccgtcagacggactctggtgcagtcactgagtagcatagatgtatcagcttggcagcgcatcactcagttctgtgtgtcagtcttcctcacggactccagatncagtcggcagactctcgacacagtgatctgaatgtgggtctcagcccgtcccttcagctccactctctcggatgggctgatgatgcgagctcaggaaaaggaacacccttctgagcttcaaattcagaagctgctcgggcaaaatggtggacgccactcaggctgatcttgggcttctcgggctgtaaaaccatcacgtagccatttaccgggggaccgaaatgcaggtggcttcgttaaaacactgattgtgctggtgattttgagtctgcgatttccgggcgtggggaactgccgggagttcaggtacgagatgtgctgcatggccttatccaattccccgaggtcttctccctccaaggtcaataccaactggctggggtgtgcttggatctgcacgcctctgccactgtcttcgaggacctgcaggtccagcccctccttgcaggtatacagacagtcgatcaccttcttatccgcgagtttcccggaacggagagttaagccagccagattgcctcggaaaaactgggtcatgtgcaggtcgccacctgcagaggccacagtcacaggctcagtttcattgtcattttcaactcctgaaaactcttgccagcaagcccccaccacgagctgagtttctatcttggatggatggagcgggtaatcctcagtcacagagaagggctcgtgggacgtgccatccacatagagagtcacactcgggaattctacattgaggacgtagtggtgccattcctcatcacagacctgattcaacttccagtggaactctgcaggtctgtatttcttctcctcagaaggatcctgacggaagaggaagatcagccggcacccgtggacatagagggagtagtggtgccgattcatatctgttttatcagaactgcaaagaattgtctccttcttcctgccgaatggcccatgtctcatccacaccgagatggtgaacggctctttggggctgaccgacacgacgccatccgggatcctcactgcctgggtgccgttgaactcaaacacctggtcgctgtcgtggccattgtcggtgggcaggcccatggtccagttgagggatccactcggggatggcagcagctcggcagtgcccgcggccgc

SEQ ID NO: 136292 - DNA, 775 bp, Homo Sapiens
tctagcaggattttaagtttaagcgttcagggggggctggaccgtgcaggtcctcgaaggacagtggcagaggcgtgcagatccaagcacaccccagccagttggtattgaccttggagggagaagacctcggggaattggataaggccatgcagcacatctcgtacctgaactcccggcagttccccacgcccggaattcgcagactcaaaatcaccagcacaatcaagtgttttaacgaggccacctgcatttcggtccccccggtagatggctacgtgatggttttacagcccgaggagcccaagatcagcctgagtggcgtccaccattttgcccgagcagcttctgaatttgaaagctcagaaggggtgttccttttccctgagcttcgcatcatcagcaccatcacgagagaagtggagcctgaaggggacggggctgaggaccccacagttcaagaatcactggtgtccgaggagatcgtgcacgacctggatacctgtgaggtcacggtggagggagaggagctgaaccacgagcaggagagcctggaggtggacatggcccgcctgcagcagaagggcatatgaagtgagcagctctgaactggcatgacttcacggcgtggacacatgccagctacgagaggtttgcactgctgcgctatcgactggcatgcagtcttgctgacccgagttaactctctgctagactgatggcgctctcgcacgatttagggagtgatgatccacggcaccctgaacgcaacatg

SEQ ID NO: 136293 - DNA, 872 bp, Homo Sapiens
  misc_feature (74)..(74): n is a, c, g, or t
  misc_feature (76)..(78): n is a, c, g, or t
  misc_feature (81)..(81): n is a, c, g, or t
  misc_feature (83)..(90): n is a, c, g, or t
  misc_feature (92)..(95): n is a, c, g, or t
  misc_feature (97)..(97): n is a, c, g, or t
  misc_feature (99)..(100): n is a, c, g, or t
ggggccccgcgcgcccaaaacgaaatggtcttagaaaagctttttcgaggggcccgaggcgggcccgacaatgntnnnttntnnnnnnnntnnnntntnntttttcgggtgttttgacagtttattttgaaggtcattttaaaaacaaagttaaagacaatctgagaaaaaaattgcacagaatacactcattaaataggtatggtttatggtgattaaatcaaaataagggaaatatgttatcttctgcaattccagaaataggttctgttgtccggaaggttcttatacatccaaaaagagggaatgatcatggcaattaaagctgcctcttaatcatgtaaatctacagtagcaactaaatttttctgttcttcccattaagtcagtttcgatcttcaaactgtgccttgttttttaaaagataagatgctagaaattcaatgggatttggtggtctttcctttgcaagcacagcaagtccctgtaataagataggcacaactgtctgatccaggtaggcacgagttggcaaagactggagatctaccttctgctttgatgacttttctgcattaatcttctcattttctactattctctcaacgttgtctgtgagaccgtactcagagtgaggattttctgcaacctgcgtttgtccctccagcatctgctctggctccatggcggaccctgcaagtcacagtccccggataccagtccgcgcccaagccgttcgttcttaagagccctgcaccgcgccaccagctcccagcacaaacagctccggccgtaagtgacggctgtcgcacgactgccgcccccggccgtaatggccgaattcccgggcatatgtccggtaccgtcgactg

SEQ ID NO: 136294 - DNA, 570 bp, Homo Sapiens
gtaacttttgaattccgtattttttaatggtctatggtctacaaacactcatgtgcaaacacatacacgcagaatagggatcacctgcacgaagctatgaactatttcctcatcccttctagccccttcctagaggcgaaccctccgcccccacccccaggcactatctgtcctgcttgcacccacctccacccagggctggccaacaatagcctgtttcctctccattccacccctctcccccaccctcccatcccaccacagaaagaggattactggttcctgctttccttagcgcccctaaatttaaaggtatctgttctatgttgcatgcttcagaaccctgtagaaacaaccagcaaatccactgttgatacgcaattacccctcttggatgcatctgcaacaagcactccccagcttcgaaggggcagcaaagaagttcacaattacaagaccatggggtcacgaccacagaagcgatatgaaacaggtcccgggacacagggaggggcagaaagaattctttgagtaagcctggaaggtggaggggctcaccaggccaagagc

SEQ ID NO: 136295 - DNA, 849 bp, Homo Sapiens
  misc_feature (429)..(441): n is a, c, g, or t
atactacgaggagaagttggcagacatcctgaagtagggcaactgggctttgcctcacgtattcctgctgccaccaagagacagcaatgacatgtacagccatctgggacatgcctgtcttcctaataccatttggagctggacaacatttgacaccaaccaatcatactggacaaggcccttagaggacttgaaatatacttctcatgctgtagtttatttaggctgtgactctctctctaatgctgctctcgggaaggacgaaagtgacctgcaaggagagaaatgcaaccatacatgggctccagtcaactatgggactgaaggtcctaattgctcacccaagggggctgcttaacacaaacagcctcagacccgaggtttagatttctgaaatatgcattttatgttaagttgggtatttttttnnnnnnnnnnnnncagcaacattaataaaagaagtggtgtgtttttcccgtggccagatttttaagaaacttgaacatctggaagttgccacagacaagcgagctagtccagacacagggacactccaggctatgaaccaagccatggttaaaccaagacttgcctagacaatgcagaataactctcccatacagacttcttacgacaatcaagtgagggcctttcccttctctgaaggcaagtaatagggcagaaggtggaacaaaaagcatgagaaatctaaggtagccacatcccaaatgccagttaataagcaactagcttctttattagagaggagcgggtgaaaagtagtagtttaatgttcagatatacaatcatttaaaagtattcaatacatggtgtttgataaaaaaggca

SEQ ID NO: 136296 - DNA, 455 bp, Homo Sapiens
  misc_feature (424)..(424): n is a, c, g, or t
tttaaagctggaaggtgtttctatttggtatctttaaatgctatagatttcgggattttaactaacagctttggctatagaaatgaagaacagacactgctgaatcttcatttgaatgctcaagtttcatggggcagggtggggggcgggatagctttgcaacccaaatttaagagaatcaggaggaaaacaaagcagcaaagaggcagctggtgcttactacctcttccactactacgcttcagactgacagaaaagcagctagctgctcccttttaaattacgcaatggttaattctaagcaggaaaagatgagctgcgaagaacagtaagaatcataaaggaaaattttaattttttcccccgactatttgtggagatgggaaataattgaaggggctggagtaggacaatgtgagtaacngtttagacgtttacctggggcttgtccttat

SEQ ID NO: 136297 - DNA, 683 bp, Homo Sapiens
ttcccacatgtgattttatttcactctgtcttgagttctcaagtttttcaagacaaaatcttccgagtcagtcatggctcttctctttatcctcactccgcttctctagttctttatcaggtccagtttgactctatctctaaaaccatttctgaatgtgtcaatttctttcattctaactggctctactacaagtccaagtcaccatcctctcttgactgggctactgcagtggactctggcctggtctctaagctttctttcttgagggatctggtcataccactccctatgcaaaaccctgttgtagagcaaagtccaggcttgttgctttatcctaaaaagccccatggcaagggcctctgcctgactccttgactttgtggacaaatgggtttatctatggggaaataagaatgcaacattcctgacatcatggaggcccagccttctatctagagttatataacatcttggaaggttccaaaggcattaagtcaagtccaggtttgtcagtttctccaaaagatgtcaatgaaaactgcatacgtcttgcagctgaatatctaaagtatcaattgcctgaaaaatactgatgagcaaaatccactggtggctacaaaggtgattataaagcagtagtgacctagtcgtggggagatagcacactgagttaaggaaag

SEQ ID NO: 136298 - DNA, 1320 bp, Homo Sapiens
cacttggttcattttgtttcgtatgtttgttgtttttcgtcttccaaaggtgaaagctatgatacagttccacttaaattttagtgttttcttactcagctcaagcattaatttttgattaagtcttaatctgcatgacctgtgaatctgaatccatcatctccctttcctgccagcttttctacaaacattgaaatatgttatttggtcagcacttatttcctaggttcacagccttgggaggttgtggcatgtcctcccagtctggctgggaagagaccagctgtaccatccaaatgcttccctggtcttgatgatctcttccagagtcgatctgagtggccttttctgcaccctccccttctttctctttgaatggaattaaacccaatttggaaacaacattgacccagtcaaaagcttctaatggtttctttttcttcctccagttttagtttgcttttattaaaaaaagaaaatagtgcatggccatagctccttcagttctcttattgcagactaaccatcaggatggtatcaaagcacaaatactttggaggggaatgcgttgaactggggcaagtactctgtaacacaaagtgggaaaccacttcctggtgctgccgctcctgcccccactttaggtgggagggacgagttttgccctctagattttaatccagctggtgtccaccggatgttgccctcctggggagcagatatcagtctgtggaactctgggaaaaccacaggcacatttttcggtgcggacagatttgccagcacataactgggcagccagctagaatactttgtggaaattaagcgaggttttccatttcagccccatggtgcatggtggtggccgatgaatgtgtcagtctgctcagagaaaggacaaaaaggaaattattttcaaaactgtgttcactgtttgggtgtgtgtatggctctgcatgtgtgtgtttttgtctctgtataggtagaggtattcacatcttactccgactgtaaggttgtcttacttcatctctgcccccaccacagttgccattttgtaatgtccttccaacatggagaagacacgagctctctccagttggcatcatttgtcttttttgtggattgcctcattctccagtgaactccatctggccaattgattcagaatcaggcaagatccctgccctttggcacatccactgaaaggccaaacagcaagtccgagtgagttttaaatattaattaatcaccctttattttttacacttgagagtgattgtaataaaggctgtcattaataaacttggttctacctta

SEQ ID NO: 136299 - DNA, 670 bp, Homo Sapiens
gttcggtgcaaactcttgatcaggttctcgcaggagagggctcccgatgatggggaatatggggtcttccggagccagaagtagggagcaggagtaggaacagttaaagtggccccaactgcccatcttcgtgacattgacctgagggaacaccctggtgacagcctcgggaacatgccccgcgaatgcaggcagcactggggtcatgccgaaggagcgcatctggtccaggacccggtgctgcaggtaaagctgcttgatgtgccaggaggggggcagggggccatcccaggtgtgcaggttgcccattcgcccccaggccaggaaggcaggaccagtaaagaactcattgatctctgcctgggtcaggcccaaggccaggtacacccgctgccagatggcctcctggccgctccaggccagtgccaggttgatgccattcagcgccatccagtctatctctcgctcccagcgggcccagtcccaccacacgaaggagtagctttgcgtgcacacattctggtaatagcggtacctgttgggcgtggcctcggtcagctcccccggcacggctggcagtggccgcggcaggcgcagctgagagccggaccaggccacgtggcagccacagaagtcgcgcaggtagcggtgcagccccgcggcggccgca

SEQ ID NO: 136300 - DNA, 691 bp, Homo Sapiens
cggactccctggttcagtatttaatgccattttattcacatgctcccatgttctccctccctcccattgtagccttgctgcccaggggagggatatgtcttcctttatgcatctgggaaaccaggaacagaccctgcgcaggagagtcagagggggaagagttagaatgggtcagtggctggaacaaagttctggttaaggaggaaattagtgccacccacggtgagaagcagagaaggcacttgcatcctatgcagccctgaagaccaggctcctttgggcaaaaggcaagactctggcaggtgggtcaatgctctctccttggagcaagaagccagcttttggggaaggcaggtcctgaggcaggcactgccctgtggtcttccccaggttgaggagagaagtggaagccccatggaagacagtgctcccagctgaggtaggaggcggaggtgggggtgggggtagtttaagcctatggggcccaggggaaaggccaaacagaaacccaactaccccctaatgaagcggcctggaggttggggtatcttggagctcctcagagcccttcttcccatcaaagaaggtatcaatatgccttggaagctccctgatcctacaaaacaaacaaaatgcttattatttaccactgtgaggcaagctgaggtgaacatttaaaaggctatttcaa

SEQ ID NO: 136301 - DNA, 749 bp, Homo Sapiens
  misc_feature (406)..(414): n is a, c, g, or t
tcagaagcagcaggctcggcaccatgtcaggctagcaggagaccgtcaataagagccaacacagtgaaccaacatggtgaccacgccgcagaggagtcatgatgaccacggcgatgcccactctcatttccgttctcagctgtgtcttccatgcacccgcaccttgtggcactgttggaagctcaccatgcgctcctgacagctgaccggagagaaacgtcactgtcttgaagcagcagtagcctgggaagtgaggcaggaggaattgagaggcaggaagggggctctacagggatgactctgatgaattccaagggagaggaatggttcactagaggagcagaagacaggagcagcacgtcaagggacctcaaggccaggggcagaaaggggtcgcttagggtcnnnnnnnnncactgtttcaggaactgtgagggaatgggagggaaaatcaagaggtaagatggatacattgaggggagtaaggatagaaagaaggtctagtccttttagggatagcagataggaaaaaatcagcacaagctgattcaggtttttggagaagagtgaagaagtctgaaatatagtgaataatttaggaatggggttttcaggtaggagttaagagaagagcaaatgatagatgccagaggtgaaagctggaaggcatgggcatggaggatggacaagaagctggcaagagcaacatgggcctaggaatacagccagagcaacatgggccacactag

SEQ ID NO: 136302 - DNA, 1019 bp, Homo Sapiens
agaattcggcacgaggctgatgttgggcgtctgtggtcccagccactcaggaggctgaatgagaggctcgcttgggccggggaaatcaaagttgtcatgagctgtggtcacgccacggcactggacagaacaagaccttgtctgaaaacaaacaaacaaacaaaagctatatgggtaaggcttggagggaattcgggagtcaatttctttggggaccagggcacctctattattggtcagaggtaaatattcatacttcccttcctcccccttccccataagactcttctctgttcttggaacatatccctacaaagctggtctgggttgaggcacagatcctgtccccaagtccaagaggtggggaagtttgtgtgcaggtcctgtgggctcaaaccctgcccacctagtgttcccaggccctcacaggggtaagggaaaaagtggaagtctaggctcaggtctggttagaaccagagattaaggtgaggggtacagtggaaccacagtcagaatccaggtccaggacggtgtggggggctgtggtctggggtcctggtcccagttggcactcttgaagactctggaagtaactcattagcagtggcctccatgttcctcaggcacgtagcttccactgggcacagggctccaagggccccacaaggcatggccagatccccagtaagacaccagctcacccttcccccagcaggtatcagggctgccaatgggatttgaattcaaatcctgaaaggagaacaccaaggaggagctggcatttcgggcacatcctgccaggattgaggagaggagggggtggaatgtgcttccctagacctccagatgcatccctgctcggaggtcctagacgccgggggtgcggctgtcggtcaagagcacccccagggtcactctgttgctgcctaaactctttcaagtcgcagtcccaggctctgtgagctaaatgcaactacgcttgcagggtggagaaagggtacagggcgtgtgtgttgggg

SEQ ID NO: 136303 - DNA, 549 bp, Homo Sapiens
ttttcagtttttaatgccattttattcacatgctcccatgtttttcctccctcccattgtagccttgctgcccaggggagggatatgtcttcctttatgcatctgggaaaccaggaacagaccctgcgcaggagagtcccctaatgaagggcctggaggttggggtatcttggagctcctcagagcccttcttcccatcaaaaaggtatcaaatgccttggaagctccctgatccttgtggcacagtaggaagctcaccagcgctcctgacagctgaccggagagaaacgtcactgtcttgaagcagcagtagcctcacccttcccccagcggtatcagggctgccaatgggatttgaattcaaatcctgaaaggagaacaccaaggaggagctggcatttcgggcactgtgggaatgaagtggcaaaaatgcaggcacattactttcttcagctgtcctttggatatcaaggtccttacaggctggagggttgactctcggagctcctctcctcaatctgcttggaagtctggggaccctccgcaccg

SEQ ID NO: 136304 - DNA, 471 bp, Homo Sapiens
tttctgacttgctgttgttttcttttttccccatttcttttagggactggggtaggaggggacaggaagaaaaaaatgtcattcgtcagttaggtcctgaacaaaaagaacttctgtgtggctgagtccggcctcctgtagcgtagggggattgggccactcctctgaagggatgcagggcagcactcgcctgggaaaattggcttcaatctgaaacttttctgggctttccttcaaggagaataagaagtcgtggattactgttagagactgtgaaaagtggaatcgtctctctactcgagaatcattaggtaatttgaagatgatcttgacactttcagggtcatcaggggaaggttcagggggcaggcattccaacttcctttccttttcctcctgtaaattctgccgccgtctctcctctgccaacttttgctgttgcacctcctcctccttccgccgtttacgctc

SEQ ID NO: 136305 - DNA, 609 bp, Homo Sapiens
  misc_feature (577)..(577): n is a, c, g, or t
  misc_feature (584)..(584): n is a, c, g, or t
tttttgtctgtgtagacttctttattaagggggctgctggtgtagaactgtctacccaactagacaaaagtccagacatgatgtaaacaatccactctccccaacaataaatgtaccgttcacatatcctttctcagtaagggcatactcttttgagacaaagactgcttcaagtattaaatgaacttacacaaaggcgtataatatataattatctaccattttctatttgcatacaaatgaagcaattgaagtttttcagtcttctgctgaatgcatttttaggagctgccctaactatgctctgagcaagcaagtatatagagtcttgggtgagtgcagacacatgagactacaactgagtatctgttcccaggacagaatccccagccagggagacttgaccagacttgaattgagccccaggaaccaaaaaatggaggggcagggtggattccattctctaaagcagctgatgactgcctgaggtggaaggtataaactaatctccctgggatataacaagtatttaaaaaaggattttctacaatgaaaatggttttctttaagacatttncaaatantgaatatcaaggccaaattaattcc

SEQ ID NO: 136306 - DNA, 506 bp, Homo Sapiens
tcatgatttcatgtatcacatcgtatattttgccttgaagattcctgaaataaggaaatctataataacttcagatagcctacatgtccccatttagtggagacctcttgaatgctatttgaattctgcagtatcatttttatgaccattctcctttgaggaatactatgcccaggtacatgctccatcagtgtgccgggagagtggattcttttcttcactgcagagtcatcacactgttggaatagtctgctcttttacatgctcaggtagggaaaataggaccaaatatatttccacagtgcctaccactgtgtcatgtttacagtgagagtttaaatattgttgatgtcctgactctgtgagctcatagggagtatcttcatagtaatgacatttgatcagccataaaatttacattatgttcatatgcacccaaaaaagctagtcaggtaatgaatacccttgaagtgaatagcaattttgatttaggcagtgtgttaggc

SEQ ID NO: 136307 - DNA, 1069 bp, Homo Sapiens
  misc_feature (385)..(385): n is a, c, g, or t
actttgtaacaaaaatttattaggattaagtcaaattagaaaacttcatgctccaccacttgtcatatttacctgaaatgacaaagttatacttagcttgagtgtaaaacttgtgccccagagattctgtttggaaagcaaaaaaataattgatcgcacatagcagtgtgcctgataccacccacagtgaatgttgtttaaggcctaacaaacagtggtcagcaaagcatacattacttttaagctttgggtccaaggaagatgtcattccctacctccttcaaaagcagactcatcatagcctgggcacctaggcctggagcctattttttccgagtctaatatgaacatctggatttcaagaggtgctaggcttgaggtatcntttatggcttaaaaggcacaggtcatgcagctgaattaaaagctatcatgttggtctctggaatgcaggccatgagccacgccttgtaagggggagacctgaggccctgtccttggctcctcagtgtaacccacacatcattggctctgttcctctcgccctgctcctgcactgctcatcagctgtgaatgctggaattggaggacaggttggggctcctgcacagtctgctgccaggtagagagcaacacaggctgcagaatcctaccctccagcatatcgcggggagggggggacctgctgcacagccaagaagtgactcacatgcaggcaaggacgggaaggcttgttcttcaggcacaacgtggtatggggagaagaaacctggttttcttggaatggtcctactaagcttgaaagtggtgctgcatttagggcagggcacaccgcagccataggcaacccctttgagcgatgggagaagtagcataagaaggatgccaagaagaacaataggttcttcaactcagtgtgggctctgggaaaccatcagcagtgggtacggaacacttcgtctgctctgccctggggtcactgagagcaaatgggagtcaagtcctcaaaataagaaacttatcacttactaaatagctgtgcattcccttcagcttaggagcaaaatgt

SEQ ID NO: 136308 - DNA, 782 bp, Homo Sapiens
ccactcgttatccgctggtctgaaggaggcaaggaggtcttcatctctgggtccttcaacaattggagcaccaagattccactgattaagagccataatgactttgttgccatcctggacctccctgagggagagcaccaatacaagttctttgtggatggacagtgggttcatgatccatcagagcctgtggttaccagtcagcttggcacaattaacaatttgatccatgtcaagaaatctgattttgaggtgttcgatgctttaaagttagattctatggaaagttctgagacatcttgtagagacctttccagctcacccccagggccttatggtcaagaaatgtatgcgtttcgatctgaggaaagattcaaatccccacccatccttcctcctcatctacttcaagttattcttaacaaagacactaatatttcttgtgacccagccttactccctgagcccaaccatgttatgctgaaccatctctatgcattgtccattaaggacagtgtgatggtccttagcgcaacccatcgctacaagaagaagtatgttactactctgctatacaagcccatttgaagggatcccttcttgcctctaaggattcaggagaagcatctcccttgcatttctggactgaaccagtcttacctgagactggaaggctgatttgctttgaggctgatatgtgtgtttcagagcctctgagtaggatgctctgcttttgcatttgattgcagatgagagctttatgagttcacggaatttatttt

SEQ ID NO: 136309 - DNA, 944 bp, Homo Sapiens
ctcaagttacatttaatatctttatcacaggaaggctggcaatataaaacttcctatgtacgaaaactcaaaaataaccaaagtggcaagtgaataattcctttgagaagcaaaagaacagtacaatgtttattaacacgtttcttcctgaattttcttcaatttttttaaacacacaaaaagcttttctgtacttagattgctgtttgctgtttttaatgttgttaacatgcatattattgcatttatggatagtagtagatagtgtaatatacatcgaaaccaacatctagggatggctgccttctgagtgctttacagatggcacgttctcttattatccagcttaatcacagctcctccaactgataacttcacatcatctgcagtatttccaatctgtaaatctggttggcacaagttggttttagcgtatttggaaccgtattttaaatcactggaactactttgccttaatgcccatgggctggtcaagctcccaagggcttaagacccaagtttttcttaactttggtgcatatagcgtgggacctggcccagaacaggtactcaacaattttgctgagcagaactgtcctcaatggagaaaagaaaggagaaaggctttactgaagactgccccaaatacaaacaaattccattttaaatggaatatatacactttagcccccaaatgcagaccagtgcacggtctgtgtagtttccgactagtcacctggtaatagatcattcctgtcattcacaggctcagtcccagctctatttttcagtatcttgaatcaagttctctctcctctaatcatggaagaaatagacccataactagttattttgggtaaatgggagctatttaaaaaattgatattttaaaagcttaaatgaaatgttaatcaaatatgatttatgattattttctttcgtat

SEQ ID NO: 136310 - DNA, 815 bp, Homo Sapiens
  misc_feature (195)..(195): n is a, c, g, or t
  misc_feature (326)..(326): n is a, c, g, or t
  misc_feature (382)..(432): n is a, c, g, or t
acaggtggcactgtttattattgagtttcatattttatattgtgtattttatattatataattagtactagttacacatatgacatggacttcttcaaatcaaattcccagttatgaagctctgcagagaccgttcccacagcctgactacaaagatcaggcacctgaagacgcatgtcctgatggatacattcnagtggctggctgaaaagccaatttcagtgtgtgccctaccactgtggatatttaaataaaacaacggtttttcaaaccatgagtcagctgggaaggatgcccacgccacgcacactggcagcactggggangctgcactggggtggacgggaaggacgcaaactccaagcagctgctgcccctcagnnnnnnnnnnnnnnnnnnnnnnnnnnnnnnnnnnnnnnnnnnnnnnnnnnnaggtcagtcatcacattcaaagtcttccatacccacataaccacaatgatcatggcattcaccagcagtggggctgaaaatactatagaaatgaacatccccctggagtcgaaatactggtatttcgaaaataatctccagttcatcgcagccgcctcattgatgtattcagcacagtagactaagatgactagacacagaaagtgcccgatctgtagtctgtagcttcgggaggacaagcaggtgaggagcacgcagagcgcgtggaaggtggccagccccatgagccagggctcagtccagtccgtctgcgtgagtacggctgggatgctgacggggaaagagctgacagagaaggcggacggcatggtgttgggaagccc

SEQ ID NO: 136311 - DNA, 396 bp, Homo Sapiens
  misc_feature (34)..(34): n is a, c, g, or t
  misc_feature (129)..(129): n is a, c, g, or t
tacatgtgtgcccctaaagacacattttactcantattggagaagtagataatgaattaagcaactggtctaggaaaggaaaatttgtttcaaatatgcaggaatgtttggatttggggagagtagaanggagagatttgcttgatttgttaacttctacctccaacccacaaaaaagatatttgatctgagtttctatcactaatttggatggaaaatttctaagggacatggtaatccagcattctcaaggacctttcgccaaaatgtgttttccatctatgtcccgattcccctaaattttgcctaaaattcagtatgttccttaagtttttaaaattctgagtgtgtacaaatatcttgacataatgcagttttatttttatcattctggta

SEQ ID NO: 136312 - DNA, 464 bp, Homo Sapiens
ttttaccacctagaaataaacattatattttcctctgatatgtaggtaagaacttcaaatataagacataatttaaaagtttataattgacatagtcagggattataaataatatcacacaaaataagctcttaatgcaagaaatgaatctccaggatagatcatactaatctatccaatccagccctctgttctgaaagcagcacatgaaaaggcagagaaagaaaaataatctctacgacctggcctgttaaacatgtaatttatttcctggagtacctattaggtgctagctgtaatgggctattcagtggaggacagtggtcaaagcctcttatgatgtatggcagatgccagaaagatatgaaagatgtgatggtacaaaaaaggaagttgggagtcacatccagccacaggacttaactaagcctctttgggggcaggagactttgggaagtgttgaa

SEQ ID NO: 136313 - DNA, 462 bp, Homo Sapiens
  misc_feature (397)..(397): n is a, c, g, or t
  misc_feature (433)..(433): n is a, c, g, or t
  misc_feature (447)..(447): n is a, c, g, or t
gtatgtagaatgattataaatttatttttaattatgtaaatacaagttttagaatgaatcatcttcctattcatgtggcattatctgtcattttttaaaaacaagtttaaaagcactttgtatgataatgggacaaaaaaattagaattacaaagttttagattatagggtgacttcttaatatggatacaaaaaattgagacaggttccaaaccaaaataaagaatattgagttacttagtttacttcaacggagcaggttttttttgagggaaggcgatgaaagagtaaatgattaagcatgtgaaaaagtattagaaaattgagcatagaaatgaagaaatattggggagggaaggaaaagatagtacagattcctggttttataaggtgtccnaattatgtgctagcccatatgtattatttccaatcncccggggtgtggtnccccccaggtatact

SEQ ID NO: 136314 - DNA, 1275 bp, Homo Sapiens
  misc_feature (27)..(27): n is a, c, g, or t
  misc_feature (33)..(33): n is a, c, g, or t
  misc_feature (907)..(963): n is a, c, g, or t
  misc_feature (1204)..(1204): n is a, c, g, or t
tcttttaaatttcatatcctcactccntatccnaattccttcttatcgtgcattcatactctgtaggcccatctgtaacacacctagatcaaggctttaagagactcactgtgatgcctctatgaaagagaggcattcctagagaaagattgttccaatttgtcatttaatatcaagtttgtatactgcacatgacttacacacaacatagttcctgctcttttaaggttacctaagggttgaaactctaccttctttcataagcacatgtccgtctctgactcaggatcaaaaaccaaaggatggttttaaacacctttgtgaaattgtctttttgccagaagttaaaggctgtctccaagtccctgaactcagcagaaatagaccatgtgaaaactccatgcttggttagcatctccaactccctatgtaaatcaacaacctgcataataaataaaaggcaatcatgttaaaaacccaaaaccactcctatcgcttccgttttgcctttctataatcacgtaaccacctctaacaaacctacccaccctttcacccctcttttccactcccgccatgccctgttccactcgtccgtttgtcccccctccccacctttccccttctctctccacccccatgaaaacccttccgacccccgattcttcctgtcggcacctgtatctcacaccccttacaagtaaccacgtctcccacagtttttgcgtccttcccacccatcccctgttcaccttcatcctcgcccctctgatccgtgattcgctgccacccgtccacccccctgggcgcatcccgctcgccttccttttcccctcacctcccttacatagctatgtcccctttacccgatttttccatctatctttcatttctccctcctctcttnnnnnnnnnnnnnnnnnnnnnnnnnnnnnnnnnnnnnnnnnnnnnnnnnnnnnnnnnattctttccgttctgcgcgccccatccccctctttgtgagccatcttcctcccattcttgtcccgcgccacccctccccgctctctactcctcgcttcactgccatccgccattcgcctcacttaatgcttgccctctcccacacatcggaccggcactcgtcacaacctcatgtgcaccccttctctaccctcccccacccctccgccgctttttatacatgtagtgagccctggcatgngaccgctttatggcgtgcgatactctcagagcgacactcgttcgtgattgccgacgtcacttacgctaccg

SEQ ID NO: 136315 - DNA, 1475 bp, Homo Sapiens
gcaggtgttgtgggtagggtatgtctttagcatgaagtgtgtgaatttcatctcaaggttgtctaggggctagattctaccctgccgagttcaaaacctgtgtataacccacagctgagatcacaaagacttgtgcccagagggccacatttggggctcatggagaagtcaatctgtaaaacttgtaatgaagaaacatttttactaaatgagtaatctaaactagaaatgaacagaatcatattcaatatttatttaaaaagaaaaaagagaagctaaatgtgctggttaattttttgttggcttacttgttggtctgtgatcggtgttgtcaggcagctgcactcccatgctttgtaaaagattggaagcaggtcctgccagtccagcttgggagctataggattccaatatatttgaaaccaggttcaggtctacatctactggtgccataacagattctcccgtaccagaatcttcctcatctgaattgttatcggtagtctgggatacaggttccacttggttcctagtggtgaaacttttgctgatgcaggtgtgtgctagttcctggtccatctgggccatgtatgacttgagattatcaagtgttcctttcagggaagcctcttcgccaggttcgtgtgtttcaaagtccaagtcatcatcactatctaaacattcaaagtcttcatcatccagatcatcagaatctgactcattaggccttggccctaaaatcttatcaaaataattaagaaaagaatctgcatcaaaagtgattggagcctcagaaggttctcgaggcagctctgctcccttgtgggttgagactttggatatgaaagctttcatgctctctgagacttcagttaagtcatagttctgctccttctcctccttggaaacagactcggattcttttttgccaacagcttcctgcagcagctggtccagctgatctggtgagagatctaaccactggtcatcatcctctgggggaagattagctgcttctttcttaaggtcttctatatcaaatggtattgtctgtaataaggttaagatttcttcaccagggctcatagcaagagaactttctggccagtctactgagagctggaagtaattctctgccatttctagcctttcccggtactgagcagaaccttctatcagtcccttaaagtaatcattctttttcagactttcaaggaaactggcccagagtggtgaggcagtcacaagggatttcttgcagtcagaaaaatgtgggctacatttggagcataagatctcaaatccatgagccaatttcatgcccaattcatgggctcggtactggggatcagatggaggaggcagcctgtatccactccgccggtctggcacaaacctttgttgcaccaattgtgcatatagacatttagtgaatgtgaccgatgtcattattcgtgtttcaggcaagaatgtct

SEQ ID NO: 136316 - DNA, 655 bp, Homo Sapiens
tacgaacatattgctttatttcttggtagtaaattaaggctttctagattcatacagcacgcagtgatttgaacattagaattaaaaaacaacaacaacaaacaatgagcattcaatttagcagagccaggaaggaagcaatgttttaaaacagataaatttcctagtgagacctttggtttggtctccaaaaatctgctgagctgtttccccagtaacctccatcatagattcccaccccaagggagaacagaatggatgaacaggagactgggagaaaagaagaaactggcaagacggtatgtgctgggcaatcagtgtgaacagtcagctttgtctcatgtttggaagacagtttaggtgatgcggtcagggattcattctctggatctccctgctcattctcagagtattaaaccagctcactcggaagaccccagggccaaggattagggacaatcctttgtgacacccaaatcctgaaacttcacatagggtcacaagtcacagagctgaggaatgctgccttcaacttctttcatgggtttaaactctgtggctttcactagatcctggcctagctaaatgattcatttcccccatggcacagagccttgattacacatgtaatttgatgatgttgattggatgggag

SEQ ID NO: 136317 - DNA, 529 bp, Homo Sapiens
  misc_feature (387)..(387): n is a, c, g, or t
  misc_feature (396)..(396): n is a, c, g, or t
gtaatggatagccagttttaatgaacagaggatactgattggtataaaaaggtgtgtttgtcactgaggtgtcctcattttctagatgaggagttgtcttctccatggtcttgaacgcctgcttcgccatggcaccagcgtctgggtgcacgctggctgtcgccacagggcaggagctgctcatggaaaggtgtgtgcccctagtgtgcagcactggtcagcttttccacatagtaacaacagccttgttctgggcattggggtcccctccgtctgtcaagtacttgtcaatcaggtactcctggttctcagcagctgccttcaggaacatctccaggcccacaggctccacctgggcctgggactgcggcttaaccaggggctcangtttcctgngggggactctgtgtctcagtcgctttttccgtctttgaaccaagttttccaagtcagccaggttatccagattaaatctggtactgttaaatctttcaagtgtcttcttcttctcttcttccaatttcagctt

SEQ ID NO: 136318 - DNA, 460 bp, Homo Sapiens
  misc_feature (409)..(409): n is a, c, g, or t
ttttttgaactctgtaaaatatttgaagagatttattctgagccaaatatgagtggccatggcctgtcgacacagccttcaagagatcctgagaacatgtaccaaaggtggtttgggtgcagcttggtttcatacattttagggaggcatgagacatcaatcaaatacatttgagaaatacattggtttgatccagaaaggtgggacaatttgaagtggggcttccaggctacaggtaaattcaaatgttttctggttgacacttggctgagtttgtctaaagaccttgtattttcagctgcctgctgaagatgaagtcttactacagaaattaagagaggaatcaagagctgtctttctgtaatccgctattaagggctgaggtggagatcgcttaatctgggagcanagttgcatgagccgaattgcaccactgactccagcctggcaaagagggaga

SEQ ID NO: 136319 - DNA, 454 bp, Homo Sapiens
  misc_feature (438)..(438): n is a, c, g, or t
acctcttaatatttaattaatttcatcatgtagctatacacacagtaaaaattaaagccatgtatattatttaaaaatctaaagtgtttaaataattctaccagttgttttatcactggacaagaaatgtattaggtttgatatttacaaagatgtttatgttgtctgctattttctattataggtttattcaaagagaatatcacctatagcataaataattaaatttttcaataaaaacaaactaaaaaaaccctagaaacatttgacatcaccaaattcaacagctctcactagaaatccaagcaataaacttagatatttgaaataaacataaattatggttatataactctaagtcacatacataattttgaattatagtaatagcactgtaaacatggaataccaaggggttacagttttatacaggatttntttggttttcctcctt

SEQ ID NO: 136320 - DNA, 767 bp, Homo Sapiens
ttaacatttggagatattttatttctgtgataaggaaatctcacataaaagtctttatcatttcattaattcacaaaaagtgttaaatcagttaaaattaaagagaaaagttcacaccgaatgaaagactcgttttgtcttctcttcccctgaagtaatttaaactcccaaagcagcacgagtttttgaaatcagtttttgtccctcttcagcaaagcagacttcctgttcctggccttggcagcatttctccaacaggcctgagaaatctgcaatgacagcctcaagttgttcctctgttatttgtggcttttgcttcacaaggttaatgagaaactcttgcttcatcgtttgcagcgctacaccctgagcttggcacagatccttatggaaaatgaacttgtcatcagagaatgcaggagggacatatgtttcatccaccaccaagctgctgaagcatggcctcctgttggcatatgaagaagtgcagcactggccaacaccagggtttactggagtcatttcatgtctgatacataagtgtccgataataatgtcagccgctccctcgccacaggccaatagtttgtcctcactgagttggcaacaagtggctgctgtggctgccatttttctggtgatggccatcagctccgacgaggtcagctggggggctttctttgtgtaagcaacgagaaacctgaaagaagcattttttaactaagtcctgctgagtcattcatgagtttttagccgccttgcttctc

SEQ ID NO: 136321 - DNA, 760 bp, Homo Sapiens
cctttccaactttctgtttcagaggcagcagcagtgagctgcaattgcaccagccctttccccagccccactcccttctatgaactcctagccttcttcgcagacagcctagcatctggctaaagggcaccttgttagcaaacacaatttctatgaacggattacccatggactgaagctgttgttgccagcggctggaggaggggactccagacatgagtgttccatgagtgatgcagatgtggagtggaggtctcaggtgaggtgctgcagagccctgggtaacagaacgagtgagacagtaaggactaaactctagagatctttgcacaccttaactagcccgaggtccgtgtgacaagtccggtatgcactgcgggggaaatgcaccccaggcagaagccggcccttccaggcgtggcatactggggcacctgccaggatgctcacagccctctcgtccacaaaccactgtcttcccttggcttctgcagaggcctgagtgaccgcagcacatggcttcgaggaggagtgtccctctcccccggtgctgtgcttcagtcaattctccagcacgcgggctctcaaaccctcaagggaggcatcgggacattaggtgtcctctgggaaagcacaggtaccaccagggtccctctcagaccttgtagtaaatgttcgccgggctctgcgggggcatctcctggacgatgtacaccgggtgcccgtagtccccgctgaccttctcgcctagtgccgaatt

SEQ ID NO: 136322 - DNA, 488 bp, Homo Sapiens
accatgtttttattatccgtgtcgatccctagttgtcgctttttaattgctatatattagcttagaacaaggtacaaaatttggagattcacaggaacagcacagaagtttaacaatattaataataataaagttctaacacatgacaggaaagtttatctggatcttgaaggcaacagctgatctcgcatgcacatttctggagtccagtgattcaggaagaggtcttctctccattgctccatcttgctctttcacaaaggacccctagtccatagcaccataagcccaggacagtgattgcagcatggagaggaatgaagggcccgctagagatggctcctcactctacagggctgatgcttatggggctactatgtccgattcaaattcatttaccagctaagagtggggtctttaaaaatatgattcacggggagaagctctgctagcatacgtttcccaggaagctttccatggatctgccc

SEQ ID NO: 136323 - DNA, 570 bp, Homo Sapiens
  misc_feature (282)..(282): n is a, c, g, or t
gttcactgtgaccagatgccttttctcttcattctttacttatgaattggacagtaagtctgaattaatttcacaaagattcatagcttcttttatgctgcagaaaagcccagggcaaagaataagaagaaagacattcatgtgtttattcattcaacaaacatctttgccggcatagcgtgggaggaggtcaccagacccttctcctgggagtttccctcccttctgagtgccacagatcctccctgaaatgtgtggccgttagagccgccgttgcctccnatgacttagcagttctctgcttcctttgcaggggccctggccttccagtctgagtgctgacctcgaagagcccctgagtgaggaggagacagaacaccctctcctgcctctgccccgagccactaaacccagaatctccaggaaatttcgttgctgtactagtgccctcagcaggtcttcccattagtggacttctgaagcccatggtgaatgccactaccgtgtctcagatgggactcaaactaggctgtatcatcttgtcctgaaacctcacaaaccttggacttc

SEQ ID NO: 136324 - DNA, 647 bp, Homo Sapiens
agggtaataatccccactgcctttgaagatgtttcaatcattaatttacccattgaagaatcacatgttcttcatcgtgataacgaagaaacctgaggttccattttttgggcctctgtttgatggagccatagtgagtgggaagttgctgccaagccttgtatgtgccacgtgcatcaacgccagcagggctgtgaagtgcctcatcccactctaccagagcttctatgaagagcgagctctgtatctcgaagcaataattcagaaccaccgcgaagtaatgacattcgaggatttcgcagcccaagtcttttctccctctcccagctactccctcagcggaacggattaaaacacgtaaaggtctcatttcaatatttgagcaaggggccctggcctccagtctgagtgctgacctcgaagagcccctgagtgaggaggagacagaacaccctctcctgcctctgccccgagccactaaacccagaatctccaggaaatttcgttgctgtactagtgccctcagcaggtcttcccattagtggacttctgaagcccatggtgaatcccactaccgtgtctcagatgggactcaaactaggctgtatcatcttgtcctgaaacctcacaaaccttggacttccaaa

SEQ ID NO: 136325 - DNA, 591 bp, Homo Sapiens
tggataacaaatccctacctatagccatgtggaagcagcttgtcactgtattttaactgtgtaacaattattgaaggcgaaaatagaagttgggtcatctttgaacacctaccttttatcaatgaatatttttagactgttcttcagtatctgagtcagagtttattgtaatttgttatttacaccaaggtggcatcttagtctaccttcagtgagacttgcgtttcaggggaggggcgtatgtgcatcctcggtctcagttatgtaaacggtctgatctgtaaaatagtggtagcacatgccatgtgggatagttggtggagatgatagatggagttaagcacagggcccagcctgtcagcagtagctactattattgttgcccatttcccctgcaactgaggtgagaggttttcctgagtttgaagctgactggcccacagttaaacgtaacagaccagtttttcagggtgtcagccaacctctattagtgttcttaagtacagtttctgttataaaagttcagattattccttgaaaatttggatctacctcccattattatgagtaatacatgcttatagtaaaaaa

SEQ ID NO: 136326 - DNA, 433 bp, Homo Sapiens
cattgtccgcctggtgtggagaatgcattgacaggttctttgcggccgacgataccatgcagacattttgcttgttcaaaccaacaagacccagcaccgcgctctcctggtgccattattatgcagccagcggttctcttgtggagggggcaggtgacgtttcagaagacaccgagctggatgggactacctttctgttcatcaccacacaagcagaatttcctaatggaagtttgttgtgaatgtaaaggagggagcattctttgctttttaatatacaaacccatgggttttttggagcaggattttgtgtaagaatggtgtttacatgcagtgtgttttccccctcaccttcaataaggtttttcaaaaaggaaatggaaactttttaaccaatttgtgaataacttttgtattaaaattttaagaacct

SEQ ID NO: 136327 - DNA, 484 bp, Homo Sapiens
atagtttagatcgggaagctgtccctttgccttcccattctgcttttgcacgtaggtcttctgcatggctacacatcagatacccactaagaacatgaatgcgctctgtattgtatttcagcggcgtcaattcacagcgtagaacttgaagtgcctccaggaccttgccatcctccaggtattctaggtacttctgctgcagcagcaaaaacttcatcctcacaatagcatgaggagaatgcactaaaggctttagttcattcaggtcattttctgccttatcccagtctccttccatgacatgatttcggaatttggtagcagaaggatgttctaaacgacatcctgactcttgcatgaggagatcaacagtctggttgagccctaagccattcaagtgctgtcctattagcctaatgacatcctcatctgactgggagagccgcttcttcttcttgaggctgctgcccagttctggggtggc

SEQ ID NO: 136328 - DNA, 433 bp, Homo Sapiens
tgcgctctgtattgtatttcagcggcgtcaattcacagcgtagaacttgaagtgcctccaggaccttgccatcctccaggtattctaggtacttctgctgcagcagcaaaaacttcatcctcacaattattcccaacaacgtttgagagatttcaagtgcgcctcttaccacaatagcatgaggagaatgcactaaaggctttagttcattcaggtcattttctgccttatcccagtctccttccatgacatgatttcggaatttggtagcagaaggatgttctaaacgacatcctgactcttgcatgaggagatcaacagtctggttgagccctaagccattcaagtgctgtcctattagcctaatgacatcctcatctgactgggagagccgcttcttcttcttgaggctgctgcccagttctggggtggc

SEQ ID NO: 136329 - DNA, 1065 bp, Homo Sapiens
  misc_feature (740)..(740): n is a, c, g, or t
tcggagagaaactggatgggctgcttgggatctaggctcttctaacccctatcctaagctccagttccatggcaaggctcagacttttaatgccatcttaatctgatggttgagcgcttcactctattttctggtgctgcccagccagtgccttctgccatggatgttactggctacttgagaaaaaggagaggggagaaccccttctttcattccaactgcctccgaccccaaagggattcttggctctctggtaaccatggataccaccaatgaattttatttggatcctcagcaggttgattctggaggcctcatgctatgactttttatttctcttcctgggatccaccaccctctactctcagctgactgctgcatttaggccaggtctccaattgctttcctccagaaagtgtgttcccgtctagtgaggtagtattgaagcctcggctttccctctggagcctgggaccctgtttacagttgcacatctgggcccctcactgtggggattgatcattctcatgaaggaatcacagttatatggcaactgcagaaggctgagcctcctcatggtgctataaccccttgggacactcatccagacttctctgaagcagaaaacctgagctccccactcactgccctagaatttatggcaaggagcaaatctacagcattctctcccacctacgtcctgcttcttggttgagactactgggatcctttcaggaaangaaaccactgggtcccatggctaaattctcaaccgccaggcaccttcagaagaatccagcctaatactggaatttgtgctattatcttcctctccagccccccaactccatccctcaccacagttgtttaggaaatgacatgaattcaatatctaatgtcaaccgaatggggagagccacaactccaggagaggttcctgagctgagtcccttaatttttggatgaagaagaccaacaagttttgtccaatgtatttgtttctcagaccttgcctaggcactaaaaataaaatactaggtcattggaggctaatgtgggaaaaaa

SEQ ID NO: 136330 - DNA, 556 bp, Homo Sapiens
gatttttaaacttttatttgcctaaagcaagagaaaacaagcttaaccaggtaacacatgcttcaaagcctcgacagccaggatttcagagatgctagatctcgcggccccccaaagagaagcacggtggcttcacacagaccgccacatgctgcacacgtccaggtgccacacccatgtgcccacacccgtgaaaatgctagtgtgttgtctgccaacccactctctgtcaggcatctgccgtcctaccctcgtgtaaatacacgttgttcagtcttgtggaaaacattagctttctcccttagacgggtataaaatattcatcaccaaatgcaaaaatcaaaagcacaatgtgtgatcaactatcagcccaacacggggacaccactcggatgccagctgctcatttggaacaagcacacagcattcctgtctctgccaagcatattttcccatctccaggctaggaaaacgccttcactggcctgccgctgaggcagacgcggggatgagcttgggcttggcttgctgggcggggccatgtccgggatcttct

SEQ ID NO: 136331 - DNA, 670 bp, Homo Sapiens
gctcccggcggcgacgactacgaccactaggagagcggacggaggcggcgcctgaagcggcggcggaaccaatggccccgggacggcgggcggacccggagagacaaattcggggcccggggcatgtccccgggccctgtgaaggaggcggcggcggctatggagatcgcgccgcaggaggcgcgcccgtgccgggcgcggacggcgacattgaagaggccccagctgaggccgggtctcccagccccgcgtcgccccccgccgatgggcgcctcaaggctgcagccaagcgcgtcacattcccgtccgacgaggatatcgtgtctggagcagtggagcccaaagacccctggagacatgcccagaatgtgaccgtggacgaggtcatcggcgcctacaagcaggcctgccagaagctgaactgcaggcagatccccaagctcctcaggcagctgcaggaattcacagacctcgggcaccgcctcgactgtctggacctgaaaggtgagaagcttgactacaagacctgtgaggccctggaagaggtcttcaagaggctgcagttcaaggtcgtggacctggagcagacaaacctggatgaagatggtgcctcggccctcttcgacatgatcgagtactacgagtcggccacccacctcaacatctcctt

SEQ ID NO: 136332 - DNA, 702 bp, Homo Sapiens
  misc_feature (560)..(560): n is a, c, g, or t
  misc_feature (576)..(576): n is a, c, g, or t
  misc_feature (607)..(607): n is a, c, g, or t
  misc_feature (670)..(670): n is a, c, g, or t
ttggcaaggacacactaattttattttgaaatagggactgcaagggcgggctgtattgagaaggatggccccctggtgtgatgagcttggggcctcatctgctcaccgtgcacgccctggagtcctgctacccagcatgtccaaactaagggcacccccctgggaagggatgcagagacggggagcttctctgtatccccttacaggcaggacagggggctggggtgcagaagcactctggggagacctgccctagctttccagctgggaggaggggacgatctggggtccagcaggctcccgggctggggtccacttcccgttctccctgggagtggagaccgaccaagcctctctgtgggcaggactgaggggtgggcctgtgtctccagatgttgagcagggcctggccagcccctgagggggcatcctagagggaggtggtgggcttctggtgactggtattaatatgtagggggagacctgaggttgcagtcccatcctggtgtccaggtgccatctgggctagggaggcatctcctcaacaggaatcctgagcnaggtttagagcatagntggcaggagggggagggtctgacttcagcanggcctcgtgctagatgatgccatattgggcccagtcgtgcagctcccagtgggtgaaggcctnccaaaggcagatgacctggatgtctgtcccag

SEQ ID NO: 136333 - DNA, 817 bp, Homo Sapiens
  misc_feature (76)..(76): n is a, c, g, or t
  misc_feature (82)..(82): n is a, c, g, or t
  misc_feature (168)..(168): n is a, c, g, or t
  misc_feature (248)..(248): n is a, c, g, or t
  misc_feature (283)..(283): n is a, c, g, or t
caccttccagtccacattgtcatacactcggtaccggatctggtatttggcttgaaagaggtaatccttgagggcnggtgcngacacccagcgcacgctcagctggtcctccaggcccccgacgcggctcacgtgcacgtcgggcggggggtccgtggtcaccacatncagcatatccagcgtgagtacatcggagcgggcagagcccaggcggtggtggccctccacccagatctcatagggcgtanagagagccaggtccttggggatgtggcaggagtgnggccccactgtgtggtactcctcacatgtgttgtcctggccataccacctaagcttgtacttgagggagtagttggtgtggaggaaggtctccccgtgggcccctggcgtccagcggcaggtcaagtccttcatgttcttggaccagcagctgatgttgacgggtttctctgggggcaggccaacatagaggcaggagccagccaggatgctgccgtcacgggcgtggcacacgaggttgtcccccgaccgctgcctggacccattgaggttggccagggccagagccaaggtggaggcgttgagtacacgggagagctcagggggcaggcggcgcccgttgagggtccagtagaggccctcggcggtggctcctggtgggtctccgtgcactgagcaggtggccagcagggaggagccgatgagaagcgtgggatcctggggactgatcacagctgtgtgggctcctgatccggctcgcggcgccccgaggacgcagagcagcagcagcaggggcagcaacggcggcggccgc

SEQ ID NO: 136334 - DNA, 854 bp, Homo Sapiens
  misc_feature (746)..(780): n is a, c, g, or t
tgtaataaagtgttggtttttcaggatagttcacaatccattgtctggtctgatgggaatgggcattttactttcctgcattctggtaatttagtccaatttccatgtgtcgtgcaggtaattgtatcatttccaaacatcgcatgttgtggcaaacattcaaaaactgctgtgtcccgatagagggaattgtttccagctgatggcttataaacacgaagtgttgcaaacgtaggtatggatggtggagggcagatgatgggagcacagacaggaagctccgggctccattttccttcctcagtgcacttggcagaatcagcgccattcagataaaacccagtgttacaagaaaaactgatcgtgttgggatattcaaaagtcgtatagcgtacggctccattttctaagattccagcaaaaggacatactctgggtgtacatttcagagtgttgatgggccacagtcctgtgagagggcagataaactttctcatccctcctcgggacacatagcccggcttgcaggaatacgtaatctcttctcctggctcatagaatgtttttaacgggaccactgtggaaaatggtaaatcatctggcttgggacaggtccgtcctgcaatagcaacatggcagagaaaactcgagaacaagatgagcactggagaaatcattgtggatgagtcacactccccggccgtaatggccgaattcccgggcatatgtccggtaccgtcgactgnnnnnnnnnnnnnnnnnnnnnnnnnnnnnnnnnnncgccgcttcctcgctcaaatactcgctgcgctcgtcgttcggctagacgcgcgaggccctatatgagtgataga

SEQ ID NO: 136335 - DNA, 1380 bp, Homo Sapiens
  misc_feature (1266)..(1300): n is a, c, g, or t
gccgcccacaatgtttttttctttcttcctgtgttttggttttcccggcaataaattcagtagctttatttttaaatttcaattaggttccttggatgaacaagaaacaagtgtgacattttgtgtggaatctgaaaaccaccttagcatggctttacatcggatgcatcagttttccaaaaagccagagaactgtgttccttgaagcatttggggacttcgatagtgccatctatacactgagcatcctctgtatagctacacttcttttccttatttttgcagaagaaagaaactttatcaccatgtagcattccattcttaaatttttcctgaatctttactctctctccttggtacaccacagtggcttttttcacaggtactttacaagatgctttacaacttggcatggcagaccagtttcccagtttggtacattctatttcttccgggccatccagagaatatccatcatggcagccaaatgtggctttatccttgtaataaagtgttggttttgcaggatagttcacaaatccattgtctggtcttgatgggaatgggcattttactttccctgcattctggtaatttagtccaatttccatgtgtcgtgcaggtaattgtatcatttccaaacatcgcatgttgtggcaaacattcaaaaactgctgtgtcccgatagagggaattgtttccagctgatggcttataaacacgaagtgttgcaaacgtaggtatggatggtggagggcagatgatgggagcacagacaggaagctccgggctccattttccttcctcagtgcacttggcagaatcagcgccattcagataaaacccagtgttacaagaaaaactgatcgtgttgggatattcaaaagtcgtatagcgtacggctccattttctaagattccagcaaaaggacatactctgggtgtacatttcagagtgttgatgggccacagtcctgtgagagggcagataaactttctcatccctcctcgggacacatagcccggcttgcaggaatacgtaatctcttctcctggctcatagaatgtttttaacgggaccactgtggaaaatggtaaatcatctggcttgggacaggtccgtcctgcaatagcaacatggcagagaaaactcgagaacaagatgagcactggagaaatcattgtggatgagtcacactggcactaccaaagttccccggccgtaatggccgaattcccgggcatatgtccggtaccgtcgactgnnnnnnnnnnnnnnnnnnnnnnnnnnnnnnnnnnncggccgcttcctcgctcactactccgctgcgctcgtcgttcgtctgcgacgagctagcgccctatagtgatctatacgat

SEQ ID NO: 136336 - DNA, 607 bp, Homo Sapiens
  misc_feature (177)..(177): n is a, c, g, or t
  misc_feature (487)..(497): n is a, c, g, or t
tttttccatcaaatgtcattacggatttattaagcctgatgtggaaggccatttaccggtaacatctccagaaggcataaaaggagcacttctattcagtcttgtgctttgaaaagctaaatatatttttatcatataaataattcttttcatgttttaagtgcatctgtgtttttnttcttctctcctttaattttcatttttcaattggccaaagcagaagtcgacgttgactgaaatgaagcccatttgcaaagctaatggtgttgagaggcatgtctctgctattccgtatcagctaggtttcaggaaggtggttcaatagctgcagcattaaaatgagggacagcctccagcaaaatcataattgaacacacccaggtcctcaatgtcagcagttgggtttcctgatgcaaattacgatacgggtttcagatgggaacagtctatttccaataactgctgagtgggggaaaaaaaagagacnnnnnnnnnnncaacacaaaggcaagagttatcatgtataaaaatgtaaataatatacttatagaaacctttttgatggaaatcaggggctccatataaccttggcgaatgtgttgttttc

SEQ ID NO: 136337 - DNA, 499 bp, Homo Sapiens
tctcgagggtggcgtcacagcaggatttccgccttctgcattgcactgcacagccccatggaacatgaggcacttgaggccttgcttcttggagcctctggggagcagagtaggtcactgccctctgggagtgttttgcagtagttttgtaaatgtgttgctacatagtcaagttcctttgtggcaaagaaatattttgttttgatattaggagccagcccatgtaatgcctctcaggcttgcttgcttagaagaaaaaagtcaccctttgtggtttttaagaaaaaaattctgtgcagatctgttcctcctcctgctccttcccttttctctacatacagtgctcattggaggctcctgctaaaccttcttaaccagagaaataataggtatttgttagacctgagtgtacatttcacatgttatccttcacatatttctcattttcatctagtactttcttaatgcctttgttggagtccgcatcctcatctttaaa

SEQ ID NO: 136338 - DNA, 568 bp, Homo Sapiens
tttgccgctcatcttatttttttacaaaataaagctcttcccttcctcctccatgttccctgcactccagttccgaccccagagcaggagggaagacgggcagggcgcccactacatggcatgttcctgctcctggggcaccacactgccccgctgtgaggactccagcccgccccagaagccgaggtttctcctgagcgaggtgagcacctgtacctggaggttggagacaggggcagggctggcagccagggctgcggtagccatggtgcggttcagcagcgaattgggtggcgtgctgctgggcgggtgtgtggccttccaataggcttccaagtactccgccagatgctcgcaggcatcctccaattggttctcatccaggatgatgtcaaacatttcaagggggggcactgtgccagctttttccgaaggccgctatttggacattgaggtgtttggactgagactttcctcgggacttgatgagcctttgaagtaccttgggagaggtgatcttgatgtaaaacaattgatggggggcccagccgaggttctttgggacagc

SEQ ID NO: 136339 - DNA, 573 bp, Homo Sapiens
  misc_feature (448)..(448): n is a, c, g, or t
  misc_feature (464)..(464): n is a, c, g, or t
  misc_feature (485)..(485): n is a, c, g, or t
  misc_feature (493)..(493): n is a, c, g, or t
  misc_feature (501)..(501): n is a, c, g, or t
  misc_feature (532)..(532): n is a, c, g, or t
  misc_feature (537)..(537): n is a, c, g, or t
  misc_feature (555)..(555): n is a, c, g, or t
tacatttggaaaatatactttattcaataatataaacaatgtagatatatttgattatttaataatcattttaagtttattgcacagatgcacatgtcaataattagtgtttttcagatgggatgatatacattctgcttttatttttatctctttggtaacaattattgacagaacaatgaaacaaagataaattgttttacagttgtaatacccttgtatggtaattctcagcctcttttatcttatattctactagcacttacatctaataggtctcaataaagtagaaatgtaaaagtatgtattttcagaaaaggtcatatttcataaagattctgttactatgttagtcatttatcataagtgttaagtctaagaaaagttgtaatagaaattgctaagactttaaaataaaaactactccccttaagtagttaaaaaatgntattatatgggtgagnataaaattttattgccccagnggaccgtnaaaaaccngaaacggttagccaaaaaatattggcccttnatagncttatccccaaaatcccncaaccggccaagccggat

SEQ ID NO: 136340 - DNA, 851 bp, Homo Sapiens
  misc_feature (68)..(106): n is a, c, g, or t
  misc_feature (641)..(641): n is a, c, g, or t
gcggcagcggcggcggcggcagcagccacccgatgtcttcggcgcccgagaagcagcagccaccgcannnnnnnnnnnnnnnnnnnnnnnnnnnnnnnnnnnnnnncatggaccccgcgtcgtccggcccgtccaaggccaagaagaccaacgccggcatccggcgcccggagaagccgccctattcctacatcgcgctcatcgtcatggccatccagagttcacccaccaagcgcctgacgctgagcgagatctaccagttcctgcagagccgcttccccttcttccggggctcctaccagggctggaagaactccgtgcgccacaacctctcgctcaacgagtgcttcatcaagctacccaagggccttgggcggcccggcaagggccactactggaccatcgacccggccagcgagttcatgttcgaggagggctcctttcggcggcggccgcgcggcttccgaaggaaatgccaggcgctcaagcccatgtacagcatgatgaacgggctcggcttcaaccacctcccggacacctacggcttccagggctcggccggcggcctctcgtgcccgcccaacagcctggcgctggagggcggcctgggcatgatgaacggccacttgccgggcaacgtnggacggcatggccctgcccagccactcggtgccccacctgccttccaacggcggccactcgtacatgggcggctgcggcggcgcggcggccggcgagtacccgcaccacgacagctcggtgcccgcctccccgctgctgcccaccggcgccggtggggtcatggagccgcacgccgtctactcgggctcggcggcggcctggccgccctc

SEQ ID NO: 136341 - DNA, 466 bp, Homo Sapiens
  misc_feature (79)..(87): n is a, c, g, or t
  misc_feature (211)..(231): n is a, c, g, or t
tcacatttaacacttgtacattttatttaattaaatcagccattgtacacattgcagctatgtattgttagtgttgtannnnnnnnnccattaactaatacatgccctcatagatatattcaattagtgttatcaccatgggaacaagatgctgattcgtcaactgaaaattcacttcttctcacagtattcaagtttttgataacacagnnnnnnnnnnnnnnnnnnnnnggtgaataaccattatgttgttacacagacatcatctgcactgcaaataacacaacagaaatgcttttcttgagctccagtgaaggttttgacaagaaggccataggggtgtctcaaaaagtttcaccatcggcctctcttattttggctgccaaagaatgtctcatttcctatccaactggccaaaaagtgctaggcatttgaggcttaggggggaattgggctggtgggggaa

SEQ ID NO: 136342 - DNA, 949 bp, Homo Sapiens
  misc_feature (604)..(635): n is a, c, g, or t
tttattgttaaagttgttctattttattattattgttgttaatcttttactgtctaatttagaaattaaacttcatcataggcatgtatgtatcataaaaaacacagtatatataggattcagtactatctgcagtttcaggcattcactgggggtcttggaacgtatcctgcagataagggtgggctactgcacaaacatctggacgttcattcatgtgccactaaggatcatcacacagtgaaaagcataccacactctggaaggctctgatcaactttttctgcttctccaagacaatttgaagcatcaacttgttctttcaaaaaatcaacacacattttcttcacaggttcaatctgatattggtttgctgcatccaacaaagactgaacattgttgctattcacggaaattctagcagtataagcaaattccaccagttgttcaataatatcaggttcagcatctttgagttctacttcaaaggactttgattcaagcatgttagttgtgaacattaagttaaaaaaatgactggctgcagcaagaacaacacgatgagcaggtatctttctttcctggaccatgaggatcacgtcannnnnnnnnnnnnnnnnnnnnnnnnnnnnnnngacgcccatgaaacccgccaacaatttagcttcttcccgagcagcaagtttcttctcggtcttcttcttgctgctcttctccaccccagaggctgccatcctccctcagctcggttcacgcccggggctcgccgggccgggcgaggggtcgcactctctgggcacactggggattctatcgaccaaacacggcgatcggcagtgcagctgcagcgcccagctctggaacgcgcggcaggcggcggtggctcggccactgccgaaagacaaggccgggcggcccccttagaaacgctcagggagcgacgcgcccc

SEQ ID NO: 136343 - DNA, 1319 bp, Homo Sapiens
  misc_feature (1245)..(1279): n is a, c, g, or t
cagaaagtggacatcgaccagcacctgtgtacgtacagtacaccttgcagccgaatgcaaggttacttcatcctatggtaaaggtcgcccccagcccggtagccagagatgccactctttctgcccagctaacaccattgtgcgcctgtgtgcgagtggtgccagcataacctcaatcacaccaatattgctgccaccactgctttactggctccgactgaacacagcatagaagagtcaggagagaatgcacagctgtacacccaattctgatgccccctcaatactttcatcatgtttccatcatctttcaggtcccatactctgagagttttgtctcttgaagctgacaccaggatcaagcttccatctggagcaaaagttaaatctctgaccacttcagtatgatctaccaagttaaggaggagttttcctgtatatacatcccatattttgatacgcccattgttcaaccctgtagcaagaagtagctgatcttgtccaaatctgaagcgatgccattctatatttacacagcgactctgtttttctggaactgatgacccaaaagcaagactccagactatatctccacagtctataatatgttcacgaggcttatttttctgaccaccatcactattttgtcttggcaatcttaaactgcttgaattggtaacattcttggtgccatgcaagagaaagttctgaaggcactgggaccacggaacaagctttactgtgcgatgtccttgtgaccaagcaaagtatgaaccatctggagcaaaagcaacagtccaattttcacgaccacatttcttgtcaaaaggagctgcaggagctaaaagttcacctatagtacgtaatctcacgatctctttctcgttgaccctcgggggaaagctggccatctatggggcaccgtctgattccgggaatacgatgcggacccaacaacagagaagagagtggcgaccgctgaggggcgtgacgccaagttggtccctcccgggcccagggacagaggagacgggcgggggcggccgctgcggcttctgctaactgcctcgggaaagctcccgaaggcctcagaccaaagtacggagtcaaccacagacaatagaccctgtacccagcctcgcgcctgcggaggaagacagttcccctaaagcgccgactgcaaacgagacactccccggccgtaatggccgaattcccgggcatatgtccggtaccgtcgactgnnnnnnnnnnnnnnnnnnnnnnnnnnnnnnnnnnncggccgcttcctcgctcaaaactcgtgcgctcgtcgttta

SEQ ID NO: 136344 - DNA, 347 bp, Homo Sapiens
aatcatacacataaactttattcatcattgtctttatgttatagtaggaaaattaaggcatttcataaaatatgaaatcaattgtacaatgcatgatacagtcaaagatctggacatggaattggtgtcttaactatcatttctcacctttaatcaataaacattattcctcttgaaagatgatgaaaaattactcatattaaatacagtaaaaataaacatcattaatcaaacactacatttctaacctctttacattcattaacagtgtggaatacaaacaatgatggtttttgttatggctttgtgtttctttaaaatgctaactaggccaggcgtggtgctca

SEQ ID NO: 136345 - DNA, 1673 bp, Homo Sapiens
tggagggctgcccaagcccaggggctgctgagggccctggctccccagagcgagggccacttttcttttatctccctccacccagcccttctaccctggggctgagcccaagaaacacacttcatcttttattttttcttacaaaaggccttcatatcatcgtttgtcttacaaaaaccaaagtccttgtctctgagtttgaaaaacatcttcccagaataaatgggaaaggatctcttataaatatatatatattttaaaaaagcaaaacatgttcctaaagcatcttcctttccagtttcttttgttccttcgcttcctggggccaagactagagtcacacagccgcctacccgctctccctctgctctttccgggagcttccttcactggcccccagggtccgcctggagtgggagagcccagcagggcccaggcatgcgttaccagcacatggcagggcccgccgtgcccagggactgcacgttgcggagggcagggcggacactgtcctcataggcactcggttctggggacgttagggctcgtcagctgggccacagcatactcacagatgagcgagaccgatcggtccagagggaacagggcccagctgtggttccacacagccctgtctgcacacatccccgaggttgggactgagaacttacgtggtgtggcagccggagggggctggccatctcactggctgagagcccggccccagctgccctgtctctctctggcttagatgtagggctttgcgtggaggggtgactggaggcccaggccctgggaaagcccatgagtggcccctccacattcagacccgctgggcagggcctctcccccgccctctgttgccttcgggcctggctccaaggggaccttcactccctccagttccaggggcccagcccctggcccccacctgccctttgtcctgagccgctgctgccatggcccgcccccgccgcacacagtaggctgcccccaccgcagccagcgcggccaggagcaccgcggccagggcgggcgcaatgaggagcggcaggttgccctcgcgggcctgggtgactggggcgtggttggagtggacggctgggggtgtatgggcctccccgcaggcctcctcgccctccggcacccgcccgggccccaaaggcatgacacagacggagtaagtggcgttgggccgcagctgggtgaccgtgtactcagcgagcgaggcaggcagtcgcagcgtcaccagccgcttatcagggcccgataggttgcgataggtgagacggaggctcctgagctgcacggagctcccctggaggtagcgctgcagccccacgcgcagggaggtggggctcaccggctcgatgcccagggtcagggaccgtggtggcctcggcgtgactggtgtagggctgggccgtgtcccctgccccatctggctctcacagtacaggcccgtgaagccttcggggcacaagcacgccaggtggtgccgtgtccccaggtggcatgtgccccacattgaggcaggtggacggtgggcagtcctggggctgggggacaggccctacagtcggtggggcagtggagggcgggctgggggcctcagtggccggcgctgtggggctaagccaggtaggcctcgtgccgaattcgccactcaggcc

SEQ ID NO: 136346 - DNA, 551 bp, Homo Sapiens
gagaaaatagcacctcacttccagaaagctttaagacaaaagctggagtcccaaataaaccaggcattcccaaattactagaagggagtaaaaattcaatacagtgggagaaagctgaagataatggatgtagaattacatactatatccttgagataagggactgaaaacacaccgtcgatgaaaaccagccactgatgaacagcctcagacctggccagtacggggagcacgtgaacccataactggcttagaaggactgatttcatgccaacttgaggggagaattccaaattccaaagacactcctctcacaggactatgaaaccatcttttaagaagttccaaggacaaaagtcacttccataattatagtcctggcaacttgatctttagatctatttttgcttcatctggctctggcattcccataaccttaaaaaatgttcctgttcatactagagaattcccttggcccttatttctaattgaaacctccttgaagtttctgttgctgcttttcatgcagagtgaaatacattctaacctgc

SEQ ID NO: 136347 - DNA, 410 bp, Homo Sapiens
atatttattgggccctttatttctattattatttcattgtaatatataatgaaataattacacaactcaccataatgtagaatcagtgggagccctgagcttgttttcctgcaactagatggtcccatctgggggtgatgggagacagtgacagatcatcaggcattagattctcataaggagcataacctagatccctctcatgcctagttcacagtagttccagctcctatgagaatctcatgccacagctgatctgacaggaggtggagctcagacgataatgtgaaccatggggagcagctgtaaatacagattaagcttccctggcttgccagagattcacttcttgctgtgtagcccggttcctaacaggccatgggctggtacccgtttgtggcccgggggct

SEQ ID NO: 136348 - DNA, 847 bp, Homo Sapiens
  misc_feature (32)..(32): n is a, c, g, or t
  misc_feature (189)..(189): n is a, c, g, or t
  misc_feature (246)..(246): n is a, c, g, or t
  misc_feature (792)..(792): n is a, c, g, or t
ggtggcaacacactcatattttccttggtcanactcttcactctgctcaatctgaagggctcctgatcgtaactgcttaatacgaccattgttgttgcttgtgtccacaggtaagaaatctttaaaccaagtgatttctggatccggattaccactggctgcacaaagcatggtggccgtgcgagtacnctcaaccaccttcaactgtgggcccatgtcaatggtaggtcagcccctgggaatttngatcttcccgcaaaactgtgagtctggtggatacacttatttctcccacattatttgaggccacacattcatacatggcctcatccctcggagtccgtaagggttgtattctgagaactgatccagacccatcgtcaaactctattacctcaaatctctgattgctgactttctttccttttttgttccagacaattttaggtcttgggtctcccgtagcttggcagatgaaagaggcaactccgccagagacccctgtctgatcaacgggtgttcgtgtaaaccttggaggtgtctcagcatccgtgcggaggaagaaagtgaggagcagcagcagcagcctggctacgtgcaccatcctgcagcttggcagcagcgtgcgcgagcagcttggaatcactgcctccggagccgcagcgagtctgtccgatctgaaatttcagctggaacactttcagagcctggtcatgttggccccggcagccgccgccaccgcctcccgcgccgccgccaacactttccatgccgcgccttcgcgccccgccnacggccgcgctgtcgcctccgggcggccaatttaatcccgcggagcagcggccgc

SEQ ID NO: 136349 - DNA, 1065 bp, Homo Sapiens
gcagcaatgacgtttaatacttctggaatgattaggaatctgagaacagaccgtgggcggctatgctgaccagggctccggatgtggaagctgggccctgcctccttgcaggggactctgcccagctggaaggggcaggcagctcggcaggccctgaccggcaagcgggcagtgccaggcagcccagcagcagctggagcttccagaatggcacagcagtgggcctgttgaagaggctggcgtcaattgaaggagaactggagggctgacacgcgtggctggtgggcaggcaggccaaggagcatagggcccgggcctacgagagggcggggcggcccaaccgccggcagtggggcctgaagccactgtcgccgccggtgccactctgcaggctgtagtggtcgtccgcgtcactgctgctgccaacactgtccagctcaccagggccaaactccatgccctctatgtccacttcttgctctgagtcgtccgtggagacagcagagcccgtgctatctgtgcgcacgcgctccacgctctgcaccgacagctgctccaggcgccgcttcaggaaacgatgctcctgctgcagctgctccttgatgctcagtgcccggcggtcctgctcctccagtttcttgatgtgcaccttggcccgcttcaggaggctcagcgtggtgtggcgggtgctgtcggggcccaggggcaccagttgcttgagctgctcaaggtacagcctgagtttggctcgtctgtgcttttctagctcgttgtgtgaagacctgttgttcggggccttgcgcaccaggccggccgcctttgttttctccctggcgaagtcgccgtcgaagggcagcaccgaggcgtagccgtgctcggcctctcgatccctgcgctccaggtactcggccgcctccagcaggatcagcagggagttcagctccatcctcccgcccgcgcccgtccgccccgggacggcggcggccgctgcccggcccgctccggccggctccgctcgccgcccaccccgccctcgtgccgaattcgccacccaggcctcgctcc

SEQ ID NO: 136350 - DNA, 1085 bp, Homo Sapiens
  misc_feature (341)..(341): n is a, c, g, or t
aaaccaggatcttgtcttaccccaggggcccgcccccgttttttccaaggaaaaaaagggaattggttcccccttgtgcggcaagggttgggctctccctgaggatgcttccagggtgcccccggggggggttccttggctcccttcccaagtttttcttggaaggggccacccttgggcccccctttacagggaggcctccaaccttgggtttgggcggggttcctttccggggcccacagggggcacccagtttgcttgagctgctccaaggttacagccctgagttttggctcgtctgtgctttttctagctcgttggtgtgaagaccttctctgagncctggggtgaagatgaactggctgcatgtgtgaaacggctcagcatagagggcagtgttcgggcagccttggccaggacgctggttgtcagctttggattctccatgctgggggagccccagctcacgccccagagttctccacgggtcagggacttggtttggagagaagcggcagcgggggccgggcttgctcactgaggaggcctgaggcaatggttccctcgtcacactcctgtccttccccaaactgtccccagtaggggaccaggggctgggactcagggacgggtcccagccagggcagctggagactcaaccaattcctcgcctggctcaggatgccacagaaatgggtccctacaccagcctttcggattccctagaacaggtggaccacaggaatgagccatgccctggggctctgaagccccctacaaacgcagctcccagcctgctcacacaaaagggctgggccaaggtgggcccagacaggaccaggtgtgctatggtcctcacagcagccaggagggtggaaatccccggggagccccggcccagggtccccactccccacgcgggggacctgtacgcaccccagcttcagggcttctgctgcctgaacacgaggtcaaggtatggagggcgcagctggcacccgtagtaacgacttcatggggcccctgccctgcagcctgccccctcctccctcgtgccgaattcgccacccaggcctcgcttcctt

SEQ ID NO: 136351 - DNA, 969 bp, Homo Sapiens
aatggtccctgctgcaagctggctcccttgatggtccagttccccggcggtccctgctccttccagtttccttgatgtgcaccttggcccgcttcaggaggctcaagcttggtgtggcgggtgctgtcgggggcccaggggcacccagttgcttgagctgctcaaggtacagcctgagtttggctcgtctgtgcttttctagctcgttgtgtgaagacctctctgagcctggggtgaagatgaactggctgcatgtgtgaaacgctcagcatagaggcagtgttcgggcagccttggccaggacgctggttgtcagctttggattctccatgctgggggagccccagctcacgccccagagttctccacgggtcagggacttggtttggagagaagcggcagcgggggccgggcttgctcactgaggaggcctgaggcaatggttccctcgtcacactcctgtccttccccaaactgtccccagtaggggaccaggggctgggactcagggacgggtcccagccagggcagctggagactcaaccaattcctcgcctggctcaggatgccacagaaatgggtccctacaccagcctttcggattccctagaacaggtggaccacaggaatgagccatgccctggggctctgaagccccctacaaacgcagctcccagcctgctcacacaaaagggctgggccaaggtgggcccagacaggaccaggtgtgctatggtcctcacagcagccaggagggtggaaatccccggggagccccggcccagggtccccactccccacgcgggggacctgtacgcaccccagcttcagggcttctgctgcctgaacacgaggtcaaggtatggagggcgcagctggcacccgtagtaacgacttcatggggcccctgccctgcagcctgccccctcctccctcgtgccgaattcgccacccaggcctcgcttcctt

SEQ ID NO: 136352 - DNA, 361 bp, Homo Sapiens
gcggccgccgccgtcccggggcggacgggcgcgggctggaggatggagctgaactccctgctgatcctgctggaggcggccgagtacctggagcgcagggatcgagaggccgagcacggctacgcctcggtgctgcccttcgacggcgacttcgccagggagaaaacaaaggcggccggcctggtgcgcaaggccccgaacaagaggtcttcacacaacgagctagaaaagcacagagaccgcatcccaggcactcagaggctgagccacatcctccactgctccccgcgggcactaacattgccgatgagacttggataaggaggggaccttgttctccatttcctcacttgatctttca

SEQ ID NO: 136353 - DNA, 491 bp, Homo Sapiens
ctatttattatttttcaccaaatccaagaggtgtttagtgtaatgagtgttcagatgggtggggcagggtggggttccccccatctgaccctctagggctctggggtgactcattcttccttgggctcagaggtggagctgatatttgttcctccagttgagccctgctccccctggcccttggcgttctcagtgtctccagacactagagccacgttcctcagataattgatgttgaagcagttgacctgttcatccccaggactcaggtaacagcagagggcagggtctcgccagatgttacgtcggggaccacacagatcattgatgaaggttaatttctcctcctctgcacagcaggcctgttctggaaatggcaggtcacagcagcgggcagtcatgttgtggatcagcccaggaatatgtttatgcttggtgagaactctttggtttccacagaggtggcccatgaggttgggggtgactcgact

SEQ ID NO: 136354 - DNA, 680 bp, Homo Sapiens
  misc_feature (252)..(252): n is a, c, g, or t
atattggtgggggggaaatcccaaaggccccttagtggcctgtgacccgggggttttccctagggggaaacaagcgtaatggcccacaggtcccccttaacctcccgggggccccggcggcgccaaaacgaaatgggtttagaaaagcttttcgaggggccgagggcggccgacaaggagaatgggcgttccttttttccgagtttttccaaggtacgggggtaacggaaattgtgtagagtactgggtgtnttttgactactcaaagactttcttttattagtacatgggctgggattgatgggaagggacagatgtagttggcaaccatggttagcatcggatgcccatcccaatggccatgaatgtgccaaaggtgccgccactctgcatcatggttttcccaatgccgcccatcagctctcgaccccgcattccgatcctgagacaggaaaaggtgccgaagagcgccccggccgccatgcccacggcgcaacccatcacgaagcccattttgacacggtcgaagcagcttggctgggactgtccgtagggacccacggccaccggcatctcacctcgctcgcgggctgggtcgctcagctctacgtctctcacggaaaacgacggggagggcgctcgcggcccgatgaatcgcttccggagcgccgggcagcccc

SEQ ID NO: 136355 - DNA, 465 bp, Homo Sapiens
tttgctcaaagactttcttttattagtacatgggctgggattgatgggaagggacagatgtagttggcaaccatggttagcatcggatgcccatcccaatggccatgaatgtgccaaaggtgccgccactctgcatcatggttttcccaatgccgcccatcagctctcgaccccgcattccgatcctgagacaggaaaaggtgccgaagagcgccccggccgccatgcccacggcgcaacccatcacgaagcccattttgacacggtcgaagcagcttggctgggactgtccgtagggacccacggccaccggcatctgcgggggataggaaagtgtgggcccaggcgctggcccaagagtcgggcggggacggaagcggtaggctgggaagtgggcccaagggctcaggggaagtaagggaaggaaaatcagtgggtagcccgactccaccaccctcttcgccc

SEQ ID NO: 136356 - DNA, 134 bp, Homo Sapiens
ctgccagataatctttattttacacatttgcaacacggcaagagaattcaccccgtacatcaccatgatcggatcccccacccattatacgttgtatgtttacataaatactcttcaatgatcattagtgtttt

SEQ ID NO: 136357 - DNA, 694 bp, Homo Sapiens
atgctcatcctcgtaattgtgctcaatctccagatcactctcggaatcacactttgtgcacaccaccaacaccgggatccacaggttatgagtcagcacattgtcacccagaggcagggcaacattttcttcatcggagcctgaggtcagagggcctcttctctgtggggaaccttgacaaccttcttcaggttccatatagtcttgaaaatctttcacaaacttccgttccagctccctcattttttctggtggaattttcattttatcaatgtgctcacgtaaaacactagcccatttctgcagagattccatcacagtccaaggtctagacatgtctgcaacaaaaatgacgagggtctctggcaaggattcagcagaaactgcaaatttcagcaggcctttgtggtacaagtctccatccagaatccacacgttgcagcgcgtgtgatcatctcggtcctcatcatggacactgaggtagagatattctaggcctcttccttttttgccatgctcagctccttgtagtttagtcatgagggttgttttaccagaaccatcttcaccgaagaccaggatgttcttgccggacggcagcttggacctggcgcgggtggacacttcgctcagaatggaggaccataggctctggccttcctcctcctcactggtcaggtcgccggcggccgca

SEQ ID NO: 136358 - DNA, 956 bp, Homo Sapiens
tctagtcttaggaaacaaaaggtttattgaaatgcatgtagataaattatcatcagcataaaactgttatggagttttcaacatggggtcttttgctcttaaaatgaagtgaagctttgcaagtccattgtccaataggaaaaatattatatctctctgttcagataaagtcctttaaaaaagtaaatctcttttgaaacggtcttttaaacgtctccagcctgtttggctccccccaggtggtgttgctgtccttctccaattgtgagtctgttgaatgggattatcttcatagtggttttcttcatggaataccaccgggttttccaagtggcccaaataatgccattatcataaccattaggagtagatgcttttgagtaagtgccaccttggtaataaactccattgagatggccagcgtgacacttgttcatccaccaaccagatccatcctgttcagcacagttgccttcaaacttatcattgtcattgtcccaggtactgaactgcatgccattatgggatgtgaaaaacttgtcactaggatcatcgccaaaatcaaagccatcaaaggcatctccagcatccccaccagcgaagtaggcatatgttaggcggtacttgtcagcttcaggtcccaccttgaacatggcatagtctgcagtactggttctgccattccagtcttccagttccactcttaatgcatatgggatggcagactgtgtgcttatcaaatgaatcttctcatttcccagccaaaattctgttgtgtcagtaggagacagatgtccaaatccttctttatattgaatccagtttttcttgaaatctacactgccatcaagtctcttctgaaacacagtccatccatttccagacccatcgatttcacagtagactcccggccgtaatggccgaattcccgggcatatgtccggtaccgtcgactg

SEQ ID NO: 136359 - DNA, 1389 bp, Homo Sapiens
  misc_feature (1268)..(1302): n is a, c, g, or t
  misc_feature (1306)..(1344): n is a, c, g, or t
acctttagattagatgctttttaagtaatgcccaccttggttaataaactccattgagatgccagcgtgacacttgttcatccaccaaccaagatccatcctgttcagcacagttgccttcaaacttatcattgtcattgtcccaggtactgaactgcatgccattatgggaatgtgaaaacacttgtcactaaggatcatcgccaaaatcgaagccatcaaaaggcatctccagcatccccaccagcgaagacggcatatgttaggcggtacttgtcagcttcaggtcccaccttgaacatggcatagtctgcagtactggttctgccattccagtcttccagttccactcttaatgcatatgggatggcagactgtgtgcttatcaaatgaatcttctcatttcccagccaaaattctgttgtgccagtaggagacagatgtccaaatccttctttatattgaatccagtttttcttgaaatctacactgccatcaagtctcttctgaaacacagtccatccatttccagacccatcgatttcacagtagactaagaattgctggttagctttcagaggtttaataaagtaaagcccgctctgtttagctcccttattggcaatgtcttgacaatctttcccagtgatatcatggatttgcaccgtgtctttgcaaggttcctggcactgtgcttcaagctgggctaccttctctttcaggttaacaatcttttgattatttgaattatatatttcctgcaaatatcgaatacttgagtcatgtgttaaaatcgatgcttcatatttcataatttcttctaacattttcctggacttcaaagtagcagcgtctatcatatttggttttgatgattcatcaggattataagtgagttggattgcttttatcagctgtttgacttctgatgttttgttttcaacttgatgtaagatgtcttccaaagactgtagatccttgtctactttggtttgataagtagacaggaaatctgcaatgccacaggtagttggacaataactaccgaatctttcatctaagatgcagcagttgtctctggtagcaacatatgctacacatgttgaagagagaaataaaagagcatagaagtagagaattaaattccgggggtgcaaggaccaactcatgatgtctgagtgcccggagctccgagccttgtagtgtcagcactgtcccccggccgtaatggccgaattcccgggcatatgtccggtaccgtcgactgnnnnnnnnnnnnnnnnnnnnnnnnnnnnnnnnnnncggnnnnnnnnnnnnnnnnnnnnnnnnnnnnnnnnnnnnnnntctgatgacggcggagcgccctatagtgagtctatacgtcttttt

SEQ ID NO: 136360 - DNA, 767 bp, Homo Sapiens
aggtggtgtgctgtccttctccaattgtgagtctgttgaatgggattatcttcatagtggttttcttgatggaataccaccgggttttccaagtggcccaataatgccattatcataaccattaggagtagatgcttttgagtaagtgccaccttggtaataaactccattgagatggccagcgtgacacttgttcatccaccaaccagatccatcctgttcagcacagttgccttcaaacttatcattgtcattgtcccaggtactgaactgcatgccattatgggatgtgaaaaacttgtcactaggatcatcgccaaaatcaaagccatcaaaggcatctccagcatccccaccagcgaagtaggcatatgttaggcggtacttgtcagcttcaggtcccaccttgaacatggcatagtctgcagtactggttctgccattccagtcttccagttccactcttaatgcatatgggatggcagactgtgtgcttatcaaatgaatcttctcatttcccagccaaaattctgttgtgccagtaggagacagatgtccaaatccttctttatattgaatccagtttttcttgaaatctacactgccatcaagtctcttctgaaacacagtccatccatttccagacccatcgatttcacagtagactaagaattgctggttagctttcagaggtttaataaagtaaagcccgctctgcccggccgtaatggccgaattcccgggcatatgtccggtaccgtcgactg

SEQ ID NO: 136361 - DNA, 929 bp, Homo Sapiens
  misc_feature (718)..(727): n is a, c, g, or t
  misc_feature (810)..(844): n is a, c, g, or t
tttgtcagtcaaaatacaaggaaactcttgtgcctttaatagcaagaaaacttcagaatgtatctgtacatcttttgacctgttatctgaggaattgctgagtcaataaatgattacaattgtttagaaactggtaaaaggctaccctaacaatattcctggtagaatagagcagtcaaatccagctttaactcttcaaatgggtcaatggtatgacattccagccagggatcaacatttctccagtgaattgtcctaagatgttactgaagtatgtttaggaaaaaacctcaataggaatattcaacaggtattcaacagtcttgcagtactaagcattcttttccccaatacgcattggtctttgtttttatcttcagattaggtggctcatccaggcttccaagagttcaagaacccatcttcactgtaacatcagttaaaatgaggaatgaatccctttattcctgtttataattgattctttccccagctggtagatggtctgcattcaacaccactgagtcatagcaacgctgtattcttctaggtcttctaacagttgtgctatcatccagatgatctaacaagttgcagaatttgaaggtccagcagtcttggagacatggactccagatgaccacaaaccaactcttgcactttcatccgcatttcctgttgggttatttagatctttccagctttactgtccacagtnnnnnnnnnngctgacaaaattcaagatttcagcaagaagatcccggccgtaatggccgaattcccgggcatatgtccggtaccgtcgactgnnnnnnnnnnnnnnnnnnnnnnnnnnnnnnnnnnncggccgcttcctcgctcactacttcgctgcgctcggtcgttcgctgctaacgagctagcgccctatagtgagtctatacatcttc

SEQ ID NO: 136362 - DNA, 410 bp, Homo Sapiens
  misc_feature (94)..(107): n is a, c, g, or t
  misc_feature (366)..(366): n is a, c, g, or t
tttacggagccaaattctttatatgtattatatttttcattaataaataggttttcttcattaaacacagaacatataacagattgaaacactnnnnnnnnnnnnnnaattccaaagacaagagtctataaaacaaatgccagctgtactaccctaagggcagaaaaagtctggtgacccccacccagccctgcccctgcagcaccaccacccccacactctgcaagagaagggggtctggggcttctcccttggaccctggggacttaggtgagaagcatgtgaatgtatgatgtcacctctccatgaggcatgggctatgcaaagatgaggtttccttctcattgggctctgaccagctcctgnacttccgatgcagttacgaagcacctggggtaagccccaaggga

SEQ ID NO: 136363 - DNA, 816 bp, Homo Sapiens
gagatgcaggagaatcctttaagatagggaatttggatgtaaaagttccaaagtaaggtcccagttacaagaccccaggaagcaagaagaagaaggctgagagggacgacacactccagggctcatgtcacaccgataggcgcaccaggaatgaccgccatatacttccctaaagctcaacccacccaccagttcagttaagaattatactttaattcgtgtttggccactgaagatcaaatccaccatgatgataggatttcagcacaacgggccctttccagtcatgacagacagagatgtccaggctcttgaggagaaacaaaagttcctttgacttctcttgcaaggaccaaagagataaattttttctttacgatctgttgaaatatttatatagacttttaaaaacaactaacagttcatcctgtgctcagtttccctggaaggtttctcatgatcgcccctccgagagctagaggggttgtgtgtctgggaacaaaggattaagacactttaaaataagcaatgaaaatcctagtgcgacactcagaagcagttggtgggcttgagggggccgaggggttggcggcagatgcttcgattgaggagctgggtgccgccttttgggaaagccgagtggagacagaagcatcgggacaggaagccctgctggagaaggctcagttccttccttgctgttccctgggggaccagggacagcacggcccctgcatttctacttctcagggccgaagacccgacctctgaccctccacccactccggtgacctgcacgctaagttggcggccgca

SEQ ID NO: 136364 - DNA, 331 bp, Homo Sapiens
tttcacaacaggcaactttattttagaatttgatccataaatcaacaaaataaataaaaggagctgagtctctctctattatgttagtacacaaaataaaccaaaaaatacatcaacatttaccatgagatcatttaaatgtatttgcaaatgatctgataagggaaacatgatttacaacacgggaaacttcttttaacaaccattgacttaaatgcacggcactgtaggtcacctagactaggttagcaagaatgagcaaagtggtaggtccaaaaggcaacctccaaacaccgtcctcaggtggaaactttggcaattatctgtggtt

SEQ ID NO: 136365 - DNA, 899 bp, Homo Sapiens
cattgtataatttaaaagctttatttccccccataattttgcaaatagatttcatattagttccactggaagtttttttcgtacagttgcctttctcattgactatgctgttggtggggaaatctgctttctcatgaggggaagggttagatttcatagagatgctctgagctaatcacataaacaagagggtttgacctggcagcctctgaggcagtcaaggaggtcaagaaatcctttcagctaaaggcctagtcaggtgggactagttgccaggatcctctctgcagaactgcccaaacgtagctctctttgaccaggaagcctggaagtcagaccatcttctcaggccctgccaaattcccatcctcagtcctgtggcctcatgcgggaacattttatccaagcaaaccactggctttcgccttgaggtccaatgtgcactcttcaccaagtgcaagattgatcttcactccaaagttcaccgttcacacagtttttggcttgtgctttagaggctggtctctgcctctcctaggaatggtggcatcacagcaatggaagcacaaagacccaggcaagcactggtaggtagagtgtgggggcactgctgccagatgttctctgagcgtgcattacggcaaacactgcattagtgtgattggtgggtaattctacattgcagatcattccttcacagcaagacctacactccgtatgttcagaatctcggctgtggtggcaaccgacaaaatgacattcacttctggaggcacactttttggtgatggatgtgcttcttccgtggctggtgaagtgatgaactgtcaaacagtactgtgtattttgtggacaccatttgtcttctgcccatcgattgcagttataattatcccctg

SEQ ID NO: 136366 - DNA, 692 bp, Homo Sapiens
  misc_feature (23)..(23): n is a, c, g, or t
ctgccctggccaggaccggcctnctcctgtcctcctggtcacttgcacagggcctccaaacacctccagagtacgtcggatatcccggacttggcgcgccagcccctgaaccggctgcagagcccgctccagctcctcgcagcgcgccagcagggtgtacatgcccttgatgctcatgtccacggcttcacctaaggagtccacagcatcgcggtaggtctggatgcaacccacgctcagcgccgtcagctcctgcaccgcgccacccagaccgcgaagcagacggtccacccggcctcccagctcccgactcaaccgctccagatcccgcagcacctcggggtcgatggggggaatggccggtgtgggtgtgggtgcaggcgctgggcagggccgcgcaggggcagaaggcgggggtggaggcgcgccgctcagacggatcttgagttgcaggttgttggcgacaaagtgggtaaggtcgccgtggcggctcactgtgccttcgagctccaggggactggagatggtggcgcggcgtccgccgcccgcgccggactcggcactccctgaggacccggcgccaccgcacgcctcgctcagcccgtccaggctgcggctgtcctgaagacggctggagaacgagcggccggctctgctgcccgcggccgcaagcttattcctaaaggagggtt

SEQ ID NO: 136367 - DNA, 596 bp, Homo Sapiens
attaacaaaccggtgggacagtgcagcggaccccatttttgaaccctccccaaagcactgacaaagaaggagcaccttccggcaatgaatcacctggactccagcagcaacccttcctccaccacctcctccacaccctcctcaccggcgcccttcccgacatcatccaacccatccagcgccaccacgccccccaacccctcacctggccagcgggacagcaggttcaacttcccagctgcctacttcattcatcatagacagcagtttatctttccagacatttcagcctttgcacacgcagccccgctccctgaagctgccgacggtacccggctcgatgaccagccgaaagcagatgtgttggaagctcacgaagcggaggctgaggagccagaggctggcaagtcagaggcagaagacgatgaggacgaggtggacgacttgccgagctctcgccggccctggcggggccccatctctcgcaaggccagccagaccagcgtgtacctgcaggagtgggacatccccttcgagcaggtagagctgggcgagcccatcgggcatggccgctgtggccgggtgcaccgcggtcc

SEQ ID NO: 136368 - DNA, 565 bp, Homo Sapiens
tttgtttgtcagaaatttttatttatttaaagaaataacattggttattgattagatatatatcattatggtttagggtatgagatatagtgtccaatgtggtattattagtttaatatatatctacttgtggcaatagtgaacagtttcaagcgatgaatacataatttaaagggggagaacgacataactgcacgttcatttcaatgtctgagtttgataaccaaaagtactttcattttttagataaaaattttctatttcccaaatctcaagacctggatacaaaatgtagagctgcagatttaaggcctgaatggctggagtagcaggtgttacctgaacatttgtgaacattttaccaagagaaaaaaggggaaagtggagattctcatgtctacatgtgtactcaatgaacacatgttactctgattaggtttgtgggccccatggtctccgaatcagtttcaggtctgaagataacaagagtcattgagggaaataaaacgattgattgttgcccagtgaagttggtagaaattaggatgaactatgtatgacatgg

SEQ ID NO: 136369 - DNA, 592 bp, Homo Sapiens
tttactgcttgtgttttacagacccgatatcaggttcttctttagactgggcttatgacctgggcatcaaacacacatttgcctttgagctccgagataaaggcaaatttggttttctccttccagaatcccggataaagccaacgtgcagagagaccatgctagctgtcaaatttattgccaagtatatcctcaagcatacttcctaaagaactgccctctgtttggaataagccaattaatccttttttgtgcctttcatcagaaagtcaatcttcagttatccccaaatgcagcttctatttcacctgaatccttctcttgctcatttaagtcccatgttactgctgtttgcttttacttactttcagtagcaccataacgaagtagctttaagtgaaaccttttaactacctttctttgctccaagtgaagtttggacccagcagaaagcattattttgaaaggtgatatacagtggggcacagaaaacaaatgaaaaccttcagtttctcacagattttcaccatgtggcttcatcaatttatgtgctaatacaataaaataaaatgcacttaatgctttaaaattc

SEQ ID NO: 136370 - DNA, 471 bp, Homo Sapiens
gccctttatgaaaatcactttaatttaacccagatgggtcttgttgataacctcatacaatgagcaccctgaattatactttccgtgagaacacactagttatatttagccacaaattacgactctgtgtttaacaagcaactttgagagtggggagggggccgggcagcctcctgacctggttggacaaaaccggcaactgcagcaatggagaccccctcgctggaggggacgccgagaaagccgtgccacgggcttctgagtctctcttctctgctgctctagtttctttaaaacacttacaacctcgtccgaggtctgtcgaggagactgtggcctgcaggtacaacctgagcctcccccaggatccctgggacttctgccttcccacacccccaacctggctccctgcttgggctggagcggggaccttctgggagagcccagttcgacaggctggggggctggggg

SEQ ID NO: 136371 - DNA, 898 bp, Homo Sapiens
  misc_feature (184)..(184): n is a, c, g, or t
acttttttgatattttttattataaaagaaaagagaacaacataaaactagtggggtacttgacattgtttttgagaaactaatccatcagtatctggcttgatggaagtagttgcaattctcagtgagttctcaaggtgctcatcagatattttggttctaattttactcttcgtgttcttcnatccttgaaaatagtagctcccaaatgtaagtgctgccaaaaagcaatgacatgaacaaggtgtgattgtgaagcaagggatatttgtcattggggaagacaggtccttacaaaaagtccagtaaagaggcaaaatcaaatttttctataagttgaacatcagattgcagctctaggcattccatttcaaaattggccaggtaacatatatatgtcgactgaaaatgggagttgcaaatataccaaaatattgatgattttttcagaaatcttgaaatacctgttttcaaattcctggatcaaattgaaaagcaaggctgcgtatttttggctgttcacaggaccatgtttagccaacatgtcgaaatgcataaaattgtttgccttaatttgagcttgccataatttcagtttcatatggaatgctgttatggtttgaaacattgtattgttaagttggttttcaacttgaagacacaggtttaactcacttaaatgggccgtcaaacccactaaaaatgctaaatctgtaagccagttttcattgtcaagttctggcaccaattttgtttgataccataaacagcttgatttcacatcacaaagcataaaatctttacattttgccttgacttaaccatcttacttctaaaaagtgaatgacttgctagagtcagcatccatacttttaaggaattcccctcgttccgaatt

SEQ ID NO: 136372 - DNA, 181 bp, Homo Sapiens
ctttctcactttaacttaaagagaattttatatgtcttggaaatttaataatttagtgttctcagtatcaattggtgtttttgttaaacgaatgaatcatctgttcatgcatgctctactttgatattataacctatgtcacatgtgtttaataaataccatatattttgttctacaaaaa

SEQ ID NO: 136373 - DNA, 570 bp, Homo Sapiens
  misc_feature (77)..(77): n is a, c, g, or t
ctattccctgggtttgctcagctgacaaggagagaggagagcacgtattttgcccgcaagctgagtgggctgcagcncagcctccggaactccagggagcaacaggaggctcaatctcacccaagaagagcttctgatttccctggccaggactagcccaattttggccttggcctgcagcaggagatgagtgatgtgcatgagggacgtggcagtggagaaaggctgggcctgtcctgctcagctcactttgaccgcttcggagctctgatctgagcccagtatggtttctggaaaaggctggggaggggagggcgtagtaggacttcagtgggaccatgctgggttggtgctgtgggaggagttgagccgccctaggtactcactaacctgctactataggcccaacagtgggggtggtgaggaagcgggtgcttaagagaggggagacgagctgtcgccccagcacactgctgcatgaggagtgggcctggggccactaaacccgcccagttctccctggctgattgtgcaggggctttcacagcagctcaggtctcaggcggccgc

SEQ ID NO: 136374 - DNA, 604 bp, Homo Sapiens
  misc_feature (490)..(513): n is a, c, g, or t
tttttttggaacattttctttcttctctttttaattaagaagtctaaagaaaaccttcattgactcagggaacataatacaaattatggtgacctgcgtataaaacctggcaacaaatttggcctttgggaacatttatatataaaaatatgcattaaaatccgcaccagggcacagtgcagaactgatagccccgatgggagtgaccaccaaggcatacgtggtccgtggacgcagggagcccttggtcctcctgcctcagggtgagccctgcatgagaatggcctactccaaggagaggtcagaaggcaaaacccctgtgagcaccaaaatgccacaagcctggtgtgaaacaaaaatggtgctgggaaggactggggagaaggtcatctttcttccccttgtctctgggctctgcccactattagaagattctggctctctgctagacaaaccacctttgatttaactttagaggaacttttgcaannnnnnnnnnnnnnnnnnnnnnnngagacggagtcttgctggtgtcccccaagtgggagtgccagtggcatggatctcagctcactgcaaagctccgccttctggggttcacgcc

SEQ ID NO: 136375 - DNA, 840 bp, Homo Sapiens
  misc_feature (829)..(829): n is a, c, g, or t
tattcttaataaatttatttatagaaacagacatattcaaatgcaacactggacaaaaacaaagagaaaaagttggaatgccgatgacaacagagaatctcactttcactttccatttctctgaattagcaccattagttcagaaatcacagatgtaattataattgcttctaatatataaaacaccttataaagatctgtaaactatctaatagcaaagttcttccaaaaacgcatttaaaaatcaatcagaatttaccatttgaaactgatgaaaatggtttaaaaatgaatccagttctacagcttgtcaaagggaatgagccataattagttttattggaagaaagtgcctgaattcatcttctagcctccttctaaccaccaagcaggtacagcaaattgaatattactacaggaataagagtcatctaaaactggtcttagaaaatattttcctaaactataaaaatactaaatggcatacaaaaatttcagcatatacagcaaatagactacagcagacaaatatttagaacatacttaaaactatctcgtaccacaatcatcataaacatcaagtattcttctaatcagttttctatgattcattctaattcaatgtttatttaccctcaagttttgttctagtgtcagatacagaccaaattctgtgtttctagcagaagttactggaggaaccattgaataattcttggtattcaactcgttctcaaagtgctggaagtgcaattgtagtatagcctattttttagatgaggggtcagcaaactacagcccaggggccaaatctggtcaccatctgttntgtccggcctg

SEQ ID NO: 136376 - DNA, 357 bp, Homo Sapiens
  misc_feature (184)..(193): n is a, c, g, or t
agtaaatagtataaatgtattttgtaatttaaacaaaagcttctgttaacattattgctaacatggctagacactgtcactaaatttggtggctctgctcaggatggtctgaacacatgcaacattctttttggagccacctgaaaaacaaggattcatcatccagctgaaaccgaagacagannnnnnnnnnaccaaactggagggaattttgaaatggctgaccaaatctgtgggatacagaatgtacaaaattctcttttagggttgctggggtgacagggcagctcaaagaggtaaccatctataacatctgaaactgaggtatgagacctgtattacaactggataacaaaa

SEQ ID NO: 136377 - DNA, 440 bp, Homo Sapiens
atgcatcatagggcgagtatattcaaatacttccatatataatcgtttccacaaattgggatcattagcaagttcactgaagcgtttacatacacaagctgctctacaaagatcctgttccagcaagtaagagaagatttttagaaccacttcatctggccagtttctcctgaagatactgtttcagcaggtgctgctgatagatcttgtgattttccagacactcttgcacgttttgcacgatgaccgaaagttttctgtagttgaagttgaggcgccctccatactgttctttgtgggacacgctgttcttttcggcaaaagagtttttctacgaagttggtatggactattttgtgcaccaggacctgattcttctgcaaccatatctgcaggcacatcatcatcccgctcgccgacgttgttccgctcctgaggca

SEQ ID NO: 136378 - DNA, 497 bp, Homo Sapiens
gttctttgttgacgggagaggctgccagcagcaattcggtgagcagagcagcagatatttattctgaatgtccttactccacacactctcaccccaccccaccccctctccctgcttgtttagagcctgggttccaggagggccaggagctggaatcagcaggtgggatgtgccactcgtggtgtggacagagaagggaggatgaagtcagggctggacctggaaccactggctgggctgtcagtgctggtccagaatgaggggcacctgggcgctgtccacgcggggaggcagccgctcacctgtgtgcacattgaacatgggcagggtggagagtggccggggcacctcgcggctggccgccatctgccgcagctcctctgtgttcccgtggatggtgcagtggtggaccatctggatgctggaggcacaggtggggagtcatcagctctgggagtcagctgcctggagtacagcctggaactgcctctgagcca

SEQ ID NO: 136379 - DNA, 655 bp, Homo Sapiens
  misc_feature (518)..(527): n is a, c, g, or t
tggtggctatgaccagtggttacaaaaagcaggctggtaacggtcggaatcccgggatatcgtcgacccacgcgtccgacaggccgtccattagagatttaactagatatgttcaatagaaagagtctgaggcaagtggaaatgaggggaggagatccctgtcatgtctcttgtgccatggagctattatggctggtcttccattgctttttctttaagtgaaaaccatttttctactttgcttttctctccatacttaaatggtcagtagctactgagtggtgctttatctgaataggcctggatcgaagtaaaatagaaatgggactggctttccacaggaagtaaactgcttcagagcccacagtcccctgctcagtgtccggaaagaagtcagtcatccctgtggcagtaaatcttcccacaggccgtccattagagatttaactagatatgttcaatagaaagagtctgaggcaagtggaaatgaggaacggaaacttaggttgggagaatannnnnnnnnnattcattctgtttgcttaattcagagtacagtttgtgctatttcatatctgtactccaggcagaaatataacttgaaaatactgtgtctaaagaaatttcagtgttctatcattaaattatttactta

SEQ ID NO: 136380 - DNA, 949 bp, Homo Sapiens
  misc_feature (307)..(307): n is a, c, g, or t
  misc_feature (609)..(609): n is a, c, g, or t
  misc_feature (938)..(938): n is a, c, g, or t
agagagagagcgggacgtataccaatctgccgagcagcagcagaagcggtggcagcggcacagcagcagttgagctggaggaggagagctctagtgagcacctgacctgctgcgagcaaggggatatcgcccagcccttgctgcagcccaacaactatcagttctgctgaggagttgacgacagggagtaccactctcccctcctccaaacttcaactcctccatggatggggcgacacggggagaacatacaaactcttgccttcggtcatttcactcaacagctcggcccagctcttgaaacttngggaaggtgagggattcaggggaggtcagaggatccccacttcctgagcatgggccatcactgccagtcaggggctgggggctgagcctcaccccccgcctcccctactgttctcatggtgttggcctcgtgtttgctatgccaactagtagaaccttctttcctaatccccttatcttcatggaaatggactgactttatgcctatgaagtccccaggagctacactgatactgagaaaaccaggctctttggggctagacagactggcagagagtgagatctccctctctgagaggagcnagcagatgctcacagaccacactcagctcaggccccttggagcaggatggctcctctaagaatctcacaggacctcttagtctctgccctatacgccgccttcactccacagcctcacccctcccacccccatactggtactgctgtaatgagccaagtggcagctaaaagttgggggtgttctgcccagtcccgtcattctgggctagaaggcaggggaccttggcatgtggctggccacaccaagcaggaagcacaaactcccccaagctgactcatcctaactaacagtcacgccgtgggatgtctctgtccacattaaactaacnagcattaatgc

SEQ ID NO: 136381 - DNA, 605 bp, Homo Sapiens
  misc_feature (57)..(107): n is a, c, g, or t
aacatatgtagtggatggatgactgtatttatagttgaacaggagactgactcattnnnnnnnnnnnnnnnnnnnnnnnnnnnnnnnnnnnnnnnnnnnnnnnnnnntctgtagcgtgtgtcacttttggggcccctaggcactaaaggccagcagtaatcccatgtggtttctacaaaaaatatgccttctttgccaaacacacccatgaaggatgcccctactcagggtcccatccctttccatttaccaacaatattctttgaactaaaagtgatgtttttcaaatgccatttactgagtctctctcctttttaccccaggcatatgctatgatgctgtcactgtctgacaaggagtccctccattctacatcccacagttcttccaacgtgtggcacagtatggccagggctgcggcggaatccagtgctatccagtccataagccacgtatgacgttatcaaggttgaccagagtgggaccaagtccaacagtagcatggctctttcatataggactatttacaagactgctgagcagaatgccttataaacctgcagggtcactcatctaaagtctagtgaccttaaactgaatgattt

SEQ ID NO: 136382 - DNA, 1011 bp, Homo Sapiens
tcttttttaaatcattcagtttaaggtcactagactttagatgagtgaccctgcaggtttataaggcattctgctcagcagtcttgtaaatagtcctatatgaaagagccatgctactgttggacttggtcccactctggtcaaccttgataacgtcatacgtggcttatggactggatagcactggattccgccgcagccctggccatactgtgccacacgttggaagaactgtgggatgtagaatggagggactccttgtcagacagtgacagcatcatagcatatgcctgcgatttggactttctgtgtaacggctgcttaagttcctctggcacatgggaagtactaaaagaagacagctcagcttcagaatattgattatcttccattttcctcattttgaggctatctgtgaagtgccttatatgatctagagcagaaagtccacttttatattcttcctctttatacctcactggggatgtcttgcaactcatctccagggcactggtttcttcatagtcatcctcagggtttccttcatgtaaattacttgtcactggttcctttcctgtttttccagtaatatcattgtcttcatcctcctcatctaacaacacctcatcttcaacttcttcatcatccagcaagtctgaattttgactggtcaccaaagccttttcatctttaaaatgactgccattcattctctcctccacattcctgggagattggctgccatggttgctgttcccaatgaaatttcgaatttctgtgaagtaagcgtcttctttgtcatccagaatcgcacctgtactttccagttcagaatgaggcgacgatgttgctgtaccggacatgttcccattctcatgtttctttaggtgtctgtctaaattggtttgttgaccaaaacacctatcacataagtgacacttaaatggcttctctttattgtggatgttgcgaacgtgcctttgcaagttagaagatatgctaaatgatccc

SEQ ID NO: 136383 - DNA, 801 bp, Homo Sapiens
ccgtttcgtgttctgcattccattcttttagcccacggccagtatgcatctcaggatctggttgatgagggccccaggttctgtgatgagtctcgcccttttccctcagggcttctgcccaagcggctctggtgacgtcttccattggtgggtgtttttcgctcaggacctgtgtcgagaatcatgtcctgtgttgtcgtgctcttctcgcaggcctcgctgaccgcccgacgattttcatttgaggtactgctgatccattttatccaaggctgcttttcaattcattcctcaatcccttgttactttctggtgtgaggatctctattttccttaaacgttgaaaagcatcataatcagtctctccaaatagtctgattggttctcctctttctctcaatcttctgatgacctcttgcctagaaagcgtcataggtaatttttcctctgccagttcaagttctaacactggattcgatgaagttaatggtttctggtcctcctcttttggctgtatcttgtagccacatctttcaaaatatgcttcctcttctttttttggcgagctcactacgcttgaaatattttttattttccaccagcaggttcctgtcctccaccagctgccgcttccgaaggatctctgatttcagaatgtccatctcgccgccagaatttaagctccagtttcccgctccagctcctcgaacccagcctcactgggccggcggccgcgaacccactgagtatccccggccgtaatggccgaattcccgggcatatgtccggtaccgtcgactg

SEQ ID NO: 136384 - DNA, 470 bp, Homo Sapiens
agagaggctccaagtcagcgcactcacagttcctgagtctctcgtcttccacagacactggagctgtgcaaacttactggccgcgctgatgaaagtacatagattcattcgcaaataacatccccgttcccacttctggctcagattcagaaaggatacacagcgatgtaaggagtggcctgcttcacgttcccgttaaaatgaaagatacagagcaggaggatgacatcttgcgcgatgaggatggggtactccaggtaggtcagcggcggatacccatagtaacactggtaccgcagaaacaccaggaatcctgccagctccagaagtaaactcggaaggctgaggccccgcgcgctgcgcgccgctagcacagcggagatctgcggcagcttcagcgcggcgcacacgcccagcgtgctccagttacacagcccccagcagcgccgcctccatagcgccacgggcgc

SEQ ID NO: 136385 - DNA, 610 bp, Homo Sapiens
  misc_feature (532)..(532): n is a, c, g, or t
agccagcatgatcacaaaacgtagaagaattgcacaggtataggaagagaggctccaagtcagcgcactcacagttcctgagtctctcgtcttccacagacactggagctgtgcaaacttactggccgcgctgatgaaagtacatagattcatggccaggtctatgatccacttctgcagggcaaggatgaaccaagaagacacccatacagcgatgtaaggagtggcctgcttcacgttcccgttaaaatgaaagatacagagcaggaggatgacatcttgcgcgatgaggatggggtactccaggtaggtcagcggcggatacccatagtaacactggtaccgcagaaacaccaggaatcctgccagctccagaagtaaactcggaaggctgaggccccgcgcgctgcgcgccgctagcacagcggagatctgcggcagcttcagcgcggcgcacacgcccagcgtgctccagttacacagccccagcagcgccgcctccatagcgccacgggcgcgggcacctggcgancgcgtgggtcgacgatatcccgggaattccggaccggtaccagccctgctttttgtaccactgttcatagtacatgcc

SEQ ID NO: 136386 - DNA, 549 bp, Homo Sapiens
tccactgtgtgaaggaataatgtatccatcattcagcctttatagcggtcttccggtagcgaagtactgtcactgttacccatatatttacagccagcatgatcacaaaacgtagaagaattgtaaaatcattggtggtcattaaggttgtgattattcttgcatggccaggtctatgatccacttctgcagggcaaggatgaaccaagaagacaccaatacagcgatgtaaggagtggcctgcttcacgttcccgttaaaatgaaagatacagagcaggaggatgacatcttgcgcgatgaggatggggtactccaggtaggtcagcggcggatacccatagtaagactggtcccgcagccccacccggcatcctgccagctccagaagtaaactcggaaggctgaggccccgcgcgctgcgcgccgctagcacagcggagatctgcggcagcttcagcgcggcgcacacgcccagcgtgctccagttacacagccccagcagcgccgcctccatagcgccacgggcgcgggcacctgggcggccgca

SEQ ID NO: 136387 - DNA, 595 bp, Homo Sapiens
  misc_feature (110)..(110): n is a, c, g, or t
ataatgtatccatcattcagcctttatagcggtctcccggtagcgaagtactgtcactgttacccatatatttaaagccagcatgatcacaaaacgtagaagaattgtanaatcattggtggtcattaaggttgtgattattcttgttgcacaggtataggaagagaggctccaagtcagcgcactcacagttcctgagtctctcgtcttccacagacactggagctgtgcaaacttactggccgcgctgatgaaagtacatagattacagcgatgtaaggagtggcctgcttcacgttcccgttaaaatgaaagatacagagcaggaggatgacatcttgcgcgatgaggatggggtactccaggtaggtcagcggcggatacccatagtaacactggtaccgcagaaacaccaggaatcctgccagctccagaagtaaactcggaaggctgaggccccgcgcgctgcgcgccgctagcacagcggagatctgcggcagcttcagcgcggcgcacacgcccagcgtgctccagttacacagccccagcagcgccgcctccatagcgccacgggcgcgggcacctgggcggccgc

SEQ ID NO: 136388 - DNA, 989 bp, Homo Sapiens
tttttggcatagaacaagattttgttttcagagttttcttccttccccttcccccaattgttagcagcttgatgtgtcattctccccagcaggggagggggtggaatggcttgggttgtaaactccctcccccagccttcctgtcccttggaggggcagttcagctgggttctggttcagggtcaggcaggcagttaaggcttggctggtgcgagaaggctgggtgctgtgtcttcagagctcattcctccactctggctccacttgcagagacaggcccccttcaccctcccgctcctgggggaggtagtcatggctgtggggccctgaggtagaggggctgagcttgctcagaccttgcagtaaattctgtccctgttgcaggtccagtttggcagggaagggacacccggtataccctccgttttctttacagaactccaggaatactttccagtcagggtcatggcccaggagaagggggttccccacgatgatgagcagggccttggcccgggtcacagctacattgaacctcttggggttcttaaggaaacccagattaaagtccagatccagctgcacaaagctctggctgcttcgcacggtggagatgaggatgacgcttcgttcttgggccttggaattcttctactgaacccaccttcaagtccttgatgtcatccagtcctcgaagctccctgtcaagtttggtgatgcagtaacggattttctccacctgtttccggtacggggagatgacgcccacacttcgagggctcaggcgagctttgcccttcttggaggagggggccaggagcagcttcaggtaggaagtcactgtggcagcctcttcagggttgaagaaggatgggctgttgccttcacgctcatctttgcccattacgccgtgaaagatgatgggaaagccctgtcgagcctcgtgccgaattcggcgcgccgtcgacttcatactctctaacacctag

SEQ ID NO: 136389 - DNA, 1554 bp, Homo Sapiens
  misc_feature (110)..(142): n is a, c, g, or t
ttccccttcccccaattgttagcagcttgatgtgtcattctccccagcaggggagggggtggaatggcttgggttgtaaactccctcccccagccttcctgtcccttggnnnnnnnnnnnnnnnnnnnnnnnnnnnnnnnnnaggcaggcagttaaagcttggctggtgcgagaaggctgggtgctgtgtcttcagagctcattcctccactctggctccacttgcagagacaggcccccttcaccctcccgctcctgggggaggtagtcatgactgtggggccctgaggtagaggggctgagcttgctcagaccttgcagtaaattctgtgcctgttgcaggtccagtttggcagggaagggacacccggtataccctccgttttctttacagaactccaggaatctgtggggtacagaggagtgccagcagagactggaggctaagccacggtcctgtcccatctgagctgtacttgctcaacctctggatgtcatttaacttataaatacaatagtgatgctgtgaaaatggacacatctgaggattaactgagcgataagcaagcgcttaaaaaagatccacctgccctaggcaggggctgtggccactaagagggagaatggggtgggaatgctcacactttccagtcagggccatggcccaggaggagggggttccccacgatgatgagcagggccttggcccgggtcacagctacattgaacctctggggttcttaaggaaacccagattaaagtccagatccagctgcacaaagctctggctgcttcgcacggtggagatgaggatgacgcttcgttcttggccttggaattcttctactgaacccaccttcaagtccttgatgtcatccagtcctcgaagctccctgtcaagtttggtgatgcagtaacggattttctccacctgtttccggtacggggagatgacgcccacacttcgagggctcaggcgggctttgcccttcttggaggagggggccaggagcagcttcaggtaggaagtcactgtggcagcctcttcagggttgaagaaggatgggctgttgccttcacgctcatctttgcccattacgccgtgaaagatgatgggaaagccctgtcgaggtaggcccgcccagcggcagaagcgttctcgatccacgacatcagcacaggcctgcagctccccttcataatagagctggttaggaatgtccaggatggtgggatgagacctgtagttgcggagcagcttggttatgaactgggggtcatagccatcagggcccttcttgtacagggagttgtaggtgagcagccgctccagcagtgagtatcccagtccatgcttctgggtcagtggggaacgcagcacaggccccagctgccgagggtctcctgccagcaccagctgccctcctggatcacctgtttcctttacttccatcagccctgctatagctaccagactctcaggctccatgcagtggccagcctcatcgatgaagatgtggtgaagtatcctcgtccgaattcgccacccaggcc

SEQ ID NO: 136390 - DNA, 457 bp, Homo Sapiens
  misc_feature (263)..(263): n is a, c, g, or t
agggcccagggttgtatattcttaacagatacttagtgattgttttcaggaaagtttgaaagtcactgctctgagttcccgtgttctttgcaatgctgttttctttccttagaacactttgcaggccccagccctcagcaggattcaaccttcatgtttcagcttccacagcctacctcccatcccctttccctgggccgtgtcgcagcactggttcactcactgatctacaattgcccagtgacctctctgtaccctccttnggaaggcaagcttcctggggtagggcaccctttgacacccctggctggtctcagggcctgcctctttccccactaggtggtttcagtagaagaattccaaggccaagaacgaagcgtcatcctcatctccaccgtgcgaaatgccagagctttgtgcagctggatctggactttaatctgggtttccttaagaa

SEQ ID NO: 136391 - DNA, 588 bp, Homo Sapiens
gggttgctcactattcaatttttattatcacatcaccaccacgagaaggtaggtcggagagcaatcatttcattctatagatgatgcaactaaggtcccgaggttaagtgaggccttaaggtgctggcagaaagatcacacccagcgcactgctcttaccattggaatcagggctgtcggtccgctccaattgtctggtttcctgaacttattttcaagttcgccattgagagaaacctccgaatgactaattcttaaatttaagggtgcataataatcacctatggctcaccgctgcatttccgattcagcaggctggggtgggtagcgaagtctgtatttcaaatgagcccctcaacccaggtgacgcaggcggtgtggggaccgcatccggagggcgacctggagccgactgacttcacaaaggcctcctgccgcaaaccttcagcggccaccaaagccccggctgccggcggcggaccacctctctgccgcgcgcctaccggagccgcttggccctagtgctttccagcggatttcccctcaggtgcggagccgggtgccggggtcccacagccaaccactacc

SEQ ID NO: 136392 - DNA, 448 bp, Homo Sapiens
ttttatttataaatgatttttattctattttactcttgtgcaagtataaaaaggaaaatataagttatataaagtattcattcaacttttagaatccagctcttttgaataatttttaaaatcagcatcataggcattcatttccccaactcattcatcccatagcattgtcctctgtgccaagaagatcatttaattccataatgcagcaagaatgttctgttatctctgggattttcttccaaagccattgacagctacccgctgcatttccgattcagcaggctggggtgggtagcgaagtctgtatttcaaatgagcccctcaacccaggtgacgcaggcggtgtggggaccgcatccggagggcgacctggagccgactgacttcacaaaggcctcctgccgcaaaccttcagcggccaccaaagccccggctgccggcggcg

SEQ ID NO: 136393 - DNA, 519 bp, Homo Sapiens
  misc_feature (370)..(382): n is a, c, g, or t
aatgtctcctttctttaaatccctttaagtcatttgttggtcctattcattctactttaaagtagagtactcctgccctcctgtccctctttgttacctccagcctggctactatagatcctcattccatcaactgtggattattacaaggatctcctaactggcctctacctccagtctcttctttctaatttagccttgtcacacttgagagattctttttatgaaagcacaactctaataatgacactgactaaatttcggtgtttacctacttcctgtgaagtgacacagaaagccctcagcctggtatacaactttctataattttgcttcaatcttatctcccactcatcccttttgtggatcnnnnnnnnnnnnnaagactaactgctttatactagcatttaatgattcatatttttatataccatagctggtaaatacaagctacgtactttatttggtgagctactaaactataatctgttccaactctagagggaaaactggttatgt

SEQ ID NO: 136394 - DNA, 612 bp, Homo Sapiens
  misc_feature (257)..(257): n is a, c, g, or t
cagcatcatgtgccattttataattatatctacaaatgatacgacaactcacaagatttagggatttctgaatgtttgtgaaaatattttgttttgtctgctgcttcttgttgatgtcacacatacccaaagacattccacgggtttaacaagtcttgggcatcttgtggaagactcagattctcatccatctcagagatggatggggaacttgacggttttaattctgtgcaccatgattgcaagggtcatctggntccagcattttcccaaaacttctcttgagtcccattcacagagatatgcaatccaaccaatccctttgcaattgtgttcatgtcttcatgttggtgtgtcattttagtgtcttggcctgggttcccctcagaaagcatagcctgcaacaagggctttgtaagggaagattggtttggagagtgatctcagcagacaagagtcggggcctgagggtgtgaagcagggaagaaggtggtgacctgctccatcttatcttctgggaggatcctctgaatttgcagccttgtctcatttgttcacaaagaatccaaagccagcaacatcgatcagcttcttgctttttgtccaactact

SEQ ID NO: 136395 - DNA, 968 bp, Homo Sapiens
agaagctttcccaatcttgcttcaatccggcttaactacaacaagctgacagacaggggactccccaagaactcctttaatatctccaacctgcttgtgctccacctgtcccacaacaggatcagcagtgtgcccgccatcaacaacaggctggaacacctgtacctcaacaacaatagcatcgagaaaatcaacggaacccagatttgccccaacgacctagtggcgttccatgacttctcctcggacctggagaacgtgccacacctgcgctacctgcggctggatggaaactacttgaagccgcccatcccgctggacctcatgatgtgcttccgcctcctgcagtccgtggtcatctaggccctactccgccaccggatctgctctgaccgcacttgaaggctggggcccaggcacctgtgccggccattcgttttctctctctccctttctttctcccagctttgcctcccttatcccaccctcgaggcagggaaaagccatctattcttctgcagcctcaggagcgagacttcaaggactcagtttggttccacccagttgaaagacacccagtgcacacccaaactcctggccttctgtggtttccctttgctccagaaacacagatgtgtctaaagactgggtgtccccttctctctcctcccccacccgccactcctgggtacatctgggccgtggactatctgatctgggtcctggccgagcaaacagcccggaggtaaggttcagaaagtccccctggggactcctccatcttcggcagctctggctaaaagaggccgagaaacccagttctcctgggccaaggatcccttctggcaaagctgctgctccgccgcttggttccccggcaccagacatcgccctggccctgctggcccgggtatcgggaaggaggagcgagggaatgacggaggtagggtgcagggtcagggctcccg

SEQ ID NO: 136396 - DNA, 440 bp, Homo Sapiens
  misc_feature (302)..(318): n is a, c, g, or t
  misc_feature (418)..(418): n is a, c, g, or t
tttgacatttggatagtgccgtttattgttccagcaccccttcctccaccacgcccaggcctgggacaaacgggcacccgcctcctgcgcgctgcctctgctacccggaatccaggaggggaaggaacgactcgagctctaaggatgggacccggaaggcagaaaaaaataatggattggggcgggcggggagtcaaaaggtgggctgattaaaagaaaattctaaaagagaaaagggcccctggttctcttccctctctgggatcctctaaagggcctggtttctccattcctcgcagcannnnnnnnnnnnnnnnnggacaactgaggaagagcagggaaaatggccttccgcttggggcctggtcgccactcggcctctgcagttctctccattgtctctccggctcgcaggcgnataacttaggaagggcgggcag

SEQ ID NO: 136397 - DNA, 440 bp, Homo Sapiens
  misc_feature (217)..(217): n is a, c, g, or t
taaagctgaacaattttttatttaaaaaaaatgagttttaattaagaatatccacacattaagatacctagaaccttctatactttgtcagtgcaccctactctgttgaatgggaactggaatctgtcatttgagaaggcatttacatttagcagcaagattcaagtgaaagtccctgttccaggttctggaatatcaggctgtggtcagcatgggntctaatcaaaaggcagcaactctccacaacgagaattcagtttcagacacgccaagtcatcccgacccgtgtgggcccaatgttcagtattgcaatcgggagcttcttctcccaggcagtgaggataaacctgtaaccccgagtatacctgcaaggatgatcccaccaccaagagggagtcggcttcttttacacgcttgtgcacaaaatcaaccttgtcagg

SEQ ID NO: 136398 - DNA, 1240 bp, Homo Sapiens
aaaaagaatattatttattatcttctttattaatactcacatgtaacctttgctttttacacaaaagtctgctttagaagaatgcctcctcggcttatcatgcccaatggggctttttgtttctggaccacttcccctttctccacccccacccccacatccaaattactcttaacatgttcacagataccacgaatattttgtaaacaagatttgggttactggaacttgatttcattaacatcccacttcaaaatggaaggcaggtggaggacagggtaagaaataggagaaagaggacaagagaaggcaaagaagaagaggggcacctggtcagaacgttcaagtcttgccttttcttaggggtgtgtattttgtggctgttccttgaaatgcactgactcaaaacattgacagcaagtgtgtgtgtgattatttatatatctataatagaatatgtgggcttcctccgtttgagtctggactgtgtttatttaaacaacactacgatcctctttataaggtatcaccacagggaatcaggtctcctgggaaccccttttagagacggggcttccgaagcagggtcttgctgaggtctttgacctcctcagggctgttgacccgctcatagcccaggacggccatgggctggtagcaaaactcctccacctgtttgatctgctggaaggtgagggcggtccgccaggcattggcggcctgcgtggcattgcgtgcagataccacgaaaggcttggaggaggagcccgagccactggtcatgttcagggcaaactgctccatttcggggctcaccaacagtcccacaaaatcgtacactctccgtagtgtcttgacggggtctcccaccaggtcctcgtaccgcaccaccaggtagtggccctgcagccagtcagggggctgcagggctgtctgcagcgtcttagccatactattgcagatgacctccatagcgcccagagcgtggtagtctgcggggccgcccacgccctccttcttggcgccaagcttgtggcccgcggcctccaagaagggcatgcggtgagctcgcgggtctcggctgcgcaccacctgtaggctctcacggatgaggccgtggcgcgagcggatccgtgaactcgccaccgcgcggggatcacgcaccaagtggatgaccttgaggtccaggccggtctcgcagcctcgtgccgaattcaaaccaggcctcgtactaagcctt

SEQ ID NO: 136399 - DNA, 1036 bp, Homo Sapiens
  misc_feature (137)..(147): n is a, c, g, or t
  misc_feature (258)..(266): n is a, c, g, or t
  misc_feature (402)..(420): n is a, c, g, or t
agggggctccgccgcgtgcgaaaccccccctggtgttgaaaaaaaacccccccaagaagaggggcccctccagcaggcccccctttgaggagtttttgttcaaaaaatcgctctttaatttctcccccgggggcggnnnnnnnnnnngtggggaaaaaaaccacaccctcttttgttctgtgcccgggggtttttcgttgggagaacacaattaaggccccggtttcatttttcctggtgggggatccgggggggccnnnnnnnnntgggtttaaagaattttcttcggagggttaggggggtcttctaacaaatatccttttttttcagctttacatgctttggcccttcttctacacccttctgctttcgtcgtgagattccactgatttattcttcacnnnnnnnnnnnnnnnnnnnacgcatgaacaaatgtattagttaaccacctatgaggaaacactgagaaacatagccacacactctacaaagctccctggcccttggcacttggacccacacccacaccccacaaagccttgtctcttgatttctgcttccatgtcatgctgaccccctcagctccccactacttttcccccttacccccactttgttgttttcccatggaactcaatcaaacccagtttagacctactgggaggtgagctcccactggggttggggcgggccaccactgtttccagctgtattaagtcccgaatgggatgacccttggaagacacacctaataaatatgctcaatgaacgaatgagaccatcgaaattgcagtgagtgttcaatgagataaagactatcattgtgtaattgctcttaaaaaattcctgtaagtggaattgctgagtcaaagaatatgaaccttttagagaagctttttatccttcaaagaaaatacaattaggccagccctgtgagtttatccacactcaattcctagtgactttgggaaccaacagaataaatctgttaatttaagctagcatgcttgtagcaattagttatagaagtctcagg

SEQ ID NO: 136400 - DNA, 1059 bp, Homo Sapiens
  misc_feature (322)..(334): n is a, c, g, or t
  misc_feature (454)..(477): n is a, c, g, or t
  misc_feature (608)..(619): n is a, c, g, or t
  misc_feature (633)..(634): n is a, c, g, or t
  misc_feature (878)..(878): n is a, c, g, or t
ggtggtgtgggtgttttacaaagcgcgatgtcccggggggggagaggtttcacccacagggtgttggaatatataaaacgggtggccccataaatgggggaaggtgtttttttgccgccgccccccgtttttctcacaccacggggcgaaaaatttttatttcccccaaggggcggacaaagggtgtgtttgaattcccgccctgggggagttcaaggggtttcattcatgtccccgttttggggaaggggtttccccatgttgggccaggaattgcttaaaggggatttcccacccagttctttcgaaatgaagtgcccannnnnnnnnnnnnataattttggaatttcgaggcttcgcttggggcctccccggtgataagggtccccgggtaaagacccttcgggaaattcccttctggaattggttcaagaaaccgttcgggttccccccnnnnnnnnnnnnnnnnnnnnnnnnaatccaaccccttattctggcccgggtttccttgggaaccggtatggcccagtttcccttccttatggggccgggcgcccaaagaaaggttttgaaaactttttgaaggcccagggggccggcaaggttannnnnnnnnnnnggtatgtttggggnngggatctgcaaataagcactttattaccaaatagttcagcatcagaacaagaattctaattccaaaagggtttcctttacattacatgacattgtgagatacacattagaagaatctgagactatgttccatttcagtttctcttttgcaattaggtaatttgttttgatctaaaaagtacaaatttatctcattcttgttaatgctgtccatgaaatgtaagtatcagttccttctcagctangtgctttatagttatactggtgccaggttaagagacctattttatagtgagtgacatgaaagtcaactacaagaaaagcacattgtcattttcatttacagaggcaagtccctcttaacacaaagaaaagccccggccgtaatggccgaattcccgggcatatgtccggtaccgtcgactg

SEQ ID NO: 136401 - DNA, 896 bp, Homo Sapiens
ttttcggagggatttagtaggagtttattgccagtctgtgtctgggcagcggtcaccggactttgtccttcctctggggcataggtttcctccagaggaccaggaggacaagggtattgatagcaacctgcacgtggccgaagacggggacgccaaagctgcggtacaggaggccgccgaccgtgggtcccagagttcggagcagtggttgtacagaggcgcagaggcccagcatggtccctgtgtccgaggtggagacagccttgatcagcatgctgtcggtgaccacgttgagggtgcagaggctgaacaccaggccgggcaccaggaggcagaagtggaagacgctggacatccaggccatggccaggcccaccacgatgaagaccagcacgctggcccggagcagcaccttctccgagaagtggctgctcagctgcccgatgaccaggccctgggtcaccatctggaggagcccgaagaaggacatgaggtagccagcttgggcggcctccagctggaagaagtccatggagatgatggagaacatgaccatgaagagccctgtggggcagttggaggccaccttcaccaggaagatcctcgggacgtctggcagccgcagcagggaggcgatggccttcaggtcgaacacactggcccgggggccgcctggcagtggagcctgggcgtcagttttggcccctttggtgctggcggggatgcaggtgaagctgaggacagctcccaggagggtggccagggcagccaggatggccgggcactgaatcccgtacgcggagaccagggtcccgcccagcagggagccgaggatgactccgacgccgaagcagaggcccagccggcccagggccgcgggccgctcctcgggtgcc

SEQ ID NO: 136402 - DNA, 489 bp, Homo Sapiens
agagccgctggtgctgctccaagctgcgctgagtggcgaagagtgcgttgtggaggccgtcaagggaggcgttgagggaggcggccccggccccggcctcagcctcgcagcaccgcccgacattcttgacgtcgttgctcaggctctggagctcccgcgccagcccggccagggcggtggtggcggcttccttgcggcccgcgtcgtggctgggctccaggtgttctgccggccgcgggggctccgaggcctgctccagggccgtcactcgggcggccagctcgtcccagccgagcgcctgctcctgcagcccgctagcggcgtcctgcagggccacgcggatctgctcgtagctcaggggcagcggtcccggcgtctgctcagacatctcctccagcacctcctccccgaagagcgcggccagcaccgcctcggtgccgcagcgcgtcctccagcagggcggcgaaggcgctgagcagctggcgcacc

SEQ ID NO: 136403 - DNA, 483 bp, Homo Sapiens
ttgaggagctggaggggtggggagctagaggccacctatgccagtgctcaaggttactggaagtttgggctgccccttgttgcctgcacccttccctcttccctctccctcatctctgggaccactgggtacaagagatgggatgctccgacagcgtctccaattatgaaactaatcttaaccctgtgctgtcagataccctgtttctggagtcacatcagtgaggagggatgtgggtaagaggagcagagggcaggggtgctgtggacatgtgggtggagaagggagggtggccagcactagtaaaggaggaatagtgcttgctggccacaaggaaaaggaggaggtgtctggggtgagggagttagggagagagaagcaggcagataagttggagcaggggttggtcaaggccacctctgcctctagtccccaaggcctctctctgcctgaaatgttacacattaaacaggattttacagt

SEQ ID NO: 136404 - DNA, 484 bp, Homo Sapiens
  misc_feature (460)..(460): n is a, c, g, or t
tgtttaatttttaaaaaatagcctttaataaaaaatacaaaaatactgtatctttgaaacatgatctgtatattcagcaagtcctaagcttcctaatgtaaaataatctgtttaatattgtatttttatttgcaagtacattaaaacaaatcttattttacttgacagtaatatttatgatgctgacatcctcatagggcttatctgttttgggattgactttgacgttggagatcctctgtacaacttccattcctttagtcactcgtccaaatactgtatgcttattatcaagccaaggctgtgttggaggacaaatggaaaatcttggtaaaccccaatttctttaaattatatcctctggttgagcaaattaaagagaatttaagtttacgctcccctttagcatatatttaaaaagaagtacaataatttctcagcaataaaaatgtagcagctnttaaaagttatttccagtgtgtta

SEQ ID NO: 136405 - DNA, 937 bp, Homo Sapiens
  misc_feature (140)..(140): n is a, c, g, or t
  misc_feature (158)..(158): n is a, c, g, or t
ggtgggactccaaggcctttgttcatgccagggtttccctgggaaacaagtttggccccggttcccttaccttaaggggccccgccgcccaagggaaggttttaaaaacttttcgaggccggagggggccacaaaggggnaaatttggctgtgtttcncgggaaattagaaaataccttttattaaaaaaatcccaaaattcgtattcttggaaccagcatctgtatatccagcaagtcctaagcttcctaaagtaaaaaataatctgtttaatatggtatttttatttgcaagtccagtagagccaaatcttattttacttgacagtcatatttatgatgctggcatcctcatagggggatttatctgtttggggattgacttgggcgttggagatcctctgtaccaacttccattcctttagtcactcgtccaaatactggtatgcttattatcaagccaaggcgttggttactcccgttatgaaaaactgggatccattagtatttgatcccgcgttagccatgctgagtgtgtacggcctgtcatgtcgtaatgttgaatgaaattcatcttcaaattctcctccccatatgctttctcctcccataccagtacctgttggatctccagtctgaatcataaagcccttaattatacggtgaaatgtatgcccattataataaccatttctgctgtgaacacagaagttttccactgtcttagggcactcaacaggaaaaagtttggtgtgaatgtctcccatgctggtgtggataatggcactgtccgaaactcgtttaggtccttcagcttgagtagctgccatgacttcttctttagaaggtttctcattaaaaacatctcgatcagaatctgcacttttccccggccgtaatggccgaattcccgggcatatgtccggtaccgtcgactg

SEQ ID NO: 136406 - DNA, 960 bp, Homo Sapiens
  misc_feature (40)..(40): n is a, c, g, or t
  misc_feature (102)..(102): n is a, c, g, or t
  misc_feature (134)..(134): n is a, c, g, or t
  misc_feature (141)..(141): n is a, c, g, or t
  misc_feature (167)..(167): n is a, c, g, or t
aaggatgagactcctaagtagtatcactgctacgatgtgntagcttaaagtttggagatctactgacattatcagagcagttgaatgtttgcacactacttngcatagacagtggagtcaatgctgctgctacntgacctntggcaagtatcatgtctcactgttcntcatctatatgaaaaactgggatactgatagtagagtactgtgatactacataaaactatgtgcctggcagatgtagtaccatttttccttcttcatcacttagtgcttgatccaaaaacaaaaactaggtaatttttataattttgtgttatggcatagcaatagagctaggttaccttatactgtatttcatcaaatctaatgtattctgatttcagagatactaaaatgtgggggaaattgtctcaaaattgtgaattcatatactctaatctttgtattctaaagacaaggaaataggctcacagaagtgaaataatttattttaggttacatcatcagtagaggcagagttgagattgaaactcaagtatcttgaatcgtagtccattgtatttcttactacagtggcagtattgttttaccaattctaaactgattagtcacataattttatattcttgatcattttcatatttgtattctgctagatgatataaataatgcagaaaatacagaataatgcagctcttctactgagttcactctcttacatcataacctatcaatctgtagtttataaacaatgatactgtacttaccgttggtactaccgttatgaaaaactgggatccattagtatttgatcccgcgttagccatgctgagtgtgtatggcctgtcatgtcgtaatgttgaatgaaattcatcttcaaattctcctccccatatgctttctcctcccataccagtacctgttggatctcccagtctgaatcataaagcccttaac

SEQ ID NO: 136407 - DNA, 599 bp, Homo Sapiens
ttgagtagttgtaagcatccgagggatcagttcccccataaagataaagcctccagttgctatggtgatctccggcagaggatgcccgtagaaagggaaatcaaaggacaagaccactctcaaagcctgccggtgggtgttggagagtattgtgtggatcttcacttggctccggttggcctcggccacatcaccccccagttcccggctgtggggctcgctggggccatagagacgggacacataatagctgtggttgtcctcaccaccctggtcctgttatctggcagcgtgtccatggccagggtgccccacccaggtcctggctcagctgggtcctgtccggctctgacacatgcccagggctctctcgggctctccggttccagccccgcacggtccctttggcagcccatccagagcctgggccctcatcgtgacctgctccgggctgggggctcagcgcccgggcagcctccctgagcaccagcaccaggagccagagctcgcctcgcatggtgggtgcccggacctgcccccggcctgcttgctgccccggtcctgacgagggagggggccctggctcaggctgcggccgc

SEQ ID NO: 136408 - DNA, 585 bp, Homo Sapiens
  misc_feature (196)..(196): n is a, c, g, or t
  misc_feature (341)..(341): n is a, c, g, or t
  misc_feature (363)..(363): n is a, c, g, or t
  misc_feature (517)..(517): n is a, c, g, or t
gttttgttttgaaagaataactaggtaatatatgaaactagtttcacactctctggttggtaaaagagatgctgggtgagctacagtaaaggcagccttttaccaagttaccacctattaccgtcaaaagccttcaatagaaagcaaagctccaggatcattctgtttctgctcagtatcagacagataaccttanccctcaaagattctgggttctgagagaacaaactggcccaggatgctaacttctgcttcaaagtgaatctggggccgtgtggggcaacaagcactttgtttgcagtctaatattttccaccacttggacttcactagcatccctncggttaaagacaaggctagggntagtagggtaaagcacaatgttttacaatgaaagggcgcttcactggtcagcgcaggaaataagtacaggagcctgcggcatttcttttggctgtccatcatgggagacgcggagcagtactccagaaatgcctgccgtgtctgcgttctttancctcgctgcgctggctgaagtggcagccatggaaaatgtgcacagaggtcagcctcgtgccgaattct

SEQ ID NO: 136409 - DNA, 484 bp, Homo Sapiens
  misc_feature (13)..(13): n is a, c, g, or t
  misc_feature (62)..(62): n is a, c, g, or t
caggctggtcgcngaactcctgaggctcagggaaatcggcccaacttcaggcctccccaaangtgttggggattacaggcatggagccaccatgcccagctgctcctttattttaatccctaaatataatccctaaatatagttatatttcatacttagtttgtttttaaaaagttttctctgtagaaaattttaatcattcataccctttacctttaggtttttctttctatacattcagtcaggcactgggatcatctgtttacaggcattatatttatttggcactcctggaacaagtatatctaacccattcttgatttttggactattcaggtgaactatttgaggggtatggggtctagaagttaaaagatacgcatgtcttctgttcttttcccgtatcaattcattccttcatctctttggccaagttgttttcctttcagggcctgtccttccagtttagaacagtaccatgaat

SEQ ID NO: 136410 - DNA, 596 bp, Homo Sapiens
  misc_feature (526)..(526): n is a, c, g, or t
gtctttcaaaaaaatgtgaaaacactttaatataacttatactgtttctacaaattagatgtaagaaataatttcatttagtcatagtacaataaatttgattaacaaaatcccaatttacaaaacagaagtaaataaatgcagaaatatattcattatcaaattataaaataaaagtaacagttattgttgagatagcatcagtttattcttcatttcagataatagagtcaattattttggtatacttagtaatgtttttgcaagtattaaaataatggaacgttgagatttaaacacaatgacagtaaaccattgaaatttcaaattcactttatacagccaccatgaatccataagtgaatgttaacatgtaaaaaaatataaaatgattgtaatataccactaaccattaccatatgggttttaagccctattaactgctaattgccctgaatatagtgtgctttctgtgagcatgcaggcttgggcctagtctaattgaatgcctagtgaaattccaagnataaagggccttttccaccattgtacattttaaacgtggtcactttacattgtggcgcaccattcctaac

SEQ ID NO: 136411 - DNA, 634 bp, Homo Sapiens
  misc_feature (47)..(75): n is a, c, g, or t
  misc_feature (249)..(249): n is a, c, g, or t
  misc_feature (591)..(591): n is a, c, g, or t
gccatatttttaaaatactttattttttacataatactgtcattacnnnnnnnnnnnnnnnnnnnnnnnnnnnnncattcgggggttgtcaaagtgagaaaacctaaagaccccaccccaggatctggctgaagcagtcttcccccagcttcttcactatgacctttatacaactatgggggtggggtgggatcacacaggcataaaagggctggaaattccccacacagccttccaagggtaagaaantgattagcttcacatatcacaaaagtgggatttggaagtttgggggtggctaggccctgagttcagaggtgtggggaaaaaccttgtgacccttgaatctcttgggtggggaatagcttgccacctgaccccaaagccctttcccttcctgatgaaggctggtagatgggccctgtcccccacttcttagccttaatacctcaggccccattccctgccctccacccttgaacactcctgagagcagcagggaggacagaacctccagctctgcaggtgtaggcagggcagctgttacggaggctgctgaggtaggctctggactggagaggcctcgggatnccacctcggccggcgagcgcgccggccttcaccttcattgcgc

SEQ ID NO: 136412 - DNA, 1910 bp, Homo Sapiens
  misc_feature (75)..(226): n is a, c, g, or t
  misc_feature (234)..(356): n is a, c, g, or t
  misc_feature (409)..(481): n is a, c, g, or t
  misc_feature (528)..(566): n is a, c, g, or t
  misc_feature (570)..(581): n is a, c, g, or t
  misc_feature (775)..(836): n is a, c, g, or t
gaaacccccccggtttcaaggcccgacccgttgccgctttatccgggtaactaatcgttcttgagtccaaccccnnnnnnnnnnnnnnnnnnnnnnnnnnnnnnnnnnnnnnnnnnnnnnnnnnnnnnnnnnnnnnnnnnnnnnnnnnnnnnnnnnnnnnnnnnnnnnnnnnnnnnnnnnnnnnnnnnnnnnnnnnnnnnnnnnnnnnnnnnnnnnnnnnnnnnnngccagttnnnnnnnnnnnnnnnnnnnnnnnnnnnnnnnnnnnnnnnnnnnnnnnnnnnnnnnnnnnnnnnnnnnnnnnnnnnnnnnnnnnnnnnnnnnnnnnnnnnnnnnnnnnnnnnnnnnnnnnnnnngatcacaaaaaaaagcccgctcattaggcgggttaaattcccgggtactgcannnnnnnnnnnnnnnnnnnnnnnnnnnnnnnnnnnnnnnnnnnnnnnnnnnnnnnnnnnnnnnnnnnnnnnnnaccactttgtacaagaaagctgggtcaggaaacagctatgaccatgnnnnnnnnnnnnnnnnnnnnnnnnnnnnnnnnnnnnnnngccnnnnnnnnnnnnacaaataaacggggcttttattgtgtgtccacaaaaacaaagtcagggtggcctttggttaatcccctccccccaacaagatgacaaaaggaggaatgcatgtcaacaaaatgacaaagaggaccatggagggcctgagtctgctgcctccctggtgggacaaggcagggggagcaagcactactctgggctannnnnnnnnnnnnnnnnnnnnnnnnnnnnnnnnnnnnnnnnnnnnnnnnnnnnnnnnnnnnnactgctaaggcagtcagccaggacttccccaaagacctagctctgaagcccagaccctcatggctccctctagaaggggttgccttcttcagcctgcatgaagtggtaaatgaagaagaggacgatcacaaagaccaggaaaagcagcagctggccccagagcgggacctggcgatcctggcccagcccagccccaggagcacggttttcaggccggatggcacggcgggtgagccatgaaaaggaagatgatgaggaggacataaaagaggtggaggaggcagtaggataataggccaggtcccgggaggctcctggaggctgaaacagggcggtagtgcgtgatgctttggtaggcactgtcccggccgtacatggggcgttccctattcttgcactcctcttcagaagaagacaaaagatcgtcatcatgcaccctgttgatggaaagcgtcagcatctgggaatgaagtcactgactggcggacagccctggacgggccggcagactcgggctccccataagtcctgctggtgaagtagctctcttcatagtagtcgtcattgtagcccttgctctggtagagtaaagcgtcctctttcttgggaagatcatacatatctgcatcccctctagtcgaattcaagtcagagaagctataagaggaggcggcggacgagctggggggcgagagccgccgcctctgggtctcgtactcgaagatcttcttctcgtaaagcctacgagttgatcctactacaggcccgtgcgggatgttgtaccggcgcagcaaggtggtcagctcggtatccgaaagatctgcgtagttgtccatggcgggtgcgggctcaggcggaggcctggcggcggcccgggcctaccaaaaccggccgagcaacggctgccgaggagcacggcgggggcggcacgagcgcatcgggagcggccgcgctcgcgtcacagccgaatcgttgtcgcgtcacagccgaatcgttgtcgcgtcacggccgctggctccgcaggctgcgcgcgctgccctcgtgccgaattcgccacccaggcctcgctaccta

SEQ ID NO: 136413 - DNA, 214 bp, Homo Sapiens
aaaattatttaaaatagcgatgaggtctccctatgttgtccggatggttctcaaaatcctgagatcacgtgatcttcccatctagcctcaaaaatgctgggattataggagtgagccacagtgcctggctgcttgtgtggttctgtttgttgcacagaattaagcttggagaattttaaatcagattggcagtatctaaagttaaagaataatt

SEQ ID NO: 136414 - DNA, 847 bp, Homo Sapiens
  misc_feature (97)..(97): n is a, c, g, or t
  misc_feature (685)..(726): n is a, c, g, or t
gctgttttgttccgaatgtctgaggacaagccacaagattacaagaaacggctttcagttgagctgaccagctctctcttcagaacagagccaatgnttgcgaatgaggtagggaaatgtgagcagttatttatctggtagtttcctagagcaggtatggcagcttgttctttcctctcaaaacacttagtacacattcatttgcattgatgtttccctggcttgagtatttcttctttatgctgtctagcaactgctctgaggaagaactataatacaagctttaaagagtctgttcagaatcattacaaataagttgtgttatttaaaattataattcataagggagaaagatgaaaaatgttaccagattaaagaagatttttcaaaaggatgtaaggaaagaggcagtgttaaacactgttaagaggacagtttatcagtattttttactaaactttaataaaccttttctatttgaatttctgctatgaatttttcttcagcatttgtcctcagtacaggtggttccttgaaacattgtttctaataaaactagaacatcctgatattttatccattctatagagatcattgatggtacacagacatacagtggattatgtttgttgagtgaatggaaagagagattgttaggtttacaacgatgcagctcttgagaccnnnnnnnnnnnnnnnnnnnnnnnnnnnnnnnnnnnnnnnnnnttagctgggcatggagatggatgcctatagtcctagctactggggagacgggggcaggaggattgcttgaacccaggagttaacagactgcactcagtgacagagccagactccaacacaa

SEQ ID NO: 136415 - DNA, 639 bp, Homo Sapiens
  misc_feature (597)..(597): n is a, c, g, or t
tttaaattttgaggaacaacttgaagttggctaggctgctcaagactgtagttgatgataattttggttgttccatcttgatcaaccaaaggaagactgatggctgaaataacagaatggccaccttgttgtatgggtgaagcattgattgtttcttgttctttggatgcaagattggcttgattattctccaacacttgccttattacattaccatctaccgccactttaagtacattctgaatatcacttaaattgatacttatgggagacaccaaaccaactgttggcagaacaacagcttgcaccatgccctgaggagaactggttgcctgtaatgggccaccaccagtgaaaaccccattttgtaaaggggttgaacagttgattcctgaagcaaccactatgggtttgaattcataatccacaggttcagttttaatttggttaacagaaagttgttcttgaaggggtttattcctctatcttttgccgtatctgtggtcgtgtgggacttgcctgtgatgctgtaagagacggtgaagaacactgagatgtcttgagtcctgttcttggtcgcccattcacaggtatcangctgatacatttcttactggttatttgtgacctataagacca

SEQ ID NO: 136416 - DNA, 601 bp, Homo Sapiens
  misc_feature (29)..(31): n is a, c, g, or t
  misc_feature (58)..(58): n is a, c, g, or t
  misc_feature (102)..(102): n is a, c, g, or t
  misc_feature (106)..(107): n is a, c, g, or t
  misc_feature (130)..(130): n is a, c, g, or t
  misc_feature (132)..(132): n is a, c, g, or t
  misc_feature (139)..(139): n is a, c, g, or t
  misc_feature (245)..(245): n is a, c, g, or t
ttggtggtgatggaaccagaagccctgannncccctgaagactcagaaattaaccctnttaaataattgtaaggcttgcattcagggaaaaaagaaaacggncccnnctatgtccagctgtaggacacangncaagcanattgatgagcagcagcgagagatgccggcttctgccggccttcatagaccggtcatacgggcacatgggtaacgccggtctggtgaagaagatcttcccaatgtcntacagcccagtcaaagtggtcttagagaagctgagcaaggacacttcactgggtacctgttagttgggtcaggtaactttatcccagaacataccaagctggacgggaccttgaagatcatctagtccagactccctcattttaccatcaaggaatctcaagcgcagagagggagagaattctccacaaattccatcatcgagaagagtataagtgggaagtcttgtttgttgttggtttttgtctgttgtttttcactgcacctctttggatcatgatttgaaaggggcatatcagaaatcaacacattttccttatttgagtttcagagtgggcatcacagtaattctttgtct

SEQ ID NO: 136417 - DNA, 313 bp, Homo Sapiens
  misc_feature (215)..(215): n is a, c, g, or t
  misc_feature (258)..(258): n is a, c, g, or t
  misc_feature (277)..(277): n is a, c, g, or t
  misc_feature (288)..(288): n is a, c, g, or t
  misc_feature (301)..(301): n is a, c, g, or t
tttaaatacagaagttactttatttgggttcacgttgtaaaataaaattgtcttccagaaaattaaaatataaaacaacttaatagaacgtaatagctaattatttacaaactcattttaaagactagaattttaaatcgaaggttgtgccactttttccctaagtctgatacacttagatcttgaagccttcgactatgttgaaagtgttttcncttgcgtgaactattaatagaaaagttttttcattaaaataanatttggtcagggaaagatncccacctaaanttggcttaaaaanttaatatataat

SEQ ID NO: 136418 - DNA, 707 bp, Homo Sapiens
  misc_feature (333)..(350): n is a, c, g, or t
ccttcttcaggtttaaatactccaattttccctttctctaaacttagaaatttccatgcatcaccctcttctagaattcatccctcaccattccttatataattgatttattgtaaagactcagaaataaatcaaacattctactaagaaaaattgagaaggggagctctgggggtggaaacatattagggtaaaagacttaaaattggaggcagcattatcagaagatgaagaacaactcagggatggggtgggaagaagacaggtccttttctgtacttcctagacaacctccattattccctaagggaatcagtgttgtgtctgtctacnnnnnnnnnnnnnnnnnngccacgtaattttacaaactctcccttttctaggcacccgaactctctgccatcttctctcctgggatgcagtcatcccatttgtatgcctcatacttcctctaccctggtagattctttcaagatccttgggctttactttcctcacataactcagttattctgcttctagtttaccattttattctggaaattgagagtcccatccaggggtggacttatgacactactgaaacttagacttcaaggttcctcacctacagggccctcttcctgtgctctaataatatagagggctcgatggatatgtgttcatatggtaacaggcttttgtaaaaattgcagaaataagatttt

SEQ ID NO: 136419 - DNA, 481 bp, Homo Sapiens
  misc_feature (26)..(26): n is a, c, g, or t
  misc_feature (39)..(39): n is a, c, g, or t
  misc_feature (56)..(56): n is a, c, g, or t
  misc_feature (111)..(111): n is a, c, g, or t
ggtggcctttccaaaaggggccttcnttgaatgtgcaanggaaaaaggattatgcnttaagtcttgctccttgtaaagatgaagatgaaggttccaacgaaagaacttganttctaaagtttaaagccttgtaaaggggcttagccccatcccatctgctgggagatccggtttctcaggttttagccattaaactttcacctttgctacccgtaaactgcagtccaaaatagtcaacttcttatgattcccagtcgcctgcacacctggttgaggcagtcgcgtcgcggttggtttcgcctccacctccacctccatcagcaccgcgtccggcctcgtcacataacacagcatggcttgggctgccgctgccgccacagccgccttctctttggtgtgcgctgggtgccgccttgtcactggtgggacccagccccggactcggagagggctggccctcgaaggctgcagctctgcggac

SEQ ID NO: 136420 - DNA, 529 bp, Homo Sapiens
  misc_feature (500)..(500): n is a, c, g, or t
ttttcctggggtagcacttatctcaagtgtttgtaagaattcaaccctgctcacccatcaagtttataaagacaagaaaaactaaaagaaggattggaaaatgcactcggaccaagtaggtagctccccctccacctcaacaaaaggacctgcatggaaaacctaagttaagatggaactccgcatcaaaacaaacttgcctgtgagtatctctgggaaggtgcagcgggccttctaaagggaaccaaaggtcaatttgacattggtttattttagctcactttacctagtctgctcctgtaagatgagatgaggctccacgaagaacttgactctaagtttaagcctgtaaggggctagcccatccatctgctgggagatccggtttctcaggtttagccataaactttcacctttgctacccgtaaactggcagtccaaaatagtcaacttctatggattcccagtcgcctgcacacctggttgaggcagtcctcccngttgttcgcctccacctccacctccatca

SEQ ID NO: 136421 - DNA, 1162 bp, Homo Sapiens
  misc_feature (154)..(154): n is a, c, g, or t
gtacatgtgatattttattcatagaatccataaatggaagggaaatttctgagttcagagcaatacatatgatacaaaacttgatatatagactagagtttcttagccgaactggaggggctggcttaggtaatccatggattccctgaaattnggggacaccattggaaatatgtgtgagctcaggggcagtttcctatgatttttaggcctcaaaatgtctcttggactcaaaattgccttagggcagaggacgtgtgtacccccagtatagaatctcggacagtgaatgtgagtaaacattcggcagaaaatctctgccaaactgagtgctctgatgtgactttttcatcaagtcagtattcctgggatctcttgtacatggtaatctcactcttgtacatgataatctcactcttgtacatgataatctcactcttataaggtttcatcgtttctgcttaccctagttttctttcccattctgttccctctcccaccagactggactctgaaatgggcatgtacagagacgaggagaccccaacatgcttcaggctttgagtggagaggacacagcctctgctgggacagggaacagagggatgtggagtccctgaagatgcttttggacaatggtctgaggttgggacagtggcaggagataccattcacccaggatctccaggacaagagatcagcctggcagttacatgtgttttttttcaaactggttgccaggttggcatgagcgatgacatcagagattccgaccttcctgattggagggaccggactccgtggtgcctggagatcagttggacgacagtatcttctcagagctgttcttctactcctgacttgctcctaggcttgagaattgataacatactcttctggatcctagcagtgtccagaaggaaggccatggacagaacggagactaggttccgtaagaggggacagattacgggaaagatcacgaccagccgtcaaccgcaccgccagaatgagcagagtccccagcggagcaccttggggtaccccctccaggaggtgttggatgatgaagtgttgggaccatcaggtgaggggactggtggaagaagaggtgggataggattgactaagacgaaggaagggggccgggtgcggtgcgtca

SEQ ID NO: 136422 - DNA, 430 bp, Homo Sapiens
tgtgaaaagccaggtcgctacgattttgttggcagcaggactagccacagagtagggaagttttggggccaggccttaggttttcccagaatgccttgggtgatgccaccaagaaccttaagaactccctcttacattttccatcggttgcaggcatggcttttgcaactgataggtgctctgactacagatattctggtgtccatggcaacatggccttatggcttgtaatagtgggaacttccagctcactggcaatttcctggaggtggcaatatctttggcaggaaaccatctcttctgtcttggccaccagggtctgctccaggccctgaatgagtccacatcaatccatccttcttccctggtagtcattccctcttgggggaggggaaagggaaagggggtatttatcagacctattttgctc

SEQ ID NO: 136423 - DNA, 883 bp, Homo Sapiens
  misc_feature (115)..(149): n is a, c, g, or t
  misc_feature (863)..(863): n is a, c, g, or t
acggtctgtacagtttatacacagagatagggacccggcctgggccccgaacccctacaaatatagatcctctctacaaaatagagataatttagcccccccatagcagctgttnnnnnnnnnnnnnnnnnnnnnnnnnnnnnnnnnnngactccagctcctgccacccctcacggggtacagagggcaggggcagggccggcggggacatgaaggcaccgtcagcactgaaaggtggggaactcgtgggctactggagggaggccaaaggctgggggcccagggtctgggggcaccagagtggggcctctgaggtcagtgtctgtgaagggggtgcactagtgtctttggttggggctgaaggcaccgcaggtggggtcgggtggagcagggaccttataaatagagaggaagggaaaggggtgagggagggccgattttggggcctaggaacccaggagccgagtgtaggtgacatagagcagcagcatgaggaccacgtagaagacgacgaagccgcccagaccagaggggggccagaggggcggtagggccttgccccccacccgcttcatggcctccagcgcggtccgcagcccgcgggcagtgccctggaggagatccgagggcgagcacaggtcatcctcaggcacccccatttttcgacaggcttctagaaaactctccacattcttccgagccttgagggcactgagttttggcacagcaggggagggcacatggatgaagggcacggagcgcggccgtagctggttggccagctggcacaggatgaccccactgccagagcctcggccaggtcctcaggcaggggccgctgcagccgggactcaaggacctgngcagctgagtcgattaagtc

SEQ ID NO: 136424 - DNA, 674 bp, Homo Sapiens
  misc_feature (15)..(15): n is a, c, g, or t
gattcggaacgaggnggcattagataaccaatatacacatcttctgtacataaaaggggagaatgggaggcacaaaaaggagtcattgattttatttgctgttccaaaatccaggaaatgttggagtttcttttatcaggcctcaaagcagaagaataattctccgtggttcttggctctaccctctagactcttggttttgtcttctgagtcttcctttttcatcaaagctagagtgtgtttttacctgagttcttttctcaggctgcttctttccagtagaattttaggggaactagtggtctctattttgtactgtttctgtcctttttgatccaagatggcagtgtttctactgatacagaagattttgtgggcctcctgtgattctccttgggatttactccattagacaaaagccacactcataaatatcttctttatgagacctaagcttcttacagactctgtttttcggttgaaaggatctgtgaaacataatcttctgaacagccttttgtatgactgaatagcacaatcagccctccgtatccacaggttccacatcccagattcaaccaactgtggactgaaaatacttgagagcctggtgtggtgctcatgcctgtaatcccaccactttgggaggctgaggtgggaggattgcttgaggc

SEQ ID NO: 136425 - DNA, 919 bp, Homo Sapiens
  misc_feature (787)..(821): n is a, c, g, or t
ggggttctgaagttataaatgtcggacctgctgtcttattccgaggagaccaccgctggagtcgaaagggcccgaagggacaatttttggcagcacaaggtttgagcactttcgcagcaaaggaccttgaaagtttgttgcaagatttcaggatttggcaagaaccagaggcgaaaatggagtaccaatgccggcgaagtgggcccggcctctctgcggccgtgaggatggcgatggcgcctcccatggagtggcccagaaggaagacaggaagcccagggtagtctttctgcatggaatccacatgctgcaacacatccctgacgaaaacgtggaagtcagacactaccatcctctccccttcgctctgtccgtggccaacatggtcgtgggcgaacaccagcaggtccagccccatcagcatccgagccagctcttcatagcggccactgtgctctccggctccatgggacacaaagatgagggccttgggtgtgcctgtgggtttccagtacctgcagaagaggtactgtccgtctgcattgaccaggtgagggaggtcctggtagggaatgctctgcggggtccgcctgggggaactttcctctggcatgctggaagggtcttcaggtccggggccacgagcgccgctgtcgcgttccccgagcgcagcggatcctcgtttgcggcgggccagggccgggacgagctgcgcgcgaccggcttcgcggcgacccccggccgtaatggccgaattcccgggcatatgtccggtaccgtcgactgnnnnnnnnnnnnnnnnnnnnnnnnnnnnnnnnnnncgcacgcttcctcgctcactacttcgctgcgctcgtcgttcggctaaaacagcctatcccctaatatgagtcatcatcgtgtttttcttttgttttgc

SEQ ID NO: 136426 - DNA, 927 bp, Homo Sapiens
cactatggctagtcgaggctgggtgttaatcggcacgaggcttccccggtgcatatcacccggcgaagcccacccggttttcccagcggcatttccgatgacagcttcggggctacgtgtcctgtgctgtcggagacgcacaggaagcaaagtttgtgagaagccttgggggcgactttgccttgggcacccgcatttgtgcgtctgcgaggtgcctcggtgtgcgcggagctagtttcccagtttcccgggcccctcccttctccgagcccctctagcgatttgtttaggaaaagtgatgacatgaactagtagtggagaatcgcagcgccgctccccgccctggggagggaggggagccccggagagcctgccggtgggagctggaagcaggctcccggctgagcgccccagcccgaaaggcagggtctgggtgcgggaagagggctcggagctgccttcctgctgccttggggccgcccagatgagggaacagcccgatttgcctggttctgattctccaggctgtcgtggttgtggaatgcaaacgccagcacataatggaaacaggacctgaagacccttccagcatgccagaggaaagttcccccaggcggaccccgcagagcattccctaccaggacctccctcacctggtcaatgcagacggacagtacctcttctgcaggtactggaaacccacaggcacacccaaggccctcatctttgtgtcccatggagccggagagcacagttggccgctatgaagagctggctcggatgctgatggggctggacctgctggtgttcgcccagaccatgttggccacggacagagcgaaggggacgaggattggtagtgtcctgacttccacgttcggtcagggatgtggtggcaacatgttgattcccttgccgaagactacc

SEQ ID NO: 136427 - DNA, 1168 bp, Homo Sapiens
tttgcaagccatatctgagaagccatctctgcccttcccctgcctgcatcccccagaccatgagccgggcaccggccaatgcattcagggtggggacgcagttcctgccgtggctgtcctttgagagacccacatgtttatttcatggaagacggagttggtgacttcaggaagctccttgtggagaacatggtaggcaccttcataaatcttgagagtcttgtcctggctcttggctaactccatgagcaggtaggcccctttgctgtcacataggcgatcggcagagccctggagcagcaggaagggcacagtcagcttggggagggcgcgctccacccgtgagacggcattcagcagttggatgccgaagcacaccttcagccctgcccggcagatcagggggtctgagttataaatgtcgacctctgtcttattccgagagagcacgctggagtcgatgggcccgagggacaagtttggcagcacaaggttgagcactttcgcagcaaggaccttgaaagttgttgcagattcaggattggcaagaaccagaggcgaaatgagtaccatgccggcgaagtggcccggcctctctgcggccgtgaggatggcgatggcgcctcccatggagtggcccagaaggaagacaggaagcccagggtagtctttctgcatggaatccacatgctgcaacacatccctgacgaaaacgtggaagtcagacactaccatcctctccccttcgctctgtccgtggccaacatggtcgtgggcgaacaccagcaggtccagccccatcagcatccgagccagctcttcatagcggccactgtgctctccggctccatgggacacaaagatgagggccttgggtgtgcctgtgggtttccagtacctgcagaagaggtactgtccgtctgcattgaccaggtgagggaggtcctggtagggaatgctctgcggggtccgcctgggggaactttcctctggcatgctggaagggtcttcaggtccggggccacgagcgccgctgtcgcgttccccgagcgcagcggatcctcgtttgcgcgggccagggccgggacgagctgcgcgcgaccggcttcgcggcgacccccggccgtaatggccgaattcccgggcatatgtccggtaccgtcgactg

SEQ ID NO: 136428 - DNA, 946 bp, Homo Sapiens
taatttgtgtaagaatttcgccaattcttgattgttgtttgattttttggcaaccaaattctgggaaccattcttggcctttcgcctgctgccatccccccagaccatgagccgggcaacgaccaatgcattcaggttgggacccaggttcctgccgtgccggtcccttgagaggacccacatgtttattcatggaagacggagttgttgacttcaggagctccttgtggagaacatgttaggcaccttcataaatcttgagagtcttgtcctggctcttggctaactccatgagcaggtaggcccctttgctgtcacataggcgatcggcagagccctggagcagcaggaagggcacagtcagcttggggagggcgcgctccacccgtgagacggcattcagcagttggattccgaagcacacccttcagccctgcccggcagatcagggggtctgagttataaatgtcgacctctgtcttattccgagagagcacgctggagtcgatgggcccgagggacaagtttggcagcacaaggttgagcactttcgcagcaaggaccttgaaagttgttgcagattcaggattggcaagaaccagaggcgaaatgagtaccatgccggcgaagtggcccggcctctctgcggccgtgaggattgcgatggcgcctcccatggagtggcccagaaggaagacaggaagcccagggtagtctttctgcatggaatccacatgctgcaacacatccctgacgaaaacgtggaagtcagacactaccatcctctccccttcgctctgtccgtggccaactggcaaaaggtgggtttccagcacgtgctcgctccccgccttctcccattccctccctttgtatggtttcagaggagaaaaatgtataaattctggcattctcttggtgctcgcatccttccaggggaagatcc

SEQ ID NO: 136429 - DNA, 769 bp, Homo Sapiens
tttcacaatcaatacaaagtcatttttatttttaaattagcaataaaataatcaagtttacatctaaaaaatacaaacaacaacaaaaaccttcacatgttgtattccaaactgtaagccccaggcctcaatgtcagaggagagcaaaggcctttagttattttgtctcttgttgctggagcccatccactgtctgacatcatagccatgggcaagaggatattgccttggctctgtctgagtgctggattgtgaccggccataagtagcctttgcaaaggaagctaatggacagtgcctgaattaagggtgcttaccctatcctagaaagcgttaaagtcaaagcggaaaatatacatggtacccaaaatcaaggagactgccagagaccagcaggggatctaagggatttaccactgggttagcacagacactacacttgaagatttcctagcggctgctgctgctgtttccatgataagaattcagtgagacaaagaacctgccaagctcattaaccgagtagcaggaagagctactgtgtagcctctggtgttccccaactgactcagccctgcagatgggacatcctgtaggtcatgtgaatatcaagttactgagggatgttctcaggacaagcctagcataggcaccaggtgggaaagggtgtcaaaaaattataccttctgtctgctaagcagaaaaacttaattgggatcaatttagctcactccagagttctcattttattctcccagtattcatcccc

SEQ ID NO: 136430 - DNA, 751 bp, Homo Sapiens
  misc_feature (481)..(481): n is a, c, g, or t
cattgacctgaaaaatccttgcttctctttttccttgagttgctctgaatgactaatattttcaggacttttccatggatcgaatgctggttgtctttttgagtggttggttccagaactgctctctgatggtagagaagaaactctagttgacacattattttcatggaaagaattgtctggacgtggagatggcactctgtaaaagctaccaactctccttggcacaggatcattgtataggtgtctattttctttgggggctgtgccatcatcagagtgtgggtcatgatacactccaccctcagacttctgggcgtggtatgggaaggaagaggtgccttctctggaggtctctttgaccgaagatcttgccacagtcatctctggagggagctgttctccaggctggggtgacaagagttgcaggctgttggctctagctgccatcccttgccctatgctcaagcttccatccaanccttggctctcactttgtcacgggtcacatacatagaatgcctatgaggacgttgctgggaagaaaaggggctggtgtagcccagtccataagaaaaagattcgtgaggtgcagacagtgaatgggaatggctactgtccatgtgctccggcagcttcaattcctccatcgtcttagaatgtctggttgtggttcgacgtgagtccagcgttccctcatttcggttatttcttccagaagggctgagcaaagttctcgtgtcactgtgtc

SEQ ID NO: 136431 - DNA, 1527 bp, Homo Sapiens
  misc_feature (1351)..(1351): n is a, c, g, or t
  misc_feature (1458)..(1458): n is a, c, g, or t
cgcggcgccggaccgaggcggcttgtagcccacatctccgagcgaccccggcgcccgccccgcgcgcggaggcccgggcacacctcactggccgcttggcccatcccagtcagcgccgcgcgaaccccgtccgcgcgcgccgggagcggcgcccccgccgctgcctgcggacccttgggcctgcccctgcaacgggagccccactgcaggccccaccatggcgccgttcctgcgcatcgccttcaactcctatgagctgggctccctgcaggccgaggacgaggcgaaccagcccttctgtgccgtgaagatgaagggaggcgctcagcacagagcgtgggaaaacactggtgcagaagaagccgaccatgttcctgagtggaagtcgacgttcgattgccccacattcttattgaaaggggggcgcgttcatccacgattgtgctaattgcgggcagcagaaggagccagtgtctgaggttgaccgtgggtgtgtcggtgctggccgagcgctgcaagaagaacaatggcaaggctgagttctggctggacctgcagcctcaggccaaggtgttgatgtctgttcagtatttcctggaggacgtggattgcaaacagtctatgcgcagtgaggacgaggccaagttcccaacgatgaaccgccgcggagccatcaaacaggccaaaatccactacatcaagaaccatgagtttatcgccaccttctttgggcaacccaccttctgttctgtgtgcaaagactttgtctggggcctcaacaagcaaggctacaaatgcaggcaatgtaacgctgccatccacaagaaatgcatcgacaagatcatcggcagatgcactggcaccgcggccaacagccgggacactatattccagaaagaacgcttcaacatcgacatgccgcaccgcttcaaggttcacaactacatgagccccaccttctgtgaccactgcggcagcctgctctggggactggtgaagcagggattaaagtgtgaagactgcggcatgaatgtgcaccataaatgccgggagaaggtggccaacctctgcggcatcaaccagaagcttttggctgaggccttgaaccaagtcacccagagagcctcccggagatcagactcagcctcctcagagcctgttgggatatatcagggtttcgagaagaagaccggagttgctggggaggacatgcaagaccacagtgggacctacggcaaggatctgggagggcagcagcaagtgcaacatcaacaacttcatctttcacaaggtcctgggcaaaggcagcctttcgggaaaggtgctgccttggagagagctgaagggccanaaggaggagtactttttgccatcaagggccctcaaagaaaggattgtgggtccctgaatccgacgaacgaacggtgggagggtgccaccagtgggtttggagaaaancggggggtgcctggaacaacctttgcccgcgccaagaggaaattccccttttttcctcccacccccacc

SEQ ID NO: 136432 - DNA, 477 bp, Homo Sapiens
ggatcatacagaattttaatactataaaaacattagcactgtaaaaacagcaacatattatacagcctcaaaacagttttaaactgaagtctagtatgttcagaaacgcagggtgctgacccaccatccaactgaagctgagctcaggaatgcctaagacaactcataaaaatacacagcatcaagatcagtctttgtacattatttcaatgaaaaacacatagctgtgtacaaatatacagatctcaaactgtaacactgaaacacaaaatgcaacaaagtggctttataagttttcttcactgagacagaccttctggtgacttctggtgaatctagacatttatgattattaatacataataagcaagagaaatacagattttccaacctcatgatcagtaaattcctttgaaaaatgaatgaaggtatcagagtcatcaaaaggggaaacagttggtaagtttggcggccgca

SEQ ID NO: 136433 - DNA, 805 bp, Homo Sapiens
  misc_feature (274)..(274): n is a, c, g, or t
  misc_feature (296)..(296): n is a, c, g, or t
ggcccccgttctttggggttaaagacggggggtttattgaatttcagcctggcccatgcttttaattcactggaattggcaaacgagggtttttctattctgagcacggcgaaggttgttttcaaggtatcgaaggctcttccgcggtgtccgggggtagagtgccgcaaactcgatagcatctgatgagtcaacatcttgaccttggcgcgtgtgaaaggcagtctcagaagcttgccgcattcacgttgcccctgcattgagcagcacttgnacacagtccagatgctcccggncacaggcaacgtgcagaggggtcccaaaatggcaatcgtgcgcttccagattggccccgacgtcaaataagaagcctcaacacattcggaactcccgctcatgcaggcctcgtgcaggggggacgctgtgtacaggggagggttgaccttggccccgtaggacagcaagagcttcacacactcgatgctgcccgaggcgcaggcatcgcagagcggggtgctgccgtcgatgttgcgagcatccacctgggccccagccgccagcagcagctgcacacaccgcgcctggccctgcagactggctgcgtgcaggggcgtgatggagtccacggtgacctggttcacgcaggcgccgctctcgatcagctgttgcagctgcaggctctcaccccgctgggctgcctcgtgcacaggggtccgctccacccagaaacccacgtcgcccaggaagcagccgtccgccgcccggggctccatgcggctcaccggcggccgcgcggcgactctcc

SEQ ID NO: 136434 - DNA, 1049 bp, Homo Sapiens
gggtcctgtagggatcccagctggggaaggtgcaggggcctgggagactgcctctccgaagcggtgaaaccctcacccttccgtccctcccagccaccctccctaaaacttcccctgacagagggtggcagccccaggctctttgcataatcctgtggcttcgctgtcttcacccagcaccagcggacagggaagggcagagaaggccaccatggcgacactcctctcccatccgcagcagcgccctcccttcttgcgccaggccatcaagataaggcgccgcagagtcagagatctacaggatcccccgccccaaatggccccggagatccagcctccatcccaccacttctcccccgagcagcgggccctgctctacgaggacgcactctacactgtcttgcaccgcctgggtcatcctgagcccaaccatgtgacggaggcctctgagctgctgcgatacctgcaggaggccttccacgtggagcccgaggagcaccagcagacactgcagcgggtcagggagcttgagaagccaatattttgtctgaaggcaacagtgaaacaggccaagggcattctgggcaaagatgtcagtgggttcagcgacccctactgcctgctgggcattgagcagggggtaggtgtgccagggggcagccccgggtcccggcatcggcagaaggctgtggtgaggcacaccatccccgaggaggagacccaccgcacgcaggtcatcacccagacactcaaccccgtctgggacgagaccttcatcctgcgacgttgaggacatcacctaattgctaagcctttcactcttggacatgtgggaccctgtcaccatctgttggacctcttgtcccgactcgcaacgcccttggggctgcctccacgtccctccctgcattgcgcctttctgccccggactctttcccctccctcgccctctctctctccgtctatctggcctcgtgtcctatctttcctgtcggacccctctggcccctcgatctcttcctcgacccttccgcttgcccccctcttgc

SEQ ID NO: 136435 - DNA, 458 bp, Homo Sapiens
tttttaagaggacaatggatttgtttttattaatttttttgctaagaaagtttctaggtggcaggtgctgtccggggagggggcgtgcgcagcagacacagcagccaaactgtcctttctgcttccgtctgtctgtgccagccctgccgcctgccagctcttgctccctcagagccagaaggttcttggctccaggcttcctggcctggatgctggcagcccctggggagaggacccaggccccctctagtaatggccaccaccctccccccagggcagctggagcctcatctttggcagggtcccctctcccttttccaggagactctgtgcctgtagccctggtcccagtgaacctggcccccaccccagtggctggaacaggaaggccaggaggcagatgggccagggccaggagacagatggcccaatcccctgcccaccacagcagcttttct

SEQ ID NO: 136436 - DNA, 489 bp, Homo Sapiens
gcggccgccacctacgtgcagaaccagagcgaggactgcctgtacctcaacctctacgtgcccaccgaggacggtccgctcacaaaaaaacgtgacgaggcgacgctcaatccgccagacacagatatccgtgaccctgggaagaagcctgtgatgctgtttctccatggcggctcctacatggaggggaccggaaacatgttcgatggctcagtcctggctgcctatggcaacgtcattgtagccacgctcaactaccgtcttggggtgctcggttttctcagcaccggggaccaggctgcaaaaggcaactatgggctcctggaccagatccaggccctgcgctggctcagtgaaaacatcgcccactttgggggcgccccggagcgtatcaccatctttggttccggggcaggggctcctgcgtcaaccttctgatcctctcccaccattcagaagggctgttccagaaggccatcgcccagagtg

SEQ ID NO: 136437 - DNA, 337 bp, Homo Sapiens
ctttttgaatagtttaatagttattatttaaataaggctttggcgtgcttttccacatttttaggtttttttctctatgtgtacaccttgcaagatgtatcattaactcatgaaaccaccagctcctcaggcaacgaaaagggaggtagaaagaacgccagaaaggtgggtctgtgtgttctggggtgcgtggggcccgcccccgaggaaggtgccaaccgtaccctggagagcagaatcaccaggcctgggaaagccatgcgggttcgagagcctgcgccatggccatgctgggcagggccacggggtgcccaggcgtctgccactgaagaacact

SEQ ID NO: 136438 - DNA, 528 bp, Homo Sapiens
catctgtatgctctgacagttacagactgaataagttggagacttccctaaagggtggcatttccccagggtaacaacgcagagctcaggtgtgggaaggtgccaggggcaggggtgcagaggggctgaggctgaggggggtgcagaggctggagaaaggataacaggagagagtatacaggcatgccttgatttattgcacttcacaggtagcagaatttttaaagaaattgaaggttttgggacatatatgtgacagcaataggttaagaaaagcaaagcagagaaattgaagatttgtgtcaacactgctttaagcaaatctgttggcaccatttttccaatagcatgtgcccattttgggtctctacattgcattttggtaattgcttgcaatatttcaagcattttcattgttattatatgtgttatagtgatctgtgatcagtgatctttgatatattattgtaattgtttcggggcgccatgaaccgcacccatataacacggtaaacttaatcagcaaaa

SEQ ID NO: 136439 - DNA, 652 bp, Homo Sapiens
ttgttgttgttgctgtttttactcggacaatgcttattttacagcggaattgacaaataaagccttattttacacatccgaagaaacaccatcacaggaggtttgtaggtcggctgtgtgctttccaaaacagcaaaatagattcttcccatccaaccccctttcctcttgtagagtagggtgtggctcgtggggcttcgtctctctgcaggcacagaaactgggcagacctggtccctcctgagcgggccctgctcaagggaatggtgccagattttgaacacaggtaaacaggctccttcataacaacactgtgcatttctgtgtcattttgtttattgctcactgagttgttgccacctcagctcttggtggaaaacagtgggtgtccagaaattgctgacacaagaagatggattgcctatggtcgttagggacacagggcagccccagccagatcccagctggtcccatgcagggcatcagagggttattaaaccaggctgcacagagcccacagtatctgtctgaatctcttctttgatagggagatgcgaccaccggagcagtgtccatccgtgggggcttaagtgggctcaggggtgttgctgtggtctttaatggggtcttctctcctagcaagagttttaac

SEQ ID NO: 136440 - DNA, 963 bp, Homo Sapiens
gagctgccgaaaggtctggtcgcagagacaggaacgtgtaatcctcagcgtgctccagcccacagcttcgctctactgctcggcagggcagctggcctctgggcaccggcggcccctctgcctcgcggaaaagcctgatgaagtcctccgatattgatccggatttattccccgaacggttatctgcaagggtgtgcagtgcacagctgatctccgaatcgcagcgtgtggcccactacgagagtcgaaaacatgcaagcaaagtccgactgtattacatgcttcaccccagggatggagggtgtcctgccaagaggctccggtcagaaaatggaagtgatgccgacatggtggataagaacaagtgctgcacactctgcaacatgtcattcacttcagcggtggtggccgattcccattatcaaggcaaaatccacgccaagaggttaaaactcttgctaggagagaagaccccattaaagaccacaggtctgaggcgcaattacagatgtaccatctgcagttgtctccctaaactcaatagaacagtatcatgcccatctgaaaggatctaaacaccagaccaacctgaagaactaagtagtgaaagcatcaatcaagacataagaacaaaacattagcatttctctgccgtggagaattgcttatcaaccaccagaggaggcttctttcttgaacaataaacatttcttataaggattcacagattccacatacgactgatcttgatcttcggaactgactgcaggtttctttgaccttttccctttttctaatacggcggtacacgctatgatattctggatgggcatttataaattcttgccctgataacatatttagcacatgttctaaatcatagtcctatagcaaacagttggaccattatccaacctgaaagtttgcaacatttcaacttcccactaatatccagaattcctc

SEQ ID NO: 136441 - DNA, 578 bp, Homo Sapiens
ttttgggctggttattcaaaatgcactttttattcactttaacacagatgattttttacagttgaaagaaaatatttgatacacaattttgagttttttttagcagcacctgcaacaagaggattgtggaatacctcagaataaagtagagatggctggggcaggcacaaattaacctgatattcatcaatccactgaagacatatggaatctgaggcccctgaaagttagccaatacatgacaataaactaaataaatattctgtatgatgttttaacagaccattgaaaaacagtatagtcctaattagaaatatattattccaaaaatctagtgttctttaaaaaaacacctattgaaaatattacactgcacattctagggtacacagtcaatttctaaacctatatgcacagttcttggtactcacagatttcagcctttggtgttttttaatcttacccaaactgtatgtcagcaccccactgagtgttgcttacccaaatgccactgtttatgtcacttaatgttgagtgctttcattaagatattgagtggtaatttggtagaaaacaat

SEQ ID NO: 136442 - DNA, 839 bp, Homo Sapiens
  misc_feature (242)..(251): n is a, c, g, or t
tttgtcttatcttttgaaggtactttaattttgcagttattgattaattaaaaaacacagttgttttcagcatttcctagctacagtagtgcataggaaattccattctaaacaaagaagtaattaatgaaataacaacacaccttaacattttacattgataggttacagtttacaaggtgctttcacatacattatttcatttgattcttacaacaagcagaaaaaacagtgggaaagannnnnnnnnncaggcttacaatgagtattttcaggccaatgggcagttaacacaagaatataccaagaatgagacagcaatacccataagccacaatatcgtttttggtaggttgacagtttgattcaactgggtattcagcatcggtgagtgagaaaggaattaggacagacaccaaggctcttatgatattcaaataattttaagaacactgtcagagataagaagaaagatgccctaaaatatattgccttattgagacttacttcaaagcaatatacccttcaaaatatcagataaaaagacaatcttgtcatcgactgtgaaagttaggaggaatcttacaaactgcctaatccagttcttccattttacagacaagagaactgaggctgagatcatactgatagttttccagcctgaaattcagatgtcttgactttcagtctagggctccttcttacacaatgccatctcttaattatttactgagcataacataatatcttctgtttcaaatatgtaattttaggttaaatactgatttatgctacttacttcttattcaagtttttatcttattcttggctaaattgtg

SEQ ID NO: 136443 - DNA, 968 bp, Homo Sapiens
  misc_feature (371)..(379): n is a, c, g, or t
tttgttgttgttgtggtttaggcctctgtccatccttgaagacagcatagaaaaggacactaacataattcctggggagcacaaggtgagaatcctaaagtatgttacagagacagactgagcttcacaaaatgaaaccaacgaagatcacatatcactgactcagaagaaacaacagtctgcttaaacagagaaaaaacactgtttatggaatacatgaatatgagaaattgtaccatgcagagatgtatgtatttaggcatttcctgcctgataacctctgtcaccctttgttttcacctatggaacagagaagaatactgcaaggtaacaagctcaaaacataacctactgtcatagagatttgtgannnnnnnnncagatgtgcatgtaacttttacaagtgatcatggaagttatttatcaacttcccagagtttggaatttaaggagcaaactgagttattgtaggcaatacggtactaaagtgtcctataaaacaaacacatagctcttttttagtgcaaagaaatatagcaagtaagaaataacactataaatctaacttctttctttaaaagaaaatgtgcttatgcattcataacatccattaagggcactgggaaactggaaacctgaatccacaaggcctgaaaaaacatcaagcccttaagtcggctgctttttctacgtatataatgaaattgttaagtggagagagcaaggggaacccttcttataaaactatttccaatggaaaacaaagtggatgaatgacatttttacaaaatataaattcatgttcgtatcttctactgttatttgaaataagggttgaaatacctctctatgacaacatatatgtacgtgtgtgtgtgggggtatgcatacacacacatctacctatggaggaaaaaaactagatttttaggtaatcatagaaccaagcggccagcactataatgtta

SEQ ID NO: 136444 - DNA, 821 bp, Homo Sapiens
  misc_feature (635)..(635): n is a, c, g, or t
ttttttttaaggccaccaatgcttttatttatcgctttgcgtggagacaaagcacaagctccgagtgtgctgggagctctccattaactagagctcctggttggggtggagctctgggaaaagaagaggaccctgccagggagatatttcattggccagaatccagaggatggagcccattggttggaactctggttgaaactggaactctgagaagggtggagagagcccccaggtgggactctgggacagggggcggggcgaggagtgagggagcaggactctggtgggccaggccctcccactggctgggttccagcagtcggtggcaggtgggcaggcgcctacttctgggcggggatcattgtcgtcaatggactggcctttctccaacttcttctccatttccaccatgagcttcacaccatccaccaccagctgcacctgttctacttcggccgagcccagccgatcagcgttggacacgtcaaatactgagcccacgggaggtgtgtccacgccacctgtacccctcttttgcagacgacaggcgggtgaggatctcctcgaaacttgggtgcttgctcaggtgcgccagcttcacatgcacgcctccacgcagtccagtgcccagntggatgggcaggtgagcacgtagcccaagggctggttccacatgaaggggtggcccagcttttttaagatcttctcaattttttgagccctacgcaaagcgggggaaaacttcctcatggtggcccccttttcattgagatgaacccggagtgatcctcctcgtcaacccacccaggaagttttgt

SEQ ID NO: 136445 - DNA, 897 bp, Homo Sapiens
gttgtaaaacggagcggccagtgcctagcttataatacgactcccctatagggacccgcttgctacaggaaagctggggtacgggtaaagattgggcccctcgagggatactctagagcgggccgtcccttttgttttgttttgttacaatctcttttttattaagaaatcctaatgactgaggtagatgatgctgttgtcagataccgaagtaatttggtttaagatatgaaaatgatgaaaccaagggaaagaaagcactgttttgaaattatcttcttttaaatttagatgcataattaagaatgcttccaatttaaggttctaagcacaaaatccagatatgtcatgttatggacttgcttcctgaagatgatatcagcagttgatagaaagaatccacactcttacagaacagcaaatcataaatggttgtctctgtgaagccagtagctttgcattcgatatttctatctgggctcattccaaatgttcaggatttggattcctgaaggcttcttcagcatttaactaattctttgttggctgaaggggctgggactgtttctccacacacaaactgatctttgtcataaatcacttttataatgagagagcagctaggacacgttgccacgtcttccccattctccaaatcttccttggtgatggagaagttatctccacatgggcagggatagaaatacgtctccgagtcctcgtcatattggaagtcctcgatttccacctcgtcatgaaacactgccatggtcagcgggggtggccgaaggggtaacgccccagcagtccgaggccagctccgagggtttaacttcgccggaaccggcctgcggacgcgtgggtcgacgatatcccgggaattccggaccggtccag

SEQ ID NO: 136446 - DNA, 1195 bp, Homo Sapiens
ttttaagctacaaagcacatgagaaatgttctgtttttcctttcaaattctaaatgtgaagactcaactaaaaccggattctacagcattctacagaaatacacagccgtcagtcactctggggtcgtaggttagacaggggcttgatacagaaaggctgtgtgtcttacaaaggccaaaaggtcatgctaccaggagatcaacgtcaacagcaaagagtccgtgaagcagtcaaataggttgctatacaggacaagaggtcagtacaagccgcagccccggaggttgttggcaatgatgatgtcggtgacggcgtcgaacaccacctggatgttattcgtgtctgtggcacaagtcatgtgacaatatatttctttgttgggtgagcggtttttgctttcaaattgtgcttggatgtaggcggctgcgtcttcataggtattggggcctgtgtattcaggaaagcagatggtcaaaggtgacttcttgatcttctcgccaaagagatctttcttgttgaggaagagaatgatggaggtatcgatgaagaacttgttgttacagatggagtcgaagagcatgagagactcgtgcatgcggttcgtggtttcgtcttcgtggagcacctggtcatagccgctgagcgcgacacagaaaatgatggccgtgacgtcctcgaagcaatggatccacttcttgcgttcagatcgctggcctccgacgtcaaacagcctgaagtggaggttcttgaatgtgaagtgggtttctacgatgccagtggttttgaccctggttcggaggatgtcctgctcagtgggctggtagtcggcggccccaatccgatccaggctgtccaggtagtatttggcagagtcgttgagctgatactcccgggaccggttgaagcactcttggattcctgagtcgccccagagccgcatcatggcagaaagcagctctgcaaagaagggctcggtgtcttccatccgactcaccacatcacacaccatcttggggtcagcctttctctccttatccccatattcgatgcccaaagtgtccatggcccggacgatggctgccagggactggatagtgttgctgtagacaacaggcttgtactgtttcacgtcttctccggagaagccatcttcatggatgatcttcatctgcttcccaatggtgctttttcctg

SEQ ID NO: 136447 - DNA, 843 bp, Homo Sapiens
  misc_feature (411)..(411): n is a, c, g, or t
  misc_feature (524)..(532): n is a, c, g, or t
gagattagcacgccaaattttaaaacagttttaaggccctttcggggtaggcaaaaatttaccggtttgccgttagcaaccagttcccaaggcaaaaaattcaatttcaggagcttgaatgccaaatttgggccttggttttattaagaaaggcaggttttcttttccatacattttttaaatgattagattcataaataagcagttaatttcttttcttcccaatttatttctaattcatcttacggagattatagatagaattaaaaattacttaagctttttttccagtactttatataaattgagatcttttttaaacagtgagtttattgtgtttcttaaggtaaaacaacacaaacaaattctaaaattggtaactttaaattaagtggttaaaatttcagatgnccagagccgataactggtaacagcttcttgaagttcatattaagagtccaattagaaacactaacaactacctggcaatagtttgaaagaatcagaagggttcggtgaagggnnnnnnnnntccgaacatgcaaaataccccccaaaacacatgaccttctttttcattttataatctaaacttgtaaaatatttataaatacatgatcattctacacaatacagatcttctagagcatttctaaaggatattacagtttttggtcttaaggaataaagactaagatggaaaaggagatgaaaacagtgaaatctgaggaagcaatacactctctacacacaagcaaactagttcatccagtcaagttagcggttacagttcagtacatgattttcaaggcaactaagaaatcaagacacagatatttcccc

SEQ ID NO: 136448 - DNA, 547 bp, Homo Sapiens
ttcccgaatgtcccaaatgagaacccggccatcatctgaggaactggcaaaaatgttgtcattcactgggctcacagacaagccatatactgcatcttcatgagcaaacacgtccaatgtctcactgctttcaacatcatggaggataacttgctcatcattgcctccagagaacactttagtgttcccactgttgaaagccaggcaaaaaatgttggaatggtgctctcctttcagctgtatgggcttgaccctggagtggatggcttgttccatgtgccatagcagaacccggcggtcatctcctcctgagaccagccactggcctccattgttggagaattcaatggcattgacacagccgaagtggccgaggaggtccttcttgtagaggtttctgcagccccgcaggcgtctcctctgaaagtcctgagtgagcagggggtccccatgcaagccccgctgggacaagaagcccaccactgacctcatgctgccccccaggccagctctcctcttcatgctggaaccgccgccgccgccgtcg

SEQ ID NO: 136449 - DNA, 555 bp, Homo Sapiens
  misc_feature (307)..(317): n is a, c, g, or t
aaagctcacaaccaattcagaccccaagttacttcagagaagcaaatggcaccttttccccattgccaaggatcccagcttatgccagatatgaaggacggatcatttctgaaaatgttaagactctgcttgccagtggacttggcctccagtttcatgaaatgtgtaactctgtatgtgtatgttaggaggagggttggttgaaagagcgggggcagggaggggaatctgattacctcttgggaaataattttcttgccaacaaaaaagatacacttgaaagtttcttaaggtggcaagtccattnnnnnnnnnnnttgtgttggaccctcccagtttagatcaagtatttcttgggggtcttgctattgtggttgataccaataaatggaagatccagaatattttcatttaaagctcaaccattaattggaacatggtgaaacattgtacacattgtaaaagtagggaacagtacaaaagaatggaatcaaatactatattatgtgaataaactagagtgattttggaatttcactctcttcaccccttaaa

SEQ ID NO: 136450 - DNA, 449 bp, Homo Sapiens
  misc_feature (424)..(424): n is a, c, g, or t
  misc_feature (434)..(434): n is a, c, g, or t
gcaagaagcagcactggccctttattgtgacagatacggcccacggacctgaagtgccctccaccatggccccaaacccaatggccttcgccctcggggacttatcacatctgcacacagttgtgctttaggagctgagaggagttctgccagggaaccacaaggacctcaaagtcacagcgcagtttcttcctgctgcgcccctgctgccagggggcaagtggtgaggtcgacgtggtctccagtgaccctggtcttgcggcagtctgtgctccccatctccatcgtcaggaagtacttgatgccggccaccagctggctctgcgccttgatgatgtgcgtgtctcggaagtagtagatgctgttgctgcccatgttgtagctggccacggcggcctgcgccgcttctgcacctgcggggtcntcggggcganaggttcccggaattc

SEQ ID NO: 136451 - DNA, 915 bp, Homo Sapiens
aggtaattaaatttttttattgttgaaccaaaaaaagtccaatgacaaatccatataaatgtgataccatttacaatttttaataaccataaaagcaccattatataagacacttaaaataatttttcacagaacattagaaagaagctgttggccaacaagaaatagagcatacgtcctctgtggtcttgtctatcatgatctcacattaaatctgattccaacttaggaaaattctgcctggctgtaagataggcctctaatatccatggtgacaaccgccccttctgtgataggagctctcatttgtaaatccaccgtgggccctccggtttggaaactctgtgtaggaattccagtatctggcattgttggaaggcaatgcattattcctgtcctggtttctgttcattctgcttggcttttctgcatgaagcacactgtgaaaagtaacatcgtgttcataccgttctttcattcggtggattttttctcttgagacaccatgaatgtttcttcatttctggcctgaaaactaccatgtccatttccagcctgaaaagattcttttgttcggtctgaaataccatgactgcatagggcttcatttcccaggcgtggaggttggtattatcaataataatgggggatatgccattcctcattgcttttcttgctcttttttggttccattcatgagcttcctccaggaagtcaggattgaactcataggcaccatcttccctgaagaaaaaatcatccgtgctgaaaatcagggccctgggaaagtcatgctgcaattgtctggccagtgtagttttcccggagcccgggaggcctcgcaggaggtagaggtgtttcctaaagctgtggcggcgaggaggtgtcccccgcgggggcggccggggcggccgc

SEQ ID NO: 136452 - DNA, 721 bp, Homo Sapiens
  misc_feature (567)..(659): n is a, c, g, or t
tggcagtaactataacggtctctaaggtagcgaggcctgggtggcgaattcggcacgaggcggggctctcgcagccagccctccgtgcccatggaggaccagtttccttcaagtcttttgggaggctgagcctccagccccagcagcagcagcagcggcagcggcgtcccggccgcccccgcgggggacacctcctcgccgccacagctttaggaaacacctctacctcctgcgaggcctcccgggctccgggaaaactacactggccagggacgactggagtgagcactggcctgggagtctgaagattgtgccttcagacctacttcgtcacttactagctggcgactttggtcagtcatctagtttttccgggccttatgttccttacatgtgactactaaaaggctactagattataggatttattaaagatccttctgactcttaatttccagtggtcagattaaaaatagtttgctaataatggctatgttaaagagctctgaccttggagtcaatttatggctccacatccaagctctaccattcactagttttgctttnnnnnnnnnnnnnnnnnnnnnnnnnnnnnnnnnnnnnnnnnnnnnnnnnnnnnnnnnnnnnnnnnnnnnnnnnnnnnnnnnnnnnnnnnnnnngtgggaggactttttaaacttaaagtgctatatacattttaagaggtgttagttactgctcc

SEQ ID NO: 136453 - DNA, 488 bp, Homo Sapiens
  misc_feature (30)..(30): n is a, c, g, or t
ggtccatgaactcggattttaatagccacntagggcaattctgatggagtagtccacagatccactttgaagacactatctgccttgctaactcttgaacgttgaatttccagcgagtgtcaggttctcggaatataacttcatagttattttcaagtgccatgactgcatagggcttcatttcccaggcgtggaggttggtattatcaataataatgggggatatgccattcctcattgcttttcttgctcttttttggttccattcatgagcttcctccaggaagtcaggattgaactcataggcaccatcttccctgaagaaaaaatcatccgtgctgaaaatcagggccctgggaaagtcatgctgcaattgtctggccagtgtagttttcccggagcccgggaggcctcgcaggaggtagaggtgtttcctaaagctgtggcggcgaggaggtgtcccccgcgggggcggccggggcggccgc

SEQ ID NO: 136454 - DNA, 1812 bp, Homo Sapiens
  misc_feature (870)..(870): n is a, c, g, or t
gtcattacctttacgattcctatttattaaaaaaaagactggtgaattagcctgtgatacagaaaaactggtatattgttgagtttcttggcatttaggtaattaaatttttttattgttgaaccaaaaaaagatccaatgacaaatccatataaatgtgataccatttacaatttttaataaccataaaagcaccattatataagacacttaaaataatttttcacagaacattagaaagaagctgttggccaacaagaaatagagcatacgtcctctgtggtcttgtctatcatgatctcacattaaatctgattccaacctgttggaaattaatttggattcataaattcagcatcagtataagaagacattccagagttgtgaggacttgattgtcttaatgccacataaaacatcaactgctcattttgtaatgagcatggcttttatatatccctgtatgacctatatcctggggtgcctaatttcttgcactcccaaacatttgagctgccgactaattacacatgttaataggcataattttagaagtcgtttattccttttaaaagttaggtgttttatggaaggcaggcttattttatttaccctattagcccaacagccaaaagttattcaggtttaatcctgctgaataaagtagtaaaaacacaaggcgtgactttaaataatgacactgatttccctcagtagctcctgtagctattaaggatttgacagcatttttaacaatgatacatcattaaaataaagaaataacttcccaaagtgtctactttgaaggacaatgttcccttagatgtatgctttctggcatattaacattaaaggaaaatcagtatcatnaggagtcgcacatctcacatttttggatacatggattatcaaagtagcaatggcactaaaactttttcctgccccccaccacttctctccaccttcccaacgtttaccgatggagatgaatttcctgaaaaaataaatagatcacttcagagcaaatggttttgaagcttatatataatataaacacttgtatgttcatctatgaacctatgtaaatatattcttgggtgtgttctcaagttttggtttcaaattcttaccctagagaaagagactgtttactcaaatctgcagaattcccagcatcagaccatgcatatagaagcactttaacaaattttggtgaagaaagtgaatataatgactttgctcagaaacttttgagttcagctatttacactggaattggagctctgactaaaatgcaacaaaaaataacaaaaactgaagtagaaactgacttaggaaaattctgcctggctgtaagataggcctctaatatccatggtgacaaccgccccttctgtgataggagctctcatttgtaaatccaccgtgggccctccggtttggaaactctgtgtaggaattccagtatctggcattgttggaaggcaatgcattattcctgtcctggtttctgttcattctgcttggcttttctgcatgaagcacactgtgaaaagtaacatcgtgttcataccgttctttcattcggtggattttttctcttgagacaccatgaatgtttcttctacatggaaaaaaaatgcatttagttaaggcaggataccacaatgagttacttatattttacaagtcctctagtattgcagatattgcagtccctgttctcaggacctagctctggcaaaagcataacacacatcttgttcagcagttctctttcagcctccactcatgtttttcatgctgccctgc

SEQ ID NO: 136455 - DNA, 535 bp, Homo Sapiens
  misc_feature (323)..(415): n is a, c, g, or t
gcggccgctgccgctgctgctgctgctggggctggcggctcagcctcccaaaagattgaaggaaactgtcctccatgggcaggagggctggctgcgagagccccgggttccctttactgaagtcacggtcttggccaaagctgttgtttttgtgactctccggccatgtgattataggatttattaaagatccttctgactcttaatttccagtggtcagattaaaaatagtttgctaattaatggctatgttaaagagctctgaccttggagtcaatttatggctccacatccaagctctaccattcactagttgtgctttnnnnnnnnnnnnnnnnnnnnnnnnnnnnnnnnnnnnnnnnnnnnnnnnnnnnnnnnnnnnnnnnnnnnnnnnnnnnnnnnnnnnnnnnnnnnngtgggaggactttttaaacttaaagtgctatatacattgtaagaggtgttagttactgctccgttgttggtcagctgagataaatcttcagtgttccctggatcctggctctggagtgaa

SEQ ID NO: 136456 - DNA, 542 bp, Homo Sapiens
aaagaagctgttggccaacaagaaatagagcatacgtcctctgtggtcttgtctatcatgatctcacattaaatctgattccaaccgttctttcattcggtggattttttctcttgagacaccatgaatgtttcttcttgctaactcttgaacgttgaatttccagcgagtgtcaggttctcggaatataacttcatagttattttcaagtgccatgactgcatagggcttcatttcccaggcgtggaggttggtattatcaataataatgggggatatgccattcctcattgcttttcttgctcttttttggttccattcatgagcttcctccaggaagtcaggattgaactcataggcaccatcttccctgaagaaaaaatcatccgtgctgaaaatcagggccctgggaaagtcatgctgcaattgtctggccagtgtagttttcccggagcccgggaggcctcgcaggaggtagaggtgtttcctaaagctgtggcggcgaggaggtgtcccccgcgggggcggccggggcggccgca

SEQ ID NO: 136457 - DNA, 1008 bp, Homo Sapiens
  misc_feature (647)..(739): n is a, c, g, or t
tttaatttcaaaaacatttttattagttctttaatcaaatgagaaaaaaggttaagcagaaaaagatgaacccacatttgtaaaaagcgatttcctccaaattttgaagaaaaaaatttttattctaagaaatacatattcgttatagaaaatttggaaaatacagagaatagagaaaatgtgaatttcccagaatccaacaacacacagataaccttacagttttactattttctatatacatgtgtatttttaaacaatttgctcttttcttcttccccaccctacctcccaaaaaagtggggaaggcagctcctggtgggccacacctgagcctgcctctccaccattccatcctcaccaccggcctcccttccgctgagctgtggcccatttcctcgcttacgtcccagacttttctataaacacacaatccaccccatggcatgccaaggctgctctgctcccagaactgccaatgcccagcgaaacgggaggactcaaagtcaactgccaagctaccttcttcactccagagccaggatccagggaacactgaagatttatctcagctgaccaacaacggagcagtaactaacacctcttaaaatgtatatagcactttaagtttaaaaagtcctcccacnnnnnnnnnnnnnnnnnnnnnnnnnnnnnnnnnnnnnnnnnnnnnnnnnnnnnnnnnnnnnnnnnnnnnnnnnnnnnnnnnnnnnnnnnnnnnaaagcaaaactagtgaatggtagagcttggatgtggagccataaattgactccaaggtcagagctctttaacatagccattattagcaaactatttttaatctgaccactggaaattaagagtcagaaggatctttaataaatcctataatcacatggccggagagtcacaaaaacaacagctttggccaagaccgtgacttcagtaaagggaacccggggctctcgcagccagccctcctgcccatggaggacagtttccttcaatct

SEQ ID NO: 136458 - DNA, 612 bp, Homo Sapiens
tcaatttccaaaaaatttatttatactctgtattaaccagtgtttctcttttccatcctcactccctaaggagtctttttacaatcctaatcaaccacccccaaaattttaataccacagatatggtatctgtttaagtactgtgtgtatattcatgctttatacatcaagtttttgtcccccagaacaatcttgacaaggactgcgtggcgctaacaatgaaaagtttatagtattaaaacttttttatttgaataagtggggagaagagaaatatatttcagcacttagatatataaattatttccaaaacagtttaatactcaactagtcggttctatcaaaatcagttttccctgaagtaagcactgttcccagctacaagcgatcctcatttcacatggtactgtgggaccataaaaatggtcctgcaatcttaataatcaatagggaaaatgatgattgttccatgaccctttaagggtctgctcaaatattaaaaactcttaagaccagttataaatgtagaaaaaatgcagaaatgtttaaaaatatttagtacactgtaatttaaaacattagaaatagaattaaagtgttttatttcattgt

SEQ ID NO: 136459 - DNA, 1113 bp, Homo Sapiens
  misc_feature (398)..(415): n is a, c, g, or t
atctttctcttcttcagtagcagctgcagatttttcaaataaattaaaattcaatgcactttctccttctgtggctacaggaggctttttcctttcattttgttgatgtgaaatcttcatggctgggttaaatactggatggtcttctaaagtttccatttctctttgaaatttccttattttttcctgagcctctttttggccttgcttgtttttttctagtttaaaggtagctgcttgttcttttgcatccagcagttttgctgcaagatgtaagtacctttcattagggtcaaatttttcctcctcttctaaacttttagaattctcattcttttcttcttcattttgttgttcagcatatcgtaaaatccactctttcatatttacttccatannnnnnnnnnnnnnnnnnggcttactcttggggtcctcttcatatgtttttgttttaggttgcaatggaggtgaaatagtggcttgtatttgaggagactgaaatttaggcctacttttaggttgctgctcttcaaattcctgactgaatccttcaggaagtgcatcatctgaaaggtttaaacagagccaatccaaggcagaatgaaggtcacctccatataagagtgtattggtcatggcatcttcaatgtcctttgtcttaaatgaaaatgcttgtaaagccatgtataaatcctgcaattttttggcagtaagtcttccagaaatcattcctttgtcattattttgctttttatgctcattgatcactccaataattctttgctctagtttgttattaattaccactttcaaaatagatttatccagatttgcaggaccactagaatcatttgtagaattaaaactataaatttttggaccttgcttgacacggggctccctggagccggcagcggcagcggcagcggtggccggcctggacactggcttcttgctttgggcctccccggcaattccagcctcggcagatttggctctggaagcagacacggcggcccggaccaccgcggccgctggagccttgtgtttcttgttcttgccgcccatgttgcagctgtggcagaagatccttcgcggcccaggccccgaccc

SEQ ID NO: 136460 - DNA, 347 bp, Homo Sapiens
  misc_feature (124)..(124): n is a, c, g, or t
  misc_feature (126)..(126): n is a, c, g, or t
  misc_feature (152)..(152): n is a, c, g, or t
gtcgctggatgttttattttccagagaaccaaaccttagcactgtgcacgccacacctgagggcggattatcccaggccagcccaagtcagggcagggctggaaacttaggggcttgttgcccnangaaccgccacaacagagagcggactngatcctgcgctccggccgggctgacctgcctgcgtccagcccccgcgccctgggcctgcctgggtctggatctgtgtccgagtctgggtctggatctgggtccgagtctgggtctggccctgcgctcagggcccgcggaggagactatggaccccgccgggcgcgcccggggccaaggggccacggcaggggggc

SEQ ID NO: 136461 - DNA, 433 bp, Homo Sapiens
gtccaatatgctgcacataagtaccccaaagttagcacagaaattgttccatggctgtccatatatgttaaaaatccattaaaagttcattttttctctcattatgggaaggatacatgctcctactagtaaatttagtaggtagaaaaaaattatcactatctagactgctttccatttagtctttatgcatagctttcgtgtctgcctatttttaccttgtgtttgtaacttactattataaaatatgcgtctctatgttcattgtcaacgattatttacaataacatggagtggatttacatgtattctctatatttggattaaaggagatagagtatgtgaaattaaatgggagaagtatctgatacataacaggcaatacaaatattatcacatagcgtcaatttatttgtgaatattgaaagctcca

SEQ ID NO: 136462 - DNA, 590 bp, Homo Sapiens
gtcaccacagccggcaagcactgggcctggggatgtgtgaagagatagggttattgagaagagtaaacagaacgctggtcatccgtggcactcagggctaggcagtccagggagcagaaaacaggggtcccgggcccagtctccctcctggaggtcagagcggagcccctggcactgtgccctggcccagaaccaggctgtgggctccacgctgcacaccccaactcaggagcagaaagcaaacccctgactgtccacactccctgtgactggtccccttcctgccggctcttcacccccagcccatggtggcttcaccccatggcaccagccactgactgcctgcccctccctcccatagtgacactttcctggggtctgcaggtctccggtccacttcatgcagacaggccctgtcccccactggggcccaaggcccaggctaaactacagcccagccatcccaccccaggccgtgaatgccttctccaggagggcaaccaaggatggtgccacatgtgagcacaagcaaaacccggagccaaggcgagtcctgctgggtgcacgtttatcccagccaccgcctccag

SEQ ID NO: 136463 - DNA, 541 bp, Homo Sapiens
  misc_feature (472)..(500): n is a, c, g, or t
ttcctcccttaactaatacatgattttaaaaaaaattatctcattctgtgggttgtatttttgctttcttgatattgtccttggaaacacaaatggttttaattttaatttacctattttcttcttttgttgcttgtgtttttagtgtcatttatttaagaaatcattgcctaattcaaagtcagaaagatttacgccatgttttctttgaagatacttacaatattagctcttacatttagatcttaggtcaactttgagttaatttttatatgcaatatgaggtaggagtccaatttcattattttgcatgtggatatccatgtttccaagcatcatttaatgaaaaagactattttgcccccattgaattgtcttagcactattttcaaaagtcagttgatgataaatgtgatcaatatttctggaccctcaattatattggtattttactctttctgatgctgtcaannnnnnnnnnnnnnnnnnnnnnnnnnnnngagtcaaggtctaactctgtcatccaggctggattgcagtg

SEQ ID NO: 136464 - DNA, 1418 bp, Homo Sapiens
  misc_feature (685)..(700): n is a, c, g, or t
  misc_feature (1270)..(1319): n is a, c, g, or t
tttgcctattaaaaatttattagaagtagaatatcaataatccaggtgaaagtctacaaccatgtcagaacacaatctaactcctttgatatttacaatctcaaaaaattcaggcatgggtactaagcagacagcagaaacccaacattcaaaaccatcacagcaaaaagtcattccatacaaagacaaaagaactctacaccaggaggctcaccatgtctcgccgaaagttatgaagtggaagtttagctaatgcctgaaaggcgtcctttatcttgatgtttttcatttcaacaagaaattctgaaaacgtctcaacatctctgagtaatggaagaaggcatcaccttctctagctaggaaaagggatagagctgcgtctaaatgtttgagtggtgtccgaagcagaaagggagctgttgtctttcaggggccgccatgcctgccgttaggaaatgccatttgactcgcaaactggttatggtagttgctgatgaagaagatgaggagccaggatgtcattccttttttacacagtctgtcttcctgcccataaccacactttaatcaccatgggcaatgaccgtacttaaattttgcattgtaaaacagggacgcagcagtaatggaaaaagtatcatcactcataaaatttggaaaatgcaacatgagacttctgtgtctnnnnnnnnnnnnnnnnattaacacacacaaacccaggaaggaaaatgaaacacaagcatctgcttttcatcagcaaacacaggcaaagcaaggggcagcagaggctgtgtcactgaagtatccgaggatttaaacattcctacatccggactccttggtcaaccaaagcaaggctctctgagaagcatttgaaaaatacgcattgaaaagtgtccatgaaatccacatcattataagcttctaaatagtttcgggattttggttgtttttaacgacagttccaacatactctaaggaatattcctgtgtaaatcttctacctccagttcccacatactttcatggatgggattatcagaaaggtctgtcatcttcacagcctgcaggcagggctcagggctgcaggcctgaaccactcccactcaccatcacatactttcctgggactagacagggccagcccgcgcggcacccgctccaggccgcggaccgagaagtccccgctcgggtccctcagccgagccatccgccgcaggtccgccatcactaccctgccctgcatccacacggccgccaggtccagcgnnnnnnnnnnnnnnnnnnnnnnnnnnnnnnnnnnnnnnnnnnnnnnnnnntccgcgtcgcgccgcagctgctccgccagcaccttgagtggcggcgacctcggaagccgcacccccgcggggccgcctgagaacgagtccgcagccgcc

SEQ ID NO: 136465 - DNA, 555 bp, Homo Sapiens
tgcggccgccaactgtggcagaacttgggaccatgcattggaccacacaaataaggcaaatgcccagcagtagccaatcaagcagtcatgcaccgctaagagcagtcatgcactgctaacaacgtttcagtcaatgatgggccacatgtagatggtggtcccgtaagattataataccttattttaactgtaccttttctatgtttagatgtgtttagataccattgtgttacaatggcctgaagcattcagtacagtcacatgcgagcaggtatgcagcctaggagcaataggccacaccacacagcctaggtgtgcggcaggtgtagcgcactctgatgcctgcacgacgacaaaatcaactaacagcaaactcctcagaccgtatccccatcattaagcaacacatgactgcagtttctttctttgcttctaggctcagcctacaaaagcttgctgctcatgctgccggagcagagctctgaacttctaattctgagggctgcccgattcccaaactgttctttgctcaaataaacttatctgttaaattta

SEQ ID NO: 136466 - DNA, 348 bp, Homo Sapiens
atattaaggagagttttattgtaaagataggcaggatctacaattttatatttttccaagtgtataaaaactctcagagtagagatttatgtctgttgtaccagcagacagattatttataaattgggaaagggaaagtttactttttgccaaactgaggcagagggggtggcaccttaatatcttggcctctctccaacttcttttcacaatccaccaggtaattgactccatcgatgactatctgaacaagctcaacctctgatcgaccaattctatctatgttggaaatgtcgtacacatctgcgacccgcggcaatgtcccacaccaccttgtggccacgcttc

SEQ ID NO: 136467 - DNA, 804 bp, Homo Sapiens
  misc_feature (706)..(740): n is a, c, g, or t
ttggtgtctaatacttttacttcccagcagcataataccactttggtcaggttgaaccactgcacaattttgcagctctttcagaaaaataatgaaaacaattggaaagacatgatgtacatgcaaatggtgagaaaatgatactattgtccaatcctttcccgtaaatgtaaaatatccttagttcatctccgaactgtgtatttattataagcccttacatcagggattttgtttctttcagtttttgtagcaccaaatagacacagcggctaacaagaaataaatctgaaaagtcactgaaatatttatcacatgtcagaaattttctggtctgtacctttaaccatgttcctggcttcacatattcttcttaagagtaagctataacataagattgagttcccaccctgtgtttgctactgatgtgatttgtttaccatgaataatactttgttaatatcttttgtatattactttacaatttccaagtattttatatacagtgactcacttagtgactcattcattttaatgtaatggtgtcccccaaaccacagataatgattagacacatgaactcttgtgtcagattgcatgggttcaaatcccagttccacctgctagctgtgtgaccttggacaagtcacataatcccggccgtaatggccgaattcccgggcatatgtccggtaccgtcgactgnnnnnnnnnnnnnnnnnnnnnnnnnnnnnnnnnnncggccgcttcctcgctcactgactcgctgcgtcgtcgttcgctcaagagtagcgccctatagtg

SEQ ID NO: 136468 - DNA, 724 bp, Homo Sapiens
gctggatgttgttgccccaggtccaggatgaagcagtcgccattggttgaagctctcccaggacacaggtacctcggtggcacggaccacacgccgccctttgacctggaagagtctctgcaccaccacctcgttgggtaccatgtgcttgaatcctgatgccacacctccgtttcgttgtacttcaggccagacttgaagtagcctaggaaggtggccgactcgaagccctggacctcacggtgctgcacggcccggccgttcaggtagtcatccagctgcacggtaaagatggcggccgccccgctctcatcctggctgcactcattgcccagccagtagtggaggtcatactgcagatttccgttcctcagctgcactgtcttcaggatgacgtaggcgtcgcccgtgaagaagtctccataaaggttggtgggcacgggcaccagatcgaacttctccacacgccagatctgcaggccaggctccttccctgccttgaggaactcggggtgttccaccaccatgctgttgggctaacaaggctgtgcagggtgaagagtgctgctccgtgggaaggcgctgggaccaaggccgaagcactggacaaagagagctatgagcactacctgctgctgcggcactggagacagcggctgctgggtccagctgcccccggccgtaatggccgaattcccgggcatatgtccggtaccgtcgactg

SEQ ID NO: 136469 - DNA, 1136 bp, Homo Sapiens
  misc_feature (20)..(20): n is a, c, g, or t
  misc_feature (56)..(56): n is a, c, g, or t
tcctctcttccgtgttgccntgcttgctttccagacaagattttcccatctttgcngtggttcaggatgaagcagtcttctgactcaggggccccctgggcgaagggtttctcatcagccacgagggagacgtacatggtccctgcaccattggagaccttgtagagcttggccagcttgcggttggccgcatcctccttggcggtgtcctcggtacctgcaggcagagccggcttggggcccagcacctggagcatcgcctcgggctcagtgccctcctcagacacgtgcactcgggcccggccactccgctcgttgtcccggatgcccttggacacctgtgtggccttcagtctttcataccgattgctgttggaaccacaccactggtggatgttgttgcccaggtccaggatgaagcagtcgccattgttgaagctctcccaggacacaggtacctcggtggcacggaccacacgccgccctttgacctggaagagtctctgcaccaccacctcgttgggtaccacgtgcttgaatcctgatgccacacctcctttcttgtacttcaggccagacttgaagtagcctaggaaggtggccgactcgaagccctggacctcacggtgctgcacggcccggccgttcaggtagtcatccagctgcacggtaaagatggcggctgccccgctctcatcctggctgcactcattgcccagccagtagtggaggtcatactgcagatttccgttcctcagctgcactgtcttcaggatgacgtaggcgtcgcccgtgaagaagtctccataaaggttggtgggcacgggcaccagatcgaacttctccacacgccagatctgcaggccaggctccttccctgccttgaggaactcggggtgttccaccaccatgctgttgggaaagcaacaaaacagtttttccattctagacctgaattactccccttttcctagcgctgtatctgcaagaactaacaaggctgtgcagggtgaagagtgctgctccgtgggaaggcgctgggaccaaggccgaagcactggacatagagagctatgagcactacctgctgctgcggccctcgtgccgaattcggcgcgccgtcgacttcatactct

SEQ ID NO: 136470 - DNA, 641 bp, Homo Sapiens
  misc_feature (51)..(51): n is a, c, g, or t
ccttatatttttttaaaaaacagaagtacctaagttatttcctctgtgtantgtgcaaattaaaacaaaaacaaccatttaaaaataatgaaaaataatctctttattctctctctccaacagatctctgacccagtccttctccaatacaaaggaaagacgatcaagagcgtgaaggccagctagcgcagatgggcgggccgcaggtggctagagcaaccggtgtactctcgggggatgcagcgagatgcgccatctctgacggcaaaccgaccgacgatgcctacacggggcacctggttcctgtccagtatggctatagagtgtgcccaagaacctcggaggcaagagaaacacggtcagtattcctgatcatttccactgcagcaagcgctgcactccagagatggttaccatccaggagttctgaaacgtatgcagtgtgcacaaaagccaggggtttagttcagactcctctccccatctcctgtggccacccccctcatccattggttaaagctgattgtgtcccgacttcagtgccggggcattatcggggcggctgctggaggcctgacgactcagacagactgctgacccttcggggaggacgtagggacctgggtcatgttctgtggatc

SEQ ID NO: 136471 - DNA, 672 bp, Homo Sapiens
gaaaataatctctgtattctctctccccaacagatctctgacccagtccttctccaatacaaaggaaagacgatcaagagcgtgaaggccagctagcgcagatgggcgggccgcaggtggctagagcaaccggtgtactctcgggggatgcagcgagatgcgccatctctgacggcaaaccgaccgacgatgcctacacggggcacctggttcctgtccagtatggctatagagtgtgcccaagaacctgcaggtagtgctgcggtggctgctgccgggcctgtgcaggctgcaggggcgatggttgggaggcagggaagctggggtggagcaccgcctgccccatcagcaggacgggcatcggggcgctgctgctgttggcggggtgtgcgtctggattttgaaacacagtctggctctgggcgtacttgacttgccgtcccgtcctgctgacttccgagggctgccttgcgtcacaggacccgggcatcatgggctggatgggctggctcagcaacagcctgagctgccgatcatggctgaagtctgggctgggctggcactggctggcatcctgggaggtggaagcaggtgtggtcagattcagacttggcgggagcgcagctgtggcgctgctgaacggggacactaggctgcttccagagcggccgc

SEQ ID NO: 136472 - DNA, 694 bp, Homo Sapiens
ttttaaacttgaactgagaccttgatgagtctttattttaggaagcatattattagcttttgattttaagaggaatttactccttgctttccctgttttggggaaaatgaggagagctgcctccaaatcagggaattatattgacacaggtagacatagggaatggaactgaatgaacccaaggtgttacattttgtttcactacacatgagggagaagaataagccctgctatagtgttggccagagcactgcgactgacgccacagggtgggttaccagttaaagtctcagtgtgactacttggacacctatttttgtttagacacactattcaaagggctgcatgggaaccagaagcttggcctcttctgataaatgcctggtacctgctatgtaaaagagctggaggtttctgttctttttgaactgacagaggaaagaggaagacaaggctggtggccttgggtagggctttcagtagttgcacagtactgggcaattcttagccttcccttggttctagccttgattagagatagtctttttagtgtcattatgttgcccagagtggttctgaattccttgcctcaggtggtcctccgcctcagcctcccaaaatggtgggattacaggtgagcgccacagtgcctggccaaagctcgttttgatcctcattcatatgtcattgtcct

SEQ ID NO: 136473 - DNA, 439 bp, Homo Sapiens
acttttaccacattttattggtcaaagtgagttagaaggccaatccagattaaaaggaaaaggaaatggactctaccctctgaagagaggagtccaaggaagggaaggaattgtttgagggacatcttcaaaaactatcacagtctgcccccggcacagttcttgtctcactaacatgcaaaaatgtacttactctgtaccctaagagtctcactccattatggcataagtttaagttcagaatcttatcatctaaaccatgtccagatacaataaacttcctcagttactgtttctcaagtgaagatgcttgagagtagcttgtcccagttaaggttttctaggataggaacaccacacagagactatcattcaaaaaaggagacaaggaaacaggaagcataaaattaaattgttttcagggtccccctacaccaaa

SEQ ID NO: 136474 - DNA, 662 bp, Homo Sapiens
  misc_feature (230)..(245): n is a, c, g, or t
ggtatccaaaacttgtttttattaatagtcttaaagggcattcaataaaacgttcccataaatatgccagtgaatttgttttaataacagaagatcatgaccttataaattactaagaaaaatatgctgcacagtaaaacaatgtctgatgttcttgaaaatactttttcactttacaagagatacaatatgtgcttcagtttacattttactctccatctaacttcagnnnnnnnnnnnnnnnnggatgctatactaagaaatctttagtatgaggagtatgtaatcatagcctcagaaatttcaaaagctgccacaatgtttttccactcctgtaaagtcaaagatataactccctgtttcctgccatggcaactggaatcatttccctcacccatctggttaacattcatcggctctaatattggcagcctgtcttcatcaagccttattcttgcaaaaccatctcttacaataaaagaaacataaaatatattctccacagtacgagaaaaagagtttggatcaatcacaaactcaaaataggacacaggagtatcaggatactttcgaaagtaggtttgcaacaatcccaaaatcctttctacgtttttttctgtcgcttctggataactactcaggtccaacttctgcaactttgt

SEQ ID NO: 136475 - DNA, 2436 bp, Homo Sapiens
  misc_feature (663)..(675): n is a, c, g, or t
  misc_feature (1012)..(1024): n is a, c, g, or t
  misc_feature (1314)..(1322): n is a, c, g, or t
ttttttcacgcattataacagttttattgatgatgtgttttcttttatttacatttgtttttactgtatttggtattgaatttcaacactctctaccctggtcgcacagctgctctagaaaagctgtaaacaacacggcactgtgctttcctgcacaaaccgcctgtcaaagtcaaagctgctcattctcctcccagtaattaccttctcagtttagacttaatgcaagtgaaatttttactttatcataatataataaataaaagacattagttaattagtagtgctggtatatttctaaaatactaaacagacaaacaataaactgtgaacttaatcacatgagttcttatacagtttcaagacaggaaaattagagctctcagctacagtcattttaataatcacatggatctgcattatttattagttattacatgctcaagtgattcaaggttgtacaatgcctaaaatcattccaaagcaagcataccttttgtctgtttaattctgagtggattacacaatgcatatatttgtatttagttaaactgctaaatttatttcacatattccaagaaagagacatcagccattctcttggtttccaaccagactaactttcttgatatgatcccctaaaaaggagtaaatctgctagcnnnnnnnnnnnnnaatgtgaaagctatgcaagccctcaggcagattctcaagcacttttggttccctagcaaatctctggtaccttaagaatcctcttggaagacccaggaattctggaatgagtagtagcttgtagaggcacaaaagacagcaagaatctcaatttctatcaacagctttcaaatttggatggctttcccttttcttttgctatctggttactcacctttcatttttagatgcttccctttcacttcttccagcccctagttcaattcttaaatgctttctggattttgtgaaaagcatgcagcttgaggaagtttggtttgacttttacttttttgcnnnnnnnnnnnnntggtggttcagaattgactagaaccagctgagaaccaagaagtaacctttttaagacagaggacctgtctgtttgtttagtcttggagcttgtgtgacttggagggcaattctgttatgtcgtatgaagaaataaagttcttaaatataatagttttttgtttgcatcaaccaaagaaatgcagaaataaggactggttactttaatttgctgctaaatgaaaagcaggtttggctttattcatgttactgtaaaaactaaataataaagtattcacaccaagcgtgaannnnnnnnngccagcaaaagttaaaacatcaaagaaacctctttcaaatactaacaaatttacttacaaacacctatatttattatttcataaataggcgcaacaggttccataaaaaaagattaaatacagacacagtatgaagaaacaataagacagagccatatgtaaaagttgtaatttagctgtttccaatctgtttctgcatctaataaaataccaggtaagcatttggcagttttatacataaaaggacttaaatgacatttactaaccattacacaaaaagtgatacaaaaaagcaatttttctgcagtacaaaataaatgtgtttgcgcttcccttaatactagtttctttttgtctgatcaatgagacaaagccaatttgtttttaaattaaaatcacttgggaatactttttattttcaaatattttgaaaatatagaactatcagtcagttgttttaaaaatgaagtaaaaatatgaatgtttgccaatttaacccctattgtgaaatcaataaactggaatgagccagtttcaattacaattttagctacaaaaacattcacattttatactctaggagagtgtaacatagatgctatttacaaacttgctatgactgctacatcaagccatttaaaaagtctttagtagtttcatataaacacccattatgaaaaccaatggaaaatccaggacttttatccgagacatctacagttgctaaggcagttactagagcgcagcacttcacagcaaaaaaccaacataaaatctgaatggtccaaatttccttcagggaagaagaaaaacaatgtccataaaggattaaaaaaataataaagaagcatgactatttcttccagagtgggtgacccacaagctcaaatggtcctaagtgcttagcaacttgtattttctaataaaatggagaactgccttgactgtacaaagcaatccatggtgaaaacacttccctgaattcctcagtggaaagaagaggtgttcagattctcaagtaaggtacagtgctttgtccctctgcatgcccccactactgcagtagtcgttattccagtccacaggttgtgggggaggattctgcacccgaacg

SEQ ID NO: 136476 - DNA, 2110 bp, Homo Sapiens
  misc_feature (292)..(300): n is a, c, g, or t
  misc_feature (405)..(622): n is a, c, g, or t
  misc_feature (1572)..(1572): n is a, c, g, or t
aaaatatatttaatttgggtgcacaaattggttgggtaggacgatcctggtcgtggggggagtattttcaacagtctctctttatggaatagtgttgtgttgatggcggcgggtgtgtaataagtgttgatacatctttcccttagtaataggtttaggccggggggggtggaccggattataaattcggggtttggttcagggctctccttggtggggtggtctatagttaaggaactttggcccctcccggggggttgtcgcgtatgagtggttgcgttcccccgcgggnnnnnnnnnggtttgaaggtatccagccagagttgcttttcacgggtttctttttaggaccgcaggtttgttattggtgtatctttttagggggcggcggccccgaccgggtgnnnnnnnnnnnnnnnnnnnnnnnnnnnnnnnnnnnnnnnnnnnnnnnnnnnnnnnnnnnnnnnnnnnnnnnnnnnnnnnnnnnnnnnnnnnnnnnnnnnnnnnnnnnnnnnnnnnnnnnnnnnnnnnnnnnnnnnnnnnnnnnnnnnnnnnnnnnnnnnnnnnnnnnnnnnnnnnnnnnnnnnnnnnnnnnnnnnnnnnnnnnnnnnnnnnnnnnnnngttatatagatatatatttaatataatatgtgtgattgtggttacagatacatatttggtgctttatttatccagaagcatgagtcacatagtacataaagtattgaatacaaaattctaaagataaacacaatttttcttgaatttaaaatatatgggataaatgcttacaaatggatttataaacctttcacttctacttcattctcctggctgtgtcttccgaagatgagttgctagttgcaacattaaaaaaaatagctccttcaaatcctgacactatatgacataaaaagaacttttggcaaatatttattcagattgcttgtctccagtggcaaatttctcagcatttctctttgttttgtctatgccttagcctgtgcatttttctagaaaggaagttaaatgcttttaatgtattaattattacattattgaagttggacccaaatatgttaaatatttcctcttgcaaagggagaagaggaagggaggaacaggggcaaggtggggaggaaaaaaatacctcaggtgagagaacaagtaacttgcaagaggcttattaaactgtatataaatgttgaagaggctgatttgtagtttctctactagaaaaataataagatgtattattaaaacgtgagttgagaataatattccaaatgtttgttgttgtcgttgttgttgccgtggcctgtgactctctgctgtaagtttccattcaaagccaggagtcttttctcagttggaagagttgatctttttagttttgggatgtgtaagtgatgctgggaaagccctttcttttaaatagtccattgctctcgtttgcctccagaacctatttggtgaaaagtgtgtttaacacaaacagtagctgctaaattgttaactaaagagccttgtgcgaagcaaggtgttcggatacggtgcttgtctaatagaantgaagaggacttataagccagagaggtttaatagcagttgagccagcataaaccaagatgcaccaaacttcatgtccaaaacctacatagaattgccttaccccttggggtttcggatgcttggatgttggagattacattttctattctctgctttctggcacatgcaagccagatatggacaggaaaccctcaatatttattcatttttctagtcaaggctttctagtatgataaaataaaattttacatctagctgcattgcaagtcagaaaataccttcctgcaaatatggaagatgacaaaactcagtttcaaccaagctgagctgctcttaaatatttctagcaaagggattacgttcataggtctgagcacttactttttaacctcttcccttctcccctttcttccctttcttttcatgactattctctcctaaacttgccggacgcgtgggtcgacgatatcccgggattatccggagcgtaccagcctgctttttgtaacacactggtctatagtgtcaccaatagca

SEQ ID NO: 136477 - DNA, 233 bp, Homo Sapiens
  misc_feature (182)..(190): n is a, c, g, or t
ctatttacccacgattcttctttatttggctgccaaatataggggcacgttagtattgcggtcagcttaatattaagtagaaggcattaaaggctagaacagtggtgcaaaaagctgtaggtaaatctcttctatgctggctgttagcagagcactgtgatgctatataattgcagcaaacnnnnnnnnnggttctgctgcactgcagctcataaagggagcactcattctgg

SEQ ID NO: 136478 - DNA, 1002 bp, Homo Sapiens
gctaacatctcaagtagcgaggcctgagtggcgaattcggcacgagggagaggagattgttttaagtggtattgtttttcctatagggctgtcccttgtcactctttcacggttacggtttggtcggaattagctgccggggcctccaccggcttgggctcttctgcagaggctgcggggccctgggccttgggtgtggaactaggcgcttccgtggctgcgggggtctccttggaagagggggcagcctccgagctgccgggttttgagtctgaagctggggccccgtcacttttggtctcctgggcggcaggagctgcgggcgcctcagtctttttgggttccccttcctccttgctgggctcctccccggcggcaggggccgcgctctcggccggggccgcggcggcctcagcagctttgggggcctcgccgcccgcagcggggccgggggccgcctgctcctgctcgggcgccttcgggggctcagccttggcctctgccgcgccctccgtcttctcgggctccgccttcggggcctcctccttggcagccgccgcgtccttctcgccctccttctcctcggccttgccctcggcgtcctggtcgggcttctccttgccctccttggcctcggcgggctctgcggccgcctggggctcactctccttcggggtcccctcctcttccgtcgccgcgccctcggccttcttgtctttctccttggctttctcgtcgttcacattgtagcccttcttcttcttgctgagcttgcctcccatcttggagttcggctctgggtgcctatgcagcccctgagttagcgcggtgccgccgagaggccggggtcgctggcgtcgtctggctggtgcctggccgctggcggaggctctctcccggctcgacggcggagcccggagcgaggagccagttggagcgctgccgccgccgtcgtcgccgcctcgtgccgaattcgccacccaggcctcgctaccttggacc

SEQ ID NO: 136479 - DNA, 328 bp, Homo Sapiens
  misc_feature (120)..(137): n is a, c, g, or t
  misc_feature (239)..(239): n is a, c, g, or t
  misc_feature (293)..(293): n is a, c, g, or t
tcagtttcaaaacaacctttattctgtttgaagatctaatacaatgcattaaagcaacttaaaacaagacatagctccattgaatctataacttgaacgaaatgtcaaggaggcacactnnnnnnnnnnnnnnnnnnagttgccttgtgaaggcaaagttacaactgaccgtgacatcctccctctcgtcaaaagaccaactttattttaacaatgtcatataaacagatttttaaaangcattgaacagattgtacgctttaaaaaatacacaggtataaatgagttttttnttggtttggattttttaaatacatatatatatggt

SEQ ID NO: 136480 - DNA, 626 bp, Homo Sapiens
aacatttaaaaatgtatactttaataagtataaagtatataaacaattaggtaagcttgtggagaagctgaccaagatacataaattaggaaatacaagtgtccatctaaattttctatatttcatttttttcataatatttattaaaggtgtttaatatacagtttctcatctgtcattttggaagtcctttattgtaaagacaattctattgtctgatgacaaacagcagccaccatggttattcaggacctccacgttggataaattccatttcttcttgagacacaagtttccttctgtatttctgaggtaatgtttttattatttctgcagtgtctggtggaccctgatacatcagcaaatctggtgatttacttcctttagaatgttgtgaaattacagaagagtgagatggtagccctgctgatctcaaagcttctgatacattgggtttaggattgtctcttctgtcaggaaaccttattaatggagtgtgtggtttgactacctgaacgaccctactagcagacgccatcttgctgcccatcatgacccccgagaaggggcagtttccggggcgcgagcgagccgcggcgatcactggagtaccgggcagctgtccc

SEQ ID NO: 136481 - DNA, 1048 bp, Homo Sapiens
  misc_feature (77)..(89): n is a, c, g, or t
  misc_feature (133)..(134): n is a, c, g, or t
  misc_feature (136)..(139): n is a, c, g, or t
  misc_feature (147)..(252): n is a, c, g, or t
gggggaatccaacccctttgccttggcccggttcctttaggaaaccaataaaccccggttccctttcccttgggggnnnnnnnnnnnnnaaagggttttaaaaattttttgggggccgggggggcccccccanngnnnngtgtttcnnnnnnnnnnnnnnnnnnnnnnnnnnnnnnnnnnnnnnnnnnnnnnnnnnnnnnnnnnnnnnnnnnnnnnnnnnnnnnnnnnnnnnnnnnnnnnnnnnnnnnnnnnatgcttttagaattatttattcaaaaacactttataataaattcaggtaacagtaaagtaatacattcaatagtactaaaatctatagaaaatagataatttcattaaggtgcaattaaaatacttgaaattgggacacatctctatatttcaaaccaatatactggctttctttttaaaagactattctagtctttacgatgtccaaagtttttcctctttgcttttatttgctttagaccatatttaaatttttagcattcctaagtgcatacattttaggcatatactataatgaccaagagtttgtgaacctactgattaggtaaacactttggggaggtatgacctgcacaaagtagggtgggaaagctattatctcccttaatctggacacaactgttcaagcagtctataatttattagcttctctgatagcttcactatttggttttcattgaccttttgagcaactgactggcaaaccccagattcttttcgcctgaaatcttttcaagttagatactgtccatattacacttgtacttataatttactatcttcttgccttggacaacttatttctccaaattctgatttctccagcagtgtattgggatagtatcactaatcttgcaaagtaaagatcagaaatgctgtacataatatgggtcagtgacttagcatacaacaactattctatgattaatattttcaaaatctaactactcctcatttgtccttggcagttttctatcttagtcatttgcagaaagagttccagcttgccaaaacc

SEQ ID NO: 136482 - DNA, 939 bp, Homo Sapiens
  misc_feature (595)..(607): n is a, c, g, or t
cccagccaagtccccagggaaggccgcatctgtgaagcagagagggtccaaacctggacctaaagtctcagctgcccagcgggggaaagctaggcccttggcctaagaaagcacctcctaaggccaaaacgcctgccaagaagaccagaccctcatccacagtcatcaagaaacctagtggtggctcctcaaaagaagcctgcaaccagtgcaagaaaggaagtaaaattgccgggcaagggcaaaatccaccatgaagaagtctttcagagtgacacagtcaaattttataggaaaaccaagggtattcattgatgaaattcaaaatcttattttctaaggtcagtgtgcattgttagttttgatgcttttcaaattacattattttcctcccctatgaacattgtggggagggactctaaataaaccagtttaggcatttgctagctttaggtgcttttattggtgcctgcccttttccttgttcattttaatttctgcaataatcctggactttcctaaactatgtaatgtatacttgtcctttttctctgcctcccccaaccccctgttgtttttatggtcagctttgccnnnnnnnnnnnnnccaattttatctaaacagttgcagagatttttatatttgtagaaagcatcaagaacggtatgccagtcaggtcctggaagtaaaatggaggcacaatatagcactgactgagttgtaaagcctcctgcctggagacttcagttatagctgtaataattaatcttatttataaaagccactccactaaccttttctctccaactgtaaacacagagacagctttgggaataagccaaaaacagggtgatctcattagattttgaagatatatgactcctttgggctacatttcatattgatcaatttctaggtatttttcactggcccaaagt

SEQ ID NO: 136483 - DNA, 529 bp, Homo Sapiens
ccacatcttcttttgcaggatctttatccacatttcttcgtctttttcgcttcttaagccgtacttcctcttccatttcctccaaattgccgtcttcgatggcccttagccactgcttctccgtgagggcgtcactgtagtccacgtcacggcgctggcgggaccccctcccaaatattttctcctcctcttcttcacaggtgagcctttctacttcagcgtcatccttaatgatccaggagggcagctcatcctcctccattaaacggggcttccgtttcgggttccgggcatcttccctccgccggtccatgtccatccgcataaaaaggtcaaattcttcttctcgtcgagcaatcatttggttcagagtctcatcgtccggtacttcatcttcttcctcattttcctcctcatgctccaagatggcctgcaggaatgccctccgctcgtggcttgaagacttttggtcaaacatgcccgcctggatcactttctgatccacgttcagcttgtattttgcggccgc

SEQ ID NO: 136484 - DNA, 549 bp, Homo Sapiens
tgcggccgcccccctcccgacgtggacggcatgatcaccctcaaggtggacaacctgacctaccgcacctctcccgacagcttgaggcgcgtgttcgagaagtacgggcgcgtgggcgacgtgtacatcccgcgggagccccacaccaaggcgccccggggcttcgctttcgtccgctttcacgaccggcgcgacgcccaagacgccgaggccgccatggacggggcggagctggacggacgcgagctgcgggtgcaggtggcgcgctatggccgccgggacctgccccgcagccgccagggagagccacgcggcaggtccagaggcggcggctacggacggcggagccgcagctacgggcggcggagccgcagccccaggcggcgacaccgcagccgatcccggggtcccagctgctccaggtcccgcagccgatctcgctataggggttctcgctatagccggtctccctacagccgatctccttacagccggtcgcgctacagccgctctccctacagcagatctcgctacagggaatctcgctac

SEQ ID NO: 136485 - DNA, 1347 bp, Homo Sapiens
  misc_feature (559)..(587): n is a, c, g, or t
atgatgttatcattatagagtgctcacagaaggaaatgaagtaatataggtgtgagatccagaccaaaagtcatttaacaagtttattcagtgatgaaaacatgggacaaatggactaatataaggcagtgtactaagctgagtagagagataaagtcctgtccagaagatacatgcttcctggcctgattgaggagatggaaaatttttgcaaaaaacaaggtgttgtggtcttccatccagtttcttaagtgctgatgataaaagtgaattagacccaccttgacctggcctacagaagtaaaggagtaaaaataaatgcctcaggcgtgctttttgattcatttgataaacaaagcatcttttatgtggaatataccattctgggtcctgaggataagagagatgagggcattagatcactgacagctgaagatagaagaacatctttggtttgattgtttaaataatatttcaatgcctattctctgcaaggtactatgtttcgtaaattaaataggtctggcccagaagacccactcaattgcctttgagattnnnnnnnnnnnnnnnnnnnnnnnnnnnnntgcaagttctttcaacatataaagagacattttgtcctagttacaggaatcccccgaaatcactgtcctcattggcttagtttaaagccaggagactgataaaagggctcagggtttgtcctttaatctcattaactaaacattctgcttttatctacagttaaatggttcaagcatgtaacaactagtttcaaaggtattgctcattggtctggcttagagacaggaagacatattgagcaataaaaacacagattctttggcatttaccaatttagtaaaaatttattaaacactgaataacctgccgttcttaagtgcttgaaagacgtaaaccaaagtgcactttatctcatttatctctatggctggaacaccacaggaacaaatttctctaagagactggtgctcccctttagcttgacgaagaaccttcattgagctagctgctgatatgctccgactacctaaggaaaaacacttataacaggtatcacccctgtgtggaccattgccgctttgatacgaagatgcggaaaatcacgagagcagcgagcctctatcatacattgttatcccgctacaataccgacgtattcgacccgatagcactgcatacctaaaaattggcttacaacgtgcaacataactactagcgccgtccaacaacagggccacttcataactccctgaaccttgacatcgactgccaatcacaaatatacgctacaataataatggcctactggagagtctgaca

SEQ ID NO: 136486 - DNA, 754 bp, Homo Sapiens
tgttatcaatgctttattaattctgtacattaagttataggttttacatatacacactccagttaataaacagttgttgaatactagatatgtgtcaggcaccaagccaggcactcttaaattgcttatggttcagtgaggaaaagaggcaatataataccttgtgaaaggggctatgattgcataaagaagatatgcctcacctcgctcaggaggatctgctaagctttttgatttctgagaaggaagaggcctgaattgagcctggaagaataggtaagagaaagcaaggcaaaggaagggagagaaacacatttctggaaaagggagaagcacaggtcaagtcgtggttagagaagcaggaaggagcagatcctgaaggacaccacttaatgtgctggcaattgtcagatggtttttaaaggccactgggagtcctttaaagaggggttaattggggcaggagtggggagtgtgttggtggtttaagagttagatttcaagaaggtcatcactgtttctgaaatctagctgagcgctaatgagagacttaactaaggtagtagaaataaaattgacaagacagggaatgcgggttggcatgagagaccaaaaagtcgtgcatgaccctcaaattttaggcatggtaccatttaccaaatcaggaaaggcaggaggggattgaaggttgtgggatgaggtagaagtcagatttggacatactgtcatccctcaggatagtgggggaatttgt

SEQ ID NO: 136487 - DNA, 475 bp, Homo Sapiens
  misc_feature (447)..(447): n is a, c, g, or t
acgtattcaatattgagtttattaacaaaagtggatgtgtacatagtcttatctcatatttgaatatacacactgcataatgacagctattttttatcagagcaatgtttcccaaacatagaagcgcagaagtaaaatgttattttcatttttctgtattcttgattttagtttctagaattcataaactcaaaactgttcacataagtttagagtatttgttcttgtttatctctgacaaagaggtgttctctaagaaattttatattttataatctttcctctgaaatatgagaaagacatggaatctcctgagttatatatgcagcttatacattctttgaaaaaattattttttaaaaatatcacaaagtatatatccataatatatgttgctattcacacaattctttaagcaatattcaagtatatttgtgctttatattnttacattactttagaacctatttttagc

SEQ ID NO: 136488 - DNA, 1059 bp, Homo Sapiens
tttgtttctttgaattttatctttatttctccataagggcaatcagagaaatatgctttcctttttaacaagctcatctttaatgtggtagcaaagatggaaggtgcgagaccaaatcttaccaaactagctatttttacaggccaataaagcaacatgcaatccccctcaacaaatttaaataatcaggcaatactaagaatgtatattccattaaactaaaataaacaaggttgaaatgtggtacagaattcactgatgagcctgtgaactccacgtgaggatgtccagtgccttatttatctcagtaaccagagtacccagcacacaagataaaagtgggtattacctaagtggccactattttattaataatgcacataacatatgcttatcattaactcttaaaaagattattatttaactatacaagaactaccatacaacatttcaacatacaagttcctatacttcttaagatacacaataatattttgaaagattggaaatgtttcccaaggactttcctatcacaaatcccccccagtaaaaattataggaactgtggaatatggctgctaatattctgagatgaatttagaaagtataagtattgagagatggactttattatagcacctgtagaagaaccaaattcaggcatttatcccatattttctgaaatatttacaaagctcttataacattttcaaataacatttaatttactaagttctatttcatggcaaataagaatcagaaaatttgaggatgctattttttaagtttttccaatacagttaaagcttttgggataaagctgtatttactaaaatgatcctgttctcatttgtggtgctcgttctctttgtcatttcagagcccttgctaagtcacatgcaaatggttacggagagtcgtggtacccactgtctgctccctctgtgtcctcatcactgctgttctactaatgctctcctgaggaggcagagctgagacaggattatcaattttggagcttcataagagaatcttcaggatcttcctcccttttcttgc

SEQ ID NO: 136489 - DNA, 268 bp, Homo Sapiens
  misc_feature (13)..(13): n is a, c, g, or t
  misc_feature (23)..(23): n is a, c, g, or t
ttccttaaaatangcttcacagntgacagctgaaaatacctaggagattaaatatgaggaaagaagagtataaaggaagaaaggtaaagtgtggtgggagttactcaacacacacctaacttacattatagttttaaccaaaaattcgtggagtttcacatacttccaaggcatcaaactaaccccccaaagtgaataaagaaacactgaattatcctatctcctttccattaggttggataattgagaattgagtctggcatgatac

SEQ ID NO: 136490 - DNA, 734 bp, Homo Sapiens
  misc_feature (177)..(181): n is a, c, g, or t
  misc_feature (183)..(183): n is a, c, g, or t
  misc_feature (185)..(187): n is a, c, g, or t
  misc_feature (189)..(245): n is a, c, g, or t
  misc_feature (248)..(248): n is a, c, g, or t
  misc_feature (250)..(250): n is a, c, g, or t
  misc_feature (252)..(255): n is a, c, g, or t
  misc_feature (258)..(279): n is a, c, g, or t
aaattcccaaacccctctagtttccttggccccggggattttcccttatggggaagccacgcttattggccccaaggttccccctttcccttactggggggcccggcgggcgcccaaaaagaaatggtttttagaaaagctttttttgaggggcccgagggcgggcccaacaaaagnnnnntntnnntnnnnnnnnnnnnnnnnnnnnnnnnnnnnnnnnnnnnnnnnnnnnnnnnnnnnnnnnnggngngnnnnggnnnnnnnnnnnnnnnnnnnnnngaaggttaatgctttaatgtattgacattttcacttacaaatgtacaatttgcgtatgtaggaaaaaatcagttctctagacacaacagaatactactagagacgggaaagcaatcacaaaaagatcaactctggggagaaagtggaactgcattccatgccttcgtatctacatacactagggaaggaaaaagaaatattacacaggatcaaaacttgtggaaaatacacttgggtcattttgtctcaactgcaggaccttcttatgatccagatggctaccttaagtccctggatagcctaaaatgggcaaagtctggccttgttcacaaatgatgatccaaaacattaaccacagttctccttctctttagtatccaagaccctggaagttgactcaaggaatggaaaagaacaatcagatcagcatggtatataatatcattgggccactt

SEQ ID NO: 136491 - DNA, 994 bp, Homo Sapiens
agaataagccccacctgactgatgaccatggtggattaagcttcatctttaattattgatattaatgatctactgtgagcaagatgatctctaaggtactttctaattgtgaaatattattctgtcttatgtatcagacataactgatagcctatcactacatgtgctttactgactacatttctgtcggtcttactaaaagtaaagagctcaactgttgtcatcatctaaaggtgccaccacttttatttgtttaccagatcaccagatgatactggtccattacccttgacctagtcagaccttgacaaaagacttaatggtgctatttaggatgcatttccttgctgctttgtgcaggtggctttctcgttgttgcataaacagtgacgggaacatcagttattgtcaggcaatgacttccagggcacctccggagttgcctggttggtgacatctccttcccattacaggcagcactggagctcagcccaggttccagctcaattgaagaatctcctccttccactggaaacctccttggctgggttccaaattgaaaaggcatacttcactgaaaaccaaaagaggctgagtctgattcctgtagaggtgaataaatcaatgctttctactggcctttccacagaaggctggaattgccaaaggaatgatgatcaaatgttccggtgacacccggaaattatgacatcaggagattctttcacatagtttcctacctgctgccagttaccccggcctccggagctgccgatgctcgaagatgttgacaaggcagctaggatatacagtccagaagcccagtcgctacggtaacggtgacacgcaagtgcacttgcgcggccttctgacggaaaaccttagcctgaacctacagacgtgcttagcgacggcagaggcttgcggcagtagcgtgacttacggcagctctctagcagagcgccgttgctgggggaatgcagaagcggccgca

SEQ ID NO: 136492 - DNA, 469 bp, Homo Sapiens
tttttttgaatgtatatatttattataatctccaaaataatttcacttggtacaactgcttcttaaaaccatatcaatatcaggctcagaatttaattacaaccaagcaattcacaaaaacactgagcaacaaaacatgcttaatatttctttgagaaagacccttcaaatatgtgtacagcatcactgggagttacacaaaactgttacaaggtgaccattaagtgccccaattctgcacttctgacatacatgaatggctaatgtaaccacgtttgggaatctttttacatctcaaaataaagctttctgatgcaacttgccatccttttaaattttaaaggatattcttggtaattccttaggaaagtaaaactacacacactttcagagaaacaataagctgcttagatttttaaaattttttatattatacacttcaattatgggttatttattaaagacttca

SEQ ID NO: 136493 - DNA, 1099 bp, Homo Sapiens
  misc_feature (205)..(205): n is a, c, g, or t
  misc_feature (441)..(449): n is a, c, g, or t
  misc_feature (516)..(532): n is a, c, g, or t
gatatacaatattaccacccggggcgcggcgggcggtcatatattctgaagtatacaaagacggctctcccctatgagcggctccacctggggtgggaggaaggagtcccccagttaaggcgtcccctcgtggcgggacctccacattctgtggtgtattggttgcacaaaaaacccgtcttcgtaagttttgcaccgccgcgancgcgggtgttgttttattttacggaagaaaggagttccgcacaaagccggctttggtacaaaatagcccccagagagttctttcctctaaggaagagacgaaaaatgttggggaccccacaatttggcgaccgtttcccctgtaatttggaggcgccgcgggtccgtcccaccaaatcgagagaggtggtttataagaaaaagaatttcttcggggggggcggcaaaaaacacatnnnnnnnnnaaacgtacaatttctggggggcggactgggggaactcctaaaatgcaacccgggctcacaagacttnnnnnnnnnnnnnnnnnatattcacagacacagcaaattatttaatgtctgtaggtgtacctcaccctcacattgctattacgattcaaaagcctccataaactgtcaaactggcagaaccagagaaaccatgggcactttcttccaacagggtttgaaaaccatcaacgctctagtcctgttgacctggaaatggtggcaggtgaagtctctccacagcatgccttgggcctctctgctcaggagaaaaagccccccagttctacatgattcctgaggtcttctgttcttctgcggcctggcgctgggccctgcgccactggaaatagtggtagactcggacactgcagaggtaccccccatacacagtgagaagcatcatggaggtagagaaggtcttatagccaatgtcagctagctgcttgccagttggcatcttgtcccctggatgctgcagctccttcgcatccaaccgaggcctcctcaggcaggcagggtctcgaggccactgtctacgcaacttcccagcacagccgaacgcagcactcggaaccagacacgtgagggtagcgtccctggacccc

SEQ ID NO: 136494 - DNA, 1443 bp, Homo Sapiens
ggatgaaaaaataaaaacattgcatttgatgacattacagtcaaaatgagctctaatacaaatgtatgtggagaggttttgaagaataaatcggatatcccaggggaggttctgctgcttgtaccgtaagatttcttaaaagtagtggatgagcttgtatactataacgttcttcatcatcgtttgtggcataaaggaattcccatggaagattggcccactgacctctaacagcttcaggatttaactttcccacttggatcaataattcttgaaggctaagcactctcccagtgtaaattcccatattagaatcataccccagagaaaacaagtatggcttttcttgtaaaattgcttccttccacttttcatcagataccaaaccaatgtaccagtcacgttcatattcttcaaggtacttaatcagttctctaaagtcttctattggacctaaacttgctttatcaatcattagtttcagagtatacctgaatgctttcagtgctagttgaaacagttctggcttttctgtgagccagtccagagcaacagaccaaggcaaaacaccaccgtaaactctcaatatatgaccaggactaggagccatattgtctattccaaataaactaaaataacaagtcattactgtatgaacataaaagtcttgttaagactttgtccttggcaatttcttccagtacatttgaggccttctcttctgaatgataacattccaactgccttagaacaaattggtaccagtcttctggaaataacgagctcatctccttcattttggaactgggcatacagctagtcctccactctgcgggtaagcatactaagtgagaatgtgaacaactgaactccatgagaggaatatatggcatgtcctcttgttttcctttgtcaacagcagggtatcctaatagaactgctttgtaaagatcgttttcaggaacagtgcctgtagaatgatcaccaaccctctgtgattctactgatcctggaataaacaaatttgtacctggcaaatctttcaactgatgtttttcttctattacttttttgatagttggctcatcatcaaaaatattatcatcagaccagtcattaaaagtttctgaatttaaactgtctatgtcttctggggatttgggaggtggcaaagtgttcaaagcaggcaacattagaggtgctttccctttattttcagtgttgtgaacattctctttcatgccaggccttttggagcagtattgaacaagtatccacacaagtactttaatgaggtcacctttaaattcttttaagttttcataagaatcaattatgcctgatagaacattcctggcatcagaatacaatttcacaggcaaaacagtacagggtgtcaagacatttccaaagtgttcattaagggaacatactcttgtgtat

SEQ ID NO: 136495 - DNA, 882 bp, Homo Sapiens
ggaaaaggaaggaaaatattttattaaaagttttttaaagtttatgaattgaagtctatgaaaacaaactacttgatacaaaaacattcagatattagatgtcaaaataaatcagcacatttgaaaatactataaattatatttcaaacaaatatatacacattatgttaaccttcaacaggatccattatcactacttagaacactgatatgtttatctcttaagtatgtaaaaattacatagctgttaactttgtatggcaattcacctataacacatttaagaaagcattacaaaattcattatatgataattctacaaaagttttctcacatttaccaaagcctactaaagtccagagggcacaaatattggccaaatagttcttttatcttagacataaagatgtttttgctgttttttagaaccattaagatggctaagagaaccaactttacggagcttagctgttctcaggcatctgaatgggggtgtggagaagtcctcaagttacaagaatcacagttacttttttaggatgaaaaaataaaaacattgcatttgatgacattacagtcaaaatgagctctaatacaaatgtatgtggagaggttttgaagaataaatcggatatcccaggggaggttctgctgcttgtaccgtaagatttcttaaaagtagtggatgagcttgtatactataacgttcttcatcatcgtttgtggcataaagtaattcccatgaaagattggcccactgacctctaacagcttcaggatttaactttcccacttggatcaataattcttgaagggtaagcactctcccagtgtaaattccctttaaagtaaaaagggtaggaggaggagaaaaagaaaaga

SEQ ID NO: 136496 - DNA, 511 bp, Homo Sapiens
  misc_feature (146)..(401): n is a, c, g, or t
gtcacagagcagcacagactgagtctgacagaaactctctatacaaatagcacaccttgtcccagctaaaaccctgggccctgggaggacaagacatccctcctctaacccctcgtcactagcccatttgtaaaaaccttgacagnnnnnnnnnnnnnnnnnnnnnnnnnnnnnnnnnnnnnnnnnnnnnnnnnnnnnnnnnnnnnnnnnnnnnnnnnnnnnnnnnnnnnnnnnnnnnnnnnnnnnnnnnnnnnnnnnnnnnnnnnnnnnnnnnnnnnnnnnnnnnnnnnnnnnnnnnnnnnnnnnnnnnnnnnnnnnnnnnnnnnnnnnnnnnnnnnnnnnnnnnnnnnnnnnnnnnnnnnnnnnnnnnnnnnnnnnnnnnnnnnnnnnnnnnnnnnnnncgacagaaaaaaaagaaaccttgacatctttactacaacttagcaacccgctcaggccccctctgcaacggagagctcttcttcctttttgcttattaaacttctgctcc

SEQ ID NO: 136497 - DNA, 821 bp, Homo Sapiens
  misc_feature (709)..(743): n is a, c, g, or t
cctcactatgtacaaaaagtccatttcagctttgacgacatgctagatgcttccattacaggactacaatggctttagaaatgcatttgtagctcaccgaactgtatatctacaatatataagacttagcatatatttaaattatagaaaataaagtacaaggtgttttatttttcttcatggggctttcaggcagacatcaggatcttctcttatccctgtagtaccttgtgtacttctagctgaggacttcttctcaactggatactgcagaggtattacaatgccttgatctggcttctgaaatgctgaaatgagattttttattttccggaaatatcttttatgtaccccaggtgctgtctcagcactccaagaacctgtttctgtctgggacactcggtatgtataaatgtaaccgtgatacagcacacataggcagtacacgcctggcacgctctcgctgtccctcagcaaatagctgccatccagcccagtggcaagcaggagcttctcgccggtttccctgctgattttgccatgatacacagccactgcgtccatggcctggtggactcttgggcaggccgaggaggagaactgtgcaagggagatgccgctgctactgcagccaggcacaagtcaaccacctgactcccccggccgtaatggccgaattcccgggcatatgtccggtaccgtcgactgnnnnnnnnnnnnnnnnnnnnnnnnnnnnnnnnnnncggccgcttcctcgctcactactcgctgcgctcgtcgttcgctgctgagggtagcgccctatatatctatacattcct

SEQ ID NO: 136498 - DNA, 472 bp, Homo Sapiens
  misc_feature (461)..(461): n is a, c, g, or t
gatttttcacagatgaagaagttcacattcattcgattcattgagcctgctgctgtccctgctgcgtgggcggcggctgggggccgccaggacctggggtctgtccgtagtaagcggcctgctgtctgtaatattccgcccaggcggcactgtagtctggctgggagcctgggggagctcctggaccccctccggtggccacttgcgcttgcttcttgtagtactcctcccaagccttcgtgtagtcctgctgtgggggcgctccgggctgctggggctgctggccgatctttttgtaatactcttcccaggccttagtgtagtccgactggccggtgggtgggggctgagggggctcaccctgagccggtggggccgcaggggccggtgcggggccggggacgggcccgggggctgctggtagtagtgtgagtagtaggcggcccacgcggcgttggggntccgcggtcgc

SEQ ID NO: 136499 - DNA, 306 bp, Homo Sapiens
aaaggaagccatcagaggagcttgtggacaggattatacatcatacttcgttccaagagatgaagaacaatccatccacaaattacacaacactgccagacgaaattatgaaccagaaattgtcgcccttcatgagaaagggaattacaggagactggaaaaatccactttacagtagccctgaatgaaaaatttgataaacattatgagcagcaaatgaaggaatctacactgaagtttccgaactgagatctaagaaggtctttctttacttaacatatctgatattaaagatttcttttcatt

SEQ ID NO: 136500 - DNA, 755 bp, Homo Sapiens
  misc_feature (62)..(84): n is a, c, g, or t
  misc_feature (490)..(532): n is a, c, g, or t
agtgccaagctaaaattaaccctcactacaagggaataagcttgcggccgcatacgcggtcnnnnnnnnnnnnnnnnnnnnnnnaaggatttactaatatttattaagtgccaccaacatttcaacgggccacaggcagggctgggagttgggggagaaggagtggctcccctcccgacaacaggtgaccctcacccccggctcagggccccgagggggtcctggaaacactcacgctcaaggagcggaggtgaatggcttcctgttctcacctccgggtccaggcactgggggtgaggaagtggctgggaggccaggaagctggaggaggggaggtgctggggcccagggctgtgcgggaggggatgggatcctgtgggtaccttggcccgtgtgccagggtcgggggaacgtgacactaggtgagaattgggtagaaagtgtgtgtgaaagggcatgcgtgcatgtgatgttggtgccatatctatannnnnnnnnnnnnnnnnnnnnnnnnnnnnnnnnnnnnnnnnnnacatcatcaccgtctgtgtgatgccatcgccgcgtctgtgtgacattaatatgtgtgacgtcgacatggcccgtgacgtcgttgctgcatctcggtgtgacgtcatgccaagttccccatgtctgtgtgcgacgtgctgcatctgcacgacgccatcgctatatctcttcgtgacgtctacatggccacgtgacgcacctcgtgccgattctttggctcgagg

SEQ ID NO: 136501 - DNA, 714 bp, Homo Sapiens
aaaaggcggaatgattcctcttctctgtgtttgataatgcaggtggcttgtttggggcagtggctttctgagactttccaccaaggagtcaccccctgcatcttcactcggccctgtggttcttggcagggcaggactagctgccgtgtgggttaccatcttgcggtccaggcccagattctggcagaagtcttcatcagacccatcaggacactgctgcactccatcgcaggcgagcgtgatgtcaatgcagcagccatcgtcacagaagaagtggtagcgtgagcaagtgtgcaaacatcctcctgtggagtaggctgcgcgaagcactgtcactgacacgttgtcagagcttctctgcccggcagtgtccgtcacggtcagctggaaggtgtaggttccctcctgtaggtgggacagcttcagggttcctgattgaggcaccttcatgtccactgacgggtccccctgcagcagtgcccactcatactggacgatggcgtggtcatctgtgctctcgcggccgtctagaaccaccccgtctgtgggcagatgcagaaccacatcctgcccagccttgctaagtggaggcgcatccttttcctgccggggcgaggcgcgcgcggtggccagggcggcgccgtccggcgcgcggctgaggctgtagctgctgtagccgctgtgcagcgcgaacttgcagacgttgcggccgca

SEQ ID NO: 136502 - DNA, 433 bp, Homo Sapiens
aatgtgtgcactgacccccttgtttgatcaaatttgtgtaaaatttttttagaagagatggcttattaacagggaagaagcttgttatattccagttgtaagaatagccttagtgtttagatttttttatgatagggaagatgcggccatcactgggatattttcaaatcccaaggacatcagagtgaagtgtcagttgtcagatgattttaaaagttatgtcttcagagaaaaaaagattcattttctcattttaagccaattaaatattctgagtgagactaatcactcatttgcctacgaccttttagaaaagttgttttgttgaaatactgtacgtacgcttaatctaaatttgcattgactatgttttagtgtatttataaatggtgaactcagtttctgcaattaaacttcttatttgcaatttaaa

SEQ ID NO: 136503 - DNA, 1331 bp, Homo Sapiens
  misc_feature (43)..(82): n is a, c, g, or t
  misc_feature (85)..(119): n is a, c, g, or t
aaaactgtatagatcactatagggcgctagctcgtccgctagnnnnnnnnnnnnnnnnnnnnnnnnnnnnnnnnnnnnnnnncgnnnnnnnnnnnnnnnnnnnnnnnnnnnnnnnnnnncagtcgacggtaccggacatatgcccgggaattcggccattacggccgggcatgcctaattagcctctggtctgtgatagttccacagtctttctttttcataaccttgacagttttgaggagtactggtcaggtgttttgtagaatattcctcaatttgggtttgtctgatgttttcctcatggttagagtggggttatagatttttaggaagaataccagaggtgaaggtccttctcactgcatcatgtcaggagttacatgctatcagcttgatggtgtattaactttggacacttggttaaggtagtgtgtgttggttttttgctgctgaaaattactgttattttccctttccatacttctgttctttggaaaacagtcactaagtccagtcatgggaggtggtgggtgggaaagattacattcaaccccctggaagtgggaatatccatatgtagtatttggaatttttctatatggaacatttgtttctccctcccaccctaatttgtttacatcagtatggactcatgtatattttgtattttgggtaacacagtatttattttgttgcttaaagttgtccagcattggctattaggagttctgccaggttggctactatgtcccatttgatgtgcccatcacattttgatttttgagcacattctttactttctggcacatacaaagatgctccaggttcatcttgggtattccctggcaccaacccatagaatccctagaatcaatccacatgatccaaaagagcccatggttcctttgtcaggagaatcatacttagaaaccacgatctgggcaatgcagaatggtgctggtgcatactgggatgtcaacatgtcagtagcagagttgagaacatatgtatgtatattaatccatgcaatatgtaacaacatctatcaatcatcaatgtggtgtccaaagcctaacacattgagtttggtattggcagggcattcacacgatcgaaaacatggtccacaaaaacatcagggtggcacataaggcttagcactcgacaaagggcgaccagtgacccctacaatgacaagacagctacaatccgtcaaaaaggacgcaagcacacacaccagacagcacaaaacaagcgggcacaacaaaaacatcacgagacaaagccaccacacaacatgtgaaacgagacacacaaacaaaaacacagca

SEQ ID NO: 136504 - DNA, 771 bp, Homo Sapiens
tttaaaccacacttgtaaaaaagatgttgacaattcataggaaaaaaagctgaaaatgtttctcattaagtcagggttacacaaaggttatatttataatatatatattttgtttattaataatttagagacgaaaaatacggaatggcaaagtgatgcctgctgtagttagatctcagatacttgatcgtttcccacaaacagtgtttcttgacagaaggggttaacaaggaccatcccagtgtctctatagtcgccattggctggggagcggggctctgagagctggtcctcagaggtttcaagggactggatctccctgggcagctccacagcatgcctgttgaagtagtccatggtgatggtgttgttccagtagctcaggttgttctccgggttggcggtcttcttcttcctcttcatgcagcacaccgtcagcaggacagagcaggaggagatgggcacgctgatggccaggatcacccaggcgatatccatcttgctcaggcagatggtggctctgtgctgcggtttgtccccctcggccacatgggagatgttccctgctgtcccaggcttccgagtcccggcggggaccaggcggttgaggaaattcctgtggctgtggataccactgtggagagaggactgggcacccggtcggtcatggtgagggtggccacagtctcctccttggctccagaaatagtgctttctgagacgctggagggatgggttggagcttgtggggttgtggcctagtgccgaatc

SEQ ID NO: 136505 - DNA, 1122 bp, Homo Sapiens
  misc_feature (199)..(214): n is a, c, g, or t
  misc_feature (1004)..(1038): n is a, c, g, or t
ttttaaaattgaaagtgtgcgttctttattctcatattgatacatgcattttctgggggtggaggataagcagcactttccagctgcagttggcttgagaggatgaagcacatgcactttttccagttggtttattgcatttcatgtacagtcatgcagttctccgttcacatgtgacctgtgaacacctatttcgacnnnnnnnnnnnnnnnncacaatttccacagtaaaattttaaatgtttcatacataccactacaatataaaccataaaagatatatttggtaataaaaacttaatagcacttttaagttataaattaacttttaccctggaagctgagatcttcccaccatgtggtgtcttttgccaagaagaggcaacaacattataatgtggaatcaacactgtggctgccctttgctgcacctatcgccgcctcctactatgaattaattcattcgccttctcccccaccccctggcaattagtgcagcagaaacacagaaacgagaggactgtgctgaggttaaccagtttgattccacattgaaggcacgagtgcatataatgttggtaaatctcttcatatcaaaggcatctcaatttagatcacttaaactacagataaaattagatgtgtagaacatatttctaaaatattgtccatattttttccattttaaataaaggtattaaggaattcgtgacaatgtaaaaaaactactctatgcacttagaaaaattgtgaattcgaaaagttggagaataatttttgctaaataaataatcatttggcagtaagttctattctacctaaaataatttgcttgaaatgctgtaacagctacttcttatcaaggaataaagacaggcatcacatcctggtcaaacatgcaaaaccactcccaccccaccccatcctaaaactaaagaaaccttaggctgtcacccggccgtaatggccgaattcccgggcatatgtccggtaccgtcgactgnnnnnnnnnnnnnnnnnnnnnnnnnnnnnnnnnnncggccgcttcctcgctcactacttcgctgcgctcggtcgttcggaaaagacgacgctagcgccatatagtgagtgtatagattt

SEQ ID NO: 136506 - DNA, 710 bp, Homo Sapiens
tcatccacggaatatttaaaaactttctgtcgctcttcagcatgattccataggctaagacctctaaggagttctgcagtatccttctgagagcaagtgttgtgcaatcactgttctttgtaatatccttaagctcttcataggtaaaatattccattaacatgggctgtaaacctcctcttcctctttcatgtgaggaagaaaatctcttgtaaaagcctccaatctctctttcagttgttttgcataatttaactgttcatattcattcttactgtaagaatccagtatatatattttacatataatacatgaaataattgttattcgattgttttatgttattggtaaggcttccagtcaacagtagtaggcttaacattcttcagtcccttttcaaagaggctaagcatctcggagagtttattgtcagaatgtacattataaatggtctggctgcgttgttgaagcaaaccaataatgtattcattttcaatctgctcatgcattttgaactccttgaaagtagcatacaaagactgcagaagagcacggaaatcgttgttgttggaaaaattggttttagaaagcttgtcgcagtagagccccaccagctgcttcatccgccagtgtggggcggtgaagacgtccacttcttcaggaaagggcgccatcgccactgcctcagcctccgcctcagcagccgcggc

SEQ ID NO: 136507 - DNA, 637 bp, Homo Sapiens
gttttcattaagcaactttagtcactaaaaaaagtgcaaatgcagactcctgtataaatctgatttgccatgctaggccaagcttattttattacatacattctgcattctaagaactaataacttcatattgtaaacattaagcatacagagttaaaattcaaggccacattatatcgattgtctcttttgtcgtgtgtctttggctggccgagatcaactcgtagtgtataaatgcataagttatataattattatataaaaagggggaaaaacattgacttgtatacttcattctgacaaacgcacagcgttcgcgactcaaaggaaaactggaggccgcctacccaaaatgcctgcgtgatttctgattgtggcagccaagaaggccatctcttacctgaccctgtggagaacaaagcccccacataatgatgaggtcctgaatgtttctcttaaatatcagacaattccagttaaaattttcatttgacaaacaaagaaagagatgcgcatttttgtttctgaattctactacttcccctttctccattacgctgtgtcctttctcctaacactgggtttggtataacactgactgcatgaacctcgagtctcataactcattgtacacagt

SEQ ID NO: 136508 - DNA, 626 bp, Homo Sapiens
  misc_feature (609)..(609): n is a, c, g, or t
ttatatatatttttaaatgttcaatattcaactattgaaacaaatgtacatctgtgaactagctaaaatcatcttatgtaccactaatatgcccagcacattttgtaaaacagtcctgatttggcctccaagggtatttattgaactaccagcagtatctaggagaccacgaaggaataccacgaaggaatttatgctccagtgcttgccataatttgtctgagaaggaatctgttaaataaaagcttttatcctctaacctttaccttcatcagaccttataaaaggtccaaatggtgattcttaagttttttagtcacaaatcttacttattcagtattagtgcgaagagtagaatactttcaagtaagcctaaacttacatgaaaacaaattacataaatctagctctgagaataggaaattagtgacaagatcaatctgtaagatgttgagcacttatctgaagtaaatgggtaatgagtttcacatcttataaatacaagttagcatgtgttttctcaagagtccaagggttttcattattggactacagctttaatcttctaaatgttattccccaagattaaagagcatctcaagttagatnaccaaagatcaaaagct

SEQ ID NO: 136509 - DNA, 941 bp, Homo Sapiens
  misc_feature (83)..(101): n is a, c, g, or t
  misc_feature (111)..(112): n is a, c, g, or t
  misc_feature (117)..(271): n is a, c, g, or t
  misc_feature (841)..(841): n is a, c, g, or t
  misc_feature (920)..(920): n is a, c, g, or t
gggggaaccacgttttgcccccttttcttctttccttgtgggggggcccgcccccccaaaagaagtgttttaaaaaatttttnnnnnnnnnnnnnnnnnnncaaaattggnnttttnnnnnnnnnnnnnnnnnnnnnnnnnnnnnnnnnnnnnnnnnnnnnnnnnnnnnnnnnnnnnnnnnnnnnnnnnnnnnnnnnnnnnnnnnnnnnnnnnnnnnnnnnnnnnnnnnnnnnnnnnnnnnnnnnnnnnnnnnnnnnnnnnnnnnnnnnnnttttttactgagtctggttgtttattgaatgcaaattcattcatagaaaacggaaatgcaaccatagcatggagacgctctgagaaaagatccagacccacctcatctcccagcccttcaagcagagctataaaaacaagtttgggagaaaaacacattcccatccccaaagcagaggccccgcctgagctcccccatcctcagcatctggggtggaccaggtgggacgaaggggatccaaggaccagggtggccagggtgcccagagctggggcaattctttgtaaactccaaggtttcataggtatgtgtgtgcatgactaacacagaacttgcctgaagactggacggaaacttagaagccagccctgggtcctagagcgaggctaggactgggcacgtagagggaaacagcacatcccttcctgaagcccctttctaaggtaggcactggggtgcccacagctatggaggcagaacgggctgaactctgtatcatccctcctttgcccctggacattcttgggcagtgtcaatggcactgaaaggccaccagctggggtttggcangactaaggggtgaggcgcttctccctccattcctggtgctggcatcagtctgggagctggctcgtggcgaattcttggnctcgaggggcaattcctatag

SEQ ID NO: 136510 - DNA, 489 bp, Homo Sapiens
tttttttaatggggaataacatttttttatgagggaaccctttaaaatggatgcacacagtggcattttctcctaggctcaaagctgagtacactcccgtaattttaataatattttaggcaagtcctatgacaattataccaacaagtttcttcaaccccaccaccaccccaccatctctatgctttgcttgcccagactcccttcaccctttcctctgctattaccgcttatggttgaaagtaaaaagcatctccagattacagcaaattcagtggccctgctccatagcctggcctctgctgaaggaagaaaaggggtgaaacatgaacagccatcatgggttgtgatgaggcactaccagaagcccagcttgtgtttcaaaaacaggctcttggacactttcccagcagataactcttcactggcttggagaacaggaaggactatttcacaaacaccactgtgtttgaatttctagaggctacc

SEQ ID NO: 136511 - DNA, 1060 bp, Homo Sapiens
tgagtacattagaatctttgggcaagtttcgcatcagaaagagaatccccctcatgtcctcttacattaaatgcatttcggtttaagcctggtgctttcccaaatacccaggattgccaacaaactttccaggaatgtaaggcctaatgaatccacactggaaggttaaggttcccaaacctgaggttaattgaatactctgcaatacggttaccatagtttttttggtactagcccagccatcccattgatcttcctgcattttcaccactttgggtcattttcaggtttttcaatacattccattacatctccttttctcgaaattaagttcttcatcattagatgagctgaatgggtaaagagcctgtaccacatgcaacacttgcccagtatttaggttattgacgactgctgctaatttctctgacagagaacccacatggtcacccaaaggactgtcactttcttcagttacatagtttgaagggaaccatccaacttgtccattgtagctaccacgccaccacccatcactgcatttctccatgacgatcacctttgtcccctttatcaatgataattcatcctctctctcagccatgtagttaaatttcacataagcgggcatgttgaggtcatagagacgttcccctgggtcaacaaaactatcatcagcaggagatgcagaatctggcacactaggttttcttttcacttttccaatgcctaaggtatcctttaggtttttcacaatagatgctttccgagcactgtttttcctttccacatagttagaaggcacaaaacctgttttattcatggaatttcgaactcgccaccaggacttagaatcatccagaagccataatctctcattcttcttgatgtccaactcttgttcttgttgggccacataatcaaatttggctactaccaccacttcttctgccatctttcagcagcttcagcactgaggagggctccaggacgccactgcggccgccgtgatggccgtaacggcacgaggcctgcgctccgccgccgccgcgtagctctt

SEQ ID NO: 136512 - DNA, 752 bp, Homo Sapiens
  misc_feature (42)..(42): n is a, c, g, or t
gtaatcttcggcgatgtactgagcataagctataagtcatcntgcttgatcaaacacatctttcgtcattaaccaagacattcgtgtcacacatttgaagccagttacagttggcagagatatagtatcttggatgtgaagttccaaaatatacctgctctaaggtggcagcaaagccctgtctgtctgctacgtaaggcagcccgtgaaccaagcctactttttctgtcatttgattcaccatgtcagtaagcgtatctggaattactcttattccactatcacaaatccatataagatcatactttgcaacttcatatcctggcattaaattattaattttaggattaatgccaacttttttgccacctataaacaatctagcatcaacatttggatattttccaagaagcttcttacatacatcaatggctggatcatcatgatcttgtacacaaaggagcacttcatatttgggataatccaattcaaagaatgtttccaggttgttgattaagttaggatctacccctttcagtggtttcagaagagagacacctgggagcttgctataaggctgtttgtcagttgccttcttgttgaggtgtaatcgggtgtagatgatagccatgaaatgcatcagccacagcaccaagaagaggacgaacccgaagacggccattccctccaaggccaggtccagcagcgccatcccccggcccgccggaccggcccggcccgctgcggccgca

SEQ ID NO: 136513 - DNA, 801 bp, Homo Sapiens
  misc_feature (19)..(19): n is a, c, g, or t
  misc_feature (461)..(578): n is a, c, g, or t
aaataaaatagttttcacntttattttgttttcccaatttccctccccagcaatgtgacaatacacataactagctgctgggaaattttctgagcactttgtggaaactgttggctttcagaaatgagcaggctgatttgaaccaaaaattagacaaaatacagaattgcaacaacaataaaacgcaacttagaatgaggatcaagccaagcagataagcaaactttataaaatcagttaactggggctgttcatcaagtcagttccctaatttcaaaaagccgaaccaaagcaaagcatgttgacttacattgcttctttagttctttcagctgttgtttaaactgtacaaatttttcattaattttggaaagtctgcatcagaattcttgctctgtaaagccaaaaatttcttctctaccaataattttaaatctggtattttttctggacgttcttcnnnnnnnnnnnnnnnnnnnnnnnnnnnnnnnnnnnnnnnnnnnnnnnnnnnnnnnnnnnnnnnnnnnnnnnnnnnnnnnnnnnnnnnnnnnnnnnnnnnnnnnnnnnnnnnnnnnnnngattgaacagcctttacataatggtttagttgccgatccaatgtagcaaattcaaccattgccttgtccatactatattcactactcacttcagtctgactttccacaagatccaaagcaacactagaagctgtgtccataccagttgatacaggcttggaagtttttcaaggaggagagagcagactctacaccactgaaggagatgaaaccagttgaaccc

SEQ ID NO: 136514 - DNA, 1069 bp, Homo Sapiens
ttccgacaaacgagtcgtgggagatgtgacagaaacgagtgtgccagagatgcgccccaacggggaacgttcaaaaacggggggagactggtcccagagaaggtttccaacggagagagattcttctgtaagttcccatgcgtcaaaggttatccggagagatcgacttcataaagcgtggctacaccacttgaggcaataggccttttctccgcttttgcctggactcatcagcgaacaatggcgtcctcttcataggtgtgccacacacgttatttggtcactgcttctgtcatttcctccctttgtaatggggcaggtgaagttggtctgactttgggtcacaattatatcttcatccactccttctgttccgtcagcttctctgtcagcttgaagaccacattgcttctttagttctttcagctgttgtttaaactgtacaaatttttcattattttgaaagtctgcatcagaattcttgctctgtaaagccaaaaatttcttctctaccaataattttaaatctggtattttttctggacgttcttctttcacatgatttattgtagattgaacagcctttacataatggtttagttgccgatccaatgtagcaaattcaaccattgccttgtccatactatattcactactcacttcagtctgactttccacaagatccaaagcaacactagaagctgtgtccataccagagttgatacaggcttggaagtttttcaaggaggagagagcagactctacaccactgaaggagatgaaaccagttgaacctgaatttgaactggaacgtcctggcatcttgaaattagtacctgggccaccaaacacagctggactcaatatatggggaaggtaagtgtcctcagtttttggagagagattaccctcttccaaaagagtgcttgattctgtgaagaagtcaacaatagcacagttcttaaaagcctggtagtccaagctgtctccgtctggtggcaccccaatttcccttggcctagacccacctcctttcctcagcccccttcgcctgccgctgaaaagtccc

SEQ ID NO: 136515 - DNA, 771 bp, Homo Sapiens
  misc_feature (35)..(35): n is a, c, g, or t
  misc_feature (83)..(83): n is a, c, g, or t
  misc_feature (100)..(100): n is a, c, g, or t
  misc_feature (316)..(316): n is a, c, g, or t
ttcctgaacttttggggtccaccaattaatattcnttcatcccactccccttctgtttccgttcagcttctcctgtcagcttngaagacccaccattgcnttccttagttctttcagctgttgtttaaactgtacaaatttttccattattttgaaagtctgcatcagaattcttgctctgtaaagccaaaaaatttcttctctaccaaataattttaaatctggtattttttctggacgttcttctttcacatgatttattggtagattgaacagccttttacattaatggtttagttgccgatccaatgtagcnaaattcaaccattgccttgtccatactatattcaactactcacttcagtctgacttttccacaagatccaaagcaacactagaagctgtgtccataccagagttgatacaggcttggaagtttttcaaggaggagagagcagactctacaccactgaaggagatgaaaccagttgaacctgaatttgaactggaacgtcctggcatcttgaaattagtacctgggccaccaaacacagctggactcaatatatggggaaggtaagtgtcctcagtttttggagagagattaccctcttccaaaagagtgcttgattctggtagtccaagctgtctccgtctggtggcaccccaatttctcctgcctagacccacctcctttcctcagcccccttcgcctgccgctgaaaagtgagagcgggctcttgcgtcatcagccgtcgccggcgagtgccc

SEQ ID NO: 136516 - DNA, 473 bp, Homo Sapiens
  misc_feature (307)..(379): n is a, c, g, or t
  misc_feature (384)..(401): n is a, c, g, or t
aggattatagtgcaatcttatgttgaaagaatgaactacctcactagtagttcacgtgatgtctgacagatgttgagtttcattgtgtttgtgtgttcaaatttttaaatattctgagatactcttgtgaggtcactctaatgccctgggtgccttggcacagttttagaaataccagttgaaaatatttgctcaggaatatgcaactaggaaggggcagaatcagaatttaagctttcatattctagccttcagtcttgttcttcaaccatttttaggaactttcccataaggttatgttttccannnnnnnnnnnnnnnnnnnnnnnnnnnnnnnnnnnnnnnnnnnnnnnnnnnnnnnnnnnnnnnnnnnnnnnnntacgnnnnnnnnnnnnnnnnnntatccaggtatggtggtgtgtgcctgtagtcctatctactcaagggtggggcaggaggatcacttgagccca

SEQ ID NO: 136517 - DNA, 418 bp, Homo Sapiens
tgtattactcagtctatcaattcaaattttattctcatctggaaacaccctcacagatacaacaaaataacgtttgtccaaatgtctgggcacccagtgatccagtcaagttgacacataaaatgaaccatcacaggtccactgttgtcaacttgacacccatacacatcttcctaaatcgtacttaatctccaaataaagacaataacaaggtcataattctgcctgacatagtacaattatcctgcattcaactaaaatcacactaacctcttccccagaagaggaggttaagtccttgagtgatgtttacttttctccttgatatctcatatgatgcataattaataatgcttaaatactatgatataaagtcaatacaatttatgttacatggataacagaataagaaagaaaa

SEQ ID NO: 136518 - DNA, 842 bp, Homo Sapiens
gctgcctcaggccaggcccccacggccccgctctgcccctgccttttctcctatatcctgtagtctatctgactccccatcctggaattgttacagcaggggtcccttgggccaacctgaggtttgttttgtccctaaatctcccccactgactgtttctccccgggtctgataatgcctttatgttcaatcccaggatatagccccaagatggggtaacagtgggaaatatgctagttcccctccaggccgctgattccatgtgacagccgttaagtccttggaatgccagccacgctgtccaaggcattacagagtatcaccttgagacagaacaaaacagggacctgccaccccttccctccctccgcagcacaagattttgggaccacaaaaaaaagtctatatttttatattggggggagggagtagaaaagcaagcccctatactgggccctattcagtggcagcttcttgttccataggattaaggaagactctgaggaaataaaagttgtttggaaaaatccaggtgtagttgctttgtatgttgtgatgggtagaagggatgaagtgaagtgtgaaggcccctcataccctccatcttgcctcagactatgtcctggaaccctggggcggagaaagcgccactttcattcctgcttcttgggattgttgacggccacgtagtgatagagaacgacaagcaagaagagcgacacgcccagcatgttggcgaagatggcgagctgcacgtccgtgatcatcctgaccagtccggctcggctccgacgccaccagcgaacaagcccgaagtcagagccctggaccggaacttcccc

SEQ ID NO: 136519 - DNA, 1321 bp, Homo Sapiens
ggtgttggtgcaaacaaaagctgccacatgtttattaagacattactggctcttaagcacagctggatctataaatcattttccatatattatcacatattcaggaaagtttctgagatgatatatcaagacaggcttctcttgtgactcaactggacttcaaatagtctctttagaagtctgagtaatggtgcaacctatacatcagggccttgcccttttcattccccaaggcaaagtatccacttctcggagaaaaatccatggtatgaacatgagaaatattcttatttttaatgactgggaagtttgaaaatactgtacaggaaggaagatgaaccaatctgactgcttctttcattttttctgaagcaattgccaagatttctgtagtaggattgaaggtcagagaagtaacacctgtaaccaagttcattatagcttttattggctttgggtttgtttcttggagacaagaatcttgattgtatatatttaccactccacaattagaaccacaagcaacatactgtccattcctagatgtggcaatgcttaatccatataaactgccttcatcaacaaatctgttaaggcacttccttgagttcacatcccaaacataaacttctccatcccccgaagaggcgtatactttcttactatctgaagagaatgtggatgctgcaacccttccattaattttcatgcttccaatcagttctttggtcttcattgctagcaaatgcaaatatccagcaatgccatttatgagcaagaaggacccatctggggagacttcaaagctcctcactatcttctctttcaaacctctcacttgatgcacaggaattaactttccagccagcatgtcatagacataaagaaccttgctgtgggtactcgtggctaaaacttcttccccattagcactaaaacaagccttaaagattggaaacctttccaaatagatgctctgaattttaggatttgttttcccatcaacctgaaatagtgatacagcattatctaatccagcaaccatcacaatctgtgcaccgggatggaactgcacagatgagatccgagcaacagtaggacgttcagcattcgcatgctggcagttcttcatcttcaagatgcctcttggaagagaagttgatgtggatatgaaattcccagtcctttgcaacaaatcatcttcatcctcttcactttcatcatctgaagatgttttccgcttagtagtctctgcccaggcaggcggacgcgtgggcggacgcgtgggtcgacgatatcccgggaattccggaccggtacc

SEQ ID NO: 136520 - DNA, 1236 bp, Homo Sapiens
  misc_feature (147)..(147): n is a, c, g, or t
  misc_feature (164)..(165): n is a, c, g, or t
  misc_feature (243)..(243): n is a, c, g, or t
tcccaatcgccccttttataggaagccaaggaaagggacccccctcctggggggagactcttcaaaaggctcccctccctaatttttctcttttcaaaaccctttccaactttgatgcaccaggaaattaaccttttcccagcccangccatgtcatagacatnnaaaagaacccttggctgtggggtactcgtgggctaaaaacttcttccccccattagcactaaaacaagcccttaaagnattggaaacctttccaaaatagatgctctgaattttaggatttgttttcccatcaacctgaaatagtgatacagcattatctaatccagcaaccatcacaatctgtgcaccgggatggaactgcacagatgagatccgagcaacagtaggacgttcagcattcgcatgctggcagttcttcatcttcaagattcctcttggaagagaagttgatgtggatatgaaattcccagtcctttgcaacaaatcatcttcatcctcttcactttcatcatctgaagatgttttccgcttagtagtctctgcccaggcaggtactcctcccatggcatgttggaattcttctttaagtctctttttaaggttgtctttcgaaagtttactttcactagcatttttcatcatatccttccgaaaccgattgttcatcatgtcaaccatttcctcatcttcatcttcttcatccacccaaactggcttcttttgaggtggaaaattaccttttgcttcattctccacttctgagtcacccgagtcttcatgttcttgaaccctcgggcctcgcagacgccgcagcaacgcgtcctcgtcgttctcgacgtcgccgaagaccagctcctccaagcaccgctccacggccggtttgtcctcctccagcctcaggcggttccgctgccggagccgtctctcttcctccgccgccgcgactgcaatcgcagcggccgccgcgctcggccgggccggcggtttccgctgggatgaaggggcaggcttttggggaggcccgcctggccccgctccggctttccagtccggcctcattccgggcttccaccgcttcggcttcgctccggttctccggtccagtttcattcgtctcctccgctccggcctcgtgccgaattcgccacccaggcctcgctaccttaggaccgtatagtactgccgtcttaacacctgctttttgacatgcctctctttgtttttttggtt

SEQ ID NO: 136521 - DNA, 593 bp, Homo Sapiens
agaaatggccttttgttagatttaaaccgacatactgaaaaattacaaaacattgctgaaagaaattaaagacttaaataaatggaaagacatccatgttcatagattggaagacttaatattgttaagatggcaatactccaaatttatccacagattgaacacaatccctataaaaatcttacttgccattcttgcagaaattgacaagctgcttgtgaagttcatgtggaaattcaagggaatcacaataggcaaaaatgttggcaaaattgaataacttacacgccgtggttttaaagcctattacaaagctgtagtaatcaaaactgcacagtaataaaaactggcataaggagagatataggtccatgggaataaaatgggagagttcagaaataaacacatctatttatcatcaattgattttcaaagagggtaccaagactattcagtggggaaagaatagtctccattcaacgaatggtgctgggaaaaggatatctacatgcaaaagaatgaggctgggcacctatttcacaccatgcacaaaagttaagtccaaatggttcacaggcatgttagtgcagaag

SEQ ID NO: 136522 - DNA, 309 bp, Homo Sapiens
  misc_feature (187)..(187): n is a, c, g, or t
tgattccaaattaaaagttttctttctccaacctgagggcacggcaaaaagatctggttattttttagccaggaacgtgcttgttaatgagtatgtctggaggacagacctgctcattaggtgtgctgtcccctgtagcctcgtgagtcagcccagaggagggtacatgcgactgtgggcctgggcntcagtggtacccacacatcagcactaccacaaggaaccaacactgagccttcgggaagctagattcacaggttagggggttttttttaggatggggggtttttgaaattttgcagttttctt

SEQ ID NO: 136523 - DNA, 691 bp, Homo Sapiens
agacccgagttttataagaaatttattttttcacagatacagaacataaatccaagaaaaattattattatttttcacaattatgactaaatcatgttatttctagttatttacaagtactacaatgttctatgcatttcttcatcctagacattaataaaacacatccctttggtcttagatacttctctttggtctgtgttttctcctttctgaattttaatcttctgtgatgtgaggaaatttacgtgaacctttcacatatctatttttttccttgtgcacagttgataatttcctcccttagattccctatttgctcaaaaggcaaatcctctaagaagtcatctgcagcccatagcattcgtctcagagcagaaagaattagaacatcctttacagggtccagctcccactcagaggaataattgctaaccaccgagatgtcagaaagagcaaatccaagttttctttggacttcctctagcttggacctcacaggctcacatctctctatttctataggtcaccttttgtaatcaaatccatgctatccacatgagtgagcaaaggcacatgtaccacaccagcgtttaccacctcctttcgaattcttttgatctttactatcatctgagaggagaagtatgatagagctggcatcaaatacaatgcacacaatgaatctgtc

SEQ ID NO: 136524 - DNA, 615 bp, Homo Sapiens
agatacttctctttggtctgtgttttctcctttctgaagtgtaatcttctgtgatgtgaggaaatttacgtgagcctttcacataactatttttttccttgtgcacagttgataatttcctcccttagattccctatttgctcaaaaggcaaatcctctaggaagtcatctggcgcccatagcattcgtctcagagcagaaggaattagaacatcctttacagggtccagctcccactcagagggataattggtaaccaccgggatgtcggaaagggcaaatccaagttttctttggacttcctctagcccagaaaatgtgtttacgaagggcatcattcattaccttggacctcacaggctcacatctctctatttctataaggtcaccttttgtaatcaaatccatgctatccacatgagtgagcagagccacatgtaccacaccagcgtttaccaactcccttcgaattcttttgatctttactatcatctgagaggagaagtattgaatagagctggcatcaaatacaaatgccacacaatgaattctgtccttcagcgatggggaatcaatgtagtcatgatgatttaatttgatgattccatggaagaa

SEQ ID NO: 136525 - DNA, 1713 bp, Homo Sapiens
tttgacattacaaagttttttaattcttttaacttagtccagacacaagaagccagattatattttaggtgtcgacagaactatttgtttaaaatagcaagttcaggtgagttagtagtcatgaaaattaaaatgaaataccaattccatttcctcgtgtacctctttgcaaatgtcggacaaagcagagttttataatagtttaataacttgtgtaacaacggtggctttggtgtatctctaaagtggagtctttaaattataaaggattttgtgtgcttgaaatcattttcactcattgtcgtggctttagatgaagaattactcttctggaaggaggtttcttttgaaaagtagcctttcctctgagcatagcatacaccaaggccacaaacggaaatcactaaggccacaactactacggctgctatgatgccacttatgttgagatcatctacttgcattcgtttcccaggacacctgcgatatccaacagaattgcgggcttcacaggaatattctccagtgtccagtttggaaacagtattaaattgcagagttccagtttttgtattcattgtgtatgagctgttggtgctttgggagccaagtctgggattttctagcaaacggatgccatccttaaaccatgtgtattcaggagctggattcccttctttgtcttgacatcgtagctctaccacagttccactcagagcagaagagggtacttcacatgatggaactgctggagccactaatacttccagagtgactgtatcctcttccaggttttggccttgctcagatggggcactaacttcacaacgatatttccccgcatcacttcttgtcacatttttgatccggatattgaaatctatcatctcagctcgatttttaaaatcaccttgaagagtctgttgatagtagacaaaggagacactccgacccagtttcttccactctaatctggaggaaacagtcttctttggggttttgcaggctaaaatagcctcttggtactctactgctgtgactacttgttggtcttttggggcagaaaacccataggccttatgatagcccagggcgaccaccaggtagcgcagcagcagcaggaggaggcggtggcggctcctcctcgccatcttcccggggcggcagccggctgctctgaggaggtcgagggtcccggcggcaggagcgcaggaggccgggggcccttgaacttctggggcgggaaaggagcagagagtcgggaggggaggaagaggagggacggctctagatgggatgtcagtttccccctccccggggcgccttctcagctggctgccaagaggcgggtcctccagcccagggatgggggtctgttctgttttgggggtgtgtggggtaggggctagagggcgtgaaaaccagacgaggcgtccgccgggtcctagcgagggggcagcaggaggagagcagcgcccgggaaagccccggcgggtcgtccctccgcccccacgcctccgggattgatcggctttgtgtctggtccgcgcggggctgccagctgtccccagggcgaggagctgggggcgggaggcgcgggcaggctgggggtggggggattgggtgtctcggggacggggatgtatgcgggtagggaaacgcctcctgttttgccccaactcctttcttccccatcccgggaattccggaccg

SEQ ID NO: 136526 - DNA, 630 bp, Homo Sapiens
  misc_feature (490)..(490): n is a, c, g, or t
  misc_feature (519)..(519): n is a, c, g, or t
  misc_feature (558)..(558): n is a, c, g, or t
  misc_feature (579)..(579): n is a, c, g, or t
  misc_feature (593)..(593): n is a, c, g, or t
  misc_feature (600)..(600): n is a, c, g, or t
catcacagtatttaaacaattagaattttactttatttcagaataagtttacagttgaaaaatgattatttactaaagccacattattcatacagacaaaacttttatagcaaaaccttggtacatgagcattaataatttgaatactatatggatatagaagatatttaaaaaatggaaacaatgtattccaaaggctgtaagaggcacaatatatatgcttgtactgggcctgcaagcattatactataattcattaaatatgatccaagaagttgcagatttttcagcactatgtactgaaaagataaaaaggaatatcatagctactcttacgctgaagaagcatctactatcaagactacaaaataggagcagcaagccaaaccaacagataatgccttaggttttaggagaaataatacatgtatggctttttcatgttccattttcgagcttggttagcaagtctggccaggtgggaaaaganggaaattagccttttaggaaaccgttaangccctaatttccaaggcacccggtattttaacaggtccnaccttgggaaattataacccngggcctggattttnggccaantttcgggggtttccttgcccaaaaaaaggg

SEQ ID NO: 136527 - DNA, 412 bp, Homo Sapiens
gcggccgctggaggtgcggcggggggtgcgcgcccaggcctgcgccttctggaaccgcttcctccccaaattgctcagcgccaccgacacgctcgacgaggcggagcgccagtggaaggccgagttccaccgctggagctcctacatggtgcactggaagaaccagttcgaccactacagcaagcaggatcgctgctcagacctgtgaccccggcgggacccccatgtcctccgctccgcccggccccctagctgtatatactatttatttcagggctgggctataacacagacgagccccagactctgcccatccccaccccaccccgacgtcccccggggctcccggtcctctgcatgtctcaggctgagctccctcccccggggtgccttcgcccctctgggctgccaa

SEQ ID NO: 136528 - DNA, 469 bp, Homo Sapiens
ttgccttttattattattattaacatagtgagcacaggcgtttcgtactctgcgtctgattttccagcagcgaagcttctgccatccgccccaccgtcccgctggctcttgctcattgtctttcccttccctgcttgcctgctccctcacgcccctgctctgcgtgttggatgtgaaaaggatgtcagggactaggcggagggcatgttcctccgagcccaggctgcaccttggcacagtggagggtccacccaccccaggtagcccaggtgaggcccctgggtccccctgtcactcaggctgtccacatgaaagtccagatgtctccgaccaacagatccctgggagaaaggacgtgacgctgccgcttcaccgggatgggttcccacgtccctccgcgttgacccacagcttccttacggtcttgtatgtagtttgatgcttttaagggccggccacggtggctcaa

SEQ ID NO: 136529 - DNA, 681 bp, Homo Sapiens
  misc_feature (232)..(264): n is a, c, g, or t
tttagggtcagcatgaacagctctttcttgtatgcgatttaaaacaaactggaaaggaaacttcacacgtcaaaatccatagaagcgcctggacgaggcttaaagtgctttgtgagtgaataggagccattcgctaattctagacccacagtgtctggtggtggggcttcccttgtggggcttctggtggtggttttgccttttcttttccctcctccatgttcttctaaannnnnnnnnnnnnnnnnnnnnnnnnnnnnnnnnttcttcaggtctctaagcccctggaagcagcattgtgtgatattctcagaggcaggggaaaatagagggaaaaatagagactattggtatgttctccccatcagcgagttattgtaactggtcaccactggacgggaaggagaacagaggagagggaaagagaagcccaacctctgtgatcatatgagggccaaggctgagcagtgtagacagagaccctttgaaatgcatttgtctctcaaatagactagtaaacaccgacttctcctttgggttacaaacaccatttcaacctttcgggagagtcagagctaggatgtacaagaactgattctaaccagaagtccgcaagtactgtggacaagaatgcttaaccatgctgcttcagccttgagagacctaggttcttacacatat

SEQ ID NO: 136530 - DNA, 512 bp, Homo Sapiens
ttttttaaaatatcaaaagaagtttattaaaatacatattttgttatacataaaacttagaaatatttcaagatttacatacatcaacttttgcaatcttcctgctggtaaaaatacaaaacagcagcataagaaccagttactcatatactcaactatattcatgcatacttaacaaaatgaaaagttctcctaaaaactggcaagatacaaaatgtcaaatctaaaatgatatatatacttacgtttttagcattcttacagattacaaacccttaccaacattaatcttggcctactttaaagttgagtgatagcatgaactctgaaaagagaatgcatgggttttctcacagctatatggccttggacaagtcacttgtcagttccctcatctacaaaaagggggttaaaaatattcacatcacagaaatgagattaagtagtttaacacataatggctaacatttcattgcttacgtgtttttgaaactacagggcacttttatggt

SEQ ID NO: 136531 - DNA, 494 bp, Homo Sapiens
  misc_feature (446)..(446): n is a, c, g, or t
  misc_feature (480)..(480): n is a, c, g, or t
taactttaagagattttttttaatgaaggaacaaatcaaaatggctcagaaaaatcagatggagtggatacacaaataaaatacatgttaatgcttaacacattgaatacaaattttctttatactaaagactttaaaatgtccatgtgttaatttcttttggaggtggaaaaatagtttgtccaaaaagacacttttcacagttgaaggaacttgaaagttctgtcccagtgagtcctaatggttttatttcaggcagcagattcattgtcaaatatcttactttttaaggtctgtaggttatgctgaataaaattctctgcaccatgaacttcagagaatctgaagtcacttctcctgacagaccagtttttcaattttattgaatctgaaatgtggccgatgtaaagtagtaacctatagggtcaaaccacagttggaaccancattccgagagtgattgggacatggccttaatgntgccctactgggca

SEQ ID NO: 136532 - DNA, 829 bp, Homo Sapiens
  misc_feature (320)..(341): n is a, c, g, or t
  misc_feature (364)..(512): n is a, c, g, or t
ctcagggtctgccaaggtgggggtcaagggccatgggggcaggtagctctgcctgcaaagcccacaagcatgtcagatcacctgggctgcagacagacaaacacctgagctgttctgaataccttcaggttcctggcctccctgagcaagtgcagaaatttttaccttcaaggatcagggtttttctgtttgtttgttttttaacacacacatatgtgaacaaagagtatgcgtttgtactggcagaagaagcgtctggtaagacaaccagcaagttaacaatggtcacctccagaaatgggctgggtaaaccaaagaannnnnnnnnnnnnnnnnnnnnngagtcaggctctagctctgtcannnnnnnnnnnnnnnnnnnnnnnnnnnnnnnnnnnnnnnnnnnnnnnnnnnnnnnnnnnnnnnnnnnnnnnnnnnnnnnnnnnnnnnnnnnnnnnnnnnnnnnnnnnnnnnnnnnnnnnnnnnnnnnnnnnnnnnnnnnnnnnnnnnnnagtgtttcaccatgttgcccaggcaggtctcaaactcctgggctcaagtggtcctccagcttcagcctcccaaagtgctaggattataggtgtgagcccacagtgcccagccccgtagtggagaatttctgttgaatgaaccaaaagcaacttgccaacctctccatgcaccatgtgtttcagaggagaaagcacagtgaagaatgcagtgtgttctgaggtcctgtcacccctgaggctgtgtgtgtcctttgccaaattaaagagtcttactgaatgcggtgcatccaggagacaggcccaggtttggactggtc

SEQ ID NO: 136533 - DNA, 1639 bp, Homo Sapiens
ggcgtaaggtcagcagcattttgtctaataagtgatgagatcaagtagctgaagtctctaagctgggccatatctaaatacccatagccattttgatctgtaaatttatccctctagtgtcttacctcacataagccatttgcccactgtgcaatatagaaaggtgttttcaaaaagtatttggccgtagattttcacatccatcataaggttggcattcaataaggaaaaagttctaactccagtattaaattgtacataaatcccaaatgttcttaaagaacactcagggacatgtttgttgcctgggattggtaatgaaaggttggtttttgaaacttgaaatttcaccattggtttttttcctatcatttctgcatatccagcaaaaggaatctcatgttgactcctggcagagttcagtggcttcagtctgtctatctgttctgaggggaaaattgtgttctggatccagtaatcaatttggcaactttaatcgaggttttcaaaattccaaggagggttaataaagaatgataatcagttttatttgctaatagctaagacaaatttgtaataaagtgttttataatacttcaaaagcatgtggaagagtgtgccgtttctgtgtcacacattttaaatgcacttgaaacaccacacagcaaggccattgaaactgggctcctggggctaagtcgctgctgctggaacatcatcttcagtaagatctgctggtttgggggcttctagtttttaaataataaccagattcaacttctgtgactaaagaaaaacttcacattaacggtattttataaaattttcaactacaaccactagtcaacctaaaaccttagtgcataaagaactgaaccacaaaagggtttcatgctgccagcattttgccttctggtttcccctgcagagcacaggtcatcaatagaacacatccagttcaaaggcatggactccaccgccacacactagacaccactccggcacttgggaatgatgggcccagtcaggtccgcaagcctcctcttcctcacaaggtcattgttgttcatcattgcgttggatgcccgaagccggggtccttgctgggtaaagtggtagccgaatttgagaagtgttgcgtttttttccaacatgctcacaatctccatttccactttgttgcccaggggctggctctggttgtcaattttcatttccaccagagaagtgttgtatgggagggcttctaccaggcgcagaatcccagctccagaaatgaagttggattccacattcagtgtcttcaacaccttgttctccttgagcatctcagcaagggcatacgccacggggtcattactccgtgtccccacgatgctgaacttcttcacatatgagttttctttcagggcttctgcatatgccttgagggtggggatggggatattccggatattattgaggttaacttcttcaagttttgggtcgttgttctttatccgttccagcgtttcctatacgtctgttcaatttggttcttcgtcgggcacaggcttgtattgtgtggctttaatcacgctgttgagcccctccttgttcatgatggagctgctgctcagggcctggtagtactgctgcc

SEQ ID NO: 136534 - DNA, 199 bp, Homo Sapiens
ttttttaaaatttcagatgttttttattcaaaggttctcaaaagaaataaaacagaaaagctaacaatctgatcaaatgtacagttcaaaaatgtcttttggcgtttaacaacaagtcctaggaaagaaaactacagagttatcttgaaccggacaaataagttaccactggcaagtctgtggcactagtaaaacaaaa

SEQ ID NO: 136535 - DNA, 549 bp, Homo Sapiens
  misc_feature (301)..(301): n is a, c, g, or t
  misc_feature (310)..(310): n is a, c, g, or t
  misc_feature (470)..(470): n is a, c, g, or t
  misc_feature (511)..(511): n is a, c, g, or t
  misc_feature (538)..(538): n is a, c, g, or t
tacaatggaacaaagaaagagtttatcaaatgctttggaatccctgagagtagaaggctcagcatcgccaaagcttgggttgtaacttttttgctgtgtaactggattgaaatccagccagcccaggtgacctccctgcagagccaggcccctccatattaagattccgcctttgtctggctgaagtttaagtcaagtctccacattaggttagcagcagtctcccaggtttttcttcctctgctggtattctgcaaagttgcaaacttcagtagcctcttgtatctgcttggaagaggantaggccacnggccaggtaacaaattaaccctgaaatctcatgggcgtaacacatcgcagtccaaatgcatcgggcggctcttcttaatgaggacttgctccagttgctctgtcttgcgatcctgccatcttaagcacaggctctgtgcagttgcttttgacaggctctnccccatgatcatgtaaactgggaaggctgggtggcgtcaantttgtgggcttcagtgatccctgacanaccaatgggga

SEQ ID NO: 136536 - DNA, 371 bp, Homo Sapiens
ttaattaattctcactgtttgttcagtctgtcttcatctaagtttgtgttgcagtttaaagttaaagtgacttttaaaggccacatcacctgagactagggtaatcatctttacttctggttcctgaaatcatatttttccagtggaccatcctccagtggctgtggttgttgagcatgctttcagaacacctatgtggcttaaaacttagtttatgttttgtgttcaacactacgtgtaatattttaaaactgtttaatgtgatgtgaatacatttatgtacatttatttttaaatttgtaaatagctttaaattgctatggcaatgtttcttttataaatcatcaaaataaacctttgtgaattgaaaa

SEQ ID NO: 136537 - DNA, 536 bp, Homo Sapiens
  misc_feature (28)..(28): n is a, c, g, or t
  misc_feature (42)..(42): n is a, c, g, or t
  misc_feature (76)..(76): n is a, c, g, or t
gatcacttgggtcgccgctttgatcatnaacacgtcccgccntgtccccagcataaaaccttgttttgttaaatanagttcgaacattgatctgcggcgacactttagaacctctcgaccttttggatctcagggaagggtccctgatgagcggtcgccgtccacaatgtggatgtggcgcagcgggaaaaacgcagccagttctgcatgtgcacgtggtagaggctgcggttgagggccttgtagtccacattgagcctgccatcgcgcaccaggaactcctcgatggacgggtagggcttgtgcttctgcatgtggttgtagaacacttgggtgtagtcagatagcacgcgctccgacgggtctcgcaggatgagcagcagccggatggacgggttcatgctgtagactcgctcaggcactttgggcgacgtgaaatacgcgggggtcttctccactgtgagctggtgtggccaggagaagggcatctggctgaggtaccagcccaagccgtggctgtaatgctcctcccagtc

SEQ ID NO: 136538 - DNA, 1049 bp, Homo Sapiens
  misc_feature (109)..(121): n is a, c, g, or t
aagtaacaaaagaatttagattttgcaatgattgcaacacagacagctattttgagttgggggcaagttaattatattcaaaaaaacatagcgtctccagaaaaaatcnnnnnnnnnnnnncagtgaaatagtttagttccttcatatagagacatattacacaatgttaacaaccatgaaaaacaatacaaaatgccctccatttaacaagtagaaaaatataactagtatatatggcaattgtgaatctaatactgtacagaagtactttatggattttacaaataaattataccttaaatgcttttttaaaattctttttcccctcagatgtacaccagaacttacagtaggaaagtttctgagcttagcttattgcaaatcagtgccagtcaaatgttctgccaacaagctcgaagaacttcttatttggctcatgaaaatattcgtgcagtttattgagtagtttgggatcgacttgggggtgcgcccggcctttggactcatgtaagcagcggtcccggccgctgtcccgcaggcagtaaaagcccttggttttgttaaagtagaagttcgaagcattgatctgcggcgacagctttaggaacctctcgaccttttggatctcagggaaggggtccctgatgaggcggtcgccgtccacaatgtggatgtggcgcagcgggaaaaagcgcagccagttctgcatgtgcacgtggtagaggctgcggttgagggccttgtagtccacattgagcctgccatcgcgcaccaggaactcctcgatggacgggtagggcttgtgcttctgcatgtggttgtagaacacttgggtgtagtcagatagcacgcgctccgacgggtctcgcaggatgagcagcagccggatggacgggttcatgctgtagactcgctcaggcactttgggcgacgtgaaatacgcgggggtcttctccactgtgagctggtgtggccaggagaagggcatctggctgaggtaccagcccaagccgtggctgtaatgctcctcccagtcgaagaagtggac

SEQ ID NO: 136539 - DNA, 846 bp, Homo Sapiens
ggcttctgctcgcggtatgtacagctgttggggccgtttcaggttaatcctatgatgagcaagaaggcataagggacaacggggcgcacggaagggcttctcaccactgtgttgtcttcatggtccggggcccagtggtttcgggatagtgatcggcaaagggggcagaggcctccttcaagctcttgttccacagccccggcaggtccaagggaatagcagctctggcagtggttctgatccagtcccgcagaggccctccccttcaccccgcagctgcccacagtctggcaggaaactggcaccacctggtggcacatggaggcatcaaaatctggaaggagcagagcatcttcaggtcgccggggcaccgccccctcctgctctgtgggactgggaggccgggctggtcgtggagtacagcagcggaagccacaggtcgggcagggaggagtggggggccctgcgtgggtacgctgatgccgcctcaggttgcccaggctgtcggccccccacacagctggcaggctgggcctggcctctcaccctggcctccctggaccctggctggctcctcaacttcactctccgcacttagtgcccggccgcccccagactcatcgtcgctcagcccatagggaagcccaggcctggcccccagagagtctccttccgagtctctctcgaagcccatgagctggtcactgttgccgtcgccttcctcctcttcctcttcctcctcaactccagatcctggcctagtagcaaatcactctccataccagggccccgggtccttcgtcgagggagtcttcagtatccactccgtactcgcttccgcttccg

SEQ ID NO: 136540 - DNA, 532 bp, Homo Sapiens
  misc_feature (166)..(166): n is a, c, g, or t
ggcaggtccaagggaatagcagctctggcagtggttctgatccagtcccgcagaggccctccccttcaccccgcagctgcccacagtctggcaggaaactggcaccacctggtggcacatggaggctcaaatctgtcggccccccacacagctggcaggctgggcntggcctctcacccctggcctcccctggacccctggctggctcctcaacttcactctccgcacttattgcccggccgcccccagactcatggtcgctcagcccatagggaagcccaggcctggcccccagagagtctccttccgagtctctctcgaagcccatgagctggtcactgttgccgtcgccttcctcctcttcctcttcctcctcaaactccagatcctggcctagtagcaaatcactctccaataccagggccccgggtccttcgtcgagggagtcttcagtatccactttgaccccctcgcatttcacgggctgcgggtggctttgcttccttcggggcatcgtgaccggctccagccc

SEQ ID NO: 136541 - DNA, 843 bp, Homo Sapiens
  misc_feature (726)..(760): n is a, c, g, or t
gtggagattcccaagcccctagttcatggcccggatctccttaggaagcgggggaaaacccggtttcatttaccttacggggcccgggcgccaaacaaagggtgtaggaaacttgtcgagggcccgaggcggccgaccagaaggggaaaagggcggtgatgtgggccggccaagtacaagggtaactttattgacccccagctgggcaactgcttggcccctacatcattacccccctattttggctgttgcccccatggcactgcctgtcaacttctacaacctggtgatgtctggcatcaacccctcccaaagatggaggggattctcttgcgagtgatggtggcagctgtttcagggggcacagggctaaggctgagacgtgtcacctcaactgaagcagaagaggtggattatggcattggccacgaagaaaaggaaaatgcctccgctcatgctgctggatgctgaggggctgctggtttggctggtgtcgttttgtcctgagagtccagtttgtatctgtaccataaccaggaggctgatggtgagtaggaggaagaggaagcgcttcattttggtaggatcttcgtggctgtcttggtagcagctttttaggtgatctcagggctgtctggaggcttcttttggtttagctgcttttgaaccaggagccccggccgtaatggccgaattcccgggcatatgtccggtaccgtcgactgnnnnnnnnnnnnnnnnnnnnnnnnnnnnnnnnnnncggccgcttcctcgctcactgactccttgcgctcgtcgttcgctagcaacgcgctagcgccctatagtgagtctatacgcctt

SEQ ID NO: 136542 - DNA, 660 bp, Homo Sapiens
gtttcccttgtttgcgccctttccctcttcctttgctcttctgtttccccctcgtccttctctgtgggtctcgctgccttctgtctggctgcctcgttccctcgcctgctttgttccctttctctcctcctcctgtgtttttggtcagtactacgggtaactttattgacccccagctgggcactgcttggcccctacatcattacccccctattttggctgttgcccccatggcactgcctgtcaacttctacaacctggtgatgtctggcatcaacccctcccaaagatggaggggattctcttgcgagtgatggtggcagctgtttcagggggcacagggctaaggctgagacgtgtcacctcaactgaagcagaagaggtggattatggcattggccacgaagaaaaggaaaatgcctccgctcatgctgctggatgctgaggggctgctggtttggctggtgtcgttttgtcctgagagtccagtttgtatctgtaccataaccaggaggctgatggtgagtaggaggaagaggaagcgcttcattttggtaggatcttcgtggctgtcttggtagcagctttttaggtgatctcagggctgtctcccggccgtaatggccgaattcccgggcatatgtccggtaccgtcgactg

SEQ ID NO: 136543 - DNA, 425 bp, Homo Sapiens
cttctacagacttgtttaaagagaaccctacattatgtgtgtttcttccacctcatcattcctctggggcctgggttccgtctccacctgggcactgagaacttggggacagaggttgccagtgacctcccaccgtatctcagtggcatggggttagggacatgggttctggaacagtgagcctcattctttagcggtacataccgaaatgtttgtccttggaatgtctgggatttgctttgacaaaatccacaagtagaaggagtgggtgggggtgaagataaaataagactggccatgaattgatagtttttgaagctggggggtgatggatacatggaggtttgttgtgttttgtctgctttatacttgagagattttctgtttacaaaaagaagagtacatgggttcaaatccaaaaaaaa

SEQ ID NO: 136544 - DNA, 744 bp, Homo Sapiens
  misc_feature (446)..(455): n is a, c, g, or t
tgtacctgccagattatttaagaatttcagctgccaaattatacgaatgccatttatttacgtgactggtgttggtctgttgattaatgtctaatgtttttctaatttcagactttaatttaccgaaaattcctaatgaaaaaggctcttaagccagaaaccaattgcctcttatcggttatccccaactgtagatcttctatgagaaagtggggaagtgaatgtaaaattttattcactacaaactgggttctttggttcctttattaagtcaaaatttctcccaggaaaatttcatatttttatggaaacagcaagttttatgttctttattgttaaactctcacaacctgataaaattatccccgaaatgacataaccaaaatgcttctcctctccattagtctaccatgactatgatatcttatgtaaatatgtgactaacnnnnnnnnnntgaatgggccataaatactgaggaccatatttgcgtgtttccaaagtgaggggttctgcgtcctatcaaggagatgtaaactactgactacactaccgatgatgctggctttttgctccattgccttttcaagtcttcaacgtaaaagagcaatcgcagttcggtttcacatgtattgttctataatccaggcaataaatgctaattagtaatgctcaaggatccgaccattcagagtaattatcataatttacttcttccttgttaaagacattccttgctgattaga

SEQ ID NO: 136545 - DNA, 520 bp, Homo Sapiens
  misc_feature (379)..(379): n is a, c, g, or t
tttgtgtgatcgcacttatttaacatttattttgagttagggtgtgagtgctggggcaggtggctaaccatcccctgccctctgtggtggcctgagagagaagcaggaatgccccgtgcaggttggggatcagcaaacagtctagaccagcttctctcctgtatcccgtttggagagtccctgggtcaggggccagtccatcctgcagcattgaagggcgtgaggaatgagcagggctgtggggctcacagagcaggcagctctgggggagaggagagggggatgtgctggagcccggagtccatgtctggcagccttgggagatggagagggtttcccaggccggacagcatgggcggggggttcattccatggtgantctccctgctccgtgttgtccaagtttgtacgggaggccaccagcgcccttcattcggtacatcgatggacaacatggccttgattgcagggaattgttgcaggagaatcggcgaacagttcttggtgcaaccgggaggcc

SEQ ID NO: 136546 - DNA, 568 bp, Homo Sapiens
  misc_feature (351)..(352): n is a, c, g, or t
  misc_feature (370)..(370): n is a, c, g, or t
gctgaaaacacaattctgagtttaatgttttctggaaagagctgggggagcttaagcagcgagtgtggcgctctgcttccgggcacgcccacagcaactcggcttcagagtctgacccgcagaagttctttaaagagagggacttagggaccccagatcccggcagccaggcccagagagggaagcaggattagtcaaaaccaggtgggggatggggggaaggaagagaggcagcgggggtttgggggcccagcgggtagcaagagtgaccctgggcatcaacatggggtgaggtggagaggggctatggggttcctggagatcagagtctggggtgccatgggcagggcnngagcaccgtggagacacngcaaccctgctccagctggtcctgcaattgccacagggctattgcctctcctgccacccagctcctgagagtgaatcctgacacgggtgattgggacgtgtacttcctcttgactctggtctcaggactgagctcacaggagcctgagaaacagacaagcgggagctttctagccccttccagctctcctgtgccgaa

SEQ ID NO: 136547 - DNA, 603 bp, Homo Sapiens
agcattacccggatataattctctagaaagagaattcccattttattcatttatttattttttgcaaacaattttagaggcagggtgttaaactgattaaaatttcacaagattgacattattgcttaaagtgcttgaattggttacattttaaaaaattaaggtacagattattttaaataaaaactacaatatttttagcaacaaaataataggaatgccacacaaatacagtaactattttggttatacagaaatggaagccaaaaataaattaatgtaatactggaaaacagaaatttaattaggcagaaaagtaggaaataattttccctgacccatgccacttacatgagttcattacaatagtgctgataaatgccttgaccatataatagcaaacaagggcaaaacatttagtgcacaatattttaatacacgtgaatatacaaagttgatcaaaatgcaatgttgaaagataaaatccatctgtaataaagctacactccaatatctaaaataagccctaagctccagttagaacatagatcattattaggcatgcccatgaaattaagggtatccatgaaaataaatgcatag

SEQ ID NO: 136548 - DNA, 105 bp, Homo Sapiens
taacagtcttgaaaatgctttattgaaatgtgtgacttatgtgcagatgtgtttgaaagaccacagcttgaaaactgatttttgaaacttctcaacaaccaaatg

SEQ ID NO: 136549 - DNA, 557 bp, Homo Sapiens
tgttatactcatggttaaagtttattacattgaaaggatacagaaaaaactcagcgaagtgaaaaggtggatagcgtggagtagaggagaaattaagcaccagcttccagttgtcctctcccagtgccattacatggagtacacttaattttctcagcaacaacgtgtgacaacatatgtaaagtgttgccaaccaacgaaactcacttgaggcatgtgtccagggtttttactggaggtcagtcatgtaggcatgcagcaccttagctaccagtcttcaggcctcagatcaaattggtacagcatgatccaaagcctcaggcatacaaaaacaggtgtttgccataaatcacactgttggcataaactcctatctcagccaagggtcagaagtaatcttcccaggagccaggccaagaccagtcttgagactctgggaatacgcaagtttgagcagcccaggctgttgaggtaacctttcctgcacaagtgtcaatagtgccatctttgattaatgctccctcctgcagctacatgaagcaaattgtactgtgtag

SEQ ID NO: 136550 - DNA, 797 bp, Homo Sapiens
tctttttaacttacaaacaaaaataccgtaataataaacccaaacaaagaccctcagcttgctgccacgttctctatgcggtttggcggggcgggtatttacaagcctacagctgggactgataccccgctcgcagccgccggagttgtccaaactgcgatcccttctcacccaaagaaacaaggggagtatgatccatgatcaacaacatgctaaagttaagacacgaaaatggctacaaaatagaaattattaccatacatgtccagcatgcaggattaatatttttaatgcgggattttttgtatcttcttctatataatcgagcaggcaataaaactgatgagatttgggcgccgagcgtcctaactgaggcctgtgtctcagggctgagagccagtgttctccgaactctgacagacaggtccgtctgtccttccttctttcgctcagcctcgcctctcgcctgccgggacgccagagtccctctcctttcctcgttgctctcttcttggcgcggactactctccgggcagcaaagcagctgtcccggcttaacgcgcaaagttcagaaagccaggagtctccagatggccttggtgacttctcgggactatgcctcgccgcccttcagcctggagagaagttactccgggacctcccaccctctcgtctctctctccggctctgctcgagtctaggaggcggcgctggcgtgcgctactctcgccttagccaaggtcccctgtcccgcccgcgcacccgcccgtcaccccgcgccgcgcgccctttctccc

SEQ ID NO: 136551 - DNA, 855 bp, Homo Sapiens
  misc_feature (281)..(298): n is a, c, g, or t
  misc_feature (678)..(678): n is a, c, g, or t
  misc_feature (794)..(794): n is a, c, g, or t
  misc_feature (799)..(799): n is a, c, g, or t
  misc_feature (820)..(820): n is a, c, g, or t
  misc_feature (825)..(825): n is a, c, g, or t
  misc_feature (838)..(838): n is a, c, g, or t
gaaaaggtaaaatagcttaaagcatttaatatctaaacaaatcaatctgttaatagtagtcacaaaatatgcttaatatagaaacccacattcatgtttttaagaaaaaagggtaaattgtattccacctcaaaacataaattaacccgcttaaagaatcttcagcggtcaaagtcatggggaattttaaacaacttcagagtaaaataacaagtactttatactgctttatatctaaaaaatgcttacaacttctcataaaaatagtttgaagcaactannnnnnnnnnnnnnnnnnaacagacacgttcaacattacgggcaacatttttaaaaccttaagctttacagactttcaaacattcaaatactgtggtccctttcctttgatgtggtttattcagctagaaaagaaaacatggtagacaacttaatacattttcaccaaattgaaagtagtacaaaaattttaggactctaccgaactacacatcgtacctaatgtatcattaaaaatagaagacagtattttcttcagcaaataaaacagcatactaatatgctgctaatgcataccttttaatgtgtactgtcattcataaattatttacaactgctactgtgtgaagagaactagaatgtaaattttctgccaaaactgggaaaaaaagcaatacnaaatttgtgaaagcctgtgtttatctatacaaagtcagttttctcttcaaataccagatattgtatgcagtgatatttggcccatatagtaatcctgaggagtttagtctggaggnagttnaagcccgatctcacaggggtntagantctattccctgcncggatcctttcaaattt

SEQ ID NO: 136552 - DNA, 639 bp, Homo Sapiens
  misc_feature (477)..(477): n is a, c, g, or t
  misc_feature (515)..(515): n is a, c, g, or t
  misc_feature (539)..(539): n is a, c, g, or t
  misc_feature (564)..(564): n is a, c, g, or t
  misc_feature (573)..(573): n is a, c, g, or t
  misc_feature (582)..(582): n is a, c, g, or t
  misc_feature (592)..(592): n is a, c, g, or t
  misc_feature (607)..(607): n is a, c, g, or t
  misc_feature (614)..(614): n is a, c, g, or t
  misc_feature (627)..(627): n is a, c, g, or t
tttggagtgacgctaatagcattgtgtttattagaaattgggcaccaagtcgtctttcaccagtgacaacagaaggaacagaaaacctccatggccacccttccccaccacgctgcgtgttcaggaagagtcttgtccaaatccccaccccctgagaagatgaggattgctctgtggaaaatacactcagcagaccagacacagctcagcgcccacgtctgttagccttaggcactggggaatgttttttttcccagagaaagaaagcacttttaaaaagcagtaatcaattaattcagaatgagcaaaggcttaacctctattctccctgccctctgcagagttcacactgcagagcccttcttcctttgagacacccctaggagcagctttctcctggctctcccctgctgctgtgactgtcactgtcctctgatctccactggattcttgctgtgatactgccagcatggatgncccactgtcagggcagccttccctcctcaatgtgaagnagctctcctgggatcttgccgtgnaagggttggtgtgctatgcctgagngaccccttncgcaatggnacagatcagntccaagttaacctgnaccaaangtggttagggcanaaaagggaaccc

SEQ ID NO: 136553 - DNA, 1218 bp, Homo Sapiens
  misc_feature (77)..(128): n is a, c, g, or t
  misc_feature (358)..(421): n is a, c, g, or t
  misc_feature (548)..(629): n is a, c, g, or t
  misc_feature (661)..(674): n is a, c, g, or t
  misc_feature (1116)..(1116): n is a, c, g, or t
  misc_feature (1133)..(1133): n is a, c, g, or t
  misc_feature (1145)..(1145): n is a, c, g, or t
  misc_feature (1153)..(1153): n is a, c, g, or t
  misc_feature (1165)..(1165): n is a, c, g, or t
cgaggaatatcccgggggggcagttttccccccccgtgtgcattttgagacccgtggcccaaaataggggagaaccnnnnnnnnnnnnnnnnnnnnnnnnnnnnnnnnnnnnnnnnnnnnnnnnnnnnaagggggcgaaagggggggtgaatgcccgcgtggggcggatttccgggtttcattcattccccgcttgggggatggggtctccccattctgggagggaagtgctttcaatgaatttttccccccttgttcttccgaagagagggtcaagggccccgggggcttaaatttgaattaatggaggctcccgcttggggctccctgttggttggatccccgtgatggcccccannnnnnnnnnnnnnnnnnnnnnnnnnnnnnnnnnnnnnnnnnnnnnnnnnnnnnnnnnnnnnnntcccagccctagtcctggcccggatttccttgggaacaggtatggccaaggtccctttccttctgggccccggccccaaaagaatggtttagaaaagtttttgagggccggggcggcccacaaggannnnnnnnnnnnnnnnnnnnnnnnnnnnnnnnnnnnnnnnnnnnnnnnnnnnnnnnnnnnnnnnnnnnnnnnnnnnnnnnnngggatataaaataacttttatttacataattnnnnnnnnnnnnnnactgctttctttagaacaagaaaatttataaatgacatgatattgctttttctgtcaaagacttcttcaagcaagatagtatacatggtcacttttgtttcaaataacatgatggtaaacagtggatattaatatttttgtcatgcctcaaccatttaccaacaattaggcgttcaaatcctcatgttgaccacttgctaagacataagtgttcaggagaaaaagtcaagaaaagataaaaacttttactcatatctcctttaaaatttgtgaaataaatcctttgcaacatcttcttcacatgaatcagacctaacatagttctttccaacatgtaaggtaaataccattgattaactttctcttttcccaaattaggtttaggaattaacagtagggaactttagctggctgacttgatccctaatccaatgggctctgnaaccttatatagtaganatccatttccanaactagcncattatggattnaagaaccggtgttaaggtaaaacccatattcccagggtaataatagttacatg

SEQ ID NO: 136554 - DNA, 293 bp, Homo Sapiens
gtctttagcgaagtttagactgtgaatatgatgacacagattcttttttatggtggctttgcttgttttaaatttttgcatgacttttcatctttttatgtgtgtttcctgtagtttgatccgaaggaaaagagtatagtagcctgagaatcaggagatgggatgttttagtcgtaggccttatgataattaccccgcggtggtgtgtagaaaagtatgtaaatttgctctgttttaagactttgaactacctcaagaagaggaatctaatacaatatttgtaatgtttaagt

SEQ ID NO: 136555 - DNA, 529 bp, Homo Sapiens
ttttttttgaaagcgttcaaaacaggatatttattaaatgtttatatcacaaacatacactagaaattaatacaaaaggaatcactattaaggctgaggcatgtaaaggcaataccatattaatcataattaagagatttctctcctactctgaatttttaggtacaaaataagtgctataccaggttttcctacatgctctacataaataacgtttctcacatttacaacaaggttttacggttgaacactctcccaggtccactgtatttgtagattcacgctccagcatgtgttctcacatgtgcttgaagcgatgcgaggatacctgaaggttttcccacactggttgcattgatacggtctctctccagtgtgcgttctcacgtgcacacgaagggacgaggaacaactgtaggctttcccacattcagtacattcgtagggtttgaccccactgtgtgatctcacatgcttttgaaagtactgagcgtggctgaaggctttcccacattgattacattcgtac

SEQ ID NO: 136556 - DNA, 715 bp, Homo Sapiens
  misc_feature (100)..(173): n is a, c, g, or t
  misc_feature (177)..(177): n is a, c, g, or t
  misc_feature (179)..(179): n is a, c, g, or t
ttagagaaaggcagagtatttattgacattaggaaatgccaagacctatagagactagccagggaaaaggactggatgtggtgaagtgaagaacattttnnnnnnnnnnnnnnnnnnnnnnnnnnnnnnnnnnnnnnnnnnnnnnnnnnnnnnnnnnnnnnnnnnnnnnnnnntccnangcatgtttgtaaatatacaaatacccaggttaaaggggatagccactgtttagctcagtcctgttgctagatggaaatgtgaatataggattcccagatctctcaaattttcaagtggaactagaactccgtgaattctgaattttaaatacagtattggcaatgaattccaattttggggtcaaaacatgtctataggtaagattctgcccaaaggtcaccagtttgccacttctataaattaaatagtaaatataagtgtaataatttttacttgagtcaggtccaaggttaataaaagtttatatatgccttacagctaaccattggtttttataggtcagaaacccttcttgccctgattgggaacctcaacttaccctgcagccaaggtaaataaaaatgtttcaattgaacttcattgtgctcctgggcctttattcttcaagagttaacagtgcagacttctggtgatcctcatcctaggtgttaccacatctatagaatagtaactcaggagtgcaatagactgtcgc

SEQ ID NO: 136557 - DNA, 738 bp, Homo Sapiens
  misc_feature (39)..(39): n is a, c, g, or t
atttttggaagggcccgaaggcggcccgaccatgtaaanccaaagggggggataaagtgtggtgggtcagtatacagagtctttatttattggaagtcctgatatccaggaaagccgggcccatgtccagggctcaggactccatctggccactctgcaggggaggggcgtgggggcagtcattcatgtccagttttcctgccgtcagaggagtcctcaggaggcaggaagtggctgtgcctccacagttgcaggtgagcgtggcggctgcacctgctcagcgcactgcaggaagcggcgcatatgctctgcacagttgcccacagctgcctcgttctgtcgaagacactcctcgaaggcctcaaaaggctgagcacaggcctggcggatctggcggatgattgggtgggaggatgtgcactgggcaatgctcatcttaaggtagtgacagtcccgctgccaggattccggcttggccgccacacactggccatactgctccagctcccggccacagtagcgagcggtgacctctagggccgcctgcatctcgagacctttgccggcgtagggctgtccggggggaacgacccgccttttccggtatcggttgtcatggcggcgcccagcccagcctggttttttctcggtagccaattgaactaacaaccccgttccctttaggactaatctgtcacggcggcgccctacctcttcttccggcccggctcgtcatgg

SEQ ID NO: 136558 - DNA, 580 bp, Homo Sapiens
tttttacatgaaagccatttactcctggtgaattcctcagggtcccaggttcaacactttccgtgatgtcagagtactcagtcagggatgatggggacagggtgtcagaacagtcttgatggtcttgccagcaacagctttttcttattttccataatttggtcttagtcgttctccagttgtcttcatgtaaataaagtggcccatggcaatcatgattctgtaattgttatagtgcctttgtaagttgacagtttccaaatccccttactcatacgacccctgtgaaggggggtgtgaaggggttggtgggcttgtgcttatgagggaatgtgaacgattttattatgaccgaattatgctttactcaataagcacttaaacactaccatctcacttgtagtagaagtgctagggatgcaaccaagagactggttgaataacgggaaggttaaatgcatgagtattttaatagaaaaaaatattaaaacaaacccaaactcgtatggaaagagctctgactaaggcctcctttctagcagtgtttggcacctgataacaattgacgctgggggaagga

SEQ ID NO: 136559 - DNA, 605 bp, Homo Sapiens
  misc_feature (40)..(40): n is a, c, g, or t
acaccaagggtcaggatctgggttcagaaggcaaggcgcncggcaaggaccagtggccgctgcagggaggtagagctccagccgccgacggccagcgccaccaacaccagcattgggctccagcagatgcacgacaccaccatgataccgacaagctggcccaccatctccacgtcgtgggcgcgagctctgcgtgccgagccgctgctccgagagccgccaaagaaggtggaggccgaagcgatggacgaggcggacgaggcggaggccgagcggggtccgtgcgccccccagcgacgccggctgtcggggcctgaggccgggggaggccgtcgggagcggcgtcgccagcgggcgcgtagcagggccaggccgctgagcgtgttgcacaccagcgcggcgaggagcgcgaccaggccgaggctggcgaagaggccagcaagcagtgcctggcgccagccgcccgggggacctatgccgatgaagcaccacgtgcccgggtactgcagctcatagcggcccacgcgcgccagcggcagcagcgccacggccaaggccaccgcggccaccgcggccagcgccaggcgcgagcggacgaccgagac

SEQ ID NO: 136560 - DNA, 586 bp, Homo Sapiens
taagttctgagtatttattatttttggttttgatataatttatttaattgtaagtttacataatttgctttcaataatgactgtgcttaacaaccagcttgcaaattcctgaaaacttaccaatcagctcttatgagccagtacaagtccatgccaataccccactgactggaagaaagaaatgctgacggaactaagtaaagacaatgagtttagaatgtgaaggatggcttgcagtattgaaatccccaatttctcactttccagaaccaggggtggaaattttaggggtttgcacccaccttccatgcagtagcccattcttcaacattgagagtcatgattctgaaagcaccaaaggtggtagatgatgaggttgtggaatttaaggccttgtgagaaaaatgagttaggggttaaaactcttgaatgaacctatgaaagtccctcaaaagaaaggaaggaacaaaggaatgaagaaaagatatagataacattttatacacattaaattagtaaaaacaggaattggaacttccatttccatttcccagacttgctcacgaataacttcagggcctctgtt

SEQ ID NO: 136561 - DNA, 954 bp, Homo Sapiens
tgtatttaaaaatattttacttttttttgaataggtgatacatatggtacaaaattcaaaaaaatacaaaaggagatacagtgaaaagtctcccaatcctgtacctatccaccctgtcaccctccccacaaaccaccattggttctaagaatttatcctgcagatgtaatcccataaattaatgtgaaatatgcacaagaatattcattacagcattatttatagcaaaagacaggaaacaatggaaacgtctgtcagtgagggactgattaaataaattatggtttatccattcaatggaatagtatacagctgtaaaatgaaatgaggcagctctaattgcaagtataaaaacaaagcaaagtgcagaacagcatgcatagtatgctatttgtattttaaacaaaggaaatatgtatatatgcatacaatatctcaaggttggcaggaaggtggagattggagtgttgtgggggcagtgggaacagcagttacgaaggtgtagtgccagcaggatatatttggggaatggtaagttctccgatggtgaggtataaggcggagtggcaaggatgaggtgaacagacaaccgcttctctttccccattctttagacaaatagtgttatgttacatgctgttatgcaaccctcccttttccccttaatttgttttggatatctttcttaaggaatttagagccaccttttttaagggttccatagcaattaattgtttctaatctttagctattacaaatgatgcagtaataacttcttacgtatgtcattttatatctggtgaaaatatatctgaaggttaagttcctagaagtggaaactactggatcaaagagttagtgcttttataattttgaaggacattaccatattgtcctcttcaatatgtacttctgtcagctgttatgagagtacctatttcccacgtcgctttc

SEQ ID NO: 136562 - DNA, 1534 bp, Homo Sapiens
  misc_feature (165)..(311): n is a, c, g, or t
  misc_feature (1427)..(1462): n is a, c, g, or t
gatgcagtaataacttcttacgtatgtcattttatatctggtgaaaatatatctgaaggttaagttcctagaagtggaaactactggatcaaagagttagtgcttttataattttgaaggacattaccatattgtcctcttcaatatgtacttctgtcagctgtnnnnnnnnnnnnnnnnnnnnnnnnnnnnnnnnnnnnnnnnnnnnnnnnnnnnnnnnnnnnnnnnnnnnnnnnnnnnnnnnnnnnnnnnnnnnnnnnnnnnnnnnnnnnnnnnnnnnnnnnnnnnnnnnnnnnnnnnnnnnnnnnnnncgtaagagtgacttatttttgtctgctgaaaacatctcaattagtatagggacctagagcaaattatttaagctttctatgtctcagtttcctcacctgtaaattgagaataaacaatagtaagtaggattattggataattaaatgaaatgtatgtatggcactcagcacagtgcctggcacatggcaagcattcaataagttatgtgatggctaacaatcagaggagcaggtaggacagggcagattaaattaagaaagtagcattcacttccatgctccagtcacatggagccttgttcatttacattgccattcatcagagaagtacgaagtcagagctttccttgtcttttaatagtaaagagtcatttcccattggaacccatcataggctatcagcagagctggccagggagtaggcacagcctcatctctaatatttagacttagccaacatggtaaagaaatttaatctgatatgaaataaaaacaacagaagagaccagatgcacatttctttattccaccatggttctgaactcccagctagtttgggttggagtgagtctctgcttgtaaactcagaggaatgcctgccatcgttttctgaagggaaagggcaggggtttctgagtggaggggaaaaacaacattggaaatctggctgcttctgaacaagaccacactggaaaatagactttttacttttagcacatcaaactggttttcacaaaaggagatcccagaagaggtttgtttcctgtaagaagcagtgtttatgtaatagaggtctttgtagatgggtactgtatcccatggcagcccttgctgctggtgcccacaggctatcactgggcggattcagctactgaatattttctttagacgtataaagccttggctcccctttctcatcaactccacgtatttttcatcatgtcctcttgctgctttctcaggctctttgttcttcttcatttgtgtctcttacacttcacaagctaatatcagccttgcttctctgagtgaagggatcttctgccactccttggggtcagagaccccggccgtaatggccgaattcccgggcatatgtccggtaccgtcgactgnnnnnnnnnnnnnnnnnnnnnnnnnnnnnnnnnnnnccgcttcctcgctcactgacttcgctgcgctcgtcgttcggctcgaacgcgtggcgcccatgtatatatcag

SEQ ID NO: 136563 - DNA, 714 bp, Homo Sapiens
tttcttccagtttcctttcaatacctacaattcctacagcccttattcttcctggctggggtcctctatttgtttgtaatgactgggaaactggcatattctcccatcttctttgtgtcatttcctctgataaacgcctgtaaaactcaatctggccatgttctttgaaggagagtttgatgtaggagttcttactactctggaatgggccaggttctttgttaggaggagctgggtgaagatgaaccactattttggcactcttcccaattccagccgcctgttcttcaatgaacacaatttgggaaaggagaatggccatgcaacactcatgatttttctgatctctccaaatcagtcggtgtgtactaagaaggagagtcccagcatcaaattttatctctttaggaaatcctttcgaagcaatccctcacccctctgcccagatatgctaatccctccgactgcataaggtccaagctaaagcttccgctggggcacggactgtacggccaccgcgccctcctcacagaaaggcgaaacggggctgtccggtgccgacgccgaggttggtgtcgtcagggggtctggaaccacgccaaggaagtcgactgccggatcgccgcccggcgcccgcagacggcgagcgctccttctcccgggcactgcagctgtgcgctcccggaagcattccgggcggagggaagcggccgc

SEQ ID NO: 136564 - DNA, 930 bp, Homo Sapiens
  misc_feature (19)..(19): n is a, c, g, or t
  misc_feature (38)..(38): n is a, c, g, or t
  misc_feature (44)..(44): n is a, c, g, or t
tggaaaaaacgtgtccagnattccttctctgtcatgtngtgggnaacattttctgcatatttcattttatctgctggtataggtcctaattatggactcaatgatatcagaagttaaattatatcttagaccgttacagccatcagtttggggccggacatcagccagaaatgcagcagaaatgccaacatcctgcttatgattggatgtggaagaactatctgttgcattcacatttaaacgattggcccagaattcctcagcactgatcacttgactcacaacaaggtctttataaagctgaaacaaaacaggatcttcttgcagcattctgttcttctcttccagttctttatttgctttcctcttgaatttgggcagcagctgctgaagaaggtcttttactgcatctcgctctttcactgctgtgctttcattggaaaaatggaagttagttgtgtcccctgcatgtaggaccagctgaagctgaattttagcttttccttctggactaattttctggcatttaatatctgcatacatatggctgattgtaaatctatctttgccttcaggtgcccaagcaattctttctgccatgaggtacagagctccatcctgcttcttttgacgcactttctttacaatcagcaaaacttcttcagatgaggttgccatggtggctagaaggtgcaggtggaagctacaactctagacaggaagtaactaactgggttggatccggtcgagttccgctgcgcttcttagagccgctgctgggaagaggccgaaacccagtggccgcagcagtagccaccgcctctgttactaggggggtctcgcctccatcgctggctgcgaggagtctgagggcacgtgaccggaagtagcaaggcgggccctgggcacgtgactcaagagcgcggctgc

SEQ ID NO: 136565 - DNA, 500 bp, Homo Sapiens
tggtgtgttttggatttttctggtgttctgttttggacggttttgaattatctaattgtcccggatcatgattgtcactttcaggggacttactattcaatttgttgtatgaacgttttatcaaaagtgctggaccccatggtagccccatttctacaaggtccttctcagttaattcctgcaggactaatcctgttacttcttcactgagcagaatttgcccgtattgctcattaatcttaaggtcttcatttacccattttttcacatgctctttggtccagtctttaatcatttcaggtagagatacttgtttactcatatcaaagcttcaacttcttcctgagacaaagcaatataataagtattttagaattatactttatttttaaaatcacatagacaattatgtatacattatcatacagaagatacatatatatatgtataatattgctaaaggctgactcttaaaactgcttgatacttactttagctat

SEQ ID NO: 136566 - DNA, 232 bp, Homo Sapiens
ctttgcgaatgaaatatattctggcccacgaacagggcgatttcctttcagttttttcctttttgcaacgtgccttgaagtctcaaagctcacctgaggttgcagacgttaccccctacagaagataggtagaaatgattccagtggcctctttgtattttcttcattgttgagtagatttcaggaaatcaggaggtgtttcacaatacagaatgatggcctttaactgtga

SEQ ID NO: 136567 - DNA, 633 bp, Homo Sapiens
  misc_feature (25)..(25): n is a, c, g, or t
  misc_feature (34)..(34): n is a, c, g, or t
  misc_feature (41)..(41): n is a, c, g, or t
  misc_feature (54)..(54): n is a, c, g, or t
  misc_feature (61)..(61): n is a, c, g, or t
gagtacctgaaacaacggaggtaancattctgcntaccgantgttggccaagcnaaagctnggaagtttgctcttattcttagggagtttatttttaagtaatctcaatctgtaaatgggattacaatccacaaaactgaccttgtatatgattccattccttctcccagcccagccccacactccaaggttttccctttgcttataaggggtagtcacccttttttatttcgaccttccaaacattctgggagttttcctcctttaggccaactacagcgcagaggagcgctttctcctgctgggtttctccgactggccttccctgcagccggtcctcttcgcccttgtcctcctgtgctacctcctgaccttgacgggcaactcggcgctggtgctgctggcggtgcgcgacccgcgcctgcacacgcccatgtactacttcctctgccacctggccttggtagacgcgggcttcactactagcgtggtgccgccgctgctggccaacctgcgcggaccagcgctctggctgccgcgcagccactgcacggcccagctgtgcgcatcgctggctctgggttcggccgaatgcgtcctcctggcggtgatggctctggaccgcgcggtcgc

SEQ ID NO: 136568 - DNA, 451 bp, Homo Sapiens
gagccaaagagtttatttttagcaaataagatatgagtttttagaaaattgcttcgaatagcaaatccgagaaacattatttcaaaacgttggaatcaaaggaaatcaaatgcccacaacccatttccgtcagtgcttacaaatgagcttctgcaaaacccagtccacttaaacatttggtcggaactcacgaaaagaaccaaaagcaaggcattccgagtcctggcgggggttgagcggccgggcggacgcctggctatctcttctgggagtcgcgcattcgatcgcattcaggttaaaatttaaagcccctggatcctgctccagtcgccagcctctccattccagagttttctaccttcagccttttccaaatgcggccacgctgaaaaaaaacaacgcctcttgtcctaaagtctccctcggcagccttctggggtcacgtctgtcg

SEQ ID NO: 136569 - DNA, 763 bp, Homo Sapiens
gccgtgatatatgtctcgctccctttcgcttacagaaaggatttcttccgacagacgtgaccccagaaggctgccgagggagactttaggacaagaggcgttgtttttttagggaaggaagaggagcctgtgcagagttgaactggggtggagaggtgccttgtaaagtatggtttccagagatggtgagacctcgtagctaagcgttgtttcctctgcacgtaacttttcagcgtggccgcatttggaaaaggctgaaggtagaaaactctggaatggagaggctggcgactggagcaggatccaggggctttaaattttaacctgaatgcgatcgaatgcgcgactcccagaagagattagccaggcgtccgcccggccgctcaacccccgccaggactcggaatgccttgcttttggttcttttctacaaggatgtctgcgtggatatccctggacactcgataccccccggggacctgcttttcccgcaagctccgcagacgcggcgggagggcgcgctggccccggcgctgctgggacagaggttagcagcggggtggacattgaccgattcgacaacgttcgggctctaagggctcgggaagggacccggcattttaccctccagattcccaatctatttttaaaaataatgttcaaaacatatgggaaaaataagtgattgctccttttcatggtcacagattgtatttattttttcagactggttttccaacctaacgagggaatgggtagtgaa

SEQ ID NO: 136570 - DNA, 430 bp, Homo Sapiens
tatcatcaagaactaatcggtttaattttgcactggatttgtattctttccaggcctggacatgatattttaaaggctggttttgtctagaggaggatggccaagatgtgacaggtaagaaaagcatgccatatgaggaatgacttaaaggactagagtaacagcagctcaaagtaagactgagggggagaccacccactgcacatatctcaagtgccgttaaagagttgcagatagtagatctggactacaaggagaatccacaggcagacttcagctgatatgaggaaaaactctctcgttattagagttgcccaacttttgagtaataaatgcatagccaccagaggctacctgaccatgcccatgggtgaaagctgtggtagcaggggtccctgtgacacaataatagaaagctggacctaatgac

SEQ ID NO: 136571 - DNA, 519 bp, Homo Sapiens
ataaagaaattttattgcataattcttgtatacaataaacataggaaaagggtttttaatgaaaattcatgtcatttttcaaaagtgttgaactgtctggagaaaaattattacaaagctatctaaggcaaaaataatatttaaccatctaaacaaaagataatcccctttaccatttgttttgtatttaaagcaagacattttaaacacaagtaatacggagaagttttcaaattgctacgtcatttgcattaagaatttaaatgcatctaagaagtgaagagtttaaacacatgggaatgttctctagtaacagatattgctgctttcttcagatccattctgcttgaatgtaaggctatactttttgcacaccaacagaattctgcatcttctaatggtacagtaagagctggagtgcagagagggaaagtcccatgcacttcctatgttaaatggcataactcccacagatcacatacaccttgccatattgactcagttcattgcactccatat

SEQ ID NO: 136572 - DNA, 1464 bp, Homo Sapiens
  misc_feature (406)..(579): n is a, c, g, or t
  misc_feature (1313)..(1408): n is a, c, g, or t
tcttgcgtttcgcccctctcagtcgatcaattctactgtctgcttccgcgctcttgctgtcttctgctcgactccccggccccgcgcggcggggccgtctcgccctcgtgtctctttttcttccgcctcctttcgtcttctgtctgcccctctacctccttatgtttccgtctcctccgcgtcccctgagcttcctctgctatagttctgtcttgtcccgctcgtggctgccgcctctattatcatcctcagctctctcgtcgtcgtggctctcgccctgtgccgccgttctcttcgtctttcgtgtccctgtcgcttcttcgctcctccctctcctgcttccttctcccgtcctccctgtctcgtttggtccctccctccgccgcgcctggctggctggcgtcgnnnnnnnnnnnnnnnnnnnnnnnnnnnnnnnnnnnnnnnnnnnnnnnnnnnnnnnnnnnnnnnnnnnnnnnnnnnnnnnnnnnnnnnnnnnnnnnnnnnnnnnnnnnnnnnnnnnnnnnnnnnnnnnnnnnnnnnnnnnnnnnnnnnnnnnnnnnnnnnnnnnnnnnnnnnnnngtaaataaaacactttatttgtagagctgggcctcaccggcctcgccttgggcaccctccagcctctggcagggcctgaccctgaccccatcctgggctctgctcatgccagggcagaccctgctcctcaggtgccccctactaccctgggggcgcgctcaggctaccatgcctgggcggagccgcggggctggctccctttaacagaggacgggggctggcgctgggccttccagagccgcctaaggacacgtccttggagcccggctcatgaaatggggcctcacgcaaccttggtgtttggttaaatttgtgccttggctcctgttgcgtttaggcacccaggttcccaagcggtgtggtgtggacctcccctgctgagaaacccgctggcgcgtggaggggcttgcccaggtccctccgacaggagaccctgctccctgggccttggcccctgctagcaccactgccaggcctggctctgagggacgctgcttctcccctgcccacgtctccaaggcctgaaaggcagggttctgtggaacagcatttctcaaaggggcatcctgcagacgttccagccccaggggaggccccgtgatgctggctggcctgcctggagggtgcttccagaaacaacggagatggtggtgaagaaggctctgggttcaaattccagttctcctttagggcgaaggggtgactgtggctaggtttgtcagttaccttatctnnnnnnnnnnnnnnnnnnnnnnnnnnnnnnnnnnnnnnnnnnnnnnnnnnnnnnnnnnnnnnnnnnnnnnnnnnnnnnnnnnnnnnnnnnnnnnnnccagcgcacgcgtgggtcgacgatatcccggaattccggaccggtaccagcctgct

SEQ ID NO: 136573 - DNA, 447 bp, Homo Sapiens
  misc_feature (38)..(38): n is a, c, g, or t
  misc_feature (179)..(179): n is a, c, g, or t
caaaacgttttcacccggggttctccatgccagttccngaaccccacttgtcccaccggatccggacatttcccctttttttctttaccagaaaagttgatggattggacattactaaaatttcccacttacagttgggagacagtcaggtttgctttgggagtctacataaatcttcntaggatagttctgtgaccatttaatagcaagaagcatgaatgccactacaaaggcaaaaatccacctctgagatcggccgttaataaacgtcccgtcatgtcagtttagattcaagaatgttaagcaactttgtttttgcggtgctccctatttcatagtatcttcaaatcaaaaataaaaattatctccattttgttaaagaacttacagggtcagggttctccttgtcacttagaattgggacactgccaggcaatcctctcccaa

SEQ ID NO: 136574 - DNA, 672 bp, Homo Sapiens
  misc_feature (248)..(266): n is a, c, g, or t
tactgggtcaatgtattatttatatactcatctgaactttcaaaagaagttaaatgggagatattctcaacaggcaaaaataagatattccaatctattgttcaagtttatggctccgatataaataatgggctataaacccgtatctggaaaacagttgcgcagtgcgtgcttaatggccagccaatgaaaaccaacgtctcattctactccgtctttcagcacgtcaaggacatcccactccgccnnnnnnnnnnnnnnnnnnnaaagaggccaaccgctggggacacctggttttggcacctttatgaggcctcccagcagcacaggagctctaaggggcacgctctgcagttgagctatttgcagagctccatgatcgctcaaagccgagcacgcgcacgggtttgctactggcaccagcacaaggctttagacaggcacttcccacggctgagttctaggcatcccctttttgaaacgtgttctctccaccctgcaagggtggggtgagaaatctcactttcgaagggcttgcaaggaggaagagagtcggcgccttgcggattccccggccgcgcttcaaggttcacacgccgcgtggcagctcggatgcagcccggttccgaggcggtcggcggtcgagactggggcctcgagccgagaagcgaa

SEQ ID NO: 136575 - DNA, 642 bp, Homo Sapiens
  misc_feature (277)..(297): n is a, c, g, or t
ttggggaggccccaagggccccttggaggcagcgcccccaccttgggcttctgagggcatcatagggggacccctagagtcagttcaccacaggccctggggagagtcaaagacccccgagggtgcccagccccccacactgtgactcctcacactcagcgatgacctgtggggtggggggccctgggacgtttttaaacctagggtttggagtctggactaagctccatccacgtcagtcacaagtttctgtttatatttctagctttttttaatnnnnnnnnnnnnnnnnnnnnncagaagttttcacaacccaggggcctggcacgccggtctgtgcctgcccgccccgccctggcccaccggccccactccctgggcacagagtcacacccactcatccttccgccaacagtccaggtcacacagcagcagtcactgtaacagactgccacatacacactcggtctcacactcacctgtgggttttggttccgttcaatttgggtttttaactttacagggtcagttccgcttcacctccttttgtatggagttccatcccggggtttcaccccctgctccagtcctgaggcctcctgaccctgacgttgtgatacgccccacagagatctatgtttc

SEQ ID NO: 136576 - DNA, 532 bp, Homo Sapiens
tttttttttggcacttagtgatttattctcctcttaaggctccatcagcaggtggaatggaagacacctcccaccctgaccccttgggcaaccaaggcattatactccttcactgcctgctctgtctggaggacccgcacatcaatgccatgtttcttgaggtactccacagttgatgaaggcaccttcaaggcctcactcatccctcggccaatcacaagagtctgtacacccttctcaacaacttccttcacatctgcaggctgcacaccaggagaatgctcagttcctgtttctctccaatcccaagtccgactaccccctggccatactttgcagtccttataggttgtattagagccttttactttcatttgcccccatgataaggaagcaatttcaggggaagtcataaggaacttcactgaagtccaccgcgctgtctcctcaaagttgcgttcccaaacggcgcagtgctctgcccgcacttacgctcccagcgctgcttcgggatctgcgctccccaactccc

SEQ ID NO: 136577 - DNA, 137 bp, Homo Sapiens
gaaatgtgaatatattttattttttcccagtgagtacacaatacacaattctttgacaatactattaaccgattttatgccaatttcttctctgatctaacaacatcaaatgaaacacattaagattttggatgctg

SEQ ID NO: 136578 - DNA, 392 bp, Homo Sapiens
  misc_feature (172)..(172): n is a, c, g, or t
  misc_feature (199)..(201): n is a, c, g, or t
gactccacttttagggaaattttggccctcgaggcccaagaattcggcacgaggttttaaacaaaacaaaatatcagtggctagcttttctgtaaacatcctttggatttggttaaaaaaagaaagaaaagtctacagaacaggatcactgaatgccactttagcccccacntttcctgcaggctctgtttgtaattannnagcgtcaaacaggttactgaacatttcttcagctgcggaaagaagttctgaatgggtgacagctgcccggagtggctctacctggttccattttacccctcatcagtcagtgtggtttcttgccaaacaacacctaacgttttaccccttattcctgcagggaggcgggccctgtggctgactggacacag

SEQ ID NO: 136579 - DNA, 898 bp, Homo Sapiens
ctagtttctttaggattagcttgttgtccttttttaaagttggaagcacaattaattttcagcttttcttctttttcaatatgagcattttttacactttagcaatttcccacaaactttgatatgcagtatgattattcagttctaatggatgttgaaacaccaggactcaggggatgaaatatgaatataagttcatttattggaacaatactcattcaaacccactttgagaaccatttttttcttcatattcttgaaaggcaactaggaaaagtctcatgattcttctagtctctcttgataataaaaaaatcctggggtcacttctagccaggatccgtctatctgtgctgcctgggagtgtcaagaggccgtgtccttcattcacctcgcgcgtgggcggcgctgccctgaagatgctcccgggctcagtgcagacggctcagcgttctctcgcgttcaacgaaccgccagaaacgtcagatggtacggaggaaaacactttacactttaacagtatttttacgtttatttgcagcaaatgttgttggctttgtatttaaagtatttatgactcactataaagtgtaggatccaagaaaacgcgctagtttcacttggcccccgtggctgtcccggggagctctccaaggaaggactggttcctgaagttcctggggtgctgcaccaccacggaagaaccaagctccacagagaagccagaagccgcgaccgcggggacgctctctgccaggcctccaccgcctcagcggccctttacagccaccgcattctccatgcccccagttatttctagcttcgcacagcgcccggcccaccgagcgacctcaaacctcgcgacactcgcaactcccgaggcccttcctgctactgg

SEQ ID NO: 136580 - DNA, 1657 bp, Homo Sapiens
ttttttcagagtttagtaattgtattctttctttagttatttacttatctaataagaactttatgtttagcccatttcctttaacttaaaaacaaacactgccttcattgtaccaaattactcttcacaatcatggttcatttaattctgggggttgtcaggagagagcttaattaaaccagtatgaacttagatttccagagccaagtggtttcggcttgccacatcaagccacaatcgtgattttccaccagccatgtttacagtagccaaatatcctcctcaaaatgtcttattgtagtcagaattgttgtggtaaactaaatccttagtaggaagtcatatcccttcaaaaatctaagatgaagtaactataaaaagacgtgtgaaaacacctcagaaaactagcttattttaaaaacaatgcaatcaaaacttattttcctgttatctttacatttcttggttttcataagttaaatatacagtattcacagaaattaagctggtggttatgaatcaccaggcagcaacagacagtatacataattatttgacgagtgcatccaacatattttaaactaaaaattgcagtacaaaaataaaactaacactgttagcatcatcttctgagtctgtagagtcaatcttgagtcaagttgattacgaggtttttttctataatgtccttcaaaaagagctgctctgcagtcacattgtgatacgcgttcttattcatcaaagacatggtggcattcccatagtagtgcaaaggactcttgaggtcagaaaagttgtatttaaaaccagctaggtgaacttcgtgacatatgtaaaacgccaatgtgatggcaataattcctgttgttgggtgtttaggtttctgatttttgggaaacacttttggaatatgaagcagttcataagctgctgttctgataatgaaaggatctaatattcggatttgataaggtttataaatcaggtttaaggctggtttcttccaaaaaccattagtgtttattttgtcacccatcaacaattccaacagccaccttaaatcatgtggcttaaaagcagtgagaatcactgtcgtattagggtcattgtgaataggatctgaaaaaacagattctggataaaaaagtcggaaggttgtccttctcccaacttcttcttcatgtcctaaaacaggaccattattcattttgtcaaactcatcaaagagatcacaactctgcagttttgaaagagcaagtcgaaaatattccgctgatgttctcatcccatagggcaaatcaaacttatcgctaccatacaaggaagcaatctttctaaaatcagccgcacacagaaaagggtgaaactgatgaaacctcagcagagaggcaaaagctggctttgataaacaaggctggatcttatttctccgtttcatttccacaggtgccacccaatagacattcgttccccataatatgcaatgcagtacataatagaggaagacagcactcaggaatatggccacaagataccctctcatggctggctcacctccatacctttaccaggtggccctgctgacacctgtgtccattcagcccctggacaggccgtcatccatcctagtctctgctggtcttcagctcacactccc

SEQ ID NO: 136581 - DNA, 882 bp, Homo Sapiens
ttttgagaataccagttcatatttaattactactaatcacagtagcactgaacatggctctagtgagtgggcctcagtcagttcaggcagctaaagggagggggatttcctcctagtcctctccctagagctaaatatgcatctgggaaaaattaggctctggagcacagaggtatttttctagaggaaaaagaactgaactcccagcactaggtaaaactgcaaaaagaaaaacacctgtgcccaggcactagctacaaggccacaccagaaaaggaaagctgggtcctggaagcttcaggacaggaactcttccttggtcaagttttccccagcacctagcacataggaaggtgcttgatgagtgagtgttaaatgaacctgtgagtgctcaggatgatttcctgataattgggttcaggaatctactgggaggagcttaaacctagaagttccctttttgaaagtctcaaatatggttccctaacttagagaagacagatgatgtgggaaggaggcctgaggagaggatgcaggctggcagaagggagcagggtgcatgcgagcccagaccctgacacccttccaagggtggtgactgggcggccactacacagcaccagcctgctgcagagttcaaaactagaaggggttacatgaaagtgttcccaggatgtggagctgcctgggctaagttcagtcacctgccagcctctgccgttcccatcaccacagagcacctcagcaccactcgcctgaggaacgggctctgtgttgcacaggcccatgcctgacggcccacccagaaacacccaggtcagaggtcagcagatggtgttcctcgtgccgattcaaccacccaggcctcgtacctagcctata

SEQ ID NO: 136582 - DNA, 816 bp, Homo Sapiens
gacccaggcccacagagctttatttcaaaaaaataatttataaaacgccatttgctcctgttttcggcaggcttccagcttctctgggctcaggggccaatgctcccgtcaagacgctggggcagcagcagcagggggaggtgtggggaaagggggttcagaggcccagaacctcctgctggtattgggaggcaggaggtttagcatagcagctctccagccaggctcagccaaacccgggatggggactaagcgccaaggtccaagaagccgagcagaaccctgacatttgggccatcaggacacaggcacggcagctccaagggcaagggcacggcccttggacacggcacagcaactctgggccaggggccccatgctatcaaggtcgagcactgtgtcaggctgtggctgagccccaaggcccaaggccaccagcctatgtgcctgcacagccttgagccttgctcatgtctgcaccccagacccgaaggggaaggagctggatcccaatggcagggggtcgtggctgaagacagaatcgctggaggagcaggtgctgctggcgtccccaccagagggggaatagggtccgaaggtcaggcggaggtcgaggtactcctcagagacggccagcaggaccttgtccagcgcctccaccagctgcttgaaggtaggcctctgggagggcgctgcgtgctagcactcacgcatcagcccgtacagctctgggggggcagtgtgggggtcggtccatccgatgtccctcccgcagcagcgagaacagctcctccaccggatgccagatacggcgag

SEQ ID NO: 136583 - DNA, 923 bp, Homo Sapiens
tttgcaaccaggcccaacacacaattttttattggtttagcctatttcgtacttgggggttgggagctcaatcttcagggaaacagaaaaaagagagaagtattcatgtaagtaggagatgagaagcagagtgagaatcacttttaggaacacagattgggagcaggtacaggagaatcctgggtgaggatgaagaatgacctgggatggttttggagctagcctctggaatcctttctcttgaccatggccatcagcacgagggcactgaccaggacggcatacaaggtggccttccctagcaagatctcatagaggatggtggcagacaggaccccttgctggtaagactccgaggtgaagccacagtctgctctaccccaggcctcggcgctgacgatctgggtgacgggtttggccctatcctgggtccactcgtcattctccgagagcccgtagaactggacttgacagcggaagtggttgcgggggttctgccagaaggtggccgagaccctcaggcggctgctcaggcagtatctggagtcattgagggcgggctgctccttgaggggctgcgggtccgtgctgaccccactgtgcacctccttcccattcacccaccagctcagctccacgtggtcagggaagaagcctgtggccaggcacaccagtgtggccttttgggtgtgggagatctctgcttctgatggctcaaacacagcgacctcgggtgggaacacgtttttcaggtcctctgtgaccgtgagcctggtgcccggcccgaagtactgctcgtaggccctgttaccccttgggctgctggcacagaaatacacagcagagtcaccaagctccagggaattgatgtgaagatttaagtgagctttgtctggagatttaggtgagaagcgatcccgaga

SEQ ID NO: 136584 - DNA, 618 bp, Homo Sapiens
  misc_feature (537)..(541): n is a, c, g, or t
tgcggccgcggtggccgctgggtcctatggaggcgggttccaaggtggaggcgggcatcatccggatgctggagttcggcagccacctggacctggagcgcatgcaggcttccctcccgctggacaacatctcctaccgcaggaagtctgccatctgacctccaggcccggccctcaccactgcccacaagagcctctgccgggggtgggatgccaggacaccccctcccacactcaggacagagccaaccctggctccatggaccttctggaggaaggtgggggtttcaaagactgggggaccccttcctcctgactccagcacccaggcctgggaagagctcggccccgatcagcctgagttccgccagcgcctacttctggtggctctaggtccccggatccaccacccttcccccactgactcttcaaggacgtgccctctttgctctcagaaccttggggaaggtggctggactgctgggcggtggacatctcggggtttcagggtgggcagggggttagtttggggagggnnnnngcgtttcttttgcatgactgtggcctgttgctcatgactttcttttgtaaatatctataaatggagacagatggaga

SEQ ID NO: 136585 - DNA, 1170 bp, Homo Sapiens
ttcgtacaaccccagaccttttcttttggtagtcaacaattggtcacattgcacatttcaaggttacagaggcccaccatacacatgcggggcaggaggagataaatcttgcttggggctaaacaataaagctacagcgagtgttccagaagttgaccacatctggaagcaagaagacagactctggaagaagcaccctagagactccaggaacccccttcactcctgggctttcgggactctacagcgtggggcctctttctcagacatcgaaaggcctccttttctggaccacagtggagcgatgtgcaggtcatcggctaagctgggcgggtcggggagggcagggggagtacagttccttcggatcccagcaaaggtagactatcaacggccaagggttcagaggcaggaaaaaaggccgtttctggggggttggctggggacactccccttcccttctctctccgattaaatataaaagccgatgatgatgaagattgaaaagatgaggaaaatggcagccgtgtctcgggtatcctcccagcggaggcctttcatggaccgatactcctgccgtttgcgaagggcctcccgccgggccctcaggcgccgttcccgctccagttgttccccgtagtgggcctggtagaaggcgtcaaagttgaacatcgtgcggttggcgccgggggaggcccgagaaccgtcgtgggtccgagaggtgggcggcggggtacgcggcgagccggggtcgggtgcgggcgtcctggagggccggacgccaggtccgcgcaggtcctcgtcgctgagtaggccgcgatcatacttgcgacggagggtggcactgcccagcaccacgtaggcctgggagatgcgcgtgaagcgctcggcggcctccgcgctcccggagttgcggtccgggtggtagagaaagcactgacggtagtaagccgccttgatttgggcctgcgtggctgtggaggggacgccgagcagatcatacagcgccgtgcgcgaatacgagcagtcgccctgggaataagtcctcgctcttaggcccaggctgggtgcagaattttgtggaaagccacgggcctgcagcaacctccaaggtaacagccgctgccaccatcgccagcgcatggctgccatgttgaattgattcggcag

SEQ ID NO: 136586 - DNA, 468 bp, Homo Sapiens
  misc_feature (394)..(394): n is a, c, g, or t
tctctcttaaaccagtcaatgttgtctttgtgtaataagaaatatcaggtaagtcttaggatgtggacatcatgtttggggcaatgtctccctcaccgcctctctcatcctttataccataaaagagtgatggcaatatgctagctgaaattcacccttcgatggtttcattttcttgtctacaaaggcagggtgagcgactgctgccctgtgatttctggcactcccagtggaaaggaagcagaggggccaagttatggcagagtgcgcccagttaggccttcgactacaaaagtatcatggtttcccttcctccccagttaccattctttccctggttcccatccccttccacatccagcagtgtgggctaaccttcctttcctcatcctgngaaaacacatcttgctccagtgcacagttagattggacaaccagccgtgtggaggggctgtgggaggtacggct

SEQ ID NO: 136587 - DNA, 699 bp, Homo Sapiens
taggatatgagaggaaatttattagggaacttggctcatgcaattatggtggctgaaaagacccacggtgaggccatccgaaagctggagaccttgggataccggtagcatggttcagtccaactccaaaggcctcagaaccaggaaagctgatggtgcaactatccatctgaggccaaaagcctcaggatccagggggccactggtgtaagttccggagtccgaagcgtggcaaacctggagttcattttagtgttcctagcagtcactgaccagcagcctcttctcccagtaagctgatcccaattgtgattctctgtatttgcctgtctctccagggttttgagtggtggtttgtcctatgactttaattcttccatggatctaagaaaagccattgatattccaatctgtacagttttttgtttgtttttgctgtgaggagggatgtgatgacttccaagctctttacatgttggagctgatactaaaagtcacctacatactttttcaagtcctttccccatgtttttctataaagctcagctaaaataaccctctgtggaggccttccctgacttctctctcctaactgaagagctactctctgtgtgctctagtagctggagcaaatacaagtattaaacttactgtctcttggctctttgactctttggatgcctggagaacaggcattat

SEQ ID NO: 136588 - DNA, 151 bp, Homo Sapiens
ttttctggctgctctttgttcccagacatactactggcagtatatttgcaatcaagacgacagaatgggaatcagccttccaccgtgtagtgtaatgcctcagagtggatatttttggaaatggcactgcattacataaccttccgtgttt

SEQ ID NO: 136589 - DNA, 422 bp, Homo Sapiens
tggggttttatttgtttatttcctcaaaagcagggatcaggagttgcttgggagaggggcagttgggagctgctgggggctgagcccaggtcacctgtcccctgacccctttccagtctagggctaaaaatgacctgaaatcgtctggtgtgccttggacatggccaatttcaaccacagtgcttgcacccccatgtgccaagaaacccggttttcccagcacctcctcctgccctactcttcagtattaattggggtgtgctgggagaagggatattccacatcacacctcccactctctgcagccagggaaacggatcctagcgcccagtttccaggacctgaaatctagtgtgttccaatcaggtgcactgatggggccgctcctgcagctcagggggctgcagatggggagggacctc

SEQ ID NO: 136590 - DNA, 488 bp, Homo Sapiens
ttttttcacgttaacattttggtttatttctttctgatcttttttcctaggcatggggcttttacagtcatttatttaccggtcatgaattcattaaaaaccacagcgatatagcaatgagcaaaacagaccctcccccaaaatcaccctgcgttcatggatcttccattctaatgggaggcgggggggtgaaccaacaataattttttaaaaaggcagaaacaagcggatctggacaatagagggaaatgtaacaggacagggcaggagggcggatgagctggaggcgtagtcattccacatagggtgctcagggcagccacgctggaggaggtctatgagtgagtcccgtaagtgcctaaggaatggagggtcttaggcagaggcgacagcaagagcgaaggaatcttctggtgtcaggccgttggtgtggttacacatatcccataaaggaatcagagccagggtcacgcgggaaccatcctctg

SEQ ID NO: 136591 - DNA, 846 bp, Homo Sapiens
  misc_feature (526)..(538): n is a, c, g, or t
ctgtgaaaccatgaaaatacattttttaaaaaaagtttccaggtataatacacaaaagcaaacaagtttatcttaaaaaataccaagtatcacatccatagcctattcctaattataattacttcttaaagcaacatttgtctttgtttacaaatacagcagcaggtgataaaacctagtatctcaaactgattgcttacaatttataatacaaacatatgtatatgtctcaaatcacattttaggcagtttaacttaaaatgcatagacaattacatacattaaatttgtcattactgtcagtgaaaaatcacaatttcaagaagaaaattacaacaaactcatagagcacacataagaagtcaagttcacttaatggcaacaagtcagtatctgctgatcagtgacaggcagtgaaagtgcctttatccaggggtaaagtgaagaggcaaactatcctgttactttgcacacttgaattgttgcgctgatcaacactacaatcttgaaaaacattaaattcttnnnnnnnnnnnnnggcatgccacatgtcaccctttaagatgcccaaaggctggttacaatttccaccagtagtgatcctaacacgtttaggtaaaactaataatgaatgggtatgctaacaaattctgtaatgttacttatagactatgagcctctcaaggacagggattcccttatagctggcaaagaacctggatcaaggacatattgtctactgaataaatgactcagatgttttcgacagccagaagcttgcctgccatttacaaaatactgattattttattggcaatttctgttttacttggcagaagtctgaaa

SEQ ID NO: 136592 - DNA, 623 bp, Homo Sapiens
  misc_feature (564)..(564): n is a, c, g, or t
  misc_feature (578)..(578): n is a, c, g, or t
  misc_feature (595)..(595): n is a, c, g, or t
  misc_feature (602)..(602): n is a, c, g, or t
ttttattgtaataaactgtttattcaacattttaccaactagtatactttaacagaaaagccctggaggtttattagactatttctgaagaaaaagaaaattaagacatctcagatacagcagcaacaacaactaacatttgtgtagcactttacaattcacaaagtgctttcaacatacattagctcattgaatcctcacaacaaccctgtgaggtaggtatttttgccaatttacaagtgaggtaactgaggctcaaaggttccaggacctttaaagagatccacagcaaatgattggtaaagatggaccataaaaccagatcttttgactccaagtcccatttaatgccaagtgtttatttttcaatgtagaattatatcatacaatactaaagatgaaaggtcttacaactgatccaacttttcaaaaatgggagcttttataaggaaaaagttctttgatttatatgaaaattcaggcttgtcagttttaaaattaatgtggccatctccatgccttagccctactttggaggtcccataattaatgcttccctcatgnggtccagaaccctntgagggctcgtggttgngcctgcntattaaccacccctgcctccg

SEQ ID NO: 136593 - DNA, 403 bp, Homo Sapiens
  misc_feature (284)..(284): n is a, c, g, or t
  misc_feature (302)..(302): n is a, c, g, or t
  misc_feature (335)..(335): n is a, c, g, or t
  misc_feature (373)..(373): n is a, c, g, or t
  misc_feature (383)..(383): n is a, c, g, or t
cgacacatgtgcccagcctacaatcatgatttctaattccaaaaatcagactttctaattctcaggtagatggccaaagctgattttcaagttttgtgtctttttaaacagaagaaaatgaaccttattaaagctgaatgactcattcaaggccatatagctggtaggtggcagaagtggggtttgaacccgtttttcttctataccacacaccaattactgtatagaaaaatagctgaattgctcctattagccaaatttcatttttaaaacccacatgtggnttattatctgttatggcnatgctatgttgcatattaataaaaaaggaaaancctgtgtttagaaacagtgttatcccgatacaattaancatcctggtnctgggtccatggatttgacc

SEQ ID NO: 136594 - DNA, 1303 bp, Homo Sapiens
ttgggaccaatttcccctcttaaaggcccgcgggagccccatttccttttgggggaagggtttccattttttcccgggccaccccaaggagaagggtttgtgctccctttcagggatactttaatggttcccttggttaaaaattccaatattccccattagaaggcgaattttaatgggttgagggagaaagcaatccccatgactcccatggtaccaagatattcctgcacccatcatgaaaatcccaacacccctaaatagcgaagaaaatatagcgcatatttggaaaatccgtacggatgagaagggatctggtgtttgaacagacttactgatgcccaatgctagtaaaccctgattacaagtatcagataatgagtgtatagcttctgagaacatacttgctgaaccggtataaatccaggcaagaaatttaaagaagcagtttaatccattgatgccaattggcacccatcaccacttttcctgggtcccttaaaaaaacactgatgctgttctggagcgtggcttggtatttccccaagaaatctctgtattctcttaatattttttggtttctaaatagcctttctctgtattctatttctgcttccttacgcaattttttctctctggcaagagcttcagggcttccccaaacttccaaagattttgcttccacatctgatctcaagtatacagtaaaagactcagtatcttcatggggacttcgtcgtctgatttttcgaagttgttctagatcactggatttgaggcagaactcatttatcgctctgactccagtgatgaaattattctgagtgtactttgagccatactcccttttcttaaggactgctttaactcttacttggagaggttcttgcttaagtggagctttgagttctgcgcctataccttctgctgtttcaaatgatggtactttttccactctgagtgtttgtgatccctgtccttctttctgaacatttgtggagtacaactttacttgactcagggtaccaatatatggatgactacagggaaccatgtttgaaaagcttccaaatgtcactaaattctgccactcctggcggtcgctgggattacaggccgccgccctgcatcgcagacggagccggcacagggaggaccagctacatctgtgggccgcggcggcggccaagccgggtaacatcctggtggggcagaggcccctactcggacaccgccttctgcctccgcgccgccaccggtaccaactgactccatagactggacatcagcgaacaccgatggc

SEQ ID NO: 136595 - DNA, 829 bp, Homo Sapiens
tttgatggaaaggttttgaagaatttaccattgtgggtcttaagaaactaagaaagactagaattgctaatgctgggcaggattcagttttagtctgctaaccatttgtgaacattgtttgacctgaatacaatatctcttcatgtttaaggagccagtagcaaattttccatatatggatggtagcaggttacacactctaagaaaggaatagttatttagattatttagatatgacacacggctacattttttaaaaaaattacctggatttgaggcagaactcatttatcgctctgactccagtgatgaaattattctgagtgtactttgatccatactccctttgtcttaaggactgctttaactcttacttggagaggttcttgcttaagtggagctttgagttctgcgcctataccttctgctgtttcaaatgatggtactttttccactctgagtgtttgtgatccctgtccttctttctgaacatttgtggagtacaactttacttgactcagggtaccaatatatggatgactacagggaaccacgtttgaaaagcttccaaatgtcactaaattctgccactcctggcggtcgctgggattacacggccgccagccctgcatcagcagacggagccggcacagggaggaccagctacatctgtggcacgcggcggcggccaagcccggtaacatcctggtggggcagaggcccctactcggacaccgccttctgcctccgcgcacgccaccggtaccaactgactccatagactgacatcagcgaacaccgatggcttcgccgccacaagctgcctggg

SEQ ID NO: 136596 - DNA, 567 bp, Homo Sapiens
tttttttaaagtataaagatagccctgcagtgtgtaaaaggaaacctatgggaaggctgcttcccataaaatagacaatagaatcattgaggaacgtcagcagtcaagacaggaggaacaagaggtcattgtagtgaaaaaccaaaacaacttgtatcttggcaagattggtttacaagttcatgacaagaacaaaaattccaacatcagccaactgaaaataaaagataaaagatgacattcatggatctttttatttttctctgtgcaaaatgctcttctttctgaattagagggtagcttgtacactgtgacatgacatgaaatgctgtgtgcccagggtgctgctgggtgccaacagcacctctcactgaatacgatatcactgtgtgcagagaaaacgggcaatcagaggataaacataacctctcctggctggagaaccatttcttgcgactttgctgctgaattcactcattaaactgctcaaaggaaaagctctaccctgatttctgagagtctacagcaatatatgtaacacaattatatatgaagactattgactaa

SEQ ID NO: 136597 - DNA, 1048 bp, Homo Sapiens
tgatcttcatcttcctttggcgcctttcgttctctctcaccctatgcgtgtgctttgtgtgccctccccttgccgcgtcagtcggcgagcctccacctggcagggacgtaaatgactccggactcgctccgtactgctggcctttcttctagtcgttgctttccacttctgacctctgcccaatggtatgaagcttacctttcccgcggcgcgggttccttccatgctggtgtctggttgggggacaaggtgccccactgacctggacatgtcggcttgaggtccacttactttggcatgcactggtcctgcttgagcccagcagtgattgacatcccccattgaagctggagctccggggtcactggccccaccgcagctgcaccatcaagccctctggcaccaccatctctgtcactgcatagcgtcaccattgcctctggtccacaccagaccagcctgaggtccagctgtaccagcatgactatggacgcccgtctcagcgccaagatggctctccgggggaaggccctgcgcacgcagctggacctgcgcaggttccgaatctattccaaccattctgcactggagtcgctggctctgatcccattacaggcccctctgaagaccatgctgcagattggggtgatgcccatgctcaatgagcggacctggcgtggggtgcagatcccactacctgagggcatcaactttgtgcatgaggtggtgacgaaccatgcgggattcctcaccatcggggctgatctccactttgccaaagggctgcgagaggtgattgagaagaaccggcctgctgatgtcagggcgtccactgcccccacaccgtccacagcagctgtctgagccctcaatccccaagctggcagctgtcattcaggaccccaacccctctcagcccctcttttcccacattcatagcctgtagtgccccctctaacccccagtgccacagagaagacgggatttgaagctgtacccaatttaattccataatcaatctatcaattacagtccgtccaccaccaaa

SEQ ID NO: 136598 - DNA, 332 bp, Homo Sapiens
gcgtgagacaccgcacctgggctcaaactaagaaatattaaaattttcttccttttaagatttagagtaaaggccaaataagcacactgatgtcttcccctcttctataagtttaaaatgaaacctgaaagcagggtcgatgattaaaagctgatgttcctaactagtcttttatggactgccagccatggtatgctctcaaattcttctgatgtgattaaaatccaagcaaccatgaagattcagtaggacagttcacgcaaccttacggtattgtgggacgccctcaagtaaaggggaatgttacaatgttttgctgatgaaagcattcc

SEQ ID NO: 136599 - DNA, 2019 bp, Homo Sapiens
tttatttatataactgttcttactgattttattgccccctagcaataagccctttcctttgaatacatgtacaactttggtcatatgagaagcaggtgcgcagagaattccttgaaagatctgaggtttttaacatgaagtctgatgtggttttcctctagcattccaaaaggtttttgctttgaaagtgttagcagaagcatgttgatgtgaattatgatttcttcatgtgctactgttagcacactgagtttttatagttgcacatcattcctcattgtgccttgttttatccattttataaatagagtagatatttgatataccactctgataactcatataaaaatatcatcataaaaagcttaatttcatcccttttatgttggttttaaaaggtaaatgcttaccatattttataattgagaactcttacatagtagaatccattctataatacatgtgttgacaaagctttagagaaagtttcctattctcttccatttcccctgcccaaagtgctgacataggcagtgatgaagaatctttaccaagattttcagggtgtacctatgaaattgctttaaatgcactgctggtgtaaataattagcaagcaaaagcgtttctgtgacttcaggtaccagcttaaagagcactagggatggggaacgaatgccaaatcagactccacctagagcaccaggaaacagcttgtaccctggtagggaaatggtgttgctgaaaggggaggctgagccagtgcgagactgaacttgtgcagccttagccaagacaaagcagtgtttttcagcagacggctgatgggacaggaattgaagaagagaattgactcgtatgaacaggacagggtgaaaatgctgggaattataatgggaaacaaaactatctatgttcatattttgtaatatttcatttgttaagtttatatctggatataatgttctttttaaacaagtataatcatatcgtcggaggttaagattatgaaattttagaatctctattcaagatgatgttcactccaaatacactacagaatttagtcaacattttatataatgtttcaataaatgtttctttcaataaagatactatgtgcccttcatagtaataaaatctcaatcttaaagcatgaatctaaaacataaatatttatattacagactcaattttacaaaattactaattgctctagtgcatatttgaactacaagcaactttttaggaatacctctttatacgtctacatattttagtatataaaaatagataatgctcttggacacattttgtattattcatgatctgaatagtagttagttaaaagatcatttgtaatattatgatcaactgttataaattaaggtcttaataccttttctgctctttcaaataactctaatgaatattcaagatattttagccttttaaaaagttgagatttagctcatggatatattttttggtagggaaacattagggtctccttttcttccttttacctagaatgcctcatttaaaagtgccttgaaaacatttagctccccttcttcatgagcatctgtagagctgaaagtattctggaactttagacagaaagctgaaaggaatctgcagtctcctgctgcagttcaactctgctgtttttcagtcatttcctactgtgagtggagtgatgttgtgtgtgtgttggcaacatgcctaatgttttcttaatgatgacaacaaatattttaaaactgcatttatcatttttaggtcttcattaaattttaacaatgtaatatctggtttctcaccccctaattaggaggatatttcttaaagcacatgtttcaatggatttttcttatcttgatttctttcattagaaagtatcctaaatgttaagatctttggctttcaaattggattatttttctgattatgagggtttgaaagaaagaattaccgtaaaagattccatttccaagttataatgtttcaggttctgata

SEQ ID NO: 136600 - DNA, 730 bp, Homo Sapiens
ttttttaaaaaaacaggacccagtttactactgaagctgcagcgaggttacagaggcgtcttggggctcagtccctgagctccgggacgcccaactgggagtggggcctccactctcctacgtacagacacccccatagggaaacgctcacatgctgtcctgctgggacgctgcaggcctggccgttctgtggccgcatccgcgtccgggtccctgtgtcctggctgggcgagccggggagggggctgattcctgggagcggttcagcagcgagttctgaatgtcttccaggacttcacggaagagctcctctcgggacttcatgccgtccaggtagaccacttccacaccgttggcctccatctcctgcctatacttctggtacatgggccacacgtggccatcgaagaggccggggggatcagggactgtgtagttgcgggtacttctcctccacttgcactcttcatacgggacggtcaggaagtaccggcggctgtacaagtccaccaggggcttgtagctgtagagcaggaagccttccaggaggaggatgtgggtgtccgaggcctctgcgggctgctcagccaggcctgcacggtgtccagcatggcctccatgtccagagactccagcacgtcccactgtttgaagccgtcttccccaactgctatttggtcttggggcttgaagaagtcatcctgatggatcacgcagcagttgggcaggg

SEQ ID NO: 136601 - DNA, 251 bp, Homo Sapiens
ttttttggcatggcttttttattctctttgcagccaagacctgtttttacaattaaaaccaaaattttgaatcacaaggttcctatgtctatgcatacttgggaacttagtgtgaggaaataatagttaattgaaatactagtggaactgtttaaccacaaatttagactaccaggagaaactgaattatttgatatattacatgtaatgatgcacgttatatattttacatatattacatatatattttt

SEQ ID NO: 136602 - DNA, 650 bp, Homo Sapiens
atatattttaaagtgtttatttttttctataatacatttcattcaaatcataaaagtctgatacatttttttctcaagaacaacttacactcatttgagatgctttttctttcctttaatcttataggatggacaaagatacactttaatggacaaaaaacaccagagttcattacaaatacagcttcccaggccccacctccagcacttctgactgagcgtctgggacgcatcctaggatcgcaaaactgtaaaattcccccagtcaactccacggcaggcaggcctggaaccacccttagtggaacactgcttaggacttgtctgttatctaccagaagcaatttcagaaaatcaggagtaattacgtatacagaaatagctcttctataaaatttccatataaaaataatggtatttatttacaaagtctgagatactacaaaataatatatcatattaggttgtgtacttcaatctaatagaggaaagtctacattgggcaagtcagatgtggtggttgcattttcctcttatctctcttgtttaaattgcttaaagcatgtggcaccacgatgtatccttcatgcagaaaaaaggagaactatattttctggaaataaaacccaatagcacatagtcagagtaaa

SEQ ID NO: 136603 - DNA, 430 bp, Homo Sapiens
ttttgaaagaatagacttttatttcatggaatctgtaagcgtttagaaaaatcactgtggactttgaaaatatatttaatacaaaacgtgttgaaacccatgctttggctatccctaggtagaaatgatcctctttatacctatgcagattatgagagccataatgtcctcagttctcatattccattgagtaaacacagaactagcaagctgtggaagcagtgtgtatgagggcaaattgtagctttgttttttaattctacagtcagtatgtgtgaaaaaaaggatgatttttaaatgataacaattcttaaatgtgataattgctaatgaatttactctgatcagttttgttcttttaccattcatagctaatttatcacattacatataaccaggaatgcaaacactagcctcatgtataccctct

SEQ ID NO: 136604 - DNA, 543 bp, Homo Sapiens
ggtggtgggttatcaattagatatgtactttttttattgaaatataattcacataccacacaattcactggtttcaattgtaccactcagtggcttttactatattcacagagctgtgccaccaaccattgccacagtacaatttcacacatcttccccagcctctcagagaaacctccatcccttttagctgtcaccctttcagctgtcaccccttaacttccctcatctcctccatctccagccctgggaaaccaagaatctactttgtgcttgtatggatttgcctgttctggacatttcatataaatcgaatcatataatatgtgggggtttttttggtaaccagcttctttcacttagtataatattttcaaggtttatttgtgttgtaacgtgagtgcgcacctccttcgtatggctgagtaatagtctggtgtttgggtataacacaatttttaatccattcatcacttgatagacatttgggacatttgggttgttcgcgctctttggctattatgaataatgtcactatgaact

SEQ ID NO: 136605 - DNA, 1185 bp, Homo Sapiens
  misc_feature (35)..(35): n is a, c, g, or t
ttttcgaaatgtcctccatgacttgacagactggnagccagcctttcaaccaggagacctgcagaacttaaacacagagcatttattgttagaaagggcaagtcttacactcaaataggttttaacatgaacacattaaagggagatggccctggcccccacagtgtctgctctctccaaggcatgcttcagttatactgcagcctggccaaccactgttccctgtagaagttgaagttcctctgtattatccagcagctggaggagacggagtatggcagactctggaatgccatttgtgtgagttccacctactttctaggcttcagggtaaatggaaaaagtcgcaataggcgaaatgtatttcctaaaaagctggacagaggtatgtgacattcctttgcttaacaagcaaaacaaaatcaatgagtctggtgaactgacgccatgacagcaatgtggagaagactgggagtctacactgggaatggtgctgtggacgctctgggcacagaagcccaatttggaacctcttctcagaagcgtgggaggtggtggaggccaagcccaccagaggcggggcctctccccagctgcctcgggatcatctctggttctcctgggccaggctccatggagtcatcaatcctcagtcacaggtggaggaatgagctgcagctggaagttctcattctggaagatgctgttgaaagcaggagcactctgcgagccactgaatggcctatagctctcgctgctgcgattctgggagagttccgtgaggagagccagcctggagcttcctcggtagagacggcaaagctgatcaaatgcttggatttgctgtggatccagaacaggttctgaggttccctttttagcagtgggatcccctttggactgatgatacgatggagacatttttacctgtgatggggttatccttccctttttaatttcagatgaattttcactgagttttcctactttgttacttgaactgcatttgtagcatgtccatcttgtttggccctcaaattccacagtgcattctttgttttgtaggcagaatgagtgatacaaatggccacagctaaagactattatttcatcagccatttcttggcgtctcttgtactgctgcaaccctcgtgccgattcacccccgcctcgtacctagccgta

SEQ ID NO: 136606 - DNA, 884 bp, Homo Sapiens
  misc_feature (192)..(192): n is a, c, g, or t
gtctgtgggtgtgatgctgccattcacggctgtgctgtcagctgcctggatggaggtggagccagtttcctcttcacatattttcaacttcttcgtgattgcctggtaacagacagctggcttctctgtttggcttagcaggaaatgatggatatgaggatctgcatctgttagcaggctcgcttgcggttnggctgccatttggacgcggccatcggtccggccatcatccccgttcacggtactagactccgggatggtgagatccttctcatcctttggggtccgaccccgcttccggggactttgctcttgggctcttttcagaggggatttggagcctctctctgaagagcctgaagacaccctcttctttccttctcccatgttcttcttcaccttcccttcagacaggctaagtttgcgcttctcatcacctgagtttggcctacttctctcctcactggaattacgtcgattcttgtcatcagaagaattgtgggatgacgtctggtctttccctttggctctcctgaggaactcttcgacagcatctaccgcttgctggaatcgtttacccttgttaatttttatcatttcctctttatgagcatgatatggcttcagctgttccactttgatccaggcatgatcttctgttccaaaaaatttcacaaagaagcatttctttccgcgaggtttcttcaagtcctttggtggattaacaatctttcctggccaaggaggatatcggccgagtttcccccacaccaagtcgccgagccgcagactcacagccgccatcattaccaccacaaccaccgccgacgcacgggccagccgggaacagcaagtcgccccggcgccgcccattggagtgggcc

SEQ ID NO: 136607 - DNA, 471 bp, Homo Sapiens
cgcttcccgcgcctcgcgggccccgctctcgctcacgaagttgctgcggatcctcactttcctccgcccgctgctggcctccatgtagccgtcctctgcggagacggagctggccttcctctctttggccatgcagggccctgcgagaggagctacctcctggctctgttcgcgctcccttcccaagtggaagacccgcctgggagccgcgtgccgcgagctctccaagaccccgcgcgctctgcgcttcacgggtggctcgggcggaggcagcaggaccacgggtctggccgtgccgaaccccgaggcgatgactgggggctttttcagggcctggtgccgtaggaacgcggagctccgcaagtaaaagtcccgggggcgaaacgaccgggtcttgcctggagccgccgcctcacccaggcccgagggacgcggcgcgcctccgagctcctcctgcaggagggcggccgc

SEQ ID NO: 136608 - DNA, 1087 bp, Homo Sapiens
gagttatgtctttacagctttaatctagcaggccagagatgtggccagtggggcagccagagaggagggctactgccagctgctgacggaacctcctccctccccccaccccagcccagaggggacaaacagtagggccccagccttcctggctgggatcttgggagcagagggactatttgactcctggcactgtgacccaggctgtcatctccctcccttgcccccagtaaaaatagcccataattccaagccctccccccaacccctcatagttctagttcagctcctgttccacttccctggggctctgtccccagtagggcccagggcttggcttggtctggggcctggtggctggaggactcctgccacccccaggaccagatgcaggtacaggatgagggcatctcccaaggttggcatcactgaaggggcagcagagacatggctggttcctcaggctcccgggtaagagggctgtggtggcatatagggaggaggagctgcagggttgtagactgggggcccagctgggtagagtggatattggggagcaggaccactaggtgggtatatgaagccaggctgtgggggtgcagggccagctttggggtcctgggggtatgggtatactggctgcactgggatgcctgtcattggaatctcctggccttcaaatgggctctggagctgctggcgccggcggtacaggtagcaacaggaacagaggaagcagcagatggtggtggcaaccacagcaacaaagaggatcacagctgaggcgatgcctgctatggtcttggggctgaaggccaggcagtgcttctgctgcctctcggtgataagcaaggtcaggtccctgcagcagtaccgatggtagcaggtcccgcagcagaaggtgaagaactcgcagttaaaccccggatgccaggagccattccggtccaggtaccacaggcagtcctcgccggccagcactagcctctggagctgggtgcccctcacccagcagagcactgccctgctccccctgtccccggctccgcggtggttcctccctcgtgccggaatcgccacccaggcc

SEQ ID NO: 136609 - DNA, 827 bp, Homo Sapiens
ggtttcccggcttacccaggagatttctcccaagccctcagccttggttgtccaaactggaaagagcctccttgtgagcctgtgtcaaagaggacaggtgttcttggtgcagcctttgaaccttttccagctcccgctggctcccctcttccaagttcttccggacaacctcagccccagccaaagcagcacgcaggccctcagcctcagctcggccggccttctccgcccgtgccagagcctctagctccatggcttgggcctctagcctcatcttctgctgcagcgaggtctcccgcaggagccggacctcctcctccagccgccgcagctcttgcagctgccgaacgatcacctcagcctgctggctcagggcctgtgacccctccagcccccaggacctgcctctccgccctggctcctgcctgtcactggaaacatcccgttcccacatggtcacttgaggtctctgggtgtctagccgcctctctgagacatcttgatggcctgggggttggaccaggggaatgtctgagagccaggtgggagccattcttggcagagttgaaaggggccgagcttgaaagtgggaggggggaatcagcccagtggaacctgaaggtggaaacatctccacattatttgaaggctctagattctgtcttcagccatctatgttccccctcctccttaagtttctatggtccctgctgctcctggccagaggtgagaaaggaggtacacagtgcaggggtcttgagcgccatctccagagttctctccatggctcagccggacgcgtgggtcgacgatatcccgggaattcc

SEQ ID NO: 136610 - DNA, 1102 bp, Homo Sapiens
gggcctgtggctggaggactcctgccacccccagaaccagatgcaggtacaggatgaggcatctcccaaggttgcatcactgaagggcagcagagacatggcatggttcctcaggctcccgggtaagaggcctgtggtggcatatagggaggaggagctgcagggttgtagactggggggcccagctgggtagagtggatatttggggagcaggaccactaggtgggtatatgaagccaggctgtggggtgcagggccagctttggggtcctgggggtatgggtatactggctgcactgggatgcctgtcattggaatctcctggccattcaaatgggctctggagctgctggcgccggcggtacaggtagcaacaggaacagaggaagcagcagatggtggtggcaaccacagcaacaaagaggatcacagctgaggcgatgcctgctatggtcttggggctgaaggccaggcagtgcttctgctgcctctcggtgataagcaaggtcaggtccctgcagcagtaccgatggtagcaggtcccgcagcagaaggtgaagaactcgcagttaaaccccggatgccaggagccattccggtccaggtaccacaggcagtcctcgccggccagcaccaggggagcccccagcaccaacagagcgattgcggtgagcggcgcggcccggcggagccccgcgggtggcatggtgggggctggcgcgggccggggtcgggcctcccagagaagggaccgcaggaccaagccggccagctggagctgcggcggggcccagcccgcgccaggctcgggctcctcttccgcctcctctgggggtgggactaagcgccccgcccgcgctaacccagccggccggctccgcgcagcgcccaggagtccacccaccagcgacgcccacctagcctctggagctgggtgcccctcacccagcagagcactgcctgctcccctgtccccggctccgcgctggttcctcccatccgagccaccatcctcgtgccgaattcgccacccagcctcgctaccttaggaccgttatagtactgccgtcgtttactaacgctgggttgaaactgcctcgtc

SEQ ID NO: 136611 - DNA, 1647 bp, Homo Sapiens
  misc_feature (711)..(711): n is a, c, g, or t
  misc_feature (1345)..(1345): n is a, c, g, or t
  misc_feature (1622)..(1622): n is a, c, g, or t
ggggtgtggccaaagcgcagtagggggctctcgcggttggggaacatagatggctgaagacagaatctagagccttcaaataatgtggagatgtttccaccttcaggtcagtgggaccagacaaggggagtggtggttgtctctgcctgggaaactgaccatctttgtttttgtaattcttcaggttccactgggctgattcccccctcccactttcaagctcggcccctttcaactctgccaagaatggctcccacctggctctcagacattcccctggtccaacccccaggccatcaagatgtctcagagaggcggctagacacccagagacctcaagtgaccatgtgggaacgggatgtttccagtgacaggcaggagccagggcggagaggcaggtcctgggggctggaggggtcacaggccctgagccagcaggctgaggtgatcgttcggcagctgcaagagctgcggcggctggaagaggttcagaggctgcaccaagagcagctgtcctctttgacacaggctcacgaggaggctctttccagtttgaccagcaaggctgagggcttggagaagtctctgagtagtctggaaaccagaagagcaggggaagccaaggagctggccgaggctcagagggaggccgagctgcttcggaagcagctgagcaagacccaggaagacttggaggctcaggtgaccctnggttgagaatctaagaaaatatgttggggaacaagtcccttctgaggtccacagccagacatgggaactggagcgacagaagcttctggaaaccatgcagcacttgcaggaggaccgggacagcctgcatgccaccgcggagctgctgcaggtgcgggtgcagagcctcacacagatcctcggccctgcaggaggaggagctgaccaggaaggttcaaccttcagattccctggagcctgagtttaccaggaagtgccagtccctgctgagccgctggcgggagaaggtgtttgccctcatggtgcagctaaaggcccaggagctggaacacagtgactctgttaagcagctgaagggacaggtggcctcactccaggaaaaagtgacatcccagagccaggagcaggccatcctgcagcgatccctgcaggacaaagccgcagaggtggaggtggagcgtatgggtgccaagggcctgcagttggagctgagccgtgctcaggaggccaggcgtcagtggcagcagcagacagcctcagccgaggagcagctgaggcttgtggtcaatgctgtcagcagctctcagatctggctcgagaccccatggctaaaggttgggaagggggctgcccncccagctttcccagccctcaacaaaccgacttcagctatgcttgtccgcaaggtccacacccattcgggggcctggattgctcgaaagctttgccccttggctcagctggcgccaagggagagctgggcccccttaccaccacccgggttcacaggatggggagaccctttggagttggcagcaaaccttggcgggaaagaacacggcaacccgcccctggcaatggcagaaaaccctgcaacgcttggaagagcgacccgccccctcaatcccaanacacgggaaaggttggcggccccgc

SEQ ID NO: 136612 - DNA, 918 bp, Homo Sapiens
cggttggggaacatagatggctggagacagaatctagagccttcaaataatgtggagatgtttccagcttcaggttccacgtgggctgattcccgcccctcccactttcaagctcggcccctttcaactctgccaagaatggctcccacctggctctcagacattcccctggtccaacccccaggccatcaagatgtctcagagagcgctggctagagacccagagacctcaagtgaccatgtgggaacgggatgtttccagtgacaggcaggagccagtgcggagaggcaggtagggatccatccacgccgttattctcaggcttgctttgctaggtgacccttcctcactggaataaactccttaccctatttcggccctagtttccagaacgtactcatttttatgtaagcaatatagttcctacagtgcatacaaataataaagcagtgtgctaagtgctagggactgaggataaacaatcaggtgaataacgacaaaatcctgacttcaaactctgtaattcacttacaggacctctaacacatcctaagcagagcggagataagaattgacccagccagcctgatggtcacacgcattgctatgagggccaggattgacgcaatgtgcaacaccctacaaggtacacagacaccaggacaactggtgcaatgaggtgggacgtatccacacatgccattgcaacaacagcgctataacatgcaggaccatttgccgattcggatgcctgggcgcagacctgtatcagaactctaagctgatcagaccatgcgctaagtacgagggtaggcaagctctcagacacgcagaatagtcctggacatacagagcctgcacatcaaggcaacaccacagcgggacaaccatatgaccacagcagcaggaatgaacag

SEQ ID NO: 136613 - DNA, 1211 bp, Homo Sapiens
  misc_feature (516)..(527): n is a, c, g, or t
atttcttttctatttaccccatttcttattaattcacacttcaaaaaagcatttcctggaagtatttctaagtgtgatggtttgtaatatataacaaatgaaaagatgtaattagattataagaaaagcatctgcctgtaaaatatgaaggaagaaaggaagtaatggactcctcatggggccccacagggaacccggaaggacccagaaaagggtgccgggcccttcccctgtgctgcagctacagggccccatttcttcagaaggagcgttctgggtattccatcgtcccctggaagtctggcaggtacaaccccctcaacactccagggagggagggaatccaccaggaagccatgaactgctggtttcagcggggagaggtaatgctgacagctctgataatctacctgaagccctttgtgaggaatactgtaaaactgcagtaagctgtcaatattcgacattaagtcatcatttcagaagagaagcctgtttgaagtaggaaaggtttgnnnnnnnnnnnngatgccgtggttcttgcaagtctgccttgtttggtaccagcacagagcatcactgtcactaagtgtgccgggggagaatgctgagctgcttggcggtgtgtgtgcgcctgtgcgaggccaggtctcacagtcccagagacttctggacgatctgcttggcaatcttatagaactgctcccggtcatcgcgccacattttggacgcatccacgttagctccactttcgtcattgggctctgccagcatgctcaccaccgacagcaggatcttctccacactctgcacaggactccaccgctccgcgctgctctcgtagcccatggggtcatcgcctggcgcgtggaggatggaaatgcagactctcccatcagggtagatgttgggatgaaacatctcacaggtaaatctcatctttgggggacttaacgggtaatcaagtgggaaactcaggatggcaggaaaaacaccataactcaaagcaggtgtcttctgggcccatgatcaatgcctcccattcaaaaaagttctcttcattcatggggcctgctacaattccttccggaggattcagtgttaattgtttgtactcggccatcagcctcttgagcgcggtccccgccatggccccgcaacagctgcgccgagcgacctcgcctcaaccgcgcgcgtgcccctcgtgccga

SEQ ID NO: 136614 - DNA, 593 bp, Homo Sapiens
  misc_feature (308)..(308): n is a, c, g, or t
  misc_feature (580)..(580): n is a, c, g, or t
tttctttgtcagcacatttatgtttttgtggttacataaattccaatgagttcacctaaagcccttccccactgggacatctcgctgcttccttgcaagctgttgttcatttgtttctttcagagaacacagagagggtgacagctctgggtacctgcccatgtccttcttttgagccatctcctagaagggaggttgcaggaactgtggccgccaaccccccaaaggctcatgacacagagctttactgaaagggcgacctatagtcgttgaattgctccatcgtaatccacaccgtctctcatctnggagagaagaggttctagctctgtagaaggtcccaggaggaggagttaggtcaagcataaagcagaaggtggaggcaggggtgagcagaattgggcgctcagctggacagctggggaaggtgctgcaagtcccagcatggccaggctcactcttgccacacagaccttcaccctccaccctcagacctgcgtgggcacacaccttttgagagctcctcctccgcgtggggctccgacgccttggggagctgcagcaggtcgtacaagaactncgctccatcgcct

SEQ ID NO: 136615 - DNA, 436 bp, Homo Sapiens
tgatttattttgtttatttaaaatcataaggataacacaaatatcagaagttctttcacagttagattgaaactggaaaaaagaagtatgctatatagcaaatgcacacacgtaggcagctagtagctaactctccaaaagtttcttaattattttcttgtacagcggggcttgcaggtccaagcaaattttccttccattcttcagcgtggctatcagttgggcagtggggcagtggggtccggccttgatcacctccaggctggtgatgtccctgggacggacctgggaggtggtcttcacacacaggcactgcaggtccccatcttcttcagcttcagcgctggcgaaggcgaccacaagtggcaggagcagcaaccccaggaacagcagcccggggcgtgaggcgcagaacccggctgcggagctcatgctg

SEQ ID NO: 136616 - DNA, 628 bp, Homo Sapiens
gcctcaaatatttgaccatttttaaatatcatgatttttttctttctgatcccacattttgacgtgtcaaagcttagagcaggaagtaggaatccacactttcacggagggggaccagcctgccatgtcgtccccaggctcacagcagcggcggctactctgctggtggtttggtggcaggtggagatggtgacggcgcattggaaaccgtaaggcatgacaacgggaggcccgcggggtgtttcagtcgcgttgacgcaggtgcatggctggcaggcggcctctacagaaggagggagcgcaattcacagcctcttgacgtagtttccggggaaagtaccaaagaatttggttcttcttgaggtccccacaaaccagccgtcatcacacttttccatgacatcaatgacatcactttctctgagctcccgctcatcttcattcctgggagtatagttatacagagcctgaaacggttcccccccactttgaatattttcatgagtaaacacaggacgctgtggcttatttgagctcaagctgtgaatcctatcactagaatagctgtggggtattggagggtcagggtagtcctcagcaccttttgtgttcttcttgacgacctcca

SEQ ID NO: 136617 - DNA, 1004 bp, Homo Sapiens
gccagggatttatggggggccccggttggtaatacatacatctcggtcccctttcactcccctccttcatcattgttcaccacacaactggccaggtggggtcttggagtggccttgtgtttgctcttggcctcctcctttgttcaataatcactacagagtcacggtgagttaggtcaatcactacaggtgctagagattcacaggtgaggtcaactacttcatcactttccccaagttctatcagttctgcatccaaggctatgttaggtgttgggcctccttctctggctatagggaatgctcaggcttgtctggaattcaccatgctgtctcagcttattatagtattccattgtgctttttggattcagtcttagagaagtaaatgatctgtgccaaggtttacagcagatattaaaactcttcgatgtctcactgctgttgttcagtcactctctgacttataagaatttagaggtcagatttccccacatatttgaacccttattctgggtccagtcctgtcttcacttccacaactgctgtgttcccacagggagtggatcttctgggagccatttgtaagatagttcaatctgaatttttaacgagatggtacttctcttgggccccacagacacctgcttctccccggatcgctattctcgactatttgcgtttcgcgaccggcctgcccctcctctttcccgctctgcccaggaaaagcgagccctcggaaggaacctgggcagccccagaaagcagtgcccatcactttccagctccatccacccagcagcccatcaatgacctaaatatgctgtctgttccacccagtcctgcccggtagttattcagcgatgagagagtaggaagcttgagctccaggagtgtgccactttcccggccctccgtggcttcccagtcccggacagagacctgagcaagccgaacccgggtgcctggctgcactgggctgggaaggaggaccgggcggccgc

SEQ ID NO: 136618 - DNA, 449 bp, Homo Sapiens
  misc_feature (365)..(365): n is a, c, g, or t
tgaattgtaataagctgtttatttacttttgccccatgaggctatgaattcctccaggacaaattggctggcactttgctgctgtttaataaatatctgacaatgcatgaatggcagtgtcctggcagaaaacagaatagtccaccttgagaggcaacaagtcctaacagctttttgtttacacagaggctgatccaccctctctcagagatcttagaggtggtgctgaagattgataaataggacacgaatgccctagggtcccttctgacatggtgattatggggcagtgactctggcagggggctgagggggatctttgaaaagcaaccaaggcccggtgagctaatcacttgatatcagtnttggttcacagcagctttgtgttccagaaaggtaaaggaaattcattgcaaagcagcaacaggcgaggagttactctggttctg

SEQ ID NO: 136619 - DNA, 443 bp, Homo Sapiens
tttttaagtatgaaaataccatggctttatttttctcttaaaaagatagccgtgcttatgagctaaatggaaaggatgtatgtcattctcatcagtaaacaagatttaactgctttcagatgcaaaccataatgccgaagaagtgacatgaaggggataaaagtctaatgctttcatcttcacagcaatcaaatgcaaagtaaagcaaaaatgaaatggacttaattaatgctgggcattcccacagggaaaacgcaagaggatattataacaatcagtagcagtattgtatacaatttaaaaattccattaggttgagccaccctcactcctctctctggctctctcccatctgaggtatagcaggctggaactaacagagctagtagtcgggagcttttgctttggagtccactgagataagtgcctcgtgccgaattctt

SEQ ID NO: 136620 - DNA, 330 bp, Homo Sapiens
ggagggaaaatttaaacttttttaagaagaaaaccaaacccaacctgaactaatcgtccaaggagtcctgtttggtcccaggaaaggcagatttccatccacaccagtgaggggcaagtgtccgggttccaactcgaagccaggcgggcctgtgcgggggtgagtcctttgccacccggcgccccccaggctctacaagcgtctagaggtcggagtcgcagggcagcgactgtcgcaggggtgggtgctgcacgagggagcgtcctgggactcccacccctccccgtcgaggacgtccaccgagttggtgttagccttggccgcggtcgc

SEQ ID NO: 136621 - DNA, 405 bp, Homo Sapiens
ttttttttgcataacactgacatttttattagaattcatttgtaacaaatggaacttgtgtcagcaaagaactgattttcatacagacttctttcgccaccaatgtaacgaagtaagaaaataaaaagcacgcctttcattctgtaaaacatttacgcgtactactaattagaggtaattgtattttttaacaagccattttacaagttatttgttttaatttttcagtctatgcatccaaaacgagagcaaagaacacaactgttattatctttgtaaagacactccaagctgggatggcaaagccacataacggatggatagaatggatctgtagccttctgatctctgctggagtatccaggggcacccataaacccaaaaaggaaccaaaacccaaaaaga

SEQ ID NO: 136622 - DNA, 659 bp, Homo Sapiens
tcagctccttctttcattccagctctgcccccatcgtgtttctcatttccgtggacacccacgccagaaacctggatctcatccttgccttatcgctcttcacacctgccttaggtctctttttaccttgtaagagaccttaagagacctttccagttggttcagttctctcagccccaggttcaacctgtcctgtctgacacgtctcacagccttcctgccttcactccagcgccccctcaatccatttcccacagtgcagcccagacctgtttttgattgtcagtccctatggggcttaagtcctggaacatccccattgacctccaggacaaaattcaatctattttcactttcagggcacttcaaaactactagtgagtggttcctcacctcttctctcaaatacaatctttgtataaattcatttatcctggaggtattagtcctctagctccataccttactcagttactgcagacccctctgctacctccttcattcgactatacatcttgttttcccgaggatgtgaatctccctcaagaaagatccctggggcctggagtggtgtcttactcgtttctgcttcctcagtctctgtcagataatcagtgctatgtaaatgttaagtaaatgactttatttatttaaaaaaa

SEQ ID NO: 136623 - DNA, 619 bp, Homo Sapiens
ttcaaatgactttattctgttagctttacataggtgttggaggattcctaaggtgtcagcattttgtaaaggtaccacaaaggagaagttgatagggaatctaattttagaatgtgccaaatggtctgtgctcaacaatataattgaactctctcaactctacctcaccatttctttatctcaaaattctgttggctttgtcaaacgttggattttatttctgcagcctagtatctccccattctaccacctatgccagatgttaaagacagcagatgttttgaggagaatggcattgtggagatgcagagatgcgttgctaagttgaggtggatccagtatagagatacctctatttcttctttatggctcaagagagctaggacttggattttgttttacaggcatgaaccactgtgcccagtctatatataatagattttagaagaaatttctgccactcagtgactgctttaaattctagagacagaggctgagagaaacttagtagcctgcctgcgcatactgcaagtacagactatataacaagttgaaagagaatcaccctggtatataatattttaaaacatgaaaaaggcattactattgttctggtcta

SEQ ID NO: 136624 - DNA, 583 bp, Homo Sapiens
  misc_feature (441)..(441): n is a, c, g, or t
  misc_feature (476)..(476): n is a, c, g, or t
  misc_feature (491)..(491): n is a, c, g, or t
  misc_feature (505)..(505): n is a, c, g, or t
  misc_feature (526)..(526): n is a, c, g, or t
  misc_feature (543)..(543): n is a, c, g, or t
  misc_feature (558)..(558): n is a, c, g, or t
tgtgtgaattatgattctttattctgactggtgcctatgaaagcaatagggaaacatgtctactaatgagttttgtctttttccacagagaaagcttggactatatttctggaaggcacccactgtggggtgctgcttgttctgtggtgttgctgtgcagcggccgggaggagcagagggctgcaggagaccctctgagattctgctttgtgcacatgtactgccagcgcatggcattcttgagcccataaagcaagacttctcaggccctgtggttagcatcccccacacccatatcagccactagcattttaaagatggttttaggtgggtacataagggcccagaaaaaaagttttacaattattttaggggcctgaaccctcatgtcatagctaatcagtgaatgaagttaccctttaatccaagagcctcatcccnggtttcctgggactaaaactttcaccaatctgaancccagtggcaactcntaaaacgaacccanccatccactgttaccagatgnggatcttaacttgaagnttccctaagggatcnccgaagagcgtgtgtacaatgcact

SEQ ID NO: 136625 - DNA, 571 bp, Homo Sapiens
agacacaggggtccagcaggccggtggccgggttagcactcatcttacacacgaaggtgaacctctttcgccaccgcacacagttctcctgtacctcctcccttgacgacaagctgacaaaatcccctccatccagcagccggaccttgcagaagaggaccccgttcacgaagggaaccgcagtcagctcctccagggtgaaagtagtttggaatttgaatttcttcttcttcatcaagaaagccatgagcgagttccctgagtctgaagccccgaaggcgaaaaaaggtggagagggacgggattcctttccctacaccacaccccctcctcaaaacaccagagccggatcccgccctgatggtggcggagacggcggagatcggagtccggggccccaggtctgagagatccaccagtccagttcgcgggccggcgggcttcaccctcggggagccggggctcggaggggttcggagcggccggggacctcaccggcatgtaaacagcagggcatggcccaggaggcagaggcaggggcggaggtgcggggctgcgcgcgagcggccgc

SEQ ID NO: 136626 - DNA, 491 bp, Homo Sapiens
gggttccttgtcttccttttttctcttatcatcttccagtctcttcttcttgtcttcaggggccttgctgacctccttcttggcagtgagcttgatatcgtcttttggcctctccttgctgctcactgtccgcctttcactgcagtctttttccttgttgtttggtaaagagtctttttcttccatacttgctggctttttacgctcagctggcattatgtgacccaggacaatcagcgcggccgggctgagagtgggggcggggcggaaggaggcgagagggaaaaggccatccgcgcgactgcccgattaaaaacagtcctgatcgtcttccctgcggcatgccgatgccctcagcttgactctggggtggcgggtccggggcaaaggctcatatgagtgccattcacttaacagctctttcaaattccccagtcgatgagaagagcgaatttttcagactggcaatacgtaaggtagccactaccagc

SEQ ID NO: 136627 - DNA, 651 bp, Homo Sapiens
tttcttaaaaaggacttatccaaataatctggataataaatcgtttgcgtttcctaagaaactgggtttttcttttcccttgtggttttggtgtttttcttcttctttgagccttactagcggtctgaagctttctttctttcctttgcctttttgcttttggacaggagaaagcagtttgtctgaattgtacttgactcttcaaagaggaaaagggcgtggaagcagaagggggcttagggagaaaggagaaatcaataacggaggaagaaaacgaagaacggaactaaaacccatggaacccagaagttgccgggctgagggtgggggggtggagggagggcctcctgcctgcccgcccccaaccaactgcctccagaggcttcagccccatcttggttcctgcacagagatctcaggccaagagagagagagcgggggtggagaaggaactctgggccctctaacaacagagtacatggattttctaaggctggtcatggtctgggggttggggaagaggaggaggagaggcaactctggctgtgaactgggaggaagcagaggccaaacatccccatcaggaggctgccccaggcctccctgcacctgcctcctgccagtccctgccagcccgctgtcccaggaggc

SEQ ID NO: 136628 - DNA, 1325 bp, Homo Sapiens
tctcctctcagttttatgagaacagtataccagatcctggagcaatgaagacagaattgctgaatctccaaacatctcaaaacatgcatttgaagtgagtcaggtagcctcacccactacctcctcgcctctcaacagtcacttcttggacagggaggctgtggtagactgtgacagtgagatctgactgcacttctcgaagacggcctcagcagagagtttaggcagcccctgatctagagggcactcatccaccaagctgttcatgggcgtcgggggcagcggagggtcctcctcatcttgactcagtccagaaatcagggagttacttgccctgtccaattccttgtccacttgctccctggacacatctgctgtctcaggctgtcctgaagggatcttcatggagtcaaaatatgctgacagggcttcctggagcaggggcagaagtttctttcgagagacctgggtgttgccttgaagataggcatggaggttagggtgggtacttgaggcaggggtcagcttcaggggtggagagtgggagcgttccaggacttcacagatctccaaatcacatatatattgcactaatggccaccttgacgccttgttctaatagatagtcttcttggtcccttttctcagcatgctgcctcagtggtcagtcctgatacatcaaactttgccttttgtagggaatcaaatatatcatttctcttgggtagatctgggaaaagggcctctagtttctccacatatttgctgtcctttgggattgcctttccaattttaaggtccatgttgacacagtcccaggatgatggttccatgcagaagggctgcagtttgcctgtccaagatctctggtgccaccctgcaggattctctcggtcaccagggtagcacaggaccccaccagctcaactgaaacatgcagggagggcatgtttcggctcgatgggtcgatggtctagcacctctgctactgcctcctctagggctgtgtcacttctttgctaggtaaaaagccagggcaagagcagacactgtggagtccaaatcacaggcttcatttcccagcacaacatgtagaggtcgggactcctgcagagcagctcgacaacccctgcaggtagtcctccatgatgaagcccaaagtacgccgtcgctcctggtcgagtagaggtgcccctgtcgaggagaggtttccccgacgaatgcagcccgcccgggactcagggaccgacgcgtgggtcgacgatatcccgggaattccgaccgtaccagcctgctttttgtaccactgtttatattacatgccc

SEQ ID NO: 136629 - DNA, 752 bp, Homo Sapiens
  misc_feature (213)..(215): n is a, c, g, or t
tggggtcagcttcagggtggagagtgggagcgttccaggacttcacagatcgttgtttggagtgccacatggggacagaaaatagccaactgccgcactggctcattgtgagtgttgccaaacgatagtcatggcaaccaggacatcattagctgtgagcctggcagacaagcatggagatctgcaatggaggttcagacctctgcagaaagnnngccctccgaatccatatatattgcactaatggccaccttgacgccttgtctatagatagtcttctggtccttttctcagcatcttgctcacgtggtcagtccttggataagatatgatggtcgaccaggatgagggtgagttggccagcctggtataatgcatggaggtcaatctcatcccgaacaacatcaacgatactctctggaatatgaaccttctttgctaggtcaaacagccagggcaagagcagacactgtggagtccaaatcacaggcttcatcttcccagcacaacatgtagaggtcgggactcctgcagagcagctcgacaatccctgcaggtagtcctccatgatgaagccccacgtactgccgtcgcccctggtcgagtagaggtgcccctggtcgaggagaggtttccccgacgaatgcagcccgcccgggactcagggactagaggccagagtcaggaggcgggactcgaacccgccacacggcgaatcggcctccgaccccgggaggaactgcgtaagcggg

SEQ ID NO: 136630 - DNA, 672 bp, Homo Sapiens
tatatgcaatcatgtataggtttatttagcaggatttaaagcagaaacagctctcaaagtaacactaggattatccaggaggatgacctgatatctattcagtcttctagaggtaagtcagtagctccacttctgttccaacaaatagcatacacagtgtggggtgtgtacagtgctaggttaacccaaagtgaactcttctgcctcctggagaagatcacaagtggtgccagtggtcagagataagaagtccaacccatcataacaatgtccagctgttttgaaaagtaggctacaggcctcatgatattccccaagtcttgggttactactcctaaacccatcccttctctctcatgtatgaacaaatcaaatggctttcttagttcagggggtctcagtagccagatccattagtaatttttacttaatggttagaaaggccttttgacattccttgtccattctaggaggtcaagtgtctggtcttagggcttcatagagacattttgctataagcccaaaataagaaaatgaaatatggcaacattcagccatacctaaaaacccctcacagctgctgccatgtcctgagtctggccaccctgacaagagcttctctccagtccgaaagcagattactctgctcctgagaaaattcaaacctaaaat

SEQ ID NO: 136631 - DNA, 479 bp, Homo Sapiens
  misc_feature (384)..(418): n is a, c, g, or t
  misc_feature (469)..(469): n is a, c, g, or t
cacgaggaatatctgagggtttttttcttatcccatttaagttactaaaagtaaaatatttttaaaatgtgtaaccgttttgtgttccatattgcctggtattttcttggcatattatgctttattggaaaaatatacctttggccatctatatatagagtagcaggattattatgcactaaagaacagttgccagcaccaagctgtgagcctcatggttgtcagacagctttgcagatggaggcccagatgggtgggtgtccagaagtattctatcaatattcagaagagccaaaaggtggaaacaacggcaatgactatcaactgatggaacggataaataaaagttagtatatatccaggccttgtgcggtggctcacacnnnnnnnnnnnnnnnnnnnnnnnnnnnnnnnnnnncagtgtcttgcatccaggagttttgagaccagcctgggcaacatagggaantccgtttctg

SEQ ID NO: 136632 - DNA, 660 bp, Homo Sapiens
gttccaatcagagtgggtgcagaaagggcctggggttggctcagggagggggatgcagaacatttgtatcccagtgaatatttgattcttcaaaaaaccctgctgaagtgatgaccgtttggttctaggttgtatttcccattctgaagttaagcagaaaaagaaatccacagaggccaggttcatgtagttctccagcatcacatctctgtagaggtatttctgagttgtgtccagtaaagcccactcctctggggtgaactccacagccacatcatcaaacgtcactgaatcctaagtcatcaaacacatgctggtttgagccaatgaacacttccaccaatattcactggtaagaatttgaccggtggtcctctaccatcgttcctatctttgtcttttcttcaaaaggacagattggttccctgggaaaaaacccatgggacatatcaaaggctgacatcctctgaagctgatggtgagatgtgcctcaatgctgtctttcttgatgccaagatcgcctcagggcagcttatgaatctaggtggatacaggcaatctccattcccctttgtacagggttatctgaggcccacagcggggtggagcactcgagcccaccagggtccaagcagccctcgggagataccacgcggtcgc

SEQ ID NO: 136633 - DNA, 569 bp, Homo Sapiens
tttggctttcccaagacatgtttatttaaaaatgtgtttgaggaacaaaaatgtgtttgaggaataaaaatttctattacaatttattttattgatcagggattctaagtatatataattactaggccagtaatatatataattgatatgtcccattcttgtggatagtaataatagctaacatctatacagttataacaaaaacaacaatagcaaagatagagttttactgtgtgccagacactgttctaagattacacgtatctacttactgaatcctcagactaactctatgaagcaaattctgttatccttatttataagtaaaggaagaaaggcacagaaaggttgagaaacttgcccaagatcacatagctagtcagcggtagagcaagatttggggaagagtcccagaagataccctggctgttaaactagccctgctgggcaaatgaaaaggcacctacatttctagcacaagtacaagtttgtggtgcccagaccttttctctctactttgtcactgtatgctgattctgggaggtaaatggaaccaagtcaatttatag

SEQ ID NO: 136634 - DNA, 1099 bp, Homo Sapiens
tttttttatccttcagcaagcctcttttaatgatttaaaaaagaactactaacttttacaaataattgtgttcagagacagactttcaatctaaagaaaagatcaaggacctagctctcgtggcagaatgcagaaacagaagcctccagattgatctctgcagatgctaacgtggcccactttgtcctcatattcagcctgatcctaaagcccttacaactaagccaatacctgcttggattcttctgacaactggcaaagatgtcacgttccacttcttatctcaccacctcttaaccacaaattggccccagtggctttcaaaagggggaaaaaattgtgcgagtttgagactgtttatgtattcatgactaaaaccaaatctgagatctttggaactcttagctggccctggggcatgcgagccgcctgtgcatccctttggtccacctggaggcccgtgaagaccttcagtggaaggaagagtgggtcagatgagacgtgtccatttcatcagtcagccatcggtgacaggctgaattcagagacccaggccagagtgtaccagctacaaaatttatccaaggattccaattatgctttaaaaaattctgccagaagaagtaaaaaacgatgtttatatgttaagaaatgtaacagagtagctctcatttgataatataaaatagctctgcctctattcaaaacagttgattttaaaagtaggtatatagtcgctatacttattattatttttagattgctttaaaaagcatatgcgtccctatctctttggcaagcacccagcggtgagtcacgccctgcacccgcagcagccgatctgagaggctcctcagggagcctccgtgaacttttccaacccctccatgcgggccgcacacaggatgcccgtgccgggtcgtttcccatcagcttccaggccacgctgcttgcttgtagcatgaaaagcaagcgcagggatgcccgtgtcagatgaagctgcttacgagtctccatggaaaggcggcgctggtggtccggcacttggtttgctcaggtgcactctcttcagaggtcgccgaccgatcccgggaattcc

SEQ ID NO: 136635 - DNA, 449 bp, Homo Sapiens
  misc_feature (39)..(39): n is a, c, g, or t
  misc_feature (376)..(376): n is a, c, g, or t
  misc_feature (423)..(423): n is a, c, g, or t
ttttccagagggaaacatataatatgtttatttatcttnagaaaccacagaacattgcaaaaggccaaattggcctcgtaaaatgtgttgctaacatgtacagtatgattgcttagtttggacaaagtcaagtcatttctgtgctgataaagaaggatcacaatctatattccggcatctctagaatttatgtctacagctcaaccctttcccttgagctccaaaattctagatctaaatcctccttgacacctccatatggaagttgaatatgcatctcaaaaaggacagattcaaaaccagatatttgattctcagttcttccagctcaacctcccaagtcattaccatctccagtaaaatgggggactttcancccttccagtggggcccagggccaaaaatttcctggaagtcatcccngggttcctttcctttctctctcatgg

SEQ ID NO: 136636 - DNA, 1035 bp, Homo Sapiens
  misc_feature (183)..(183): n is a, c, g, or t
gagacggacaaagtggcaggcatggaaggccctgaaaaatctgtttcctgtggagggagaaaggcttgggagaaagagagagagaggaaatgacctgggagccaatcccacctgccagtctgcaggggaagaaagggcccaggtttggggtgcttgaactgtgaagatgggaattacaagccnaagggtcacgtttaaaaaacctgctagaagtgaagatcggtggaatcctcccaggctgtaatccctcagaaacatgagaatatcctaagcacctacaacagtgcctggtacataaaaggtgctcggataaatatttgttgagtaaattgtcatctttacttgcatatgaaccagtaactgtcccagccatgaaggagtgcagaggaattagtaggtgttcttgggaccgctggaagtcaggctgaagcctctgagcggcaactctagcagagagaaggccgaggggccacggtgtcttcagtttccctccttcctcctctctggctacattcgtctccaggtgggtggagctgaggaggaatgcgtttgcttttctctgtcttccccgctgccctcccggggcaggtggatcatgagagcgcctagcctcagccagtcctcgtctgggatgcctgggatagggggataggcctcccagattaaggcctcatcccccctcctcaaggcgtactctcagctggcccactgcacattccagggggaacagggcaagaaatatcatggaactgggtaggtaaggccccaaggctgaccacaccctacataagacaagtccttctctctgccccttaccccaggatggcgaggcagacaccaggcgcagacctactaacagccatctcccaggcagtcgctactcaacccccttcacccagatccccacaccaagcatctccactgaggctgcatgtgctccactggtgggtcctcctagggatgaggtgggaggagcagaggagacagtctggcactgcactgggcactaacctaaggctccaccgggggaaaccc

SEQ ID NO: 136637 - DNA, 664 bp, Homo Sapiens
tgaaattaataacatttttatttgacccaatatatgcaaaacattatattccaacatgtaatcagtattaaaaagtattgagataatttttacatcagttttttcgtactaagtcccgtattttacaatatagcacatctcaattcgctatatttcgagggttatcaactagctacgttgcaagagctgagtcaactcaggaggccagcggccaccataaggggcaatgcatttagagttcacttattaaatgctgacgttaacagaacccacagagccgcatttcccttggtttcggaggacacgcgaaaaataacaacagcaaagggttctcgagcatctccttcgcgccagacggtgtgttgtactttgtcatcgtcgcagtaaggccggtgctatcgccctcctagtttgaccaagcgagaggactttctccagatgggcccctcccgagagaatggtcgccgtcccgctctcctgttcgggtcaccaccggccgggcgccactcgaacgagccccggccagccgtcaccctaatcattcccgaaggaggggccatcagagctacagctcatcagggtcaatcagaaggggcgcccgcacgcaaaggtcacctgcaaacctgaagcggcgcacggataaggtccgggactttgaagtcta

SEQ ID NO: 136638 - DNA, 188 bp, Homo Sapiens
aaaaaaactaaaccaacgatattcttactcaccaaagattatccgtgtcacatgaacttaaaaaacatttgagtaaattcctgtttttctgaaagttttagaattacttatacaagtgcttatttttctttgagccaattaaatagagctattttatacattaattttggaaatgccatccagaggtt

SEQ ID NO: 136639 - DNA, 934 bp, Homo Sapiens
  misc_feature (64)..(72): n is a, c, g, or t
  misc_feature (114)..(186): n is a, c, g, or t
  misc_feature (233)..(272): n is a, c, g, or t
  misc_feature (281)..(298): n is a, c, g, or t
gcaaagcaagcagatttacttgcaagaaaaaaaagggatctcaaggaagatcctttggatcacnnnnnnnnngccccgttcattaggcggggttaaattccccgggtactgcannnnnnnnnnnnnnnnnnnnnnnnnnnnnnnnnnnnnnnnnnnnnnnnnnnnnnnnnnnnnnnnnnnnnnnnnaccactttgtacaagaaagctgggtcaggaaacagctatgaccatgnnnnnnnnnnnnnnnnnnnnnnnnnnnnnnnnnnnnnnnngcctcgagnnnnnnnnnnnnnnnnnncctttctactaaacactcaataactttatttgcctttggctggctccttggtgtggggcagggtagggtttggcaacagcctgggcttcatgcgccctctggtggacctcagaggcacgaactggaatctgggccaaacctgaggacttaacagtcaatagcctaggagggtcgcagcgctcctcaggtctgcaccccagacccaacatcaggggacggggcactctgggaggaagccctgaacctctggctctcatactcgcccgtgttggacaaccgcatgttctgccgagccttcatctgcttcacacggtccttgtccacttcccgcttggtgaggatgaagaggaggataccacaagggaagccgatggcccaggccagtcccacagctttcatggggttcttgcccctctttctgggaatgtattccagctccggggataggggttcaggttcctccttgccctctggggagctgtggctttgcagggcccgggtcctgttatgagaagccttgttagctgtggctcctgcgagaatcccccggaggacgcgggcatttctcgccccccggcccttcagcgccgtagcagctaccaccgccgccatgttcagatcccacccccgcttcac

SEQ ID NO: 136640 - DNA, 744 bp, Homo Sapiens
  misc_feature (58)..(58): n is a, c, g, or t
ggggctccacagagaccaccttctcctgtagcagcaaagctcacttctgaaaaggacncaggtagcacagctcagggaaggaaggtatggttggcagcaacatggaaagctcaaaacaattttgggaggcacagcaatttttcttcttagtaactgaatttgcctgggccctgggtcttgggattctggaagagtgaatgggagccaaggaaagagaaacagagggaagtgtcccctagggaacaagggcagagcagagtgtctggctagtgttcacttggattctgagcttatgtgaagtccatgggctagaaacccagtctgcctattgggatagagggtgcacaagtgtaactgtgtttgagaatacaggctttatacagaaacacatttcaaagtgtccatgaaaaaagagtataaatgtcttctaatttgaagaggcccccattcctttctgatgtgccaggccaggatgtgatttttcagctcccagcaactctgggcagctcctgggactcagatcattttccttctttttagtagaggtttctgtgccagccaggctcagccaggtgcctactggtaccagggagtctttctaacccagcgcagtgtaaatccagcatctgttcgaattttgattgaagcagcttcagcttcccgcacagtctccttcacagactgccggacgcgtgggcggacgcgtgggtcgacgatatcccgggaattccggaccggtaccag

SEQ ID NO: 136641 - DNA, 579 bp, Homo Sapiens
ctttatgttttctttcattgggcaacagctaagagggcccagcaaggtaatttatggttgagctgatgtcaattggttcttgtcttgagtcgactcaatttagcccaagtgctgaaacaagaaatgtcatttttttcatcaaagacaccagggcagatttttaagtaaagaaagacaattggacccttaagaatttatgcatttgtaaagttgctgttgatccaaatattttcaagccatgtaatccattggttttgtgggcagtttaataaacctgaacctttgtgtgttttctaattgtacctgagttgaccatcctttctttttatagtatatttcttgtatgatattttgtaaagctctcacctggttcttttatggggacttttcgtttttgggcaactccagtgtatttatgtgaaactttataagagaattaatttttccatttgcatattaatatgttcctccacacatgtaaaggcacagtggctccgtgtgttaaaaaacagctgtattttatgtatgctttactgataagtgtgccaataataaactgtgttaatgaccaaagcaaaa

SEQ ID NO: 136642 - DNA, 523 bp, Homo Sapiens
ccgtagggcggatgaggaggggtttttttccaagtgttcaggtttactgagagcattaggggcaacaagggagccctgggcatctggggacaaggcctggcatttgcctggacagtggccctgcaagcagccaaggatggggtctccaccacctggtttacttgaaagtgtggctctcggctccgccccgcccaaagcctttaggcccaaacatggctgcgtagcaggggtggttgcagtagggtttgccttcgtgctcagcgtggcccccagaggtcagcgtcttcccacatttctcgcacttcaggcagggccgatgccagtccttgcccagagaggtcaccctctcggcgaagtacacctccttgttgcacttgggacacttgggcatggcggctccgggtccggtgcaggcggcagcggctggggcggcacgggctgcaggcgcgagactgggtggatccggcctggtccgcgcctttcagggaccccgggaccccgccccttggagacaccgcccctc

SEQ ID NO: 136643 - DNA, 575 bp, Homo Sapiens
tattaacacagtctacatttatttggtgaatattgcatatctgctgtactgaaagcacattaagtaacaaaggcaagtgagaagaatgaaaagcactactcacaacagttatcatgattgcgcatggatatgttcagaatgagtatttttcaaatcactttaaacaaagctgaattgcagaaacgaaagcccaacagcagcaattaaattacatttggaataaaatcatttggcctaattttcataaccacagatttcagagaataccaccacccatgccaggtgtaccagacaatcccattgtctgttttagccgtgtaggggccgctgtagtatacaccattcaggtttgcagagtgacacctgttaaaccaccagccagactgatcttcttctgcgcagttcccttcatagttgtcatgatctctgtcccacgtgctgaatttcattctttggtgactagcccaccactgcacctcaggatgaaaattccccgcaagggaatctccagctgttccagaatattccccaatattcaactcgtagaaattcttttcatctccaactttgaaatt

SEQ ID NO: 136644 - DNA, 201 bp, Homo Sapiens
tcaaatcttaaacttttatttcaaatattcaaacataaaattgctgacaataaccataatattaatgaatggaaatattaaaatataaaaagtattgaaactcatatttcattttatttgaaaacatttgacatggaaatacaggtcccctgaatcaaataaatccattgcatcctggtacctgagttttctctgaaatac

SEQ ID NO: 136645 - DNA, 716 bp, Homo Sapiens
  misc_feature (408)..(417): n is a, c, g, or t
  misc_feature (680)..(680): n is a, c, g, or t
ttttcacagacaacaggagccaaaatttattaccatttctaagttttatgagttctattgttttcctacctttattaccagcgttaggtgtgatcgaggattctagaaaaaagagctggaaaaaagaagcatcccctaactcccacaatgtagcacttcagttctggcctctttaggattggggcagtgtctcatctctttattgtgtattcgtagacagtaagagggggtctcacttactacttggaaaagttttaaagacctaatacttttgtgtgtgtgtgggaactaggccacaaaagtgctttatgaaagagtttccttacgatcatgtccggattcaaatttcaagtagtttgcatgatcttcatgtaatatctgggacacaccttcataattgacaagccnnnnnnnnnnataataataagaatggctaaatgagtgggggatatcattcatccgcccccatgaccttatctttttcaagtgtgaaattcagtggcagaaggagatgcatctatcccagggcgactctagattcttcccgcaaagatatgcgtgctgctttccgtcactaggcgccccgagagccgggtcgggttcgcttactaccaagacttctctacttaaggcgctgcgctcgggcacttagcaacttcgggaacacgggctgtggtgtnctgggcacaccacctcgagtttagggattctcctca

SEQ ID NO: 136646 - DNA, 1737 bp, Homo Sapiens
ttttttttgacaataaggtgtgagcttttattgcttaattctctgaataattcaacgtagacgtcttaaaacagtttttgtttcaagacaaagatgggggatattggattgactgattactttcgcacctaaaactgaaaggaaaaaacttaatacaagaattggaattgaaaaccctagcaggatacctagtaggtaagggtttggatatatctgtatctgctcataagtaaaacagtgattgtgcaaatggtactcgcctaagtaccattaggttattggtattaaggtactaagtacaaggcaggtatcagccactggtttgaaaaaattcaaaccagtaaaagatgagtcacaaaactcctccagccaaacctggtaaatttggtttgcttctggcctgaaggcagtgtgaaagtgaaataagtttcacacttaaaactagctgacacctttatatcttgaccacctaaatttggtcatctacctggaaagtggaaattcacaagaacgtaccctaatattttaactggtctttagttgggacattctaagaggagggacattgttccagattggggttgacttgctcatcatgagtcttgccctcaggccttggagaacaatcatttatgttttttatttcgtccggtaggacaccttaaggtttcttgttgcagtgaggcaccattctttgtgcagttggccgagtttttttatgaccttacaatgggtctttaagggcgatctattgatgagaaggtcttctgggtgggatgatcaggttttgctgaaatccacactaaacacttttctggttttaacatttgatcccaaattatggataagttgccaaagagaacattcaaaatagtttccttcatgtgcttgttaaggcgtagactgtctctgaaggtcctcagattggcattggaagacttaacttctttcccttaaggactttggtcacatacaagtagaagaagtcacagtagaagatggtttgtactactccagacacgactgcaatttggtcatagaaattctcagtctggtaccgcctgatccagttagccaggtagagtgcccggtacagacccagaaagaacaggtagtgagtagttatggtctcagcctctccagtcttgctgatcatgaagagctggggcaggatagccactgattccagatagatagagaaagtccagaggatctccagcagagtgaaactgtagttttcaaggaaggaaaggccaatgactgggaccagaagaaactccaggcggaatgtgtcattctcactgtcaaaagttttacggaatttcccatatatcatgtacactgtaacataggcacagaggagaaaaaccaccttcattactgtgttgtagatggagatgaagttggtgaacaggtccaggtacctggtggtgaagacgagagcaaacaggatctggctcttcccagagatgcccttgcagcacttggacctccagatcttccccagcagcaagatcatggccaggaggtggctcaggtcgccgaggattcggaacacgttcatggtccagccagtcagtcgtgcgcccgcgcccagcaaacttctaggaaactttctggcgggcagggcggctgccacgtctccggccccggtctctaggtgccccagagccctgcctgcgcctcacagctccgcgatcgcacccgcgcgccgccgcccacgcactcttggccccc

SEQ ID NO: 136647 - DNA, 767 bp, Homo Sapiens
  misc_feature (654)..(654): n is a, c, g, or t
ttttttttagaagtttaaaagcaattttaaaaaaccttcaatcaacaatatataaataacttaatctgaggtaagagggaaaaatgccctgcaaacactttagaaaaacacatctctgccacactacagaaatagacctttaccacatcttctgaatccccagttccctccatctaccaaagattttgggcaccagaactaaagatgagaatctctcccacccctaccacttccaggtaaacacaaagttcatgttcagccaggctaaagtacaagaaaactgaacccactctccatcccaccccatcctaggataggtggggccagggcagaaatcatggaatgctcaggactccacccctcccaagtgcactgaggtaagttctggaactgagcttcctcccaacaagccactcacctcctctgggagttcattcacctcctctcccttcctcaaaggacaatgtttaatctctgaaattcctcttgccttgtcagcagccaccatctggctgccactccaaccagtcctcaaaagaactcagcctccaaccctgaccccaaatctgtccaacctggttctatagtgtcttccatctgaccgagctctagagtgacagctccatatcagagcatcatcgctcaacacccctnctcaggccaagacccaaatgtcttctcctgggagggaaagggagaaaaaaagcaaaaatcaataataaagtattttgcacaaaccagaacaccgattcagaatcttttcctgg

SEQ ID NO: 136648 - DNA, 547 bp, Homo Sapiens
agtgcgcgggccaggacggacctgctcaatgtctgcatgaacgccaagcaccacaagacacagcccagccccgaggacgagctgtatggccagtgcagtccctggaagaagaatgcctgctgcacggccagcaccagccaggagctgcacaaggacacctcccgcctgtacaactttaactgggatcactgtggtaagatggaacccacctgcaagcgccactttatccaggacagctgtctctgagtgctcacccaacctggggccctggatccggcaggtcaaccagagctggcgcaaagagcgcattctgaacgtgcccctgtgcaaagaggactgtgagcgctggtgggaggactgtcgcacctcctacacctgcaaaagcaactggcacaaaggctggaattggacctcagggattaatgagtgtccggccggggccctctgcagcacctttgagtcctacttccccactccagccgccctttgtgaaggcctctggagccactccttcaaggtcagcaactatagtcgagggagcggccgc

SEQ ID NO: 136649 - DNA, 607 bp, Homo Sapiens
atggtctggaaatggatgccacttctgctgcttctggtctgtgtagccaccatgtgcagtgcccaggacaggactgatctcctcaatgtctgtatggatgccaagcaccacaagacaaagccaggtcctgaggacaagctgcatgaccaatgcagtccctggaagaagaatgcctgctgcacagccagcaccagccaggagctgcacaaggacacctcccgcctgtacaactttaactgggaccactgcggcaagatggagcccgcctgcaagcgccacttcatccaggacacctgtctctatgagtgctcacccaacctggggccctggatccagcaggtgaatcagagctggcgcaaagaacgcttcctggatgtgcccttatgcaaagaggactgtcagcgctggtgggaggattgtcacacctcccacacgtgcaagagcaactggcacagaggatgggactggacctcaggagttaacaagtgcccagctggggctctctgccgcacctttgagtcctacttccccactccagctgccctttgtgaaggcctctggagtcactcatacaaggtcagcaactacagccgagggagcggccgca

SEQ ID NO: 136650 - DNA, 691 bp, Homo Sapiens
tttcctattgttgcttgtgcttttagtgttatctaaaaatcaattaccaaatcaagatcataaagaggtatccctgtattcttctaagaatgttatagtcttagctcttagtgtttgaggcactttgacttaatttctgtagatcggtgtgagataggggcccagttgcactcctttggatgtcgttatctggcaccatttgttgaaaatatgattctttcccccctgaatggtcttggcaccgttgttgaaaatcaattgatcatcgaggtatgagtttatttctggactctcgattctattccattgatttatgtctctccttatgaggtaggaggtgggacttgactccagaggcagggctcggacactggaccaaattgaggactagctgaaacagggctggggtggaatgagctttccgtaagacacgctcatcagttgccatgtcagtttaccgttgccatcgcaacaccaaggggttatccccccttttttccattgggttgactcgatgacccaaaaggtagacccattccctagaagttttgcacaagtgaccccttaatctgcatgtgtgaaagtgagtatagtgggtgagaactgccctgagctgctatctttgccaaacccctgtggcgaggataatcaagtgtaggaggcttgagtgtacactggccttgcatgaggc

SEQ ID NO: 136651 - DNA, 563 bp, Homo Sapiens
attggagaaatatcataaaacatctttttaatgtgaacactacttcatacaatgaaaaactatttacaatgtattgtttccagattggctgcttttacatcatctctacccatgtgctgactcggcatgtatcttcagccagggagcttcagtccaattgcacattctcctcgatggctctccaaggaccccggggattcagggaacccgtccacttacattctctttagtaattatggctcagcaagcatgccaccaaaatcatctagaacccagagactctggcaaccccatataagtaaaaatgtgtagatcaggtttttttctccaataaataataatttgacaatccaatccatttccatcttaagaaattgttttcacttaggaaaatgtttctcagtggagctagagtgaataatctttcttcatactggaactgagttagaatgtctttgtatacaaatatagcatattttggccagcaatataattgcctgttaaagagtttatttgccttcacacgcaggattgctacatacattcacagttttaatagactg

SEQ ID NO: 136652 - DNA, 674 bp, Homo Sapiens
  misc_feature (129)..(129): n is a, c, g, or t
  misc_feature (160)..(160): n is a, c, g, or t
agaaggagctggaacagatggaagacttcttcctagattccccgctcctcccaccaccctcctttgacctcccccagccccctgtcttggatactctggacttgctggccatctactgccgcaacgagncgggcaggaggaagtggggatgccgcctctncccccgccacagcagccccctcctccttctccacctcaaccttctcgcctggccccctacccacatcctgccaccacccgaggggaccgcaagcaaaagaagagagaccagaacaagtcggcggctctgaggtaccgccagcggaagcgggcagagggtgaggccctggagggcgagtgccaggggctggaggcacggaatcgcgagctgaaggaacgggcagagtccgtggagcgcgagatccagtacgtcaaggacctgctcatcgaggtttacaaggcccggagccagaggacccgtagctgctagaagggcaggggtgtggcttctaggggctggtcttcagctctggcgccttcatccccctgcctctaccttcattccaaacccctctcggccgggtgcagtggcttatgcttgtaatcccagcactttgggagccaaggcaggaggatcgtttgaggccaggaggtcaataccagcctgggcaacatagtaagaccctgtctctatt

SEQ ID NO: 136653 - DNA, 599 bp, Homo Sapiens
ggggccacggagcctgaggtttgatttaattttggatgagatcgttcttgcagcaagatgttaataagacaaaatctagactaaatgtgttaaatgggcttgccaacaatatggatgatttgaagataaacaccgatattactggtgctaaagaagaactcctagatgacaacaattttatctcagacaaagagagcggagttcataagccaaaagattgtcaaacatcatttcagaaaaataatacgttgactctgcctgaagaactgtcaaaggacaaatctgaaaacgccttaagtggaggccagtctagtctatttatacatgctggtgctcctactgtttctagtgaaaactttatcttgcctaaaggagctgctgttaatggaccagtttcacactcctccttaactaagacttccaatatgaataaaggcagtgtttcattaaccactggacagcctgtggatcagccaacaacagaatcttgttcaactttgaaggtagcagctgatcttcagctgtctacaccacagaaagcaagtcaacaccaagttttatttttgttatcagatgtagcacatgctaagaatcccacg

SEQ ID NO: 136654 - DNA, 547 bp, Homo Sapiens
  misc_feature (26)..(26): n is a, c, g, or t
  misc_feature (49)..(49): n is a, c, g, or t
  misc_feature (77)..(77): n is a, c, g, or t
tcaagacagcccgagagccattcaancttcacgccgtgtttcaggcttngccccaacctttaagctcacacttcacntgcagaacacttcaacaaacccgtcctgtcctggggctgctggtctgcttcctgtacaacgaggcgctctattccctgccccgggccttcttccaaggtacccttgctggtgccagggctcaactaccccctggagacctttgtggagagtctcagtaacaagggcatctcagacatcatcaaggtaggccccgcacttgtaccacgtggaaggtgagcaggaccctggggaggacagtaagggtgagtgccaacaaagaccttagggggctcctgggtgggggtgggggtatctgcacagtggagccctgtggcctgtcattagggccagcgcagaccaggcaaggggtcaggggtgtatgccccctgctgccatggccactcctccataggtgctggtgcttcgagaaggccaaagtgcacccctgctgagtgcccacgtcaacatgcctgggagcgaggggctggcg

SEQ ID NO: 136655 - DNA, 793 bp, Homo Sapiens
ccatcctgaccatggacctcctggagcagcattcccgggcccttgcaggccgtcatggttgggctggccaatggagaggtccgcatttatcgttacaaggccctgctcaatgtcatccacaccccggatgcagtgaccagcctttgctttggccggtacgggcgggaggacaacaccctcatcatgaccactcgaggtggtggcctgatcatcaagatcctgaagcgtacagcagtgtttgtagagggaggaagtgaggtgggtcccccaccagcccaggccatgaaactcaatgtgccccgaaagacccggctttacgtggatcagacactgcgagagcgggaggctggcaccgccatgcaccgggccttccagacagacctatacctgctgcgcctacgtgctgcccgcgcctacctgcaggccctcgagtccagcctgagccccctgtccacgacagcccgagagccactcaagctgcacgccgtggttcagggccttggccccacctttaagctcacacttcacctgcagaacacctcaacaacccgtcctgtcctggggctgctggtctgcttcctgtacaacgaggcgctctattccctgccccgggccttcttcaaggtacccttgctggtgccagggctcaactaccccctggagacctttgtggagagtctcagtaacaagggcatctcagacatcatcaaggtgctggtgcttcgagaaggccaaagtgcacccctgctgagtgcccacgtcaacatgcctgggagcgaggggctggcggccc

SEQ ID NO: 136656 - DNA, 682 bp, Homo Sapiens
tgaatatcgtacatgtacatttattaatgactgttgattaaaaagatgattttgaaggaaaaatgctgctgagaaagcacgcgcacaacttctgtagagttgtcatacagagagttaatcagaagttagggaaacaaaccaagctaaacaacccatttcttgacttctaattgccatacccacctctgcacaaggaattagtaaaattacagtacagatcaagttccccaaatcatttttaaaagaaacgatcaatactaaatattagcagctaaaacatcattgattcttgtggctttagaactttcacacactgagagctccataagaggaaaaaagcaaagaaaatcaacacaattgctcatcagaagatagctgtattttctagtatgtacaaaacaaagagtatctcatgttctatcatcttccttcctcaagtttttagggaatattaagtaaaaccaataatcagtgctaagacatgcatcactgtgacataatgaaattcaatcaggactgatcatgctgagactctgctgtttttttctttgggtctaaaaaacttgtatactctattttaagcatccaaatatgatgattccttttgggtttaatatatcactggtggaaataaatctcacagtagcaattttttgcaacactgatcagaaatccaagtgtc

SEQ ID NO: 136657 - DNA, 431 bp, Homo Sapiens
  misc_feature (77)..(77): n is a, c, g, or t
  misc_feature (237)..(237): n is a, c, g, or t
  misc_feature (421)..(421): n is a, c, g, or t
tggtccacctggtcccctgggctgtctaactcaacctcccaggggcctggggtgccttcagtgccaattgccaactnagatcctgggctttgcccaaccacccggaaagcccttgccagggacttgcctatcacaagacacttgccagggacccacagtgccaccttgggagccaaggcacacccagaagtctctgcccaacctttgcccagcagttcaggattcatcgggcacccnagctggggacaccagggtgtatctggatagagcagacaatggagggagcgaaatctggaggggtcctcctccggggagaaggggccctgtagcttaatgacgttgagtttcccctcaaagacaccgtagctgagggtgacctgttctgggagctgtgcagtcctcagcagctgcagggtctccnaggtgggagt

SEQ ID NO: 136658 - DNA, 449 bp, Homo Sapiens
actcccacctggagaccctgcagctgctgaggactgcacagctcccagaacaggtcaccctcagctacggtgtctttgaggggaaactcaacgtcattaagctacagggccccttctccccggagaggacccctccagatttcgctccctccattgtctgctctatccagatacaccctggtgtccccagctgggtgcccgatgaatcctgaagtgctgggcaaagcctttcttgctgttaggggctaccatgggaccagctctggccagagggaactaagcaaatccaatagagatgtttctggggaaggttttgcagcccactccccatcttcctgctataaatgtgggtgtgatggctggatctggggcagccaccttgctaccatgaaggaaaggccaagacaatcatccacagctattccctccagcatctggttctgtacaaa

SEQ ID NO: 136659 - DNA, 469 bp, Homo Sapiens
aacttaaacaaataagcatttaatttttgtacagaaccagatgctggagggaatagctgtggatgattgtcttggcctttccttcatggtagcaaggtggctgccccagatccagccatcacacccacatttatagcaggaagatggggagtgggctgcaaaaccttccccagaaacatctctattggatttgcttagttccctctggccagagctggtcccatggtagcccctaacagcaagaaaggctgggaaatgagcaaaaaggatcatcacaattggctgggacccgttatgctccatcatctgggccccggcatgctgaggctccaaacaaaatctggtcctgttcgcaaggggtggggaagcaaggagctttgggagactggttggcaacaacagcaggtgctgcagaccctggattctgccatcattccacccaactcccttcagggaaaggcacccaaat

SEQ ID NO: 136660 - DNA, 318 bp, Homo Sapiens
gcacgagggttacaggtgtgagtcaccacacccggccgaagagaacattttactcatagtagaggctaaagactatgataaaataagcatttacagagaatggagactcatcctgtgaggccttaatttttctctatgttcaaggcagttaattgctcagagtatgggtttggaggatctgtaccacaaacttaaaagtaccaagctaacaaatcactcattttgaaagtctactacaaattcataggccatctacccaaatggattttctcctatcaactctagctgcagagcaacatggtgattcagaataggtgc

SEQ ID NO: 136661 - DNA, 602 bp, Homo Sapiens
ccaaaagtgatgtaattcgattggcattctttgacacgtgacattcatgctttggtgtggggtccaaagcactcttatttaacatagattccaaactttttacacccatggggtcatatatactctttattttacccttcattattttaaaaataacaacatcacccattgcccccgtgtccaaaggattcgcttgtaataaatcagcatacctagaaagatagacacccatggaaggactgccaagaattgttattttggactgacccacatgtaatcctttttcacatatggtttgaacctggtatcgatcaaccatcagaaatgcataggattctgaaagttccttatctaaacgaccatcaaacttcagttctcttcgcttttctgtaaactccttttccaaaagctcattgtgtaccaagcaagcacgtctgtagttaaaatttgttactgaggttggttcaaggtaagaagaatggagaatatttacaacatcttcaaattctcgagagcctggagttaatggctggaaaagtgctttcttttctctgctcttcctggggatctgaaaactcctcctaacaagcctttcgggctct

SEQ ID NO: 136662 - DNA, 871 bp, Homo Sapiens
  misc_feature (645)..(734): n is a, c, g, or t
taagttttgaatctactggtttaaaagcaaaatctccaaagccattttaaaatcttcatgaattctaagtaactcccagtcaccctgttttatttcaaccatggagaaaagtacagaggaaaggctgcatatggagagactgtcgggctgacggtgtcacagcagatccgagtccacgtgtggaaacagcagccgcccggccctgggtgtttcctccaggaaaggcctggtcagtgaatgcctgcaggcagcaggtgtcaggaatcacctgcccgatgccagcgctgctcttgtctggagggccagactgtcatgaagtcagtgacgacagctcagacaattggaaggttaactttacgtacaaaaacaaaattcaaatgatttccttcagaggtggagttttcttaggttcacatttataaattagtcttcacagttaatcctgtttgggaacaagaaataaggaacacatttctggtttcctacacatgatacaggtgtacattaattctcgacttccgtggtccatggacttcagtttgtgaagggtgagtggctaccatttttggatcatctactttttgtattagctaacttgcatattttatttcaaattctgtctgtcagcaatcctgaaggtagatnnnnnnnnnnnnnnnnnnnnnnnnnnnnnnnnnnnnnnnnnnnnnnnnnnnnnnnnnnnnnnnnnnnnnnnnnnnnnnnnnnnnnnnnnngttgcagaaccagaatttgtaaaggacagcccttcgcttttctatatcccatgcttccttcccatggaggaaaatgcttaacactgatcatgaaatgaaccgccagcattcaaggaggtgacgaagttcctggtacc

SEQ ID NO: 136663 - DNA, 1143 bp, Homo Sapiens
  misc_feature (148)..(236): n is a, c, g, or t
gggaaacaaggtttgggcccagtttccctttaccttaggggggccgccgcccccaaacgaaaggttttgaaaaaattttttggggggcccagggggccccaccaatgagggttgggttttttgggggttcaatgggaccccgtggtcnnnnnnnnnnnnnnnnnnnnnnnnnnnnnnnnnnnnnnnnnnnnnnnnnnnnnnnnnnnnnnnnnnnnnnnnnnnnnnnnnnnnnnnnncacaggctgaaggagttttatttcaaatggttgcctgatgcctgtggttggggggggccgttcccgtggtgagcggggtacacatggacttgggaactggtagggggtgacagtctgaggcatggtcatgtgggctgggggtccagtccagccatggcatcttgggaagcagaggcacggggagtgagcggctgtgacagggatgggacaccaagaccggcctctacagtgcggtgacatggaggccctggcccccagctgccctggcgctgtcatcccaggctgcgctgccagcaaaggcgtgcaggtcactcagcagggcctcagcactgccccctgcgctcgctggtcctggggaagccgaggaccaggtcgccctccgtgtcactgtctctggcttcctcagcccgcacggggacctgctctgggctggacgcctctccacattgctgctcgccttccccagggtcagcctgcaggccaccatccgcgacgtggtcatagtctgtgtcctgctcatcctcctgtcgctcaaggtcattgtctgtggaccccagctcagctcgggcctgcagccagcgacctggggggctggcccagagcaggcgccgcgtgcggccccacagcgcggcacctaggcgggccgggtggtagtagccccctgagtcacggctgaggcggcgccaggccagtgcttggccagtggccagcagtaggagcagcagcagcagcaggacaacggtgacagagctggagcccacgctgtcctccgcgctgccacccgagcccaagggccctggcagggccagcagcatcccgagccctaaggtgcagggcagagccattggtccgcaggcccctccgtgccgggcacccacctccagctctggctgtgtcgagcgagccc

SEQ ID NO: 136664 - DNA, 217 bp, Homo Sapiens
ggcatggtcctatttattttcagacattctcgcttcacagaaagaaacagggtgaggggctcaagagagaggctgcccaagggagaagcacgggaacgctgaactggccgaggggcttgtcctcatcctcaggggtagggggaagcccccatctgccagtctggctggaagggaatagatatagagcagaggccctgagtggaaggtgacagttaac

SEQ ID NO: 136665 - DNA, 490 bp, Homo Sapiens
aaagttgctgtttttctctttaattctcccagaaaaggaggtttatacctaaatgtgtgagggttggtaaaatacatgagataaacattttaacaactatgtaatgttaatcagcaaaataaaaaagtatttccagccctggcattccaagcaggcccatcccagttaggcccctgggggcaaagccagtgggtcagtgtgcacttgggccagggccagttcaagttcgtcttctctataggccagtaagatgtgtttctttaaaaagatttcttaatctaaaaccagctgttgtctgctgtaggccagaacacgacattttaattagcatgattgttctgcttctgaaaccaggctctatggcatcccgaggacagatgatcctgacctaagcttatgggtgaggtttgctgggttagcagctcagaaatacacgaacaataaagtggagtccctagcccactctgaatccatgaatcgccatcacctg

SEQ ID NO: 136666 - DNA, 582 bp, Homo Sapiens
aagccgagtgtggcggcttggccctttcccggcctggctcccctgctggaccaaactttgggtaggccaggggccttttatattcctacctcggccgaagaggcgaaatgtgtttactgatgggaaagaaatgcctccttaacacacaggtgatggaggggctcacttaggatgaaatgaggagccccacgacccagtggagagcgcaccagctgagggcgacgggattcccatccttttaagagcacttttcagccacttcagggcgcagagcagtggacgggaaatcaggaggtgcgcatccctaaatggggcaatgaccccttcacgccctacaaggctgtgacaaggagagaatgaaagactaggggtcttcacaacctgcaaaacttccgccaggccgaggactgtaaaacaagggaagccagcaagtcagagggtcaagggagtcggccccgcgttgggacccgttcccctacttcaaccaggccggagcgggggccttcccgcctggcctggggagaagggctctccagaggccactacagaccccagggactgctcgtgcacgggcgcggccgc

SEQ ID NO: 136667 - DNA, 518 bp, Homo Sapiens
  misc_feature (472)..(472): n is a, c, g, or t
tttttttggctgtaacactttcggtttattggctgcggtgccctggtgtggctgaccggccactgggcctgagagaagccctgtcttgtttctccatcccctccccatcggctccccacggtggctcctgggggacatgcacagacacttgtgccccaggaaactggggtggtggaatgggggctcaaaataaaaccaaatcgaggctggagcaggggtgggaaatgaacattacaatgaaaataatgcccccggtgatacacaatacagcgtgtagagacacagggatggcgatggggtcctgctgacattccctcttgccaccaggcagggccccctaagagaggaatgatgacttcgaaatgtcttgtggaagctctgctccctggccccagccccttgctggtgggggtttgtggggaagtggcttatgccggagtccagttcccccacctcctgtggacagtctcanccagcatttgccctgcaggtcctggggcctgggggagagggatggt

SEQ ID NO: 136668 - DNA, 652 bp, Homo Sapiens
gcggccgccatccccgtccttcagcaagctgccgccttccaaggccagcaagtcatccaaaggcaaggacggggtggaggtggaggccccttctcgaaagcggaagttatcccctggccctaccactcttaaacggacctgcatcctggagcccactggaaaagggaaaccctctggctgtaggggcctctcggccaaaactaaaacagccctgagcatggggcttaatgggacaatggggccaagagtgaagcgggcagggcccctggactgtcgtggctcccctcatcagctccccacaccagtcaaggcttctcagctggagaaccggggagcagctggacacccagccaaggccctgccaaccaactgcctctctgaggaggaggtggccaagaagcggaaaaacctggccacttattgccggccagtgaaggccaagcactgtcaggctggtgcccctgctgatgtggcctgctctgtgcgccgcaagaagccaggcccggccctggcctttgaggagaagtgctctacactgaagtcaaaagcccattaacgagaaagtgcctgcccactgcaacggagccgccagcacctcctcccctccagatccgggccccaggctgctgccgctttttataactttatatta

SEQ ID NO: 136669 - DNA, 873 bp, Homo Sapiens
  misc_feature (491)..(491): n is a, c, g, or t
  misc_feature (694)..(694): n is a, c, g, or t
  misc_feature (795)..(795): n is a, c, g, or t
tttttaacgtacactgcagcttcattttatttctcaaaaaattccctccgccgccccatcccatagactaggcctttaagaaagtccctcttacctcgatctggaaacgagctccgagggccttccccagcctcaactaaactttaccggggtccccctggccctggctcacctcgacaccgttaattcgctcgtctcctttaggaaacctttccagactgccccccggcgggaccgccgccatcccattacccgggagagcccagggcccagatgaaggcagagagcgagggcgcccagagcgagccgaccgactgccgccctcccccgcccgagtgaagtcaggcagtggctgcagacacggctgtattgggaagcggaggtcctacacagtaggagaggcacgtcccagacccaggaggcccgaggactctggacacagcgcgcgcggcccgcccggggcacagtctctgggggagcccgagggaggnttaaggcagcttggctgaagggagcggggagtgggagtccgccagctccccctgaaatgctggctcactgaggagacgggtttttcacctcccactcttttgtcgaggacagggggaaagacagtcaataaataaacccgaggcgaaaaggggcctcgggagactctgcgagtcgggaaggctggaggttcgaggtgcggggngagggggcggtgaaacgtcctgaagagcgtccagctcgtggcgagaggacctcgggcgctccccacgcttggagcgtgggccgctccctttaaaagttganaacggccccgttcgggacggctggcgggaggagggcccgactgaggggaggcttcagggacaactggggcttctcgac

SEQ ID NO: 136670 - DNA, 716 bp, Homo Sapiens
  misc_feature (43)..(43): n is a, c, g, or t
  misc_feature (538)..(538): n is a, c, g, or t
tcaggctttcttatggaggtaaaaaactttggctgttttggcnggacttctctttcttctccttaaaccctccttgttgccaattttctccctggtaccagctgggaggctggtttctcattaaccactgaactcctttaacccaggggcatcccggtttggcattgcgcaagttctggtgtgtgtcatacagaaagagctggttgttcagttcttcttgccgcctcctcagctggcgacaggaggagtaaagttcctcttcgctctccaggactggccgcatctcacagaaaaccaggagggaagccagctctatgtcctcgctgtacccattcttcagaggaacggacctgaatcctgatttgactgctttaatggggtaagtggcatgagcaagaaagttgggatcgctgaacatatcttcttcataaaccacaaagcgcagaaatgccaggtttgggtcataaatttcaaatgtcaccttctcctgtgttggagcccagatagggctgaggccattatcattcacaaccagtcngtcttgaacttgttgttgtcatactcggctccacagatctccacttctacaaagggacaggcaatacttcgtccaagtttggggagatggcgagcaccgagaacctgagctcatgaatgcacacatccatgcccaagcaggtgcctctgatcaaggcagagcttaatcactggatttc

SEQ ID NO: 136671 - DNA, 573 bp, Homo Sapiens
tttttttcaaggttttcattgcttttattcaatgaggtttggaacatgagaggccaaaaatgaggagcacattttggggaatcctctataaagaatataagttaagaaagttgtccaagatgaaaataataggaaattaccccaactcatgccagttgggtcttaagaaatgtccttgatggcaggcttgaagaaaagatgtcacagattagcgtcttcccagagtgtgaatagggcacgttctcctacatgcaaacacacatgcgcacacacacaatacccttacacacataccccagcttctatgagtaaaacttgctgttgctgactctcttctctcttaacctcttgttgcatttctcctggtacagctgggagctggttctcattaacactgaactctttaaccagggcatcccggtttggcattgcgcaagttctggtgtgtgtcatacagaaagagctgggttgtctagttcttcttgccgcctcctcagctggggacaggaggagttaagttcctcttcgctctccaggactggccgcatctcacagaaaacccaggagggagcc

SEQ ID NO: 136672 - DNA, 450 bp, Homo Sapiens
tttttgagcatttgtctttcaaggtttattatttacagaaactgttttcccattggttttgtttccttcccccaaggtaagacaatgcccggagagaaactccattgctagggcattggcaaaagatttgccagaccctgacacctgactcaaccttgctctcctccaatcggtgcctccaactgcacccacccaagagagtgaagaccaaagtgcttctaccaagagggtacaggttcctagcctggctctatttttcagagggaagcattgtttctgcggggacatgcctgttcacttccatggcactgctgacttgtgctcaccctatgacgcctcgcccagagcacaggaggacagtatccactgcggggcgttcaccccacgcgagcggggacaacaggtctagccctaaacaactgcttgcctggctataagaggagccttgtc

SEQ ID NO: 136673 - DNA, 513 bp, Homo Sapiens
ctctatttcacacaaatctaatcacgtattccccagctcagaaagccctaagggctccacactatctggcaagttaaattctaactcttggctcatcattcaaggctctccataatatggccccagcctgtccttttctgccatatttcttgccacatcccccttctcccagcccggcacctttctggtgaatcgtcacagcatgacttgccatgtctgactttggcatatccttcaatgcctctgcttttgctattttacttgatatactcttccccacttattcaagccatttttcttcattttgcatgtcatccccaatcccttcgaacaaaattaaattcatcctccatgttccctcagtcctttctttgtgtgacagcaaatttcacacacttgaatcatggatgtctgtctaattcatggtaaggtctatgagtgcaagagtacattatagtcacctctgtggtcagctgaacagtggccctcagagagatacatgtcctaatccct

SEQ ID NO: 136674 - DNA, 318 bp, Homo Sapiens
tgacacacacacctggccctatttgtttcttacactgggactcttgcagccataacagacctgaatgcttcaaccgtgactgtggtcattcaaaatcaaaggtcaactcacatccaggcctgggccccagacagagacagaagtcagtaccactccctcagtttgctagggaagaagtacagacaacttctactttatctgaaactagaagtcaccctcttaggattagcaggtgtgattactgttgaacgagctatgttcctaccatgtgtcagtccgcttccttcttgtcactgtcactggcaggagaggcattcc

SEQ ID NO: 136675 - DNA, 699 bp, Homo Sapiens
  misc_feature (664)..(664): n is a, c, g, or t
ttttccatcgtcaagaaatttaatatggcaccaggagatttgcataattgacctatttggctttctgcatcaagtttggtgtcctgttgcagaagctgagcattgacgggacagaggcataaactgcagcgcttgataaaatagagcccagtattctgaggttagtgaagaaaacacaaagacttgacagatgcactcccagatcgcatctcacagtcattcaaggtttagggcaaggcatttccatgtggagtctcaccttttcttgtcccagtcatgcatcttggagttccttggctaagtctgcagggaggagaagcagcaggcttgatttgcatcaataaaagcagcgatctgtgctggccatgctaaccctgttggctattagggggtgggggcactctgtcaaggggagtcactgggacggtgtaggatcagccttcagagcctgctgcctgaccgtagaggaggaacctgcacacaccctgctgttttagttcacgagcagctatcaaagcctgttagccatcctggttacctgcttgtgccagacagaacttactgtcccaggtaagcacctaattttttaagtcttagttcctgtcacaggcccacttgggttccaggcttctccactgtcccgcctctgcccatcaggtggtgnccaatggctgtgttcagagcaggcttgggcaagac

SEQ ID NO: 136676 - DNA, 1662 bp, Homo Sapiens
  misc_feature (1088)..(1109): n is a, c, g, or t
  misc_feature (1242)..(1252): n is a, c, g, or t
  misc_feature (1333)..(1333): n is a, c, g, or t
  misc_feature (1340)..(1340): n is a, c, g, or t
  misc_feature (1368)..(1368): n is a, c, g, or t
ttttttcaaattttcagtagttttattgaaaaatgcctcttttgtttcagaaataaataatataaggcagtgaaattcacaatctgcagttaaaatataaaagcagcaattctatgttcatagtcttgcaaatgttttccaactacttttgataactaagaaatattatattctgaaaaaagttcatactaaatatacaacacaaacatgcaattccctctctgcagaataatctgcaatttggtataaatgttagtgtgtctaaaacaaggaggtttaaggcaatatggaactgtatcccgttgatgcactaacttcatctacatggcttaaggtttgtggttgttaaagagatgtatacgagcattctatgccccggcgtataacagagatagaagaggaagataagtaattgcaatggagttgacgtttccctcctttttggttttaggaggggaattatttgaatcgtggtgtaattgaattgaaaataagtatagcaaaagataaactgcccgctcgaaatacacagcagctctgggttccaggacttaactgcttaacctaagagtttcactgaaggctgccccgctgtgctaactaaaggcacacggcatgttctctctttgcagcttttgttaacaaagtattttgcaagcatttcaagggcaaaggcaaaaatgtctacagactgcgtgcttggagctaggcttcctgcagaaacaaggttctctacaatcagaaagggtactcctggatgagcaacgctggaagaaacacctcagaaaagacgtacactgctctatctgacctgtaaatgagaatttcaacacctcccccaagcctcgcggcgcggcgcgtgatctctggttcactgcccgggtccgtggggcagggcgcgccgccagcgccggtggggctcaggaggctcctctgcaggctcgtctgcgccgtagtcctcgtattccgctgtccgctcgggctccaccggcacgatgaagggctcgcgctcaggcaggtaggccccccctcgggcacgtaaggctctgtccgattcaacattacaattatggcatgatttggaaggnnnnnnnnnnnnnnnnnnnnnngcaaaagctaaatcatcacccgcggtgatggcactccagtcttaatctcataactataaatagataagttacaatgtcccaattatttccagataatttggtgataatcaaataatgaaatggcactttcttnnnnnnnnnnnccttcaaaaatccagcagtaaacacaatcattgcacaaatacttgggaagggtcagagactgggcccaaagaactgtaaancgcagtnaactaagtgggattttcgcaaatccccnaagtaactgtttaatgccttcaaactcctcaattcaaagaacaacttggaaagatgaggaggtgaggggaagtttcattggctcctagaaactgaactcggggggtgaaaagcaactatcaccaggtaatatacagtacatgacatcttctgtggctgtacctcacacaaactgagttacagctggtgggtgaggaacaccagtgactacagcaaaacaggaagaaaaggtgattttaaactttggtttgaaaattgcagttacaaaacccaaatgagaggacacggacaaaaa

SEQ ID NO: 136677 - DNA, 341 bp, Homo Sapiens
gaagacatacattattcacttccatttttacaataaacacttacttaacatctactctgtgccaagcactctgctataatatgggaccataaagatgagtaagacaaggatttttgcctccaaggacttgttatcactgtaaacattttgatgtatacaatatggctatattatattttggttttataaaatcaagtctttgtatatattatgatgtatgctttcttttcatttattataaatatttttcctgatcagcttttaatatctgtcaaataaaaattgaaattgaagatggtatataagatttcaggaaataaactactctgaatactaaaaaa

SEQ ID NO: 136678 - DNA, 1533 bp, Homo Sapiens
  misc_feature (80)..(80): n is a, c, g, or t
  misc_feature (83)..(83): n is a, c, g, or t
  misc_feature (136)..(136): n is a, c, g, or t
  misc_feature (154)..(154): n is a, c, g, or t
  misc_feature (410)..(436): n is a, c, g, or t
  misc_feature (591)..(746): n is a, c, g, or t
  misc_feature (969)..(969): n is a, c, g, or t
tagataaaaacacgcgcgcgcgggggcgaatgaattaggtgagggggggcgttataagaaatcacgtgggcgtttgtgtnatnaagagtgtgtgtctctccccgcccggtgcgggctggagggaagaaagatcctnttaaagagacggagatantacggccgccccgccgtgttttcgcgggggaacaaattggagttcaccccgggaggggggaggcagcgcggacaataatatgggtggtgtggtggaggagggcgcgtcccgtctgctgtggggcaacctccccgctggtgtgtgggaggatagaccccgcggcctagagagggcggcgcccctgatagagggtgcgcgccgcttgtgggggaggtgtgtgttgggaagagagcggccgtgggggatgcgccccccnnnnnnnnnnnnnnnnnnnnnnnnnnnagagtgccgaaccccccgttgttccgggccgggggtgttttctttttgaaaaacgagattgggcccattttcccctttctcatggggggcggccggcccaccacagaaggtgtttaaagaaattttctagggggcgggggccccccccaaaaaannnnnnnnnnnnnnnnnnnnnnnnnnnnnnnnnnnnnnnnnnnnnnnnnnnnnnnnnnnnnnnnnnnnnnnnnnnnnnnnnnnnnnnnnnnnnnnnnnnnnnnnnnnnnnnnnnnnnnnnnnnnnnnnnnnnnnnnnnnnnnnnnnnnnnnnnnnnggacaccaactgcagcgtgatttattggacaagacgtgcacttttcaacagggcctcagtaaccacggtttccttcactgatcagtacaggaccagggtaaaggggcttaaagataagaaagacaaactcttcccaggaacagatggggaaagaaaggaggaagaagaggcatgtcctcccttcctccttccctagtactctggggctccgtttacacccccngttctggagtggggctgaccaagggaagctgggggcagtgtgtgtcacagccagacatgagctgaggctgtgaactgtccactcagggtcaaaatggccaggtggacgattcaactctgttccccactcaggcccccagatctggtcactgttccaggctccccccacccgccccaccgtgggtatggttaaaaaatacaaaagcggatccaatgcaggatgtcatatgcaaacatacacagggaccgagcttctacagtctctcctggccacagcctccaccgacaggtgtggcagagggcaagtgcgctgaggtgcttggagaagggtctcttctccatccaggtaggatgggcggctgctgtcactaagcttggggaaggtggttgatgaaggaagagcagagactgaagggtaggaccagagcggggcttctcccctcctccagcaggggagggggctggccagtcagaagcaggttgctggtacctacgggaagccagtcgggaagaggctgaggggctggctctcattggtgggcagcggagatcggtagccatcaaa

SEQ ID NO: 136679 - DNA, 890 bp, Homo Sapiens
  misc_feature (205)..(205): n is a, c, g, or t
  misc_feature (208)..(210): n is a, c, g, or t
  misc_feature (213)..(213): n is a, c, g, or t
  misc_feature (215)..(215): n is a, c, g, or t
  misc_feature (220)..(220): n is a, c, g, or t
  misc_feature (222)..(222): n is a, c, g, or t
ttttgcattttatggagattttactatgggtgtattttaaatgcattctccaactgaatattcaaattcaagcccctgatagggaccagggaaagagaaatactaagaagtttcctgacccaggaaaccccagggtatacagcccctaagaggccacaccccgactcaaaacaggcttgccagacacttgaggtctttctgcgcntcnnnacncngcacnantctcccctttcccagacctgcactggggcaggggtggggaaggggttacgaggtcttcagacaacctacaggacaggaggctgtaaagtacagaaaaaaatttattggaaatcccttgaatacattttgaagtgtagctcggtatttccaaacaaagtaggttggagaggttggaggaggaggagggactctgacacctggagacaaacagctggtcccagcctgtcccgggggtgctgcaggagtcagtctagggctcattcctttcatggcaggtctgaggggcaagggctggccttaacagttgctttacttctcccaagctcagctcaaagtcatggctgagactcttcacagatggagccctggtgaaaggctgctgccacctgtagatgccaaagattgctgcctcagacaatggctaggcctttccatgcaaggccttggaaagagagcagtagctgaaatatgggggcatcaataacttaccaggggccttcccccttctcaaagctggggccttggggataaacctgagcctgggttcagcaagccacgcatgtgctctgggccaaagtcaggagggccagttggctgctactgcttctgctaacacttcttggtggcagcagctagcacgcagagctctggtccccgccagagcctgc

SEQ ID NO: 136680 - DNA, 1645 bp, Homo Sapiens
  misc_feature (226)..(226): n is a, c, g, or t
tagagaagctcaggtgtcatttttattctgtggttttaaaatgaaataatcttggttagtcacttacaactttgacgactttaaccacctgatgaaacctaccagtttctgcagcctcaggtctccataagggtcttcttaaattggctcctcctcatttcaccaccagcttttggggctcaaggtcctaaggttgtgttcttgaagccaagtttccaccttaatnccatgttaaccacatggtgttaaacccctgtttaccatatacagatctatcaggcttggtgctacagagatgaggaagacagtccaggcctcccgggggcttagagcttgggggtgagagtgggggtggcagacgttaacaaaatctcccatgcagtgtgatcagcattggcactgcgctgctgtcaccaaggttgatggcctcggattcccctctgcatccaccggtgggacagctggggttgcaggattgagaggaaccctgccagctgctctgcatcccaaggctctgaggctgagggagtcacgtgcgagatgttaggtccaaaccagcccgccctaagtagcaagaatctagaacctgaaggaagctggtgcagtgtccatcaaatcagtttccacaaagctactccccgtctgcagctcagtttctgtgagacttgcccgaggtcttttagaggcttaaaatggttggctggtgtcggattccctgagaagcagcagttaggaagcgtggttcctccagcacttagatggttttactgaaattgctcaagtatttcttcataatcatgttcatcatcatctagatcctgcctttggggcttagcgggcctgtggcccttcctgtgggcaggaatcttgctgtacgtactggagccatccttgatgaactctggcaaggtcttcgccttgggtttgggcagccgagcgtgttgctgcaatcctaagactttgagaagacttggacgcctccctcactgctgtgtctcctctgcttgctgaggccctgatttttaggggcctggtggggggcttgaatctcacaggctggtaacttccgaagacgataatagaaggtgtctgtcagctcctccactgtggctatggggagagacccctctggcaagtctggctgccccttggcctccacgacagtcaggtccagccaccggggagggatctcaaagcacatcccaggctcagagtccaggctcaccaccaagaatggctctgtgatcttctcctccagccgcaggcccaggaaggaggtcagagggtcagtggggtggctggtgtccttggccaccaccttgacctcacaaggcagtgaaaactgggcagtcagatctgccaggctgtagcgccggctgtcactcatctcctccacgaaactgccagggaagtggaagggcagcaggacccgctctgggctctctgcctcctctttgcactcttcctcctcatcctccccagcctggtcactcagccgctgacaaaccaagacatccacgtcactgccctgggccccatgggcctggccaggccccagcacctcctaggtgctttccagccaggccggccactccgggtggtgtccacaaaggactgtgagggcgggggatcctatagagtgggc

SEQ ID NO: 136681 - DNA, 887 bp, Homo Sapiens
gttcctccagcacttagatggttttcctgaaattgcctcaagtagttcttccaaaacaggtcatcaatcatctagatcctgcctttggggcttagcgggcctgtggcccttccctgtgggcaggaatcttgctgtacgtactggagccatccttgatgaactctggcaaggtcttcgccttgggttttggcagccgagcgtgttgctgcaatcctaagacttgagaagatgtgcatgatggcttggatctcatactggggccgcaggatcagggaatgccagggcagggtggggcaggtgaggacgaggtctttcagggctggatcctgtaggacctggagcagagttcgaggggcactaggctcccatgtccagaagggccccttctgggataggggcaggtgcaggatgacctgctgaccctccatgcccaggacacagcgggcagagcggatcccgaggtgcatcaccacagcctcaagcatgaggagctggtcctcagtcaccaccctgccctctgtgacaatcctgtgggtcgacatgaagcaagtgggcagctgcttggagctctgagttgtggcagagaccagctcctccagggtttcatagctctgtggggtgttgaggggggtgaagtagccctggaagttgggggcgagctccatggtctggctggtcttcgggttctcacagaccaccttctggaggcggacctgggtgaccttgatcaggtcccccgtggagaggcagcactcattcccagagatctcatagatggagccctcgaagtagacccccgagcagacccgcagcacgcgcgggagggaggcggggtccaaggcgcgcacgaagtcctgcagcggcaccggctccatggtccccgcggc

SEQ ID NO: 136682 - DNA, 783 bp, Homo Sapiens
ccatgggcctgcccaggccccagcacctccagccggtcacccacagccaggacgtgaactcgggattctcctccctctcgccctcacagtcctttgtggccaccacccggagtggccggcctggctggaaagcacctaggaggtcatagctcgtggggaactcccttggccgccgccgcagcttgccttggtagccccctgacaccaggaagtgcctgggcaccttgcggcccttgcttgaggccaggacccgccagggtggtgaggctaggccatagacgcaaagcctctggcctttttgcaaggagcccacccacgggctgaggaagatgggcggccctcaggaacctccaggatctccatggacagggggaaagggccttcccaggccaggacctcgctcagcagcagcggtttgataaagtggacgtgccgggaggaggcggtgacgtcctccacgtcgacctccagggtagaagggatcttgacaatggtcctgcgcacctggaagttgggggcgagctccatggtctggctggtcttcgggttctcacagaccaccttctggaggcggacctgggtgaccttgatcaggtcccccgtggagaggcagcactcattcccagagatctcatagatggagccctcgaagtagacccccgagcagacccgcagcacgcgcgggagggaggccggggtccaaggcgcgcacgaagtcctgcagcggcaccggctccatggtccccgcggctctctgatcccgggaattccggaccggtccac

SEQ ID NO: 136683 - DNA, 497 bp, Homo Sapiens
catgagttttgagtacctattatctttgttttaatgtaaattatttaattacaagtacataaattaaacaacagctgtgttaacaatcagcttgccaaatttctgaaaattaaacagtagacccatgggctggtatgagttgcctcctaacaccacaggttctgcccgccctttcaccttaggcttggaaaagtggttgcatattattctttcttgcttgctcttatgctgtaaacatggcaacatttctgggctggccagctgaaggataaggcagtggaggagaactgagtagtccacctgtctcagccaagacaatcctagactagtaaagcagctgatcctagacatgtgtgagatcccagccaagataagaagagctagaccctgcagctgactgggtacaggtgagcccagccaagaccaatagaaatgttcacccaacccacagattcatgagctaaacaaatgtttaattttttgaaatcactgggttg

SEQ ID NO: 136684 - DNA, 437 bp, Homo Sapiens
atcaaaatcctcagatccaacaagaagctctttctttccatcaccatcaaagtcacacaaggccaaggaattaacattgtctccagtaaccgtccaaaagagatcacttccttcatgattgaaaccttgcagagcacaattgccaccaataatcgcaagaggggaagaaatgtctcccaatgtccccagcacaattgcatttgccccatctgctacctctctgtagaacaaatccgaattattgtagacatcataagccaaaagattagtctgtgtccccactaaaagggcatcatagccaagctcagggttcaatacgcctgcagtcagacagctgactgcctggttaatgttgagaagagaaacatcagattccagggggctctggaagaccctggatgcactgacatgctggttccgtgtatgaggattatgaa

SEQ ID NO: 136685 - DNA, 506 bp, Homo Sapiens
  misc_feature (62)..(62): n is a, c, g, or t
ctttgcacttgctgcccaagcctttggttgctgccctgactattgtaagaggtaaacttacntggtttgtttgagaatgaccattttcctaatgtgaaaaccatctctctcaccacttttattagtagggctaacatttttttccgttataaatggttgagcaatttgaatgacttaacacagtgtcattatcttgcaatataaactggtaacctcacaactccacacttcatcaccatatgaagtaaatgaagctagctaagcggatgctgtatcaactagtaacttgccattaaggattattttatagcatgaatttaagactatttattcaaatgatattttactcttgtattcactttgttttagatttgtgacatgaatatttcagtgctgcttaattttgttctgaattcttgtttcttgcttgtaaatggcttttttatggtataaataaagtcaatggacattgctgtttgtaaataaaaatgctgctagagcaaaaa

SEQ ID NO: 136686 - DNA, 806 bp, Homo Sapiens
  misc_feature (87)..(87): n is a, c, g, or t
tttttcaatggcaacacagatttattgggagaaagacctgcggagagggggtaccagctagtgccagagccccctttcccgcttacnaggctggaccagttacagtcccgggcagggagaggtctgggattgttgtgaaaatggggtgggggcggtgtgtttggctgctgataatgaaggaatttagtgcagccaggggttaggcctgggacctgcctgacaggatgtttctcacagctcaggccctggtggaattttccactctgaccagtttgtaaaatggtaggggtctgcaaaatagtgcagtttgggctaacattcttatttcttactttagtataaaaaggaaaaagggcgtcgttgatcatctggctgcttcctgctggataggggcgttgtgattagggcctgggttctggagcttccgaatggtttcctcgtaggctcaaagactgacagcgttaccctgggttccgaggtggtgatggcggtgggggcagcggaccctgggccccgtcagtcttcagcagccaggtctacaatgcttgccagactggaaccagggttgcaggaccacgcagtcaccgccatccaactgcatgtcactctccacttcgccacggtctgaactcttggccacaagatctaagccttccggatgccccagccagttcaggctgctggtctcttgtccctaagcctttgccgaggtagtcggcttacttgatgccagcacaccaggccccccaccacccgctggaagcacaggccccagctcaggtcaggttccggaacctagcgtcccc

SEQ ID NO: 136687 - DNA, 1353 bp, Homo Sapiens
tgcgaacctccccgcgtgtttaacgaaccaccgtgggattctgtcggttcccctgcaggtttttagacggacctccccgcgggcctgtgctcagaacaatctacctctatgctggggatctagaatggacctcccttcccctgctgacgctagacctgcctcttctctgggtatttctgctcctagaccagcctgtcgctgaggagacttagagcgccacgtcgctgggggcttctagatcttccccacctcttgtgcagacctggacctacgccactggggagatcgggatcgagaatgacctctccttggtaaggggttcgagaccgagatcgccctctcttagcggtggcagggctacgggacctccccatcctacgggagggggtatgagaatgtgatttatcccgttttgctcggccatgtgagcgattcttagatgtgggagaagaagaaatctctcggtgggaccctggagctggagcaggtttaggactttctggggaagagctggcatgccgagaaactttggtaggttgaggggatggtgggctgctctctgaggaagaagactggggaagtttctcgggagacttaggtggtgaacggtcccgagttggagaggcctcagatggggggttcactggctcctggcttaagggggtggttgcaaggggttgtggggagccgccatgtcgctcagcaaggagcggagtgggagcaggtggttctgggcctgtgctgctcctttccggagaggggctaggtcgagttgcagatttctccttcttgtctttatctttgtcttcataagggctgctaggctgtttcgtagcagtctccgggctactaggccgttgtgtgctggtagtacctggttcactgaaaggcgcatctccctccccgcgtcgccctgaagcaggggaaggacttcgcccagccaaggcagttgtatgagttttagctgcagcacttcgagaccgactgcgggaagtatcggaggaggaagcagagtcagcagaagttgaacggtgggcccggcggctcttgggggctggtgttgtacttcgagaccgctttcgctttttgtccttagatttacgtttgctctttggagtgggagacctatgcttacgtttcttggactcagattctgacctgtgcttcttcttctttgagcttttctttctctcccgtcgaggagagctgctctctgacctgctaaagatggattcaaaagcaagctcatcctgcttggcttctttcctggccctcccacttacaatctctctcctaaaaaggtttctaaaacacttgatgtcctaatagcacgaatgccccagacctgagcat

SEQ ID NO: 136688 - DNA, 441 bp, Homo Sapiens
  misc_feature (182)..(211): n is a, c, g, or t
ccaccggcaggttgtacttcgagaccgctttcgctttttgtccttagatttacgtttgctctttggagtgggagacctatgcttacgtttcttggactcagattctgacctgtgcttcttcttctttgagcttttctttctctcccgtcgaggagagctgctctctgacctgcgtcctctannnnnnnnnnnnnnnnnnnnnnnnnnnnnnggggttggtgagcgagaactgctagactcccgaacaaggctgtaaggtttgggaggctcaggagctggttgtttagcttctcgggcacgacgctgaggatcaaaagagctgccatctacgtaagaatcactgatgccaaaggcagcacggagtctttcattcttcttctcatttaattctaccccctggtgacgcctacgtgcccgctcgagtacaacccgccgtcggtg

SEQ ID NO: 136689 - DNA, 698 bp, Homo Sapiens
ttgatgaggttggtgagtgggctgggtggatggtttggggatgtttgggggaggtgagtaaaggggtagagggagaacgctctttgggattgtgttgggaaaagaagaaccaaagtggactgtacttgcatttcagtgaatgatttgagttgtgcgactaaaggctttttggaagagggttgtccagttaggaaaggtggatgggagttggggagggggttttctgttctccctttgagctgatttccttcctctcccacgtcctcaattaactcctgcaggtctcgaagtgctgcagctaaaactcatacaactgccttggctgggcgaagtccttcccctgcttcagggcgacgcggggagggagatgcgcctttcagtgaaccaggtactaccagcacacaacggcctagtagcccggagactgctacgaaacagcctagcagcccttatgaagacaaagataaagacaagaaggagaaatctgcaactcgacctagcccctctccggaaaggagcagcacaggcccagaaccacctgctcccactccgctccttgctgagcgacatggcggctacccacaaccccttgcaaccacccccttaagccaggagccagtgaaccccccatctgaggcctctccaactcgggaccgttcaccacctaagtctcccgagaaacttccccagtctcttca

SEQ ID NO: 136690 - DNA, 545 bp, Homo Sapiens
  misc_feature (134)..(134): n is a, c, g, or t
gggtagagggagaacgctctttgggattgtgttgggaaaataagaaccaaagtggactgtacttgcatttcagtgaatgatttgagttgtgcgactaaaggctttttggaagagggttgtccagttaggaaagntggatgggaattggggagggggttttctgttctccctttgagctgatttccttcctctcccacgtcctcaattaactcctgcaggtctcgaagtgctgcagctaaaactcatacaactgccttggctgggcgaagtccttcccctgcttcagggcgacgcggggagggagatgcgcctttcagtgaaccaggtactaccagcacacaacggcctagtagcccggagactgctacgaaacagcctagcagcccttatgaagacaaagataaagacaagaaggagaaatctgcaactcgacctagcccctctccggaaaggagcagcacaggcccagaaccacctgctcccactccgctccttgctgacgacatgcgctacccacaaccaccttaggatcctctagatcacct

SEQ ID NO: 136691 - DNA, 471 bp, Homo Sapiens
  misc_feature (327)..(327): n is a, c, g, or t
aaatattgaaaatagatgttttattttgtttatacaaggtacaatgtcaaaatacaaataatatataatgtatagatataatagacaaggaagtataaatataaacgcatatattcgtaaaatggcactgagttgagttttcttcttcctgaatccttcaatggagaggattcgctgggctcagcatctctcccacctttcccaggtccctgtccatgtgtgcagagcagctggagacagggtggttagaagcccaaacgctggtgtcttccctgtagacgtctcccacgccaggagaagccttgtaattgacagagagctttgggntatgtcacttttctctgtgaactgcaagttaggatgagggacggaagattcggggcagggtttttatttcattaccacatgtattccaggcagctcacactgtaatgaaataaaaatcctgctcagaagcctttggtctctcct

SEQ ID NO: 136692 - DNA, 828 bp, Homo Sapiens
ctaagtcatcagtgtagtttaggagcttaacacagaaggacataaaagtaccaggtggaagtacccccagaactttcagcttggcctgaaatgcctttcaaagtggggaggaggggatgtgagtcacgacagcattttcctcatctttgagcctctgccttgctcctgctttaggtgggaggggaggaagaattactttctaattcctgtgtggatcaggattgcatctagaaagaactatagtccaagtccatatctgatgaattcaagggaagaggacttaagtagctcatcattcactacctggaaaatacgcttgaagcaattcccagtgagcaatgcgattgtggattggtaattacaatcctgagatcacagatccataaaaccatctgacattttcataatcattcaagagcaaagagtgacacatcttttcatccccccggcggctatgtgctgtgcacacggggccctccacgaaaccctttgttcaagggggacccagacttggaccactactctgcaggtcactccactttacccatctttcgtgaaggccaacaccggaagaagaaaatgatccggatcattttcttcttccggaatccttcaatggagaggattcgctgggctcagcatctctcccacctttcccaggtccctgtccatgtgtgcagagcagtctggagacagggtggttagaagcccaaacgctgatgtctttctctgtagacgtctcccacgccacgataaaccgttgtaattgagcagagagctttgtctattcacttatctctgtccactgaactaaataggtctcgttcg

SEQ ID NO: 136693 - DNA, 452 bp, Homo Sapiens
tttttatgaaaatattacttttttaatgtacaaaaagacttatttacaagttgagcatgtcatctcaattcatagcatgtagaaaaagctaaaaatgttttggagatataaatttggctggacgactcacctacagtatattcagggatgtcttctcgtacagaatatatacaggttgggactggcaagggaaatcctatctcaggaaggcgatgaacaccaccacagagccacagacccttagcaatgttccctggctttcatttgcagttggccttgtctctggacagagtttgatgtgctgggacgcagcgagcccagatgacgatgttggccttgtcctcaaactctcctaagaagttcctcattaaggccaaggtcacagtcagagtcacactctgagtggtgctgtttggcaaggttgccacacattccccatgaaaaggtttggg

SEQ ID NO: 136694 - DNA, 1532 bp, Homo Sapiens
  misc_feature (282)..(332): n is a, c, g, or t
  misc_feature (505)..(652): n is a, c, g, or t
  misc_feature (754)..(844): n is a, c, g, or t
gatagtgggtgcaggttgctggggtttgagggatggaatgaaggcgtggtacatcgcgtgtgtggggagagtggtgtgtagagagagtttagagcggggtgggtgggattgtgtgttgggtagagtctcattggattaggtttggactgtggtggtgggggttagttggagtgttggtgcaggttgtgggtagggagattgggtatggtagtgtgttgtagttggaggcgggtcattgtcaccctgctcgttcttcactactcgccctgctctctcggtccnnnnnnnnnnnnnnnnnnnnnnnnnnnnnnnnnnnnnnnnnnnnnnnnnnngtagagttaggttttgtttctgtgtgaggtagtagtggtgctatgtgtgtattgtttgtggttgtggtgatgtaggtagttttgtgtcgggtggagggtgggagtgagaagtgtttggtgatggggggccagaggtgggggtgggtggtgccgagaggggcgtgtctgacgannnnnnnnnnnnnnnnnnnnnnnnnnnnnnnnnnnnnnnnnnnnnnnnnnnnnnnnnnnnnnnnnnnnnnnnnnnnnnnnnnnnnnnnnnnnnnnnnnnnnnnnnnnnnnnnnnnnnnnnnnnnnnnnnnnnnnnnnnnnnnnnnnnngtgtgggctgggtggatgttcgttgggagtcgggtagagtggtgtggggagaggatgggggagtgatgtggtcggcgggatggtgatgtagagtgagtttannnnnnnnnnnnnnnnnnnnnnnnnnnnnnnnnnnnnnnnnnnnnnnnnnnnnnnnnnnnnnnnnnnnnnnnnnnnnnnnnnnnnnnnnnntgatgtttggtgttgggggtggcggtggtgggctgcagcagagccacacgcacggcggtaggctcctcggggctctgggcctcacgcaggaagcgctggtagcgctccaggtaggatggtcgctcgggcagcaagtaatagtgggtgctgctgaccttcttgccatcccggacgatgggcaggatgcagggaccagcccagcgggtccatggggtcctggatcacctggggggtggcgtacttggggtctgaggcaaagctctgggtggtgggcatggtcttcccaggtgagcttgagagccggggtggcagcggggagctgccaggtggtaccagggggctgggtgtcctcgagccttgaggggacaggggctcccgcggaggcacccggggaggggaggcaggtccaggccactggctggtctcctcctcgcccgggggtgctggagacagctggacgtgtgggcgcgtgggccgagggggtttgggtacccgaggaggcacctggggcttgtcgtcaccccccgggctgggagaggggccggggagccggccggagcctgcagttgcctcatgcactcctgctgtagcgcctggaagatctctgcggtctgtgcggagctgggcggcttgcccccaccctggggcgggaggaacaggttgtcctccaggggagggggcggccgca

SEQ ID NO: 136695 - DNA, 650 bp, Homo Sapiens
tttatggctaaatccatttattccgaaataaaaagcaaaataaacaggagtcgcatcaccagggcgccacgaccccatccccgcctccttcctctgtcctatgctatcaataaataagtttcccagccccaaataattattagaacctcctccccatgtgccagctccaacctctgctaggtatgatacagggggcggccctacccctggaatatacaaaatgttacacagatacaatatgtacactggggaagcagggccaccccagcagcccgtgccctcgcctggtctacagttagccccactgtcctgcctcagctgcctctctgtgtaagaagatgggagcccccctgagggaaaaattgctttggtgagagtaaggaggccatgaggcctcttccaaagaggccaattatatgagcctctggctattaaataacaatcatcatcatccagaaatttaaggagtcagccctggccaaggtggctaagggtctacacatttgtctccccccattagacaggggtcttatttgctactgtaagagtaaagggatgactgggaaggggtggcaggcacatgatgggggcggagcctccggccccacttctcccaggccactgtcagcaaagcctacagccgcggccgc

SEQ ID NO: 136696 - DNA, 968 bp, Homo Sapiens
  misc_feature (582)..(591): n is a, c, g, or t
ctggcaaggctaataagaaagcagcttttccaagaaacaatacaatattactggccagatagtattattgattaattcaacaaacagttatgtagcatctactggtaccctggaactgtgctgaactttatagctacacagatgactaagacgcaatttggccttgccagttcatgactgagttatacatgaacagaacaagatcctcatgaaacctctgatatggacatggtcagatgttgaaggccagaggccggctctgctcatctgcacagctgcagcaggacccacgcagggagttaaggcttacccagatgccacaatgcacagacaactcctggctccggtggaaggaaggatggcagagacattgaatcagaaactccatgttgccaatgtgctggaagatgaccccggctacctacctcacgtctacagcgaggaaggggagtgtggaggggccccatccctcagctctctggccagcttggaacaggagttgcaacctgatttgctggactctttgggttcaaaagcgactccgtttgaggaaatatattcagagtcaggtgttccttcctnnnnnnnnnngtctattttggaggaattgaaataattcatggaagggaatcacttattcagggatttttcccctttgctcttcttttccctccttaaaagaaaaattaccttctagtcctaggatgaggacacactattagtttgaattaaatgctttgatattctcagatcagccatcttgaaccaaagcaaaaccacaagttacactttcttaaaatttgatttgtcgatattttctagagaaacttgaatttaattgtgttattcttagcttccactggcagcctagctttgagggtaaatgaaaatataacccatagattacccagccacttgggaacagcaggtaatactgaagaaaaataaaaatagattttgaaaacgtt

SEQ ID NO: 136697 - DNA, 760 bp, Homo Sapiens
  misc_feature (121)..(121): n is a, c, g, or t
  misc_feature (123)..(147): n is a, c, g, or t
cttaggggaaacccagcttaatggacccaatgtttcaccttaccctactgggggcccccgcgccgccaaaacggaatggttctagaaaagcttcttcgagggcccgagggcggcccgacangnnnnnnnnnnnnnnnnnnnnnnnnntttttcggaaggtctattttaataggaaaatgttttttagttggaacgttttggaaataagataacgcaatgtcttctatagttactcatttacactgaaacgtgatgggtaacttttagggcgtttgcttccagtcactttcccctgactccttgatgtgataattccttccataagatacaaccattctcccaagtgatgcgatgacgagtatgtgcgtgactctggagggaaagggtctacatctgtctctgcttgtgcctcggatgggttttacagtagacgtaccaccgaccccgcctcttcaccaggtaacagtccttgcagcgcttcttaaggacagtcttgtttttgaaccccagcgcaggcagcagatggggcaggaggccgggtgagagaagtgagcgcactgctgccccgggttccacagccacgggggctgcacctcgaatggatccaaatagaaatgtggagagggctcgaggcttcaccgtgtgacgactgagatagagcagagggttcaccattttccttataaaaagatttgccatgttgtggtgaatccggccgcacgctctcacccggcgccgacccctgcgtctgcgcactccc

SEQ ID NO: 136698 - DNA, 2930 bp, Homo Sapiens
  misc_feature (44)..(44): n is a, c, g, or t
  misc_feature (85)..(85): n is a, c, g, or t
  misc_feature (232)..(250): n is a, c, g, or t
  misc_feature (309)..(486): n is a, c, g, or t
  misc_feature (488)..(488): n is a, c, g, or t
  misc_feature (490)..(497): n is a, c, g, or t
  misc_feature (499)..(499): n is a, c, g, or t
  misc_feature (503)..(506): n is a, c, g, or t
  misc_feature (508)..(508): n is a, c, g, or t
  misc_feature (510)..(514): n is a, c, g, or t
  misc_feature (516)..(517): n is a, c, g, or t
  misc_feature (519)..(519): n is a, c, g, or t
  misc_feature (681)..(692): n is a, c, g, or t
  misc_feature (706)..(706): n is a, c, g, or t
  misc_feature (1326)..(1341): n is a, c, g, or t
  misc_feature (2818)..(2852): n is a, c, g, or t
cctggaattataactgctgggttaggggtattgtcgtatggganatcttactggggagctagagaaaacgtagggtgtgagcaantataaggtagataataaaagaggggggatattgggtgggtggtgagcattgggggggtatataggggtggtcacgcaaaagatggtatagctatggggaggaacccaaaggacgggggggtctaaaatagagtaggtggcgtgaaannnnnnnnnnnnnnnnnnnagcgccaaagggagtcaagaggggggacggcgccgcgcggaggcgaggagggaacaccnnnnnnnnnnnnnnnnnnnnnnnnnnnnnnnnnnnnnnnnnnnnnnnnnnnnnnnnnnnnnnnnnnnnnnnnnnnnnnnnnnnnnnnnnnnnnnnnnnnnnnnnnnnnnnnnnnnnnnnnnnnnnnnnnnnnnnnnnnnnnnnnnnnnnnnnnnnnnnnnnnnnnnnnnnnnnnnnnngngnnnnnnnngnggannnngngnnnnngnngnatcatttatgggggggaaatgccaaaccctttagtcttttcccaaggattttcttaggaaaacagctaatggaccaatgttcattttacctttttgggccccgggcgccaaaacgaattggtcttgaaaagtttttgaagggcggaggcggccggacaaggnnnnnnnnnnnnggttttggtttgtntttccaaaacaattaagctatttttatttaacatgtaatagtcataaagcaactccatatatttagttttctgatatcctaatgtatttccacaaaccttttaagtctacaattttatatagttttccatcagggaggcaagatatatataatttctttttatatttaactaaaggttttaagagggcttagtctctaaatcagtaacaattagtcataacaccatacaaacacatttaaatattcaggaaagaggttgttaagattattgcttagtcttataaaatggtgaattttaaccaaattgatacctctgtaatcttatttatgtttcctataacatcatactgcttggcaagtaatgtaagttttgacataatttaaaaattcaagtagttgtaaacaaattctaatttgttaaacaattcatatattcccctttagttactatactacctcagaattaatcctccttaaaaaagtaatcatcccacatagaaaaaactgcagagcttcatctcttccttaaatattttcaagtactgtaagaacacaaatccatgaaaaaactgattaaaatttgacatttcatcttgctttactaattatgggataatacnnnnnnnnnnnnnnnntgttccttaatatttctttgcttaacagagaaatacaaagaaatactgcaattatggttatgggctactttccagcctcttcaagtataggacacaactatggttcctaccagtagggagaaatgaataatcaatcttacataacacaaaagaaagatgagaggcacaaaaagacaaactgactttggcttttaagaacctaatgttaaccctgaaatgccacattcagtaacacaacaacaaaacaaaagattacagcagcaagccaccacttcacacagtattaaaaattcggaaataatgtaatagccttccttccatctcccactcaatctgttgtgtcatctttttgtttttcctgctttttagctgcaggcagttcaaggcttgcccactgcatcggttcagcttttctcatagtgatttcaatctttgttgcagtcatagttacataacttggctttacatcaaatcacacccccataatttcacattttgatcaaattccttttctccttcaaatacaatattcccatttaacaatgtgctatttgcttctattcggctaagttctggaagtgagtttttagcatatactgaaatggtaacttcacctccagtctgatgccattcatgtctacatggaacaacttttttcccagcatcttttttagtccacatggtgtttgccttttgtacagccctcttgggctaagaatgtattaaaatcagaagtttttcttctacaacagctccagtatttcatcccctcatggaaaataggtactccagaatgatatacacagacttcttctagactctctagaccctggtatgtctttgaacaccctccattcttacatgaggtcccaatcttaatttcatcattgtcttcttctttcttattttcttcattccctgatgacagtttaagtttatcaagtgcttgttttagggaggcagatatttttaattccaaatttgtcattggttcatctgggcttggtctttttattgcttctactggcttaggggcttgaatgatgtgttcctgaaatttgggttttaattcacatagctccttcttctcagtagtcttgacttcaggtttgactggctcaggtggcttctcactattatgtctaccttttgtacagcctacaatgcttaagaaatcagaaaaatcagttgttcttctcttacagcaagaccaaccctttaatgcatcgtgaaagaccggaacacctgggtggtatgtgcaagcatcgtcggaattggtctcaggatcgaagcgctgaccgcagccccggttgtagcacagcaaggccattttcttttcccaccgtcacaggcaaggcccaaacaccgggaacggcaagaggatgcgtttgccactcccgtgtcgctagcaccggtctgacgactccccggccgtaatggccgaattcccgggcatatgtccggtaccgtcgactgnnnnnnnnnnnnnnnnnnnnnnnnnnnnnnnnnnncgccgcttcctcgctcctgacttcgctgcgctcggtcttcgctacggccagagctacgccctatagtgatctatacag

SEQ ID NO: 136699 - DNA, 423 bp, Homo Sapiens
  misc_feature (349)..(349): n is a, c, g, or t
aacctcaactttattcatcttccatgtgcctgctgagtctcagactccctttctttccatcagctctggcagcctcatcaagatgactgaattcctacttcagctcccttgcctagcacctgagatggccaatggggctgaagcactgccatgaccccagcacttggccagcactgtgctacgttgctggtcacagttgggccatctgccactttgtgagctcatcatcagtcccaagtggaactagactcacagacctagattgctgacccctgcctggtttagcacagctccagattgcagaattccacagctatattgcgaaggctcgagcttcctctgcatactngacagtgcctcaactccacccaggttctccacacctctcgggcaatctcagggtcaccttgggacaagggttca

SEQ ID NO: 136700 - DNA, 436 bp, Homo Sapiens
gcggccgcgggagtccggcccccacggcccctcgggccccggcctgccgcccggatccccgcctcctgggcggatctgagttattttttggtctccccctcccccttgagatcgcggcaccggagggccgaccccgccacctgggtcagtgcccgccccggggggagcgtccctcgttttgttcttccccgcgagctctccccgcgcccctctcctttctgtgcttaatggatgggggttttgagtttttcccctttatttttgtcggctcttgactgggaggcccggcgcgaggctctgcgtctctgcgtccctcgtcgccgcctcggcccgcggaattcccgtcacctgcttccccgccggaataggccggccaagtgacgcggcagggtggccgcgcgtggacacggggccctcgccaaagctgccaccgagc

SEQ ID NO: 136701 - DNA, 828 bp, Homo Sapiens
  misc_feature (605)..(605): n is a, c, g, or t
  misc_feature (795)..(795): n is a, c, g, or t
tttcaagttttagagcaggagtgagagtttattaaaaagttttagagcaggaacaaaaggaagtacactacacttggatcaggcaggcaacttgagagatctaagtgccctgcctgacccttaacttggggttttatgtatttggcatagttctgggatttacgtctcatctcccctgattcttcccttgcagcaggctgtccgcgtatgtggtgacctgccagcacttggaaggggtcgcatgcacagtgtgattactgaagttgcgcgcatgctcacttgaggcatttttccccttaccagtcgtgcgttcccagaggaaggtaggtcatatactggttaaattccgccattttgcctcttggtgcgcatgctccaggctgcttgcccagctcctgagatcttatcgggaagcggctgatcaccagatcagggtgttttgtatctattgagagactgtccttgcttggagctggctgcaaccaattattattttacagagacagtttaacaaccacctgaccatcacctgatggtagcctgacattcctgtgggggccctcacctgtcctgctcatgtttgcctagctccctactctaacatnttcactctgtggaccccaggttgagatcttctgcagggaagactgtcctcaaatagcctgctggggagacatctccttcccgtttacctttccatttgccttgcggtgttaggcaaaggctgaagcttggcctctgtggcagagggtttcttcccaacacgccaatgacgctggtggagagtcttaaaanacagctgtgctggggagagttcttggtgtgtac

SEQ ID NO: 136702 - DNA, 553 bp, Homo Sapiens
  misc_feature (70)..(70): n is a, c, g, or t
  misc_feature (73)..(73): n is a, c, g, or t
taatgcatgtttggcctcagctgtagttgccaaagaaactacctgcctcacagatgagcacgcacgggtnatntgtcaaagtctgagaaggatgtattgtactttgaaggaagactttccatttctaagctaccatggagaagtatatgctcctcgagaccagagactgtgacttctgcatctttgattccagcgacatatgataaaatgttttgcacatagttgaatccagcgttgatacatgaaaggacaagcattacatcttttttctaattatacttagaaatttcctctttgttctgcaccaccaacctgtatatcaagcctccttgccccacaaagcttccaaagcccgtaaattttgttaatctagagcaggggtcagcaaactaccgacccatgggccaaatctggcctgctgcctatttttgtatggcctacaaactatggtttttatattcccttttgttaatggctcaaaataatattttgtataatacgaaaattacgagattttagtttctctaaataaagttttggaaagaactaccaa

SEQ ID NO: 136703 - DNA, 850 bp, Homo Sapiens
  misc_feature (795)..(795): n is a, c, g, or t
tgattcagaactactaaacatttattgaatgtgtaaggtattaaaaacatttacaattttgttaataaaatgatgttttatattaatgtatgtattatgctttggaatatgctaagtcatgtggataactttacatttctttcaataactttattctttacaaaatatacaaataaataaaacaattcaacttttaaaagtattaccatatgcaagaagaaggtattgctatcaccattctaaattaccacaatgcattcatttcctgttcccttatctttcaactctagtggcaaagtaaagactgaattgaaattaagctgcactacaacatcattaccagggatagacacataaacaaagtcatttccaaataaggaatgctggatctccagagaagtgacaaagaggagtctactgagttttgcactcaggcacatccttgcctgaggaggcgtgccaaggacctggctgagaatccacactctctgctcctgcattttgcacctctggacaaaggcctaaacttgagttatcaaaatagcgaactggatgaggtgatggtaaagactttgatcggctatcaaaaaaacaagattttggtgattcctttggcacaggatcttgtaaattccgttccttgcattgagagggtgtaatttgtttctttttagaagctgttccagtcactttaggagactttggagaattctcacaagttacttgtttgtgagcctctcttttaagggttctttccttccaaaggtttgacctccattgggaagaatgctggantatggcttaaccatacattcttttgttttattagctggtcattttgctgtttaac

SEQ ID NO: 136704 - DNA, 577 bp, Homo Sapiens
tttttcatttaaataagcaaacgcaggtagaaatgggattccaggccaggaacaatcttgagcaaaggcatcacagcctggtgtgacaagggactttggaaaaattacccccatggtgtgaggcagagggtaagaagaggtgaggctggagagggaaagagtccagacctcagtggctgctgagtgcctcggtatggggaagccaaaggtgccaggagtcacagacacaccatgacagcgcacactgcagctcatcctgacgctcccataggaaggacgcagtctctccaggcatgtctgggacagcccctggaccatggcgagggccccactcacctaagtagaatcgcaggaagggtgacggcgtcatgttcttaaacatcatgatctgcacccaagggtttttgtattgaatctgaggtatgttgaaaaacacaaacttcctggcgccctcgcccagctccccatgcgtgttgtaattcactgtcatgaccttcacggagtccttgaacaccacgttcccctggctcagatattgcagggtgcggcggatggggaagcggcccttcatgggcat

SEQ ID NO: 136705 - DNA, 947 bp, Homo Sapiens
  misc_feature (15)..(15): n is a, c, g, or t
  misc_feature (37)..(37): n is a, c, g, or t
  misc_feature (46)..(46): n is a, c, g, or t
  misc_feature (49)..(60): n is a, c, g, or t
  misc_feature (62)..(62): n is a, c, g, or t
  misc_feature (64)..(64): n is a, c, g, or t
  misc_feature (68)..(69): n is a, c, g, or t
  misc_feature (72)..(72): n is a, c, g, or t
  misc_feature (76)..(77): n is a, c, g, or t
  misc_feature (79)..(79): n is a, c, g, or t
  misc_feature (82)..(83): n is a, c, g, or t
tgagggcacggggtntgtggaatgtttttttgggggnggttgtttnttnnnnnnnnnnnntntntttnngtntttnntnttnntattagggaagcgttttattgaccagcagagcagggatattcatttagcagctcagcttcagaccctcctctcccacatccttttacacaggtgtgtaaagtccttttaatgcaaaaggatttccagagtctccagggacagaaccaggggcttccctgggccaaagtaatcccattccaatctccccactggtcagacaccatcaccccagcccacagtgaccgtgggccttagtcctgggcatcggctttcagagcggctttgtacttccccctcatctccttgggtaatggcaccaggctggggcagggcacctgcccttccacttcacagatgcactcccgcaggcagtactttcgagggccgaagttggctgggtgagaaagctgctttttctcctcctcctcttccctgagggtttcctcattcttccccaagatttttctgatgtgctccatgatctccttattgctcttggtctccacatccaccaggacctgctccccagaatctaagtagaatcgcaggaagggtgacggcgtcatgttcttaaacatcatgatctgcacccaagggtttttgtattgaatctgaggtatgttgaaaaacacaaacttcctggcgccctcgcccagctccccatgcgtgttgtaattcactgtcatgaccttcacggagtccttgaacaccacgttcccctggctcagatattgcagggtgcggcggatggggaagcggcccttcatgggcatggcggcaacggtggcggggccgaccccacgggccgcgagccgagcagcgacgagaaaggactagctagcacccgcgcggatctcacgcggcttcctcgtgcccctcgtgcc

SEQ ID NO: 136706 - DNA, 449 bp, Homo Sapiens
  misc_feature (216)..(234): n is a, c, g, or t
  misc_feature (353)..(377): n is a, c, g, or t
ttttttttggtcgttggtttgtttctacctccaagcatatggtcttcaaaaaaatactccactgtaacttgaattttcccaagaaactggcttgtgctttggcagcatcaccttcatacttgctctggtcactcaccaatcaatagagcaccaaacctacacagcaaacctacattcttgctttgtcaacaagaaaagtgcgtgcatatgtttgcnnnnnnnnnnnnnnnnnnngcttcctattatgatctataattgaagtgagaaatccccttccccttctcaatacttcaaaaaggcctggaaatttggcataaccttgtttgactgtgtgctttgaaagtaagtgatcnnnnnnnnnnnnnnnnnnnnnnnnntagaagtaggtggtcatggtcagtgccagtggggctgggaggcaggagcaagttgcggaactcaaaaagaag

SEQ ID NO: 136707 - DNA, 985 bp, Homo Sapiens
  misc_feature (520)..(539): n is a, c, g, or t
  misc_feature (558)..(793): n is a, c, g, or t
  misc_feature (817)..(817): n is a, c, g, or t
  misc_feature (860)..(860): n is a, c, g, or t
  misc_feature (886)..(886): n is a, c, g, or t
  misc_feature (888)..(888): n is a, c, g, or t
  misc_feature (906)..(906): n is a, c, g, or t
  misc_feature (924)..(924): n is a, c, g, or t
  misc_feature (935)..(935): n is a, c, g, or t
gcagccataaaattctgtttaagactgtaacatggaaaaaatgtttatacgttaagtacaaaagggacataaaattgtatatacagaataacgactatgtaaacacaccaaaaatctatgcacagaaatgtctagggggaacatttaacaccaaaagattaacagtggtagcatttgggtggcaaacttgattctttctaaaattcccatattttccttaataagcagtaattataattacaacgggaaataatttctttaagtacccagtgcagtgtcactgtcaaataaacatcagtggctttggccccaattcttaaggtggcaaacgccgctgccccactccccacccatccccaatagggcttgagcacctgtagccctgctgagcacgtctgtgcagccccagccctcagcatctcttccactcgcttccagctatatcttttccctttccttcttaattcaggaggcagctttgcaaccacagggcccaacgatagagaccgtgaggtggcannnnnnnnnnnnnnnnnnnngagacggagttttgctgtnnnnnnnnnnnnnnnnnnnnnnnnnnnnnnnnnnnnnnnnnnnnnnnnnnnnnnnnnnnnnnnnnnnnnnnnnnnnnnnnnnnnnnnnnnnnnnnnnnnnnnnnnnnnnnnnnnnnnnnnnnnnnnnnnnnnnnnnnnnnnnnnnnnnnnnnnnnnnnnnnnnnnnnnnnnnnnnnnnnnnnnnnnnnnnnnnnnnnnnnnnnnnnnnnnnnnnnnnnnnnnnnnnnnnnnnnnnntgtgagccacgcgccagccctgangtgcatgttttcaagaaacatgtgctcaggttttggcaaccangactcaatacatcatttcctgctgcnantatgctggggctgcctgntgcaatagtgaattaganccttctgttanccagtcagatcttctaaatcatctatgtaattcaccggaagcagggtgga

SEQ ID NO: 136708 - DNA, 651 bp, Homo Sapiens
  misc_feature (70)..(70): n is a, c, g, or t
  misc_feature (89)..(89): n is a, c, g, or t
  misc_feature (95)..(95): n is a, c, g, or t
gctggaggaggaatcccttaaaaagaactgtcagagggtttaatagtcacatgttatcattaggagtggntactgtgtcacattcatgnttttantaaacactttaagttcaatattactttttttctctcctctgaaatgtgtccggtgaaatgtcccactaagtaatttgacatggtgtaagggagttgaaagggtaaacgcggataaagagcagattacttgaccctacattttaagagaagacgacgccttccgggcgcacgccgagcagaactccaccgacaccttatccttgtccacatggagacagactcctcccgccgagtcgtcctcttccagcaggtcctgcttctgctttcccaccggcagagcgtagtcgtggtcaccggcgggcgagtctctgaagagcgaggtggtcagccgcagtcccacgccgctcagccggctcagcaagcgagccagtccagtctcgttggctaagactgcccgtaggtagcgactctcctcctgcagtgcctgtacgcgtttgcccagctcccgattctcggcccgcagctcctggttctcggctgccagaccccggactcgactctccagccccatcacgtactccttcttcttcagtcgattaaggcgggcagcggccgc

SEQ ID NO: 136709 - DNA, 1207 bp, Homo Sapiens
  misc_feature (962)..(995): n is a, c, g, or t
tgcggccgctgcccgccttaatcgactgaagaagaaggagtacgtgatggggctggagagtcgagtccggggtctggcagccgagaaccaggagctgcgggccgagaatcgggagctgggcaaacgcgtacaggcactgcaggaggagagtcgctacctacgggcagtcttagccaacgagactggactggctcgcttgctgagccggctgagcggcgtgggactgcggctgaccacctcgctcttcagagactcgcccgccggtgaccacgactacgctctgccggtgggaaagcagaagcaggacctgctggaagaggacgactcggcgggaggagtctgtctccatgtggacaaggataaggtgtcggtggagttctgctcggcgtgcgcccggaaggcgtcgtcttctcttaaaattttcttttttaggtgatttccttcctgccaggctccgttgtaggggttacagaacagtcgttcccgcctcacaacctgtggatacagctgttggggcagaagagacgggaccagctgctggccacatttcctgctttattttaaaaggtagtataagaaatgaggaaaaagaggtaatatcagggcttctgctgttttttatttttaacatgttcataattaaaaagtattttccagcagtccaaagatgtaagttatcttacacataaaatgttttattttgttatttggttatgaaaatggaatccttgttcttgcacaactgtaaatgttttgttgctagataatacgatttgagacctgaattggtctttggtttccagtgcatcacagcatattttgtaaaatcatctactactgcacttgagcatgaatgggtagtagccaaactcacaaattggagtgatgaacctgcttatacctaagggcaggagcaagcccctcacaatgcagctgcatgggtttttagtgcctactgaatnnnnnnnnnnnnnnnnnnnnnnnnnnnnnnnnnnaaccaaaagtagttggaaagattatttgaaatgactaatttgtgctatctttatgaaatatgttaaatgtagcttttttgaaacagaagccttgaattgaaatttaactaatacttgaacattttgtatatatttctttgtatataattttgtgcagtaccaatgacaaaaatatggtgtcataataaaaccaggtttgttgatcttttaaa

SEQ ID NO: 136710 - DNA, 1319 bp, Homo Sapiens
ggttgggtcttggcattttaataaacgttcaaagaaacaaaatttacttgtaggggacgtgacaaagaacagaacccaaagactgcctgccttctcggcagaccctagggagctgtggtgatgtgacagctgccacagcggctatcttccatggaaataacgtacgtcatcaacacaatatacaacaccccttccactcacctgacccacccacctccctcctacatgccctaccccagcccctctgcaccctccaccttgctccaggctcccaccacccactcaccccaaataacctgcgtcccttttgttcatttccctgacgtcccagcttgtctgtccccttgtcataagatgcagcactacacacgctctcaacactatgatagagcagactcttttaccttagtggcctgtctgattgcatgcatgtaaatggggggaggggagtcaaacaaatcaaggctatgcataaacagaaaacaaagcaatattcgtaaagctaggcaagcgagcgtaacattggagaaacataaggcttgaggcttattgattctttagatcacaaccgtttggattcgctttccttcttaaatatcggtgtaccattttggcttcaaaacaatctcttcttgcttctgcccctctctttgaggaaggcttgcttaactcagagatgtgatattagaacggccgcctgggggcgccacgatgcgcttgctggctgagcgaaccccctcatccacttgggtgcctgacaggctaaatcccgactgatgaagattcctcacaggtgggttcggccgagtaggagagccccgagcagagcctgcgggggtgccacctttgggggtggtggtcaggtcaaacacaggcccatcgtacatgccccttgggacggcatgcaggtctgccatcttcctccgtgctttaatgcgcttgtagacatagtcggagaacgggctgcagggtatgaagcggccagccccctgggtcacgtgcaggttgccatcttccagcatgatcttgccctggcagatgacaaccagaggagccccgcgcagctccatcccttcaaagatgttgtactctgccgcagactggtggttcttggcagagacgatcttcacagcatctggatcccagatgacgaggtcgctgtcagaacccacagatattcttcccttgcggggatacaggttgaagatcttggcagcgtttgtgcttgtcacagccacgaactggttttcgtccattgtccctgtggccacagccttgtcccagatgacagacatccgcttctgcacaccattggtgcc

SEQ ID NO: 136711 - DNA, 561 bp, Homo Sapiens
  misc_feature (373)..(396): n is a, c, g, or t
ttttcagaaattgaaccgtttattagcctaggtctgggtttcaggcattgcggaggcacgtctggggagctctatgaggggaaacaagcccctgactggctccttgccccccaaagacccgctcccccaggctttgcattcacaagaaattactctgaggcatgaggtttccttccccaaggtgagctgcaccccagctctccagtgggaggatgggccagcaattccaaaggggtctgggcaggaccagagctccccgactttggcagcttcaacacaaacatgagcagacaggacagcattcattctgggggaaatgtgacgaggagaggagggtcacagacatcacgcctatgtgcacacgcgcgcgcgnnnnnnnnnnnnnnnnnnnnnnnntaaatatacgtttgtaccgtaacatcccttccattatccacaggtttttgtgaagtccttctggggggttaggggagagtgtccccaggaaatgtccctagccactgccacccccatgctccattctatataacttgaaagaagaaggccgggcacagtggctca

SEQ ID NO: 136712 - DNA, 346 bp, Homo Sapiens
gttcatcaccaacattttattgatttaatataccataataagttctaagttactgaagacaataggcataaatgacatcagtgagcttgttccctccccatgctccagtgctacaaggagcccatcaacattgctaaggcattttctaatataagcatgaggattgaggtgctcccagtctgctctgctcatactggctgtaaacctccccattgtccagaaacacaggcccacagaagagggggtcaggcaaaggtttagagctcaaggtctatttcctgtcttctccatataaagagtgttgcactcgtgtccttgtaaacccccagggcaagaaaataactca

SEQ ID NO: 136713 - DNA, 893 bp, Homo Sapiens
  misc_feature (281)..(281): n is a, c, g, or t
  misc_feature (828)..(828): n is a, c, g, or t
ctttcttcgccccccggcttgtaaaaacttccccaacttctggtccactactcccccgagatttctcacaaagtcgccctccgagagtgatcccggggggtctttcgaagagggtcacgaaaatgaccgaggagcactggctttgaggctgggaacactcgctgtgtgagggattttaggatgactttgggaagaaaattgggggacccggaggattctagagagagcacagaccaaggcttgaggaggggaaagcccggtggttccggaaatttgaccgncttggggaaccaccttcggtgtctcctcagaggggcgggcctgtcgcctaactggtccccaacggcgtcggaacagaggcacagatccaggggcactggcctcgcccggtaccgggcgggtacccagcgggctcggctctatagagcccgaggccccgctgccgctgccccgccgccagcagccgttccgccgcctcggccaaaccatccttcagacacccgcgccgccgcctcacaacatgtccgccgctgccgctgccgctgccgctgctggaacggcgacgccgcctgggaactaatatggacagagccaggcacagtgggagtcgcagtggctgccccgtggccgcgtagcccgaacgcagatcgtggaagccgaagacgcggcaacggtggtccctccagatgccagggaaggtttgcaggaagccgctcccgacaccctttgcgccaccggaagcctcgttccctcagatttccccctccctcccggaccgacttccgggtgtggctgccgccttcccccacccacgccggcgggagcccngtttcgcgctgccagcagcttccgcctgctacggtcctggcaagcacctcgggatcccattcctt

SEQ ID NO: 136714 - DNA, 1025 bp, Homo Sapiens
  misc_feature (163)..(163): n is a, c, g, or t
  misc_feature (990)..(990): n is a, c, g, or t
tttcccggtgtggggcccaaatttcggcctttggttgctgttttaagccttttggccaaataaattccgttgggggggtttcccaaaaccttcttctttcaggaaatgcccagggttttccaaaaggagaactggcccttctttctttttaaggctacggttntacactcttgcaagacttttttacttcactgatgtaagagccaatccccaacttttcagtgctggtatgacatgctctggtgagatggtcttcttttccgatttgttacaaatctcattggcttcagaagatatgaaggtgaatgaattcagtgcagcagttcaccaccagctctcgagcatcgttggccacccggacattaggaagagtcctctgttgatcattttattgatagcagctctggggatagtgagatcatcatcgttgccagacgaggaagccatagtaccttcctgtttctcgcgccccggcttttaaaaactccccagctctggtccactactccaccgagatttctcaaaaagtcgccctcggagagtgatcccggggggtgctttgcgaagagggtgcagaaaatgaacggaggagcagctggcttgagggctgggaacactcgcgtgtgtgagagatttaggatgagtttgggaagaaagtgggggcccgaggattctagagagagcacagcccaggctgaggaggggaaagcgcggtggtccggaaatttgagcggctggggaaccaccttcgtgtctcctcagaggggcgggcgtgtcgcctaactggtccccaacggcgtcggagcagaggcaagatccaggggcactggcctcgccgcggtaccgggcgggtacccagcgggctcgctctatagagcccgaggctcccgctgccgtgccgccgccgccagcagccgttgccgcgcctcggccaaaccatccttcagacacccgcgccgccgcctcacaacatgtaccgccgctgcgctngcgtgccgctgctggatacggcgacggccgcctgg

SEQ ID NO: 136715 - DNA, 727 bp, Homo Sapiens
  misc_feature (47)..(59): n is a, c, g, or t
ttttttgaatgagtatataatttatgaaaacagaaaagtgctttggnnnnnnnnnnnnngacaacaggagtacatacagtgaaccaaaaagagtgtaccaggaggagcagaccctgaacagttagaactatggaaatcgctatgctttgtgttgtcacaggagttaaaataggaataccctgcatacaataaatatttattggataaataactaagcctgatacccttttcaatgcgttatacagactctatcatcacaccactaatctaagttctcagaagttaaacattacaagacttcagaacaacataggcgtctttggctccatttaacagaagaaggaccatagtgatcatttaatctctatgagtctgtcttatcttctggaaaaggggcctaacaccatttccttttgcaaaaaggtagctgccttgcttccagttctaccatcctctagcaacccatctttctcttatttgatgtctctgatcagctcctcttccagcacaaactggagaaaggggatcctttctgttttcttggaggcttctgaactcaattacaggtctgcattaaaaatgtatggagaaagctggtgatcagtttgtacatatggacaagttcaaggcagtatggtctacttctgggaaggcctggattccatttgctcctgatggaaaaaccctagtcccagcagtgtttagaatgaactggagaaggcagatg

SEQ ID NO: 136716 - DNA, 523 bp, Homo Sapiens
aactcgtgttacgtatagtttatttttatttcatagccttttaaaaaatataagccacctaatattttgaaaaacatacacagaataatcatttagctgccacaatattacaaaaataaaatgacacagaataaattgcacaagagaacaaaataatctctgctgagtcactctgactaggaacacataatagtcactaggaaggtgaagtggagcagtactgccatttcttcatgatcaattatcactaaaatcagtcacaggaactattcccaggaggtcatccattcactatacaggaatatgtgcaatatatagatgtcaagttaacatcttgaatttaattccaaataccattctttcttttcctctgggagacaaattcaatggcaagctagaatagtgaagaccaggggataccaagcccatgactgacccacacctctcccagctggttctacaacacaagaaagagaataaagtataccgtgctatctaacacaatagctagtagccccatttg

SEQ ID NO: 136717 - DNA, 179 bp, Homo Sapiens
aaggagtaaagatttttaattctgtgattgtgtgtatgtgtgttgaaactgtaaagcttttatgactctaatattaatctcttaaatgaaattaaaaggcaaaagaacatgattgagcttaaatgatcatttcttcctgcagtgattcttggattgttttctcatgtatttgaaaaaaa

SEQ ID NO: 136718 - DNA, 990 bp, Homo Sapiens
acgaggaaatccttcattatgagcgattcaaagtatttataaaaacactgccctctaaaaatttcctcagatctgaagtatggtcttggtcctgaatatacagtgttatcctatgtttaaaagggtgatccagacatgagacgcaactagttggtgcataagaaggccccacttggctatttcatatctacctacaattgaccaaaaaaaattttttaggccagcaattattatttagcttcgctctttctagtgcaagaaactgcaggctggatcagtagttcaacagctaaacagtcataaaatagtcattgtgcatgttaaatttctttcaatgctttcaaagataaattccaatttctatttacttattcattgtgacagtattactaaacaggtaaggatgggaatattttgttatactgtgtatagtgaatgtattgtactgtgtctgtgaaaactgtgctttaaattatattttcatatgttttgttggggacagagcacattaagtctgaaagcaacagaggtttgttttagaactgaaggcaatttaatcaaaattcctgtcaagaaaagctgcttataaatgtaaatgaaatcacatttaaaataaactgcctctgacccaaaaataaatatggctctttattttccttagtgtccattatgaaaaccagtatcaagtttaccatggaaattaatatatccattcagttcctcattctaaggctgttcagttgatgcatgtagactttattcccttacatttttgcttagattagattaggctgtattacttttctgtcaataacaaattaagcttggacttacttacttaaactattttaaaataagttctaggctagtaagatgaacagtgtctactactataataaatattccaaggatacttttggattaacatggtccataattattaactccaacaaaaatgctcccattgttgaacatattttacctaagtat

SEQ ID NO: 136719 - DNA, 472 bp, Homo Sapiens
tgggtctttggtagttttgcttgaaatatacttgcaatggcattaagtaaaggaaaataaagaacaatatcaaaagcttgtgctgaaagaagaatttcatgaagaaaatgaggagaaccatccattaggccttcagataacttatgaaaacttcttcgctcatttcttgatgttaacttgtggcggacattttttgttacagcttttgtgtatgtcagagagaggaatccatgctgctgatgagtgccatctagaagttttgtagttgtagaaggaaagaagccagagcaattactgaaagggtcctgcttgctgatgggtcgaaccaacaaggtgcgtctgttcagcttgtcagtacaggaaaggaagacacctccacattgccccaaagaccaacactcttcccccaagggcacagatttttctttgcattgtagaaatactccttcaaaatgtcctgactggcaacctt

SEQ ID NO: 136720 - DNA, 475 bp, Homo Sapiens
tttggagcaaggaaagggactttatttcggagagccagcaaaccaagaagatggtggactaatgtcctaaagaaccatcttaaaattatgcgggctttgccttgtcttttatgtttaggtcgggggaaaggaaggggctgacaaccgcagacatctggacaccagcaagggtccaggggaggtttgcagaacttctttgtccttggctaacagtctgtcatgtgacaatagccaaacctcctcattcctataaatctttaacaaaaacagttagctgtttacatgcttcccctttaatcccagagttagttttgcaaacggcatgattcctgtttttgcgttttatgtcagtgctctaaagttatcctagcctaggtgcaggaataggtaaaggccccttaaataaaaatgtagttagttatgttagttcttctgctgtttcatggttacaagacacagaagagaacccctgcat

SEQ ID NO: 136721 - DNA, 504 bp, Homo Sapiens
tttttcacggctcctgttttattgccttcgggtgtccggagcacctgactgccccggggtctaataatttaaggtgccgagaacaggtcaggacaaggggtcgcaaaagaggggctgggggcccagtggttacaaaatatacccccaccccacaacaaacaggctagaggagaccagcctggctggtgtgggagggggcgggcagagggcgcccgacccacctcagagagacagagccacggccagcgccgccagagggagtggcggagacaggagaaagggcccagaggccacccagggcccgaggggctcctcgctcctcggacacaagtgcacggaggtgtcggggaggaaaaggcgatgtggggccagccaaggcctggagcccctgctgggctgggcagagcagggctgggcagggcctccaggtccagccaaggtcctgacctacatgacgaccaggcccagccaaggtcctgagctacataacgcagcaccgggtct

SEQ ID NO: 136722 - DNA, 794 bp, Homo Sapiens
  misc_feature (155)..(155): n is a, c, g, or t
  misc_feature (157)..(157): n is a, c, g, or t
  misc_feature (204)..(204): n is a, c, g, or t
  misc_feature (206)..(211): n is a, c, g, or t
gggggaagaatcccaacccttatgtcagggcccaggtttttctttgggaaacacagttatggcccaaggttccctttccctacggggggcccgcggccccaaagggaaggttctagaaaagcttttttgagggcccgaggcgggccgaccaagananttttccttcgcgtttgcggtaggaacccctgggcgcgccgtgcggtntnnnnnncttcctgggtgggcaccagtgtttatttcaggaagcaggtctggaaggcctggggtctgtccagtggagtcctggagcctccagcttctcacttggccttcgggttacggaacttgcgtccagcaaagattgccttgtccccaagagcctcctcgatcctcatgagttggttgtatttggccagacgctccgagcggcagggggcgccagtcttgatctgtcctgtgcagagccccaccacaaggtcagcaatgaatgtgtcctcagtctccccagagcggtggctcaccatcaccccccagccattagactgagccagtttgcacgcctggatcgattcggtcaccgagccgatctggttgaccttcagcagcagacagttgcaggccttcttctcaacggcctgtgcaatcctcttggggttggtgactgtcaagtcatcccccacaatctggatgttcacccccgagaggaaggaggtccaagtggcccagtcatcctggtcaaaggggtcttcgatggagaccacaggatagttcttgataaagctcttatacagctctccgagcttctccccagtgcc

SEQ ID NO: 136723 - DNA, 516 bp, Homo Sapiens
  misc_feature (347)..(347): n is a, c, g, or t
  misc_feature (363)..(363): n is a, c, g, or t
  misc_feature (370)..(370): n is a, c, g, or t
  misc_feature (374)..(374): n is a, c, g, or t
  misc_feature (443)..(443): n is a, c, g, or t
tacatttgataaatattcttattgtctcaatttatgatatacttacattttgtattccttttaaataaagaaccaaatcaagaacagcagaaattagcatctgtttaatatattttaacatatggaaatatatttaaacagcacatttaaagaataaaacaatagacttccatttcttattctctcaatggtacaccattaattaaaaatatattacttaatgtaccccttaatatagttactgtcaaattttctttaagataaactgtatttcaaaacaacattttaatatacccgaattacaaacaaagccataacatttttgaagacatttttggtatacgtgnttggtttggaagatcnccaaagnggtngattaataaatggtgctttatgaatactttagattaacggtaaataagcctaaccacagagtcaccatnaaatagcaagttatcaatctaaagatcattcttcaaaaagtcagtgtgtgttaaagaaaggccttagagggca

SEQ ID NO: 136724 - DNA, 680 bp, Homo Sapiens
  misc_feature (646)..(646): n is a, c, g, or t
tttacattgtgatcttaattatacttttattaaaatatacatacttatgcacagagtgaatagaaaaaatattggaaggaaaccaaaatattgacagcagttatctctgatagatagaatgacagatgatgtttattttcttcttacactttttcctagattagttctgcattttccggcattcatatgtattgtttcccagccatcctgtcaagcgctgggattgttctgatctctgggagcctccagggctgactccagtatggctaatctaaagtgagcttgtaatctccaaaatcctgatggtggcttttctattaggcagactaatagattcagatataggtcccaacagtttgtgttttccttactgtcccagttttatatcattattcttagtactaaacagagtgacaacagggagtgacatttgttgaggacctacgatgtgtcagggtccatgctggggacttcacatgagggctccatgaagcccccttggacactcaggtccttgtgttttccccacttcccgcccgccactgacgctggggtgaacctgcaactcactgtgactaagagaatgcagtggaaaccatgctctacccagtccaggctaaagctttaaggaggcctggaagttacnacacagcccagcaattctactcctaggaatctcc

SEQ ID NO: 136725 - DNA, 1293 bp, Homo Sapiens
gttttctaaatagctttgaggagttacaggctgaggaatgcggcatcctcaatggatgtgaaaatggtcgctgtgtgagggtccaggaaggttacacctgcgattgctttgatgggtatcacttggatacggccaagatgacctgtgtcgatgtaaatgaatgcgatgagttgaacaaccggatgtctctctgcaagaatgccaagtgcattaacaccgatggttcctacaagtgtttgtgtctgccaggctacgtgccttctgacaagccaaactactgcactccgttgaataccgccttgaatttagagaaagacagtgacctggagtgaaacagaatctacataacctaagcccatatactctgcactgtgtaaaggaaaagggagaaatgtattatacttgagacattgcacctaccccggaaggctggaaatacagaaacagcatggagttgcaagtcctctgaagacaatgagaggatttaggatgagcccgataggtgtggcagaccaaatggacatttctctaaaaaaccagtatatatagtctgttcatatgtaaaattcagtggaagagaggtggaacagtgctgttattttaaacagaaggttgtattattatgttgttttgttttttcactattgcttgattaaatttggcatttaaatagtggtggaaatattttatataattttcattttttggttgtgcagttccttggctactgtttttcttttacttcagttttttaaaaatctcaaatgaaaaagtcttcgatacaatattgttaagctgtattataagtattgttacacagggttatgcaattcccggcctggagcatttttgaaattcaaattgtctgtcctgtggagcaggcagtgattttgttccaaaactttgtatacacatttggagaaaagtactttatattttcagtgttttgtctgattttaatgtccgttcttagccaagctgctagcaggtgttaattggatccctttccttcactgaaatggaagagtttataagcttacgttagtattgtaatatgtaaagtaagcccaacaaaaatttttaaaaatttgatgatccccaatatatctaccattgtatgttaaataaatcaccatttttgtagaaaaaattctacctgagagtaattgtcaatgagtacatgtgtataagttgtatcccactctccccacttttatcttttccagtggtcttctgttaatgtagtgtcttttacaagttaatcattaaatttgttagatcttgttatgggct

SEQ ID NO: 136726 - DNA, 701 bp, Homo Sapiens
tttggtttttaaagatggttttatataaggtatttcataattacaattttaaaatgcagtctgtattcacattaatgaacaatttcaactaatttttgacaagggaaaaatacacatactttgctttactctcatataaaacactgattatttggctgtagtaatccagatttaagctgctgacgagtcttcgtaaaggacttcatctaccttcatgtcgttttcattcactgggacctggaggcaaatctgttctttgaaagccaacgccagggtgtagggcttcacttcctgatgctgcaaacagcgcttcagataggcatcatagtagcccttgcccctccccagtcggttgccatgtttgtcaaacccaaggcctggcatgaagatgagatcaagtccccctctgtctttcctccctgttcctgtccagctcatttgtccctcttgggattgacagtggactgtgaatttggactttactccctcgtgtcctctttctgttgccagagcaccatcaggcttgaagttcagttctgtcttctatacctgtggacaaggcctcctgccgaacatcaccctcacccaggctgagggatattccaggatgtttttggatgtcaagaaatttccctctggtgattctattctcaccatatccatgtgattgctctggaaccggtaccgagggatgaagcaga

SEQ ID NO: 136727 - DNA, 885 bp, Homo Sapiens
ttttttaagctgaaaatcacaggctgatagcctccattttaattaatattctactattcacacttctattggtttttaaagatggttttatataaggtatttcataattacaattttaaaatgcagtctgtattcacattaatgaacaatttcaactaatttttgacaagggaaaaatacacatactttgctttactctcatataaaacactgattatttggctgtagtaatccagatttaagctgttgacgagtcttcgtaaaggacttcatctaccttcatgtcgttttcattcactgggacctggaggcaaatctgttctttgaaagccaacgccagggtgtagggcttcacttcctgatgctgcaaacagcgcttcagataggcatcatagtagcccttgcccctccccagtcggttgccatgtttgtcaaacccaaggcctggcatgaagatgagatcaagtccccctgtggacaaggcctcctcccgaacatcaccctcaccaggctgagggatattccaggatgttttgggaagtaaagaaatttcctctggtgattctattctcaccatatccatgtgattgctctggaaccggtaccgagggatgaagcagattttgcctcgttggaaaatgtccttgatgatctcttctgtctcaatttcatcttgcatgctcagaaagatggaaattcttttggacttttgatactcactgtgggcaatcaccttctggctcagtacgcgggactggcgtagccgctcctcggcactcatcgcccgcagacgctgcttcagctctccccgcaggctccgcttggcgctgctcaccgctgccgccgccatctcacgcccaagccgagtccagtcccgccctcccc

SEQ ID NO: 136728 - DNA, 1180 bp, Homo Sapiens
  misc_feature (441)..(460): n is a, c, g, or t
  misc_feature (1090)..(1120): n is a, c, g, or t
  misc_feature (1130)..(1130): n is a, c, g, or t
acaacacaggatttacttttacttgcagaatcaaagctatcatgtacacatgttaggaatagtgaaaagagaacacagacaaccggcattttttgtcgttgttaccatgaggatacaccacggggaacatctccctaaacattttgtgtgatcattcttggagttcaatctgatagaccagtccagccttatctccacactactctaatggggaggggtggaaggaggggtagaggagaaggaagaaagaaaaagaaaggcacagtgactatacatcaatgccattaaaccgaattgcatctacacgggacagctcagcttatcaaagggtattctaaagacaatattcattccaagaaggtcacacatatcttacctcagtacagctgtctgttttaattgttatttttcaaaatatgaagcagaaacatgaggattttnnnnnnnnnnnnnnnnnnnnatagcagaaaagaagtgacaccaattttatttttatatattcccctcctccaggcagttcgtcagaatcagatctcttaagtcaggatgtggatcggcttgcattctcataaaggggaccagatctttaaacatgcatagcctagagtttccagaatggttctcctcgctctcttcaaatgccgtggactagaaaggtgcccacttcactaaaaactctacatcaatgtcccaggagcccggaggctcttcaggcccctctcaaagacttaaaggatggcacagaaaaacttcttctccctaaacgggttttctgaagccggaacaggggtcaggagggggtcttccttggcatgtgcttcacagtaggccatcaaatctgcagctgccttggacacctttatcctgtcgatattggcttccatcttaagctgctctaccagcttcctggcttgtgctatgctggcggtgttgttgctggccatcggagtgctggatagatctttcagaaacactcttcagttcctaaagcctgaggctcactggcagatctggcttagctcccgaggcttggtccgaggagcgtggttttcccctctccggagctgatctgtgcaggcgagctccgcgnnnnnnnnnnnnnnnnnnnnnnnnnnnnnnntagtaggagntgcccacggagcgcggcggcagcgttgtgagtatgtgtagcagcggctgc

SEQ ID NO: 136729 - DNA, 180 bp, Homo Sapiens
tttaatggtaaactgaatttatttcctcttggaaaacaattccagtaatctccaggttcagactgcagagtaaacattaataacagtaacatacaggttagttcaactgattcaagaatttggctgcgtgaaatcattaaggaaaaccttgaacactcaaagcttcaaatgtatccaggg

SEQ ID NO: 136730 - DNA, 736 bp, Homo Sapiens
taaaagaaaatgctccaagtttattaagactacaacctgtttatttacagaggtaaacatcatttttttcccccatatgattattatgtctgtgagggatatgggtcatcacatacatgtagccatcaggacagtaaaacttaagggagcttcagtaactcacaggcaagtgtttatttaggattttatctgtatcgtgaccaatgtcaaaggaaagatcctttttttgtttatctcaggatgaaattctgctttcttgggagaaatgcaataccagacactggtctttactttttccttgattgattttagagtggggaggtccattcaaagataacatggtaagttggtcagcttcctttctactttggaccataacttaaaatagaccaatgaattcctatttgttcttcagaatatctggattaagtttcttgaatgatcatggatgatctgtggagatttggagcataatgtattttgttttgttttcttcttctttaatgtagtttatttgtaaagtcaaagaagctgctaatgaccagcttttcaaagatgtaatagaaacaagggaggaagactcataaaacacttgttcatcaaacactgtttgatgaacagcaacactagcagatattttaaagaaaaggctgctttctggccagccccataaagtcattggctgattttacaaatgtattcatggtgcggggaaccaagagccaggtttatgcca

SEQ ID NO: 136731 - DNA, 286 bp, Homo Sapiens
tttatagaaacattttctattaaacatcatctccattttgcagagaacctaaggctccgaggacttgcccagggccatacagccggtgagccccagggctcagccacagcccaggtaacgaggacagggcttgctccagccaccattggctgcctcttcggcctccctctctcaggtgagacagtatgtcaggtgaggcaactgaaacaatgtccctcagttcggatgcatcctccctcttcgtttcctgtcatgagacaggtttctcctcttcctggatgtggtt

SEQ ID NO: 136732 - DNA, 1521 bp, Homo Sapiens
  misc_feature (226)..(411): n is a, c, g, or t
tggttgtcgctgctgtcgggttgtctctcgcgttttttgtgtgtttcgcgctcctcgtgtgcgttggtgcgtttgtcggatattttgggtgcccttggcccggggtgcgggcaggtccgggcggcctgcccgtgttagcggtctgtctgtggtatggtcgctaggcccggtacgaagctgggtcgtaagctggcctctcagggaatttttgagcgccccctttgtnnnnnnnnnnnnnnnnnnnnnnnnnnnnnnnnnnnnnnnnnnnnnnnnnnnnnnnnnnnnnnnnnnnnnnnnnnnnnnnnnnnnnnnnnnnnnnnnnnnnnnnnnnnnnnnnnnnnnnnnnnnnnnnnnnnnnnnnnnnnnnnnnnnnnnnnnnnnnnnnnnnnnnnnnnnnnnnnnnnnnnnnnngagattctttataccattttgttagtggtagggtggtatttcttaggaattttttgtttcattaaatttaaacaaaagtacagtagaaaatgttgccaggcccatcatcgcaccaggatatttgtacggtaaaatgctttgcatgagtcatacttctggtacgcacttctgttgcaggtgacagcacactgccatttgcaacttcatcattttttctttcttgcggctgtacttaataggaattaaatgtgtgaaaataaataataccaataaagttatctataaagtttgaacattctttagcattctttgtttagcaaccacattcttcagcatctaccaaaaaaaactcgcatgatacactaaatttaaaatgctatgaaattatacattactctctaaaaataattgatgtccaatgattaagaaacattacaaatcacaccagaagtagcaatagtagcatactatgctatagtagactatatgttacgtataaaatagtgatgaattcttcacacaaatcaaatgggtaaataaaaactataattatttctttgcaaaatagcaacaggtataacttaactggttgcatctaatttacattaatatccttcatttaatttcacatcagaggaatattttaatgagcgactgcataaaataacagtcaaagataagtaatgtttaataaaacaaggagaggttaggagctgtcactcgtgctttcatgacgcttctaaatccaaagcatttgcagacaagcagaagaattttccttttccaggactctcaaatatcatacatctccattatgtaggctttaggcaccaagccaatggctcccttcatttctcctacccaccagccatatctattgtattccttgctaagaatgtaaatcacatcaccacgcttaaatgacaactcatcagaaaaagctccagtacaatcccacaatccctggtaaaaattagcataatcagtgctcttatcccctgaggtgtgatggacactatcctgactcatcttcctttgttcttccactttcactggagcactgtcctctttttcttctggaagttctccataaattgtcatatctattgg

SEQ ID NO: 136733 - DNA, 2404 bp, Homo Sapiens
  misc_feature (551)..(625): n is a, c, g, or t
tccccccgcgctggtgaataaaaggtggttgctgcatggtgatgatgtactaaccgtcgcgtgtggcagcgacgatagtttttcttttcgacgcgcccggccagtagttataaattgccttcgacggctggtggtggggacaaccacccacctgttagtagcactcctcgtgcgtatagggatcgctttgtgatgtttcgcttccttcctcgcgggagggctgcgtatgtataataaattcgtcgtctcggtgggagagggagtggttggtcgctcccacctgatttttcgctcctcccccccttgtttggtggcgcctcttctcctcacgaggatgctcccgtctggcgcattgttttctctccctcgctcccccgcgttgtggttatatcgccgcggcgccgcctcgcgtctctcgggcgcttatttaatatacgtcgctccctctcttagggggcgccccttcgttgacaaaaaacgggggggtgccgtgtcgtgggggctcctcctcgcggggggagaatttgtgggcgcgcgcccctcctctctcnnnnnnnnnnnnnnnnnnnnnnnnnnnnnnnnnnnnnnnnnnnnnnnnnnnnnnnnnnnnnnnnnnnnnnnnnnngataggcataaacgtgtttattaagtgaaacgtatcctttaaaaataaaaaagggaagcctgtatataaatgaagttgtggattcaactagccagaatttattctgacttgcaccaaaccacacaaaatcttttaaaagtctagttagtgtagtctaaatcggacactccagagtctgttcttgaattccattgcaagagctccaacttcctactttcagaagggatggggatcaagatgagggttgtcacataagctaattttcaatatatatcaagtcttgtggggtccaggaacaaatactgtcattggttagtgtttaagtacatgagttgacttttctcctctctcacaccccaccttgccctggcaattgggtagggggaggctgtttatcctccaagagaggacggctggttcctcatctcagtttccgttctaaaccacagagtggtcattgctgtgaactccagccaagatggtgtggttgagggaggaagccgagcggtctgagccttctgtggggccggtggggttctcactgcgctggcagcagaggatctgcctaaaggtggcgctcatttctttgtcgcggtaggagtaaatgatggggttcatggcagagttgaattcagcaaggagaaggaagaatttctcataggccagcacgtcgcactgtggacagcacacgtctagaagtaacaaaaccaatccaggagtccagcagatgataaaggccccaagcacaatgaccacagtcttcagaagactcatcatggtatcccgattccgccggggtccagaactatgccgagacattctcatagtcctctggcgaacatagccaaagatgtgagcatagagaaccaccattaccacaaaggtcaccaagttgaaaatggcccagaagactaagtaagagtcactgtagaggggtgccatgttggaacaattttcaatatcacagatacagttccagcccacactgggtatagcacccataacgatggccatagtccagatgaccacaatgaccaccactacccgccggttgctcatccgtgtgtggagctgcatgcggaaaaccgtaatgtgcctctcgattgcaatagccagtaagttggccacagatgccgtcaggctggtgtcaatgaggccctgacgaaggagccatgtgctaacagtcagtctccgagtattgggtcctgtgttgaacatgagatagaagtaggccaacccagcaaagaagtctgcagcagccagattagccattaggtaataaataggaaaatggaagcggcggttgacatagattgccaccatgaccaataggttggccaacatgatgaagatacaaacagtgattccaagtcccatcaccagcttgctgactgtgttccattctgtggcaagatgctttccacttcggttataaaagaaggcaatggactcgttgtagaagcactgtggttcattcatggctgtgaactggggctgtgaaattacagggatggaagtagagatggcagccatgacagctctgtggttgtaggtggtgaacacgccccagaactacgggagacaaattttcttgtttgctgatcagatcgaagtcatgctaggagaagctgtgtacctgatgctgtaggtgtcagtcctgagaagtcaggtactcagataggtggatggggagcttcataaatcagacgtccaccccagcgccggacagctggcaggactccggtggacgccccatcccgggaattccggaccggtcca

SEQ ID NO: 136734 - DNA, 1096 bp, Homo Sapiens
  misc_feature (1024)..(1024): n is a, c, g, or t
tatggaatcttggctggggacttctatcttccgaggtctagagcctctccggtccttttgtgttgaccttcccgctcatcggtcaacaggtccatggtccgggggcagtcagttatccactactgctttgctgatgcctggggccacgggtacaggcatgtcccatgtatctgatgctgggcacggaccgcagcgcgacgggcggccacggggcaccatccaacacaccgtcaggagccgatggtgtaatgcaccacggacaggcatcatcgtcaagctccgagctccctggacttacgcgagggatgcccccggggttcccggcgaccaccccctcacctgtggagtggacgatcaggttcggctggagctcccggaaggtgctaggcccccagttccaaggcgagcgttccccatcctccaatggtgccctccatcttgatctacaaagcccaggggtcgaagctagtgattggacggggctggcggggagctcatcatctctgctgtaggcccaggccatcatgagcaagctgtggcttggctttgacctgagagcggccattgcagcccccatgcctgcatgtcaacagacaagggactgtagtggacgtacgagcccaacttcagccaggaggtgcagaggggactccaagaccgtggccagaaccagacccagaggcccttcttcctgaacgtggtcccaggctgtgtcccaggagggggcctgtgtgtacgccgtctcggacctgaggaagagtggggaggccgcaggctactaagacactgctctgcccagagctgaagtctggccccaccatgagtcctgtgtccaggccggacatggctgggggaccaactactctggcaggatctggacccctggcaggggagtccagctgagagtggaagaggtggcggggaccagctgggcagatgagaggctgagcctcatccctaaccccctttcccagagcccctggtggtcctgaaccggcccctctatccctccgtaggcctcttnctggggccactctcccaccctctcgatctgtatatcctccagtccaagattaaagaggcggactgtggcctg

SEQ ID NO: 136735 - DNA, 703 bp, Homo Sapiens
  misc_feature (681)..(681): n is a, c, g, or t
tttttggaggatttcatgaggctttaatcataacctaataatactgttaaaaacaacacatctgtcacttgcagagacccacagggacacacattctcttcctctcacatagactctgaggtaggaggtacactggctaaggaataaaaaatactcagtggctgtgcaaggctcagaccaggctcacaaggctcttggttgaaaagcagccccttgagagcaagagcagaggccaggccagcttcactgagatcccagaggttctgactggggctgcccagagttgggcatccctgacttccggcatttgagatctaacccgggactggttggtgcaagtaggggatgaagctaaggtggtagctggtcttgttccaggttgcaaggatagaatgatgttcctagcacataaactgctctcggtgaagatttgtttcacgaattgaatgaatggtgtgggggaggggaggaagaattctagaggacagtccctgtggccttctagcccaggataggggagctaaggggtggggaagcccctatgccaatcattttagaggtggccagggagggaggtgaaagttttggggcaccagctataccagtggcagggggaaaagaaaaggtagtcttctttcctcccaaagtgtcttgtacgtaattggggctcttgaccctgcnagcccagcccttctcatcttgt

SEQ ID NO: 136736 - DNA, 471 bp, Homo Sapiens
  misc_feature (89)..(89): n is a, c, g, or t
  misc_feature (119)..(119): n is a, c, g, or t
ggtaccccgggagccccttacccttgatgctttctcccggaccatagatttagggaaagcaagattggggggataccgaatcaacttangttaacttaccttcagaagtaacaaggtcntacttgggctatgaacaaagaactagaggaaacatgtgcaaaaacaagtcgatatctagattagacctccccacgaaacaaagtggactcctgtcccctgccactcagcggccacccccccaagatgcttggtcctaccagtaagtgctacaggtgtgtgagccccaagccccacccgcaggatcttccagccacatgaggccatttaggtccaaagcagtcggatccccctcccctccagagctggacctggggagaggctgcttcagtttggagaaaccgagtcagaatggtgcgatgccaggtgctggctgtggtggaaaggtcctatgcgagaaacccctggtgccct

SEQ ID NO: 136737 - DNA, 945 bp, Homo Sapiens
  misc_feature (176)..(176): n is a, c, g, or t
  misc_feature (738)..(738): n is a, c, g, or t
  misc_feature (831)..(865): n is a, c, g, or t
tgtccaattttaatgaattctggaattggtgtccggatggtaaagtaggtaaactatagggctcaaaaccacaggttggaaacagcaataccagagagtgattgggtacattgtcccttactgctgccactactgagcaagtaacaaatgtttgtgttctcacaagagaatataanataagattgatattgtaaggaacaaaaacagaaacagaatatgatcaaatgtacgaaaatcatttttaaaaccttagttttgtttattttgcttctacttaatgtaacaggtttggtaaaagtttttagccaccatactagaacaagttacatttaaaattagaggaataaaaaatcccactatttcgatgaaaattacaatccttgagagatatgttttccatgtggcttctggaaaattttcaaagcaggcttctgaggcattgttaccctgagagtgggtagactgaacaaaaacggcgggtgcacttcctccgatcacagttaaccacacgccagtgcaaacaatctttgcatttcttttggttcttagagtctttgacttaaatgggtagacaattgccagaaatcgatctacactaatacaggttaagaacagaatgcttccgtacatgttggtataaaacagcatcacagaaatcttacaaagtaaatctccaaatggccaattccgtgttgtgaagtaaaaaatcctgaagggtaaagtaaaaacaaaaagcanagtctgacattgccaagttaatcatgtaagttgtagtttcatcccggccgtaatggccgaattcccgggcatatgtccggtaccgtcgactgnnnnnnnnnnnnnnnnnnnnnnnnnnnnnnnnnnncggccgcttcctcgctcaatactcgctgcgctcgtcgttcggctcaaagagtgcgccctatagtgatctatacattcttt

SEQ ID NO: 136738 - DNA, 1167 bp, Homo Sapiens
taagcgaaaaagctaaaagataattttttgttaagtaatgaacactcgtaaaacagcaatgaaatggtaccaaagtgtttgtgattacttatttctcagcattcatctggtaacttaagcagcatgaagcaagagttgcactttaaaaaatgacaagaaaatagctattcatttagtcgacagagtaaggcccatctcatttccaggatcactagtttctgcttatgacggggtgagcatccgccagcgcggtgattgggaggcgcccctgtgtctttaggctgaggcagtgcccatagctgcagtgcctcgagtttccggagcaaccgcggggctctttcttgaggagtcttgggaggggcggtggcctgcctccccatcctagatcagcgaggtcccaagagtgcgtattgctgcggggtagctgtggagtgtagacacgttccggaggtggcttgacatcctgaggctggggtggtgtgaagggaacagaaagaggggcaggtcccgggctttgctggctctgcttctcagggtcaggccaatgggtctgcagagcagtgcagcggggctcctgccagccgtggtgttgcctctttcttcccagccccgattctcgtcttgcagggaaggcgtgtggactccggggggcacaaaggactccagcaagggccacagacagaagagtgatgtgtcccttgtcctctgcctattgcaccgtattccataaaaaataaacacttttttaggactgtatgtatattgctaatgcggtggcactcctgggcactggcaggctgcagagagccgcgttgccattcatccaccagaatccatccagagacagccttgcgggctgggatcctttggaagctttcctttcggaagggattaggcagtgcccgtctgtctaggtgctctacacagtgctgtgaacctgacatttaagtgatacaaacaaaattaatcccatgggtaggaaatcccagggcttcgtggcatcatttggcaatcatttgtactgtacagcatcatgcggtatgcctgcttcctccacgtccacacagacctggccccaggtgctccccctccattcgcaggaagctcacaggtggttgttcttggagaggtaggcgatgagggccacggccacgcccacatagacgc

SEQ ID NO: 136739 - DNA, 581 bp, Homo Sapiens
  misc_feature (64)..(64): n is a, c, g, or t
tttctctttgtccttttagacaagtcaattatttcaagcctaagttatcaggtctccaggagcnggcgcaattttgttcctacctccacccttccaccccttccccgcgccaggacccttagagtttcccctttccctcttcttcacgcccccgtgccactgctctcctgacaagaggccatcaggcagctctcgcatgggccctggggctcttaccaaggtgggctgccgccatgcggtcaaggatctgttccttttgttgttttgttttcagcccaaaactagaacagagagagaagccaggatcaactcacaaacagatacaaagcaaagagacagagagacagcgatttagaggccggtcaccagaaagatggcgtcagggtgggaggatgccccggatggcaaggcccctaaatggatggaaccaagtgtcagtcactctctcacgcttgggaagaatgttcggttgaatggcgttcacgtggacactgggttgggtagatgctgtccaatcagtcccagccattgtccttgatcatgtgtgctagttcaatgatgtatttgccttctttatattt

SEQ ID NO: 136740 - DNA, 951 bp, Homo Sapiens
  misc_feature (82)..(116): n is a, c, g, or t
  misc_feature (172)..(184): n is a, c, g, or t
tgcgatcgatcactatagggcgctagcttcgcgagccgaacgaccgagcgcagcgagtctagtgaagcgaggaagcggccgnnnnnnnnnnnnnnnnnnnnnnnnnnnnnnnnnnncagtcgacggtaccggacatatgcccgggaattcggccattacggccgggctctgnnnnnnnnnnnnncaactgtgtttttcttatatgaatcccctatgccaaacacataccttccatgcatgacatgagatctgcaaactggattttagccaccgtatttatttagtcaaaaaaatgtccatgtagcagacccgaaaaccttttgctgtgacatgaaaccatgttattcttatcttcttaaaacacagcctgggatggaatggccatggcatttttttcagagaacatcctttatctgctatgactgaatccttaggaaatgtaagctataacccttgattttcaagaactaccgaataagtgtatgaagaggtggttttttaaaacttcaagttggaatttttatgaggtcactgtgtaatttgaagaattgtgtgagattgtcatgatataaattccttttaaggactgataaatagaatgaaaagtttccaggtagtttaaaactccacaggtcagtttccttttcattcctgcttcactgtggtttataagcctacgggagagcaccgttggctcagatgctactgtgagcttcctgtccggtgttagaaagtaactagttaaaagttcattttagaatgtatggtttttggggatgaactaagaattagttattagttccaaaggattgggaaccaattttaatattttcacatttataggaacgaaattcatatgtccctgaaacttctaggacaaaaccaaacaacgtaaggagggaactgttgcaaagccatttcatcgagaaggggacagaaggagaaatacac

SEQ ID NO: 136741 - DNA, 680 bp, Homo Sapiens
acccttttgagcttgagtaaccactgagctgccctttgttacctttatggaaaatgagtgcttcactccagctgcttttacccagcccaggaacatctgggggcagtttacactccctgtttataattagagtgaattcagggctatctaataaatatctaagtatttgtgtaagagttgtacaaagtatgggtaggttgaaagggtaactggctggaaagaaaattcaacttgagctatcctccaaaacgaaacataaatcttccctcagattccataccattctggaaggctgccaaatcctaggtttttcaccatcatgtgcttctgcacttcctaatttgggctgagtctgaagaagctagaaaccacgtgagaaaactgggcttcccggtatttccagagcagttttacagaacaaaaggtttgggtaggtcactggctggaaggagactctccaaccttgactgtgactatctgggcagccacggggggaattgttcagttggcctcacgttgcattccccacttaaaatactgctggataaaggctatctacactttggcaaagtcaaaagctaaagaaattgctctggatccagaatctcaacaggatcacctaatattcccaaaccaacatctaggccagcagctgccttctactttcctttttcactcgc

SEQ ID NO: 136742 - DNA, 582 bp, Homo Sapiens
tatccagcagtattttaagtggggaatgcaacgtgaggccaactgaacaattccccccgtggctgcccagatagtcacagtcaaggttggagagtctccttccagccagtgacctacccaaaccttttgttctgtaaaactgctctggaaataccgggaagcccagttttctcacgtggtttctagcttcttcagactcagcccaaattaggaagtgcagaagcacatgatggtgaaaaacctaggatttggcagccttccagaatggtatggaatctgagggaagatttatgtttcgttttggaggatagctcaagttgaattttctttccagccagttaccctttcaacctacccatactttgtacaactcttacacaaatacttaaagcattggttaagtctgtgtatactgagttggaagtgatttcagcacattcttttttagtggagtgaaagttctgaagcccccttttaacttcctcttggtttttcattataattggtagccatctcatgaactgtctctgactgttgtctctttgtggtcatgtgattgtgagcttgctttctgacttgcat

SEQ ID NO: 136743 - DNA, 704 bp, Homo Sapiens
tttttgtaaataaatctacatctaggtattttattcgttatgtataaggtaaagtatatttaatggcacagtagaataaacaggctatgattacaagtccaaagattacaaatatgatgatgatatcaaatatatgcacacacaaacacaatccaacaaaattcttgactctctttcttttttcaccgctaaaggtagcaaacattcctctgtacctagctctgaaaacacatctacagaagcaaatgaactcatctgcaaaataaaaagcacatatctttaatttctaatgttttattatagatttttaagatacatatttatttttatattattagcttaaagaaagtaagtcacacaagaataagcttttgcatgtctgctaaggtaaattattatattataagtttgttatgaagttataaataaaacacatattgtgcttatgtgaataaaaccacagcataatcggagtgcatttgaaatgcacagagtattctcattgtttcaataagacaaaagaagaacattacctattagaattaaaagcttggccttcggctatccattagtcaaaaataattcatcatgaattactcattgattacaaaacaaaattgttaaaaagcaaaggtgactaaaataaacatgttcctgggcctttcatttaataagcattttggaataactggaggcaaataaac

SEQ ID NO: 136744 - DNA, 444 bp, Homo Sapiens
ttaaaatagaatactacatagccatatatttttaatttaaaaaataaagttcagaacagtgaacttagacagctgctgtttgcgaaaatactgagcaagaataaagatatacatatttgcttaatacacagtaaacttctctggaaagataaacacaaagctggaagaacggattgcctatgcaagaggaattagcaaaccttgagaaggattgagagtgaggctttcctctgtatacttctttgtgtcttttgaatttcaaaccacattcatatattgcttatttaaataaataaataatatattttaaaaagaggatagtaggaagataagtggagtcagggagtataggcaactcttttgaggagttttatgcaaagctgggcaagtccacctcttccttagctatgtgacccaggcaagttagtaaatgtttctaaaact

SEQ ID NO: 136745 - DNA, 1351 bp, Homo Sapiens
  misc_feature (874)..(874): n is a, c, g, or t
tttttatgattttaacagaaaaagtttattttaagaagacacaaacagctctagctatataaagaatacagttcaattgctggtagcaagccagtaaggaatgccttttttttctaaagaaagacaagaaaaaccctttgtaatatcaccccacagagggctcccttccattttgtgttggaatcctaaaaagactgagatcgtgatctctcctactttctgcttcttcttgaaatgttagggacacattcccagctctaggagatgtgtctttcctgtaccttccagtttagggtatggtctgtaaattcttgtctcccttatttttctaagtgcattgttggcattcagtaagcactaaatggtaagggctaacttaacaaaagtccacctcttgacttcatactaggactggccaatgctcattcctcagtttgcttttggcaagtgtagtatttttgctgcttttggatccaaggcacaagcctggtttcccttcctaattctggaaatcctaaacagaaggcataaaggaactgtttcatggatgcttttaaatagggaaatcctgaaaattactttcatcactgattttttaaaatttagatttcagtaagtgggtagatccctgggctcaaatgacatgaaatcaagctagagacgattctcaagaagcaattggctgagctagggataagctgccagcctgagacctaggtactgagtgggctgagtccacatcaaaattagagtgctagcccactgtatgtcagacctgatgttgcacttgcccaatggagcagaagggctaccaggaggcaagaagagggccaacatgcgctcagggaggccacacagcgatacacgttcactnggacccaagtcccaaggaacactgggagcataaacgtgaaaccagagggaacctgaagagagggtacacgaaccggcgcactgagtagaaacaagagaagtaaagctgatgcacaagaaaacagacaccgaacaggaggggctcaggggagatgatgaaccccacacgacacaggtggatgaaaacagcacagcagcagagtgaaacagacagatgaatcggtcgcgtgtcacccaacgagtagtcggaagaacgtgagcaaagcaagcaacgcatgacgacgatgcacagcaaacatgggggagaaggaggcagagaccaagcatgacacagacgactacatggtcgtaagacggggcggtcacaatcggctgtggagcatgatcatcacaccagtcgcgatggaagcaaatcacaacgctgcggccctttttcctcttgctctctcatcactagacttatttactctcctccctg

SEQ ID NO: 136746 - DNA, 789 bp, Homo Sapiens
  misc_feature (704)..(712): n is a, c, g, or t
  misc_feature (755)..(755): n is a, c, g, or t
ttttttttgttgaaatttcatttgctcactttaatgttttcagttattataaaatgtttaaaataaatgttatagttctttataaaaaactaacttgaatttactttttaaccataataatgttttaccagagtaggtattttactggctcatggaatgctaatttccctttaagggactcctagaaaaactcaagattcactgaaattgtgtacttaaaataataaatattcttggaaaacaattgattgtcatatgatatacaaaattgtggtttgaagcttcatcattaaacagttgcatagcaacaaaaggatacaaatattctcctctacctaaagttaagaaatgtaacttctgaatcagcttatttatgccacaaaaatatgttttaatttatctcccagaaatctggatataaccaattcttctagttcacagtacctataagttcatgtttgttatttgaagactcaggtttgggaaaattgcaatgcattttggtaaacatattttcttgatttctcatgctagttgtattttttaaaaatgaaaacatcaatgtgtttttcattctcttacattctcctcatcaaatatcatttccaggaattacttttatatcccgtaagtctctttagaagtctcttatacctttaaagtaaaaatgagactttgagacattgttcttagaataaaggagnnnnnnnnnaacaagagaaaaatcaaaagtaaaattactttctatatagagncttgaaacgcataagaattctaaactggcaaaag

SEQ ID NO: 136747 - DNA, 433 bp, Homo Sapiens
ttgtgttaatcttatatttatattttatttccttctctatagagagagcaggtaaaaacatgtttagtgtttcctcgctttccaagttacattttatcttgagcagatttaaaacgagattagctgtaataggactccaggatgtgggcagatgtctacttgtcaaagacaatctctcttgcaatcagctccttcattatttcatttgtaccaccatagattggctgaactctggcatccacataagcttttgcaattgggtactcccacatgtatccccaacctccatggagctgtacacagtcgtaagctacactattttgtaactcagatgcccaatatttcgccatgcaagcagtggccggagtccaaacgtttcgcttcatgcagctggagacaggttgtccacaaatgctcgggttacacatatatg

SEQ ID NO: 136748 - DNA, 1954 bp, Homo Sapiens
  misc_feature (618)..(693): n is a, c, g, or t
  misc_feature (697)..(736): n is a, c, g, or t
cgttcgtcctggtcactggctgggagcctctgtgcgtagtgcgtgcacgcgtacagttgtatggtagtctatgtggctcgctgtgcagcggtgttcggccgctgtggctgcgtgggtggagtgtgtggccagtcgacgtgctggctctcgttgcgtgccttgggctgtgtacattcgggtgtgcgtgtgagggtgtgtcgcgcgcgtgtgtggcgattgctcttcgtgtcactgctgcgtgtgtcgttgtagtgtgccctaggggcggtaggacggggggcgggcttgtcatcgctcgggctcgcgcggaataagaatgtctcccaatcgcgttcgggcgtgtgcccgagtttgtctcgccgccagcgcaattgggccgttgttagcacgcatgtacccgtgaaggtggtgtatagtgtgcgccctaggggggttgattcttctgctgagggaggtggtgccccaacgatggttccccctccctggtgggtggggtgtgctttgcccgatgtgttcccacggccgtgccagtgttttgccccgttaccagtatggttttttatacgggcgcgcctcacttgccctgggtcttatttgtagaccgactcctccatattnnnnnnnnnnnnnnnnnnnnnnnnnnnnnnnnnnnnnnnnnnnnnnnnnnnnnnnnnnnnnnnnnnnnnnnnnnnngtgnnnnnnnnnnnnnnnnnnnnnnnnnnnnnnnnnnnnnnnnaaataaacgtcctctttattttaccaaatataatttatcagttaagttgacatttgtcaattcagttatagtaactataaataattctcttaagacacagttctgtaactttttaaggatacgagagtaaaccaatattgctccttgcagccaggccaaaagtacatgcagttggtacaatcggggaaaagaaatgaaacttccatgaaagtcaccttcattttctttccctctcaccctacagtcctcctctgctcactcagggcctggggcatgcctatctgtctgctttttaggcaaaggaggtcactccagagtcttctgggactgcctggccaaattccagagatgaggaaggggcgagtgactggggtaggggtggctggagaccacagggacacagccttaggggcagaggagttggttttgatgcctgtacaagaagaatctgtgtgtaagtattttttgaggtggaggaaaagatgaaaaaagtccagagggaggaggaaaaacaagcccaggctggtgttaatgaattctgttggacacaactccaactagaaaacctctaaaattccttccaattgctacggttctatgattccagaaggaggcctggaggtctgggtagaaatggagggagagaaaatatggtctctggaggtctagggcaggttcctgggataaggtgcagtgttggtagaaacaggatcattgcctaagccttcccttggaggtgggcccttgaggctacagatggaagggtttctgtagaagcttctgagagagaagttagaaaaagcctacatccaaatccccagatctgtacacgtgtgactgcggatggaggctccagttttctcccaattttgtgctaggcagagaaaagtagaaacaaccagatgatgtccaccctgctagttctaaatcctcttttgggtgcttggtaaggagaggtggagggaagggaatgtgaggaagggtcgtttagggaaataaatactggttgagcaatggggcggtggctctagctgtggtcagcactgcacagagtaggggtctggaaaggagaaagaggcagaagaatctggcttgaagtagatgcaaatacttacaacgaggaaactttctctgccagcgacgcgtgggtcgacgatatcccgggattccgaccgtaccagcctgcttttttgaaccactgttcatagtgtccatgcg

SEQ ID NO: 136749 - DNA, 884 bp, Homo Sapiens
  misc_feature (317)..(317): n is a, c, g, or t
aaaattgtgagaaaatggggagaggtcgcggcttggggactcctccccgggggggagagggatccaccgtgagaggggccccttcaagaagtctccccattctgggattttgtttccagaaaccgctccggggttcccaccccgggggcttttcttttatttgcgtgagaatccccaagccactagttcatggcccaggggtttccctaggaaaacaagctaaggcccatgttcccttcacctacaggggcccgccgggccaaaacgaatggttctagaaaagcttcttgaggggccgaggcggcccgacaagctanttcgggcgccttcttgtttgcgggttccccaagagtttttcaaatcattttatctttaataatcttgtagtaatttaaaatatgagaaaaaaaagtcaaatgtgttccctttatgggtgatgccaccatgattgcctcacacaagcataatcaatcgccacgagagactggatgccaaagagtatggctggcaaaaaggcatcagggctcacagtccgaagagtttggttacggagtctccgaggggtaacaggtggcagaaaagacatcagtttaagggaccctcagaggacagggcgcggttgctgggtcatgagcaccttgaagcgtttcttgatggtgattcggtgtcgagagtatttgtcatctggggagaaccgagcaggatgggctgagcaggtctgttgtcccatcgggtcaaatttcttcagcgtatagactcgatctccctgctcgttgaggtaatactggagaaacatgatcgcttataagccagcggtcccaattcggtccaccgctcagtctgcagtggtccgcccgaccgcgtcacgtgttcgtcaatttccc

SEQ ID NO: 136750 - DNA, 478 bp, Homo Sapiens
  misc_feature (408)..(408): n is a, c, g, or t
ttttttttaagtgcagcaatggtggtattgatgcttttaagttcagtttaatcagtagtacaatgttatgtatttgccactgaaaccatttagaaccatgcataatcagacagtttagcatgagggtttccatctaggatatggaaattactttagattgctaattttgagttggaaggcgtgagaatttgaataattttgtaaatagtattggaatatttaagataactgagattcacgattttgtacctttaatttatttgatatgcgttagtaagtcttgctttggtttttggcttttggttggagtgctgtggtcagcagaatgccacccttccccaacaaaagaggttcattccttaatccctggaaccagtgaatgttagtttacatggcaaaagtgtccgncagatgggttaatattaaaacctgaggaggagataccaggataccggctggcccacctaactcagagcct

SEQ ID NO: 136751 - DNA, 1045 bp, Homo Sapiens
  misc_feature (159)..(168): n is a, c, g, or t
tccacttgttcccaggtgaaggcaaaaaccttttcaaggccgggccaaggcattttgccggtttagttttacccccatttttccccttaaaaaaatttttattattttcccttagaaggcttaaaatcttcggtagggaagtttgtcccatttaatgtnnnnnnnnnnagaaagtaaggttcccttcccaaaagttcccaaagctagccagttttcccagtcaaggacggtgtaaaacggacggcccagtccctagctttataattacgcctcacttataggggccactttgtccaagaaagctgggtacgcgtaagcttgggcccctcgagggatctctagagcggccgcatcgcgtcgagaatggagcccctcagctcttggacaatgatgtgcaggtcatccacgtccacaaagtgcaggtgcttctcggcaggggctgaggcagcggctgacagctccaggaagttgcctcggccggtgctgacaatgaacacggtgacgcccaggtccttgagctcctgcatgggggggcccacagggtcgctggagccgccatctgtcacccacaccagcactttgggcacccctggccgggcacctgatgcttcagcaaacagctgttccttggcatagaccagcgccaggccagtgtgggtgtcacccatgcgctgggcagaagcacgcaccgcatcctgggcagcctcacccgagctgtgctggccgaaggggaactcggtgtatggccgactgcccacgtgcaccagactggcacgcagggccccggtgcccaggggcagtggagccaccagctgccccacaaactcccgaacccgggagaactcgtagtgagagacgctggctgagctgtccagcaggaacatcaggtcccctcggggggctgatgctggtggaccgcgctccgcgccgctccgcgccagcgccagccgcaagctcagggccaggccgagcgccgtccaggggagcatcgcgcgcgagggacggggcgcgctcggcaacatcccgggaattccggaccggtcca

SEQ ID NO: 136752 - DNA, 457 bp, Homo Sapiens
gaagaattcaagttagttttattcaaaggtcttactgagaatcctagacccaggtcccagcccgggagcagccttagagagctcctgtttgactgcccggctcagtgtctcggcccactgcttggttacgggggccggggctcaggacctgcacagtcacatccatccagctggctccgaagttacattacagcagaatcacatcaaggtttgggcataagagcacttctggttacagattacagaagcataatcgctaaccttggccaacattttctcatgtgcacgaaaagccaaggaccagggtccttcaccttttaaggaatacagtgactcaggcaacagacgcggggccgtgtgttctttcctgttttgttttcaaagcgtctctctggagagctgcagtgtcacagagtaagggcccacagaaatgagcacacacttaggtttgctgctg

SEQ ID NO: 136753 - DNA, 187 bp, Homo Sapiens
ttttttttccaccaatttccatttatttactcctcaacaatcctgatggcaggtattatgtttcccattttgcagacaggtagactgtgtcacagagcggttaaggcacacaatcaaggtcatacagctaggaaggggatgaactgggattcaaaatcaagtccaaactggttcctgagcccttaga

SEQ ID NO: 136754 - DNA, 984 bp, Homo Sapiens
gtatgtcccggttctctgctctcttgtttgtgccttctacggcgctggtctccgttactctggctccggtttcccctgcgtgccgctgatgcctctctcgaaggatgccgtgctgcccatccttctgggattgtttatatgcccgctaggatgtcttggtcgggcaccatgccagcccttgttgctgcagcatgttacttgcatgggcctagggagtccttcttcccctcgtttgctttgctcttccctctagcccccagttgatttaactatcactgtaaagctgctgtaaaccagaatccagttttttattcgtaaggcacccaggatagaactgttcttgccaccctcctatttcagtaattgcctgaatttgccctgaaaggttgacatacttcacttcttgacatttaggaaggacagtggccactcagtggcaggtgactgtcccgaggatgcagtagacaagccagcatgctggctcagactgtaaattaggtagggtttgcatagctgtttctgactacaaaaatagcatgggtgttagttgaaacagtgcactgaaataagcagtggttaagttttgaacctgaatcctttaaagaaattagtctgaggtaaaatgttttaaatcatttttgaccttcagcttgtgcctctgacagagcttttgtcctaaagctgagagtagaagcaggattagatgtggtcatctgtggtgtggacacagcagacctgccatgtggactgacggtagatgggagaaccgcttgttagtgttctgggcttcctgatgatccccccctcctccccgtagaaagtctgtcatccgctgtgacagtgtcagtgaaaaagagaacaagtttccactgccagctctggccctcaccccaactcctttctctaagagtaacggggactgggcatagggaccccgggcaggagctagcggcatcctctaacaagaactacatctgtaaacaa

SEQ ID NO: 136755 - DNA, 454 bp, Homo Sapiens
  misc_feature (421)..(421): n is a, c, g, or t
  misc_feature (440)..(440): n is a, c, g, or t
aacaggagaactttgacatttattaaaaccatcagcaacatatatgagaaaagacatatttgagtttagttaccaagaacatgtgtcacccgacaattaaaatatggatacccacagtctgctagattttgtaaataacaaaaaaacatgctccttgcctgagtttgtccttaaaaaggagtggcaacatgaaggaacccccctggaagatgggttactttaaaggttgtgttattaacaagtgatgtggtcccacacagctgtgggtcacaataactcattatagtacccacccagagagaccactggctcctttaacaccaagtcctaaaaagctatggcaaaacatttttaaaatgttccaccattcacaataaagaccagtggcaataaagcacagtagaaataactgggggtctcncaaaagaaaagattcctcntccagcccatttct

SEQ ID NO: 136756 - DNA, 507 bp, Homo Sapiens
gcggccggcgcggagagcgtcgccgtgagtactcgccaggctggcctgtgtggccgccaccacgggcacagggcggtgcggccgggccacgggaagggtgcggggctcgcccttctccgcagggtggacgaagtgagaggcttggaccgggaggttctgagggcccctcctaggctggacaggcttcactcaggcccggcggccgggcggcatagatcgggcccagagcgtctttcctggggaggcaggtgttgggtgtttttggggtcttcaggggagccccggagaacaggtgtaactgcttccccgggagaggcctcagggcctgtcctggaagcacgggtgccagagagtgttttcgcggggcagccgtatcctctctccctgcggggtgcccgagatagcgctaacctgcgggagtcgcccctcagtgattcttcctagtagtctttgtttagtggcctactcctgagaagggagcacacgggatggagtggagttacctcc

SEQ ID NO: 136757 - DNA, 1182 bp, Homo Sapiens
gcatctacatgctttcgtgttagatctgtgagtctgtgatactacagtcttcatgagacagccatctctatgatgctgaacctcatgatgtctgtcattagtactgagagagaatcgcagctcacacatagtctgtccgaggaccttcagctgtagagactcctcatcgagaagctgatgtgatgtgaggtcaatgtccacgtcatcgatagttccatattctctgatggatacagagttctcactgtagatctccttccagggtttcaatgtctgcatcaagctgtgggtgtcgatacaggtcagctgcacagttccccctgaacgccatagagaaattcctctgattcattatctccctccgagtcgtcatcattccagaactggcctttgatgtccattgggtcagtgggtcacacacactctcaggtcagtgctaggcagcacccctccataccactagccgaaccaaggccaacgagatgggcatttaggagaccacaaagggagacaaggtagggcacgatgtcagggacaactggtgatctgttggggatggcaggctctgctgttgcggtggtaacaagtcactgtccttcaagagcagctgagatccagaatgtgaagatcttggggtgaggttcgtgagatttgaaaataaacagtcaagtgctgatctggatgatcacagaggaataaagagggaggcactaaatgtccagcctgggttgccctggggtgaggggtaggatgacggcagcgttaggccagaagtgccaacttttcacggtctttgttgctgcagaagtcaagaaaaatttagcctctttccaagggctgttgctgcttggtttctgttgctccccaggaaagacgctctgggcccgatctatgccgcccggccgccgggcctgagtgaagcctgtccagcctaggaggggccctcagaacctcccggtccaagcctctcacttcgtccacccctgcggagacggggcgagccccgcacccttcccgtggcccggccgcaccgccctgtgcccgtggtggcggccacacaggccagcctggcgagtactcacggcgaccccgggccgcgcgcggccgcagccgacgggacgagcggcccgggcctcgtgccgaattcgccacccaggcctcgctacttaggggtgttgggtg

SEQ ID NO: 136758 - DNA, 352 bp, Homo Sapiens
cggtcactagaactttaatgatagagactaggatgcggaagcgagcgcccctccccggggcagctggaggctccggctcttctttcccggctccgtcggcccgggggccttggtctcaggcccacggcagcagcgtccggagccgtccgaggagcgcggcgcgcagcgcggccgggaggaagtgggcgagcaggccgagcgcagccagcgccaccagcagccagagggcgcgcgaacaggtagaccaggccgcacagggccgccgccccttcatgaaagaagatgccggcgacccagagcgtggcgaggaacagcgggaagtactcgctgcagttcaccctgcggtgggcgg

SEQ ID NO: 136759 - DNA, 1296 bp, Homo Sapiens
  misc_feature (564)..(678): n is a, c, g, or t
ccgctggtaatacacccaatgggttttcgtccatcgggaaagactacggtctcaccggtgagccaatctctaccttgtacgctctcgcttcgccccctcgcgagcgggccacctaaggcaatggggggcctagctctatcgctcctcgctcaactgttgtttccttcactcttactggttcgaccaaattaatgggggggccaactctcttgtccgcgcatatttgtgcaaataattgctcgggaccttaactaagttgcaggccacgctggtaactccttctcggtccagcccacgtttcaaatccaaagatacgtgcacttcttgtggcacaaggttgctgcacgggagtgactattattactatggactcagtctttgcgatgatctttatctggggttctcgctccctccctggttttccattttcaatggtaacctacgactgtagccaggagtctcgccgtcatgatctctcgaaacaagcaagggcgtctattaccgtcttctccggtgggcctcccggggggagccttccactggcgcgcgcgccccgccccttgnnnnnnnnnnnnnnnnnnnnnnnnnnnnnnnnnnnnnnnnnnnnnnnnnnnnnnnnnnnnnnnnnnnnnnnnnnnnnnnnnnnnnnnnnnnnnnnnnnnnnnnnnnnnnnnnnnnctcggtcactagaactttaatgatagagactaggatgcggaagcgagcgcccctccccggggcagctggaggctccggctcttctttcccggctccgtcggcccgggggccttggtctcaggcccacggcagcagcgtccggagccgtccgaggagcgcggcgcgcagcgcggccgggaggaagtgggcgagcaggccgagcgcagccagcgccaccagcagccagagggcgcgcgcgctcgcgtacagcggtgccagcctgagctgcgcggagcgcgcgtagccctggaagtagcggaggcgcgcgaacaggtagaccaggccgcacagggccgccgccccttcatgaaagaagatgccggcgacccagagcgtggcgaggaacagcgggaagtactcgctgcagttcacctgggctcggtagacgcgctcgaactcgggtgggccggtggtgagcggcggcgacacgcggaaggccctgcgcgccgagatcacctgcagggagaagtaggcttgcagcaggactcccaggagggtgacagcagccagtagagctacctcgtccttcatggtaccgtcggtgtggtggcacgggctgtgtgtgaaggcgagctgggg

SEQ ID NO: 136760 - DNA, 668 bp, Homo Sapiens
tttacatgaaatgaccaataattttattttatatttcaaataactagaattgtacagagtttaattttacagctttagggcaaggataaactcatttttatttttgcagtaaaaggtataaatattgaaaattatgtaggtttaaaactttactatgatatagacacattctcaaattaatgaattttactgagctttttatatcaaacttactgatatttaatgcaaaataataaatattgagattcttggttgtacattataaaatgcatcacagagcgatttattgatgcaaaggaaccgttttggctcatgtaagtgaaaagtctaggagtcacatctttaggcatcgctggatccaggtgctgaaatgatgtcatcaggcccaaaatgtctctttattgcttgattctgctttcctgagttggtatcaactaggagactctctctacatgctccatggcagctccaggctcacacatacttagtattaagattttctcctcttctttaatataaaggaaattcagctagatgatctttagttcaaaattctgtgatatataaataactcgaaataactgctaacagttaatgaaacatctgattcagtaaagagaatggttatttacaattgagtattgcatattaaaaagttggcggccgca

SEQ ID NO: 136761 - DNA, 1086 bp, Homo Sapiens
  misc_feature (61)..(78): n is a, c, g, or t
gtgccaagctaaaattaaccctcactacaagggaataagcttgcggccgcatacgcggtcnnnnnnnnnnnnnnnnnnaacctgcttagaaaagctatgtagttcaattcatcaaaagtttctccatccacggtggtcccctctggctctctctttattggttttggcgggagatggcctgtggggctttttccggtattccacttttgtccagcccccttcgctgactttgctgtcctcttcactggctcttgagtcagtctcagggtgcaaaggcatccctggtatggtgttgggttggtggaggtccctggggcttctcttgaagtcaggcgactggtgaggattgagtgctgactgagaaaccctgtagaactttccagggtatcttcctcttgaaggagtggaatgctgactctttccactgtatcttcctctaggagaagaattgagtgatatactaccacgtccatatttgttcctgcttctgtctgagtatcgacccctctctgaagaggtgtcagtattgccactggaaaagccactgtccctagagttgagatgtagggaagagaagtttttggtcagtccatactgagtaggagacgagcttctggactggttcacaggtgtaatctgttgatacttaatgggcacctggggccgtctcacagcagcagcgtaggaatcctggccatcaaagtgtgagaagaacggtgaccccagaataggattgctctgggaacgctgtaaagaagtgttggatgcaatctgccgcatcctcagagtatctaaccactggcaatcagcacttgagtcggacctgcttccagggttgccatctgaattggtgaataatgtctgaatggcaagttggactgctttcacttcatcctgaggttttgttctactccactgaatcaaatggacatgtttagtgctttttggagttctaacatcactctcatatgtgacagtgcactccacagtctgactttttgctattcctacaatccacttctccattacaaatggtggctttgtcatctttaaaatctccgcatcaggtaggttagtgttgaatgt

SEQ ID NO: 136762 - DNA, 748 bp, Homo Sapiens
  misc_feature (569)..(569): n is a, c, g, or t
ttttcagcagtaacattttgtatctttattactcaggaagggattttttaaatctacccacccacttccccaaagagggcaaaaataaataataattttttaaaaaaacctacggttctaaagccagtcttaataagacaggttcttattaatattattaagccagtttgtgttgacaatcagcaacacttttaccccaacattttctttgttctaccttgattggttcctcagccctaacaactcgagtctgtcttgtttttgaactgcatcttctagatttgaaccatgtgctttaccaacagcatttcaccagcattttactagttgcaaatctgccatgtgctataaagtatttcataggatgtttcatttcttatttgtcctccaagccaacgctgaaagtaaagttttgcttggatcttcattgctcctttcctgtttttccaagggcccatgcaaactcatgaaacaacttgaccattccctcttggagtcacatagaaaacctaacaaaaataccctggttcagtcctttcttcttccattgttcctaggaagtgggctgnagtgaggtatcttcacatgggtccagctgcattctcagtgcaccgattttatgaagataccagagttggagaaattcctcgggcatgggctggaagcccagaaaagggttaagagttgtcataatagtggtggctgatggggctgctcatgcatattccacagagaaaggccagaaagc

SEQ ID NO: 136763 - DNA, 855 bp, Homo Sapiens
  misc_feature (239)..(239): n is a, c, g, or t
  misc_feature (243)..(243): n is a, c, g, or t
  misc_feature (246)..(246): n is a, c, g, or t
ggcccccctctcgggattttttctcaaaaaacccctgcggtttccccccgcgggcgtttttttatgtgggggggaattccaaaccccttgtttcttggcgccgggtttttccttggggaaacaacctttggcccaatttccactttccctacggggccccccgcccccaaacggaatggttttagaaagctttttggagggcccgagggcggcccaccacggacaattcccttctttantttnttntttttgaaatatagatacccatttttatataagaaaaaaattacagggctccatatcacaaaatttaagatcttcctgttaaacatcacacaattcccatcatcattatgccctacatacactctaaattatgtagagtttctactgatatttaacaacaacaaggtccagaaatttaactaaaacagctgcagaactgcatattgggcagtaatctgtgtgtaccacaagagcttgggccaacacagagggccaggattctgcctccatggcctggactcctccacacacagtcagacgagtcaggttcttgcagaccttcaaatctccattcatatcccccttcaagagggccgttttcagaggtgaaggaaggagcagccactgggcacgaaacgccgcactcctacttcagtatgatatgatagctatcattggtttctgctttcattgtgtccagaataaaacatgcttcttcctgaaagttctgtatcatctcatcactgatgagcacatgaattcctgttggcccctgcttgtaaatctggctgatctggcaaggggaaatgctgaaaagctgagcaatttttctgtcaattcaacagctgt

SEQ ID NO: 136764 - DNA, 1144 bp, Homo Sapiens
  misc_feature (41)..(43): n is a, c, g, or t
  misc_feature (1033)..(1033): n is a, c, g, or t
cggactggatcggccagagttactccgaggtgatgagcctnnncgagcactccatgcaggcgctgtcctggcgcaagctctacttgagccgcgccaagcttaaagcctccagccggacctcggctctgctctccggcttcgccatggtggcaatggtggaggtgcagctggacgctgaccacgactacccaccggggctgctcatcgccttcagtgcctgcaccacagtgctggtggctgtgcacctgtttgcgctcatgatcagcacctgcatcctgcccaacatcgaggcggtgagcaacgtgcacaatctcaactcggtcaaggagtccccccatgagcgcatgcaccgccacatcgagctggcctgggccttctccaccgtcatcggcacgctgctcttcctagctgaggtggtgctgctctgctgggtcaagttcttgcccctcaagaagcagccaggccagccaaggcccaccagcaagccccccgccagtggcgcagcagccaacgtcagcaccagcggcatcaccccgggccaggcagctgccatcgcctcgaccaccatcatggtgcccttcggcctgatctttatcgtcttcgccgtccacttctaccgctcactggttagccataagactgaccgacagttccaggagctcaacgagctggcggagtttgcccgcttacaggaccagctggaccacagaggggaccaccccctgacgcccggcagccactatgcctaggcccatgtggtctgggcccttccagtgctttggccttacgcccttccccttgaccttgtcctgccccagcctcacggacagcctggcgcagggggctgggcttcagcaaggggcagagcgtggaaagggaagaggatttttattaagagaaatttctgcactttgaaactgtcctctaagagaataagcatttcctgttcttccagctccaggtccacctcctgttgggaggcggtggggggccaaagtggggccacacactcgctgtgtcccctctcctcccntgtgccagtgccacctgggtgcctcctcctgtcctgtccgtctcaacctccctcccgtccagcattgagtgtgtacatgtgtgtgtgacacataaatatactcataaggac

SEQ ID NO: 136765 - DNA, 576 bp, Homo Sapiens
  misc_feature (430)..(430): n is a, c, g, or t
  misc_feature (441)..(441): n is a, c, g, or t
  misc_feature (478)..(478): n is a, c, g, or t
  misc_feature (507)..(507): n is a, c, g, or t
  misc_feature (513)..(513): n is a, c, g, or t
  misc_feature (534)..(534): n is a, c, g, or t
  misc_feature (540)..(540): n is a, c, g, or t
  misc_feature (547)..(547): n is a, c, g, or t
tttttttccagctcaacccttctttaattctttaattcttccaccatcggattcttttgcttttattagctttgattcttccattttcatcccttctgatgccaggcacatctctgccagttgaaagagtgcagactttccacagcgttttacaggctcagcaccacccaactgcgaagtgtttgaagaaatctctgcaaactgaaacaaggcagatgtttgacactgctttgtagaagcatcagagtgggacgtacttgaagatatctcggcaaactgaaacaatggtgacttctgacgtaattcaggagattctgaaacatcaggcctgcatgtgccagaggatacctctggtgtgccaagagcatgtctccagctaacagcagcatactcaggcctcccatttgagtaggatcagcatccaaagttnactgaggcatnttcagctttgttcttggggttgcaagctcttgagagnagatggaagcccaagttcttcgtggatgnatggtntgggatcaacttttgggagancatttncagattnttcaaaggccctaacctgcagctggatct

SEQ ID NO: 136766 - DNA, 461 bp, Homo Sapiens
  misc_feature (321)..(377): n is a, c, g, or t
tttagcttttctggcttgtttaatgctgcgggatcctcaatgatcataattccatgaggatggcacatatgatcctttctactgggaacatcactaattattatcttgctactggcagaataagaaaaatcaggaaaatgactacatttgtgatcttcttctaactcttcctttctaatttctttgggatcttccatttttatagccattatgtcatctatttgcaatgcctcaaaatttctcaattccttagaatctcttaaattttccttagccgatttttcaaattctgcttccttctgtaacctagtttcatctgtnnnnnnnnnnnnnnnnnnnnnnnnnnnnnnnnnnnnnnnnnnnnnnnnnnnnnnnnnaccatcggattcttttgcttttattagctttgattcttccattttcatcccttctgatgccaggcacatctctgccagttgaaa

SEQ ID NO: 136767 - DNA, 535 bp, Homo Sapiens
  misc_feature (26)..(26): n is a, c, g, or t
  misc_feature (80)..(80): n is a, c, g, or t
  misc_feature (102)..(102): n is a, c, g, or t
  misc_feature (342)..(342): n is a, c, g, or t
  misc_feature (463)..(463): n is a, c, g, or t
ggaaccatcaatataccttttcagtntcaagggttaaatctctcacttcaaatataagacatctcagttggcacaggtgnacgctttattccagacatatantctgaattagctcctcatattctttaataagtgagctgcatctcttttgaccaccccaactgatttgcacgaactgcaacttcttggttaagatgcctggcaatatttttatttctggctgcaaattttccacctagcttggccaggatgtagtgctggttaggtccaaaggcagcgtgacagcaccccgtaaggccacggtggagagcagaatgctgccccaccagggcaggcccgtgngccgtgcacgccgagcagtacttcctccgcaacccgcaccggcgaagacgcgccagggcctcgtaccagccgttcgcatgtactgcagagactggtgccactgcccacactgggagagtgngggcttggcgccgctcgtaggaaccggcgcaagcggcaggtccctagcccaaagctgcagggcagggagcgg

SEQ ID NO: 136768 - DNA, 848 bp, Homo Sapiens
cattgccagaatccaatggagtcgggttccactgaaggtcaggtttccctcagagttcccacccagtagcgtaactgttcccgtggacacgtaaaaccgtgtctggaaattgtgtccttgccccgtggccgtaatttcccggatgatcccataagacatggaagggatgccacacttgggaacttggaatcccacccgacccacttggctttgaaagggtggcagttatctcgcacatatagctctgaaattagcctcctcatattctttagataagtgagcctggcatctcttttggaccaccccaactgatttgcacgaactgcaacttcttggttaagatgcctggcaatagtttttatttctggctgcaaattttccacctagcttggccaggatgtagtgctggtaggctgccaaaggcagcgtgacagcaccccgtaaggccacggtggagagcagaatgctgccccaccagggcaggcccgtggcggcgtgcacgccgagcagtacttcctccgcaacccgcaccggcgaagacgcggccagggcctcgtaccagccgttcgcatgtactgcagagactggtgccactgcccacactgggagagtggggcgcttggcgccgctcgtaggaaccggcgcaagcggcaggtccctagcccaaagctgcagggcagggagcggccgcagccaccgaccgccgagccggcacagcatttctgcaccacggcggagcccagatcccgggcctcacaatccagcggacatacaccggccagccaaggctgatacgcccccggccgtaatggccgaattcccgggcatatgtccggtaccgtcgactg

SEQ ID NO: 136769 - DNA, 902 bp, Homo Sapiens
  misc_feature (692)..(742): n is a, c, g, or t
tgaatgacggtaacacagcaatttgaacctgcaggcaatcgggaacgtataaatatagtatagggctcctggacataccacttaggacaaaagtcagataactttctgaacatagaaggtagaaatagagcacatttattaatagtaggaaaactcctaagcttacaggtacgacatattaaatcttacataacatacagccaaaagcattagaaatccactgccagatatcctgacgcaccatcctgaaaatatgtctgatacataccactaacatatataacaaagtatggcatttatttcacagagagaaaagatagtttcatcacacaaacagatttgcagatttcagctttaagttctagagatatattttaaagataaaaaaaccaagattcacccttcaaataaaagtctctctctataagccattattaatattctctatgctcttacaatgtaaaacatttagaaactgtttgaattctagaaatgttcaccagttaacctacttggccttaacatattctaaattccctttcaagaatcacatcaatgttttcagtccatcagtccaatatgaatggagcaactctatttctttttcttcttctttggtggttcatcgtcagagctgctatctgtgctggtgctactgctactggaagagctggaatctgagtctgaatcannnnnnnnnnnnnnnnnnnnnnnnnnnnnnnnnnnnnnnnnnnnnnnnnnnctttcatcagtgtcactgtcctctgaggaggaagaggtagatgtttcttcactctctgatgaagaatcactggcagaactgtcactgctactgctactggaactggttacactcttagacgcttgtctccgggctattagccgatgcatgggagtcgcca

SEQ ID NO: 136770 - DNA, 558 bp, Homo Sapiens
  misc_feature (518)..(518): n is a, c, g, or t
  misc_feature (540)..(540): n is a, c, g, or t
gcggccgcggcctcccaggcagtgctcatgcgctggccgtcgggggaggcaggggcacagcctccatgtgcgcgcgcgtgtggagctgtgtgcaccgcatgtgtgctttccacaggggcgtctctgcgtccacgcctgcacatcccggcgcacgtgtgggcaccacagaggacacgtgaggggaatggtcaccagtgagccatatttattatttctagagaaatcacgaactgctttctgtaattgcactgtggataaatgttccgagagtctccattgttgtacaggatcttcagttattcgaggggaatgaggcaggtcaagccgatgctagccactagtttgattttttttctgttttatagtttgcgctgcatggtacttgtgaagcttaaatattttgagtgtctactgtgtctaggattgttgggattgtacatatggtaccttccataaatgataaatgatctgaatgttagtgtttatgtcatataggaaatattcattgagccaaaatncactgtttgtgatggctgaatnatttgcctcttgataacg

SEQ ID NO: 136771 - DNA, 1162 bp, Homo Sapiens
  misc_feature (71)..(71): n is a, c, g, or t
  misc_feature (155)..(155): n is a, c, g, or t
ttatctctacactcttgtcacttctttctcgaattaattcattttgttctcttaactgctgctgttcttcntgaagtgagcaaattcggtctgttgcagctgaaagctcttcttgaagctttgagttagtcttttccaagccatctatcttggtntgaagatccccaactgtgcagctcaagtgccggttaagttcttccacataatttttttgatcaaggacatcagtaattctttcatgctccttgccaccatcaagatcctgcacatccttaaggtagagggaaaaatctattactccaacctgagaatccaagtcttctcctttcaagcagagattggcatcgagaacattgagtcccaccagcagaccaacaatcaccatcccttcttcctccatcattaaagcctcaggctcatagaactcgcttaagagatgtttattgtctataagcactttcagataatctgccagtttcttttgcatgagtgcaagataaagccacgctcggcctcttcccacagctgtctttaattctggaagatttctgacactagtcgctatatctgatgcttctggacaaagtttctccaccagctccaaaggaccaaagaatgatttattttggccaataaaactcttcttaactttcagcccatgtttgaggcagtgctccatcactacaaagaactgctgcaagggggcatggtccgcatccaggctgcggcccaggctcagagccgactggagcaacaccttgatgctgagtttcatcatgtgcatcaggttggcacgctcctccatcatctggcacttagaagctgcgcgcgccgtgccgtccccgctgtccccgccgcccagccccgcggccgcgcgcagcgcgctcccgcagctcgccgacaggttcccggtggccctgcgtgccagggtcaggatgggcgccgaccagccctcggccgcccgcggcctcgttgcgctccgcaggtcgcctgggccgggcagctggcttcggtccacgatctcaaactcttctcccggctcaagcgctgacccgggccccggccccggctccagctccggctccagctcccgcccccgcccagcagcgcagccgccttcccggcctcgtgccgaattcggcgcgccgtcgacttcatactc

SEQ ID NO: 136772 - DNA, 570 bp, Homo Sapiens
ctggcatctctgttctgaatgaaaacattaaccttggcaagaaatatgtctttgatattaaaagaacatcaaaggaggtgtatgaccatcccaggagggctctgtacaatgctggcgttgtggacctcgtttcaagaaacaaccagagcccttcacactcgcctctgaagtcctcagaaagcagcatgaactgcagcagctgcgagggcctcagctgccagcagacccgggtgctgcaggatgaagctacgcaagctgaaggaaagccatgctgtgcatggtgtgctgcgaggaggagatcaactccaccttctgtccctgtggccacactgtgtgctgtgagagctgcgccgcccagctacagtcatgtcccgtctgcaggtcgcgtgtggagcatgtccagcacgtctatctgccaacgcacaccagtcttctcaatctgactgtaatctaatctgttgtgcttttgttggacttggcatgtttccatgaactgcactattataaactattaaaatgatagattgtggagaaagtaattattccaacacccatctgccatgcgatgtt

SEQ ID NO: 136773 - DNA, 526 bp, Homo Sapiens
catgtagagaccacattctgcacagaaagacgtcttcagtaattgctttattcaatgtaccttctttagcgtttcactaaaaatgtaattaatttccttcagtttatactatgtcatagtatttatttttaagcccttgtaaagtataaactttcaacctgtgagacagcaaagatctctaccaattgaaagctagaaatcactgtgatcacaattgatttagaaaattaaatgcactagagaccaggggtgtgcacagagacacaggccccccaccgaggcttgcatgctaacagagactgttggcttttctttcccagtcatgtcccgtctgcaggtcgcgtgtggagcatgtccagcacgtctatctgccaacgcacaccagtcttctcaatctggctgtaatctaatctgttgtgcttttgttggacttggcatgtttccatgaactgcactattataaactattaaaatgatagattgtggcgcaagtaattattccaacacccatctgccatgcgatgtt

SEQ ID NO: 136774 - DNA, 357 bp, Homo Sapiens
  misc_feature (329)..(329): n is a, c, g, or t
ttttatggatgcttatgagaaaaaaatttagtcatattcttcaactgagacaggcaacctgaaagaaactagagaataacacatttgttagagttaagtagggctttggacgttacttggttcaagcccatgttttacatttcagggcacagagacacagaagggttgaactgtggcagtgtggggcctgcagtttgggtcttgtgacttgggatcccaggcctctttccattctgcctttcacaaagaagaaagctaaagcagctgagaagatattttcacaataattcaggtcacaatataaaatcatggattggtcccgagtcggnttttgcccaatccaccccaaactaagtt

SEQ ID NO: 136775 - DNA, 717 bp, Homo Sapiens
tcttgttataaagagtttattataaaaaatcacattttttgaatgacatcggacacatagtacctttccacatgtggtagctttgtctcctgattccaagagtcccactctatgtatgggggcttatgtaagtgtgcttatttttaatgccagcaaatttttaattggaaatcaatgtacacttctctttctaaggataagtcttttgccaagttagaaaatataagcttttaaatttcaaaaaagttagaatttccacatcttgaattttacaccaagagggaatttgtagagtttataataattggaaaaacatttttctgaaagaacaagtctttagaaggataactctatgcttaagaaaatgattagctttctaattatgccattaactatgagatttatatcggatgtttccacatttacttaggtgggttaaggtagtcaataggcttgtgattaccctcccgagcaagtccgaaacaagccaaggttattgcaactgctgtgttcactgttcgagttacttcttctggtgtcttccccagggatgggttcacttccattatatctaatcctgagagtagccctgttttgtagatttcttctgtgatgtagagaccttctctgtatgtcagacctcccacgactggtgtgccagtagctggtgtgaaagatgggtccagtccgtcaacatcaaaacttagatgaattggc

SEQ ID NO: 136776 - DNA, 1188 bp, Homo Sapiens
ttttttgttttctatagaagtttattcccaaaacagagcgcggcttcacggaacaatttacacagacaggaaagagggccgctgggctggaggaggggaaccccagagaggggcatctacgaaacctaggacatagtaaagacaccctcccacccccagcaggccactcagcccttcaagagctggggtccttctcggtaaggagagtttgggtcctggctggtgggatttagctccagtcagggaagtagaatttctaatctcccaggaagctgcttcccaagagtatgcatggggtggtgggtgaggagggtgtctgcacagaccaccccccagccctgcacagccactctcccccgtggttagaggacgcctactctcaaggtcttctggatctgctgttaaacgggactcaaggctgaccttcggcctgggagacctgggggttagaaaacccctcaagatggccaggtcagggtcctcacaggtgggtcctccaagtccctctcccactttccctacctttcacttggaaacaaaggaaaaaaaattatctactgtaaacaaagtgtaaaactcaaagttttgagttgtaaacaaagtaaaaacattttttgaatctggacttgtaaacagtaacaaaattttaaagtcttcagttctggacagcagacaaaatagcaaaagtaagagttttgtgaacagggtcgtaacagtcatttttccctttttaagggaataaaggaggagtggaacggagtcacttcctgcagcccaggtgcctagggccacggaggatcctgtaaacataggaggcagtggcacctacattctgggtcttgaattcccttgtttctgctccctttgctcaccttcccaccctacccttcggaatcaattcaagcagggggcagtgtcagggaatcaaatggcaccacagacaacttttgcttgctgcaggggcaggtgaatgacccctccaccgaccctctgcaggaatgtctgactagaggcccgagcccctccccgtgggagacagggaagccttgctctgtaaacacgacatcagctgctccaccagcaccccacagcatcagtcctaggtcataaggcagtaagtggcagggactccacataataaaccctcgtgccgattcgaccacacaggcctcgtacctagcctatatt

SEQ ID NO: 136777 - DNA, 594 bp, Homo Sapiens
tggggctaatgttttttttaattttcacaaagatcagattggatgccctctgatgtggggctgtggagacaacctgacagatctgggatggaggcaggtatagcagcattgggttttggtatcaccatcacctgtaataccaactaatctccaaataaaacccaaactctgtaccttaatctggattgttgtgctctgcaaacgaacggggacgagggccgtttgccatggaaatttatctccatcacctaatccctaaatagggccaggttccacacatatacctcttggtgggaggtattacccaggcttcagctgggattatagggatagttaattgaagggtttaggactctgactgacaagaccctggggagatgagagcctctgctagcacccccagctcctggtcccactgaatctaggacattccagtcacctccacctctggagctgctctgctttggagagaaaaccatggtgtttgcggtctgcactggattcaaatcctgactttgcgatgtaactgtggcaactctggaactctatgtgactaaaaaatggggatacttatttgctctctgtttggggtag

SEQ ID NO: 136778 - DNA, 899 bp, Homo Sapiens
gacacttagaggtggctcaggctgagcatgtttaattatcctcactgggagagttgaaaactacttgacaggttccataatcaataagtcagagattcagatcatcaaaaagggggattgtcacctaccccaaggccacatataggattctgggtcccagagtgagtctgggaggtggaaccctgtgaaaggcagctttgacaggtggtgtctgttggacaccagcttctggcctggccctgctttcttctcgggtaccagacagggtgtgagggcagggaactagctccggagatcactggaggactccgagttggggccagggcttgctgagggcctcacttacagttttttgggggaaattcccaccggccttggcccttgccaccaaagtttcgcacccgatggataatctgcagctgctgctcaatggtcgaggtgatgttcacgtcatctgggatgtggacgtagcggacattgcggcctgtcacaaagaggtcatccagcttgacctgatgcccccaacggtccgtgtaggtgactttggccaggcggatgttcatgaaagcatcgacattgtctatgcgtccgtgggccacgctctcatcccgcaggtccacagtggttacccggccctggaggccctgcagtaggatgatcaggctgttctcagagatggtccgctccttcactgaatggctcaccgccattcttccacaccagctgcctgcttgcacgcgacattccttccgctttccccgtctgggtcgccgccgaagctagcgggcgcctggactggctgcctcccgccggctgcagcaggacggagaaaccatgccggcgaccgggccgctctgtcctccgggcgcagagtgcgtccagtgatctgcgagtcaccg

SEQ ID NO: 136779 - DNA, 578 bp, Homo Sapiens
  misc_feature (543)..(543): n is a, c, g, or t
tttttaaaataaaagcacattttacttaagaggtatttttgaaacctcaatgcaatcatctcattttacatgaaaactctgagcttagagaggtacaaaaacttgctcatggtcatagcactacttagttacagcacctggtcacctgctcccaatttcataatcatttcatcagatatcagtatgaattttgagaaaaataaacaacaacaaattgagtatttttcaagaataaacatttcctatattaatctgatataaaaaacacttcacattatttcaaactagtcaataaattaacattatataccaaaatagcaataagttaacaatcccttcttttcacattttaatcaagtatattctcaaaagtcttacaatattacattaagatttaatgtatcaaatccaacagcatttcatctcaatatttaaccaatattatggttcaatattgaatagtaaaaaggaagctaaactttatctctttgtgtattgatttcagcaattctgacagtgtttgatcctccatgcacggtgttnctacgcatcaaggaaagcacagctacaaggggtaa

SEQ ID NO: 136780 - DNA, 472 bp, Homo Sapiens
  misc_feature (148)..(160): n is a, c, g, or t
  misc_feature (165)..(183): n is a, c, g, or t
ctgaaaatcagccttttaatctagttgaacccaacgaggggggaaagaactaaaacatttttttcccttcaaattttgattataaaaataacgggtcaaaggggtcttttccataggaaactgacatcccctatgtcctcaaagttgnnnnnnnnnnnnncttcnnnnnnnnnnnnnnnnnnntttcaactcatgtgcatgccacacatttccatctatagtgacaaatcataggggcttgattgggaagtaccatctttcgtggaaggtgccgggtgtataaaggagtacctttgggcagcctggtcccaaagctgaaagcccaggtctggtgcctctggggcaggttggctgcccaggggagaaaccaaatcattaatgtgtccacctagtgggggctgcgagattgtcgaagcctggctgagagctgatcgatatgcattctgggatgttcccctgagggaagagactg

SEQ ID NO: 136781 - DNA, 2889 bp, Homo Sapiens
  misc_feature (2719)..(2731): n is a, c, g, or t
aagtatgaagtcgacggcgcgccaattcggcacgaggcgggggcggggcggccggaggaggcgttggcagcgggctcggacccacgcggcgccgcggcccgcctggcctgcagcgctcccacccccggcggcggcacgatgccctttgacttcaggaggtttgacatctacaggaaggtgcccaaggaccttacgcagccaacgtacaccggggccattatctccatctgctgctgcctcttcatcctcttcctcttcctctcggagctcaccggatttataacgacagaagttgtgaacgagctctatgtcgatgacccagacaaggacagcggtggcaagatcgacgtcagtctgaacatcagtttacccaatctgcactgcgagttggttgggcttgacattcaggatgagatgggcaggcacgaagtgggccacatcgacaactccatgaagatcccgctgaacaatggggcaggctgccgcttcgaggggcagttcagcatcaacaaggtccccggcaacttccacgtgtccacacacagtgccacagcccagccacagaacccagacatgacgcatgtcatccacaagctctcctttggggacacgctacaggtccagaacatccacggagctttcaatgctctcgggggagcagacagactcacctccaaccccctggcctcccacgactacatcctgaagattgtgcccacggtttatgaggacaagagtggcaagcagcggtactcctaccagtacacggtggccaacaaggaatacgtcgcctacagccacacgggccgcatcatccctgcaatctggttccgctacgacctcagccccatcacggtcaagtacacagagagacggcagccgctgtacagattcatcaccacgatctgtgccatcattggcgggaccttcaccgtcgccggcatcctggactcatgcatcttcacagcctctgaggcctggaagaagatccagctgggcaagatgcattgacgccacacccagcctaatggccgaggaccctgggcatcgccagccttgcctccagtgccctgtctcctttggccctcaatctggtcccaaatctggctgtgtcccaaagggtgtgtgggaagtggggggaaagtagaggatggctcgatgttttgcagctacctcttttccccgtgtttctttttagacaaattacactgcctgaagttgcagttcccctttccctggggagccccaagaacagagtcaggcaagggggtggggagtccaggggatcttggggacccctcctaggagagctgcagtctcttccctcaggggaacatcccagaatgcatatcgatcagctctcagccaggcttcgacaatctcgcagcccccactaggtggacacatttaatgatttggtttctcccctgggcagccaacctgccccagaggcaccagacctgggctttcagctttgggaccaggctgcccaaaggtactcctttatacacccggcaccttccacgaaagatggtacttcccaagcaagcccctatgatttgtcactatagatggaaccctgacttctgccccatcccttcctgcccaacctagaacccaggcctcaagtctttaccccacccctttcttgttcttccaagaagcagatgcccagttgctcagcagcagcggtagagacttgaatctgcccaccagtcacaaggcgggtcacagattcctcttcctctcttctcctcgttcctctgaaccctccaccaatgtgcctcagcctgtgtgctgtgtggcaacagcattctggttcccactgccaagatctcccaccactctgctgggatctgcagtggcagggagtgggggttgtgtaaaggggaagtcatcttttgagatccagatagacatggtttgtgcacttacgtccagatgggaagcatccttcctgcaaccctaaaataatcatgcagcctctcagacggacgccatcggtcccaaggccttaggtggaggaagcaaagcaggccaggcctgtcctgtccgtggacctctaccttctggactccctacgggtgcagagcacttgggtttctctacagccatcgtggcccacttgacactgtgctcctccatcagctggtcacatgccaacacgttcccagcccctgaggcagctccagggtgccccacctgctcctgaggtgggtccctaccctgctgctcctcttcatcctttcccttttgtcctgaaagggaggagcaatggtccaggcattaattccacccagggaattttagctatgccctcatgtcccagggagagagccacacgcctgttttccatttatagcaagattgtttgcatacttttgtaatgaaggggagtgtccagtggaaggatttttaaaattatcttatggatagctcaagtctctgccatttgtaatttttggctctaagctccgattggagacgcttctccttgtgcatgtgagttgactgatgttgtgagtgtaaatgcatttggttatttctggtatcggtggccacttggatggatttttttacattctgttccccagttacaggaaggagtccctttggtgtgtgaatatgtgtgcctgtagagggtggggcagggtggggtggggatggaaatgtgtggcatgcacatgagttgaaattcttttatgcatttttttgaagnnnnnnnnnnnnncaactctgaggacataggggatgtcagtttcctatggaagagacacctctgacccgttattcttataatcaaaatctgaagggaaaaaaatgttttagttctttccccactcgttgggttcaactagattaaaaggctgattttcagaataaaaaaaa

SEQ ID NO: 136782 - DNA, 598 bp, Homo Sapiens
ttttttttccatttatgtctttattggttctggtgatcagtacaactgctttgacttcaagtgtcatcattcactcttttgtgttctagtgatcattcattccagcctccagtgagaaacacaacagaggcagtttttattttaataatcatgcaaagaaaaatgtagtgaaattaaaaataaatggccctccttcaggtaaagaaaaatactaggataaattcaactacatttatgaagaagaaattcaaatactgaatcaaaaatttgaaaactcctgattgtattgtgttttcttttcactggtaatcaaaaccaagtaatcttagtagctaaaacttcaataaatgactgacttcttgctggtgttaagagttaaaacatattattagctcaattcttgctgtctatagtcattttaatttctggcttatgtttaattgttatatgatcttcatacacctctactacatgtagaattactcatatttctttaagatggacaactcataatataaaaataaaaacaatgaagttgtgtgaaattttagataacagaaaaactggtgcccaatagctagccattttaaaaatatct

SEQ ID NO: 136783 - DNA, 1700 bp, Homo Sapiens
  misc_feature (571)..(583): n is a, c, g, or t
tgaacaagagtaacctatattttgggagttggtgtgcaataaggctaaaacaaccaaattataaaacagtatacctgacacagtatgttgaggaaatatgcatctgtttcatagtttttgtacttatgttaatgccttactaagctacacatatgtaaatagtatgttttcttgctaatatattaaatccaatagaatcattaagttctcattctcctttgtgacttgtaactttatcagataatttaatgatgaaagcatatgcccaaacctgcagatcatatgtactgtcatctattacaaccagaattctcctcacatttcatttttcttaaaaggaaattgagaatacctgcaacatcgttaaagagaatgttgtagtgtgaataaaaactagaactcagtggtctatgaagtatgtattattttggcaagtgattttttccttcctaagaataagatgaacatgtccaaatgttacctgtgccaacttcacagatacagaagtatccagtcttcatttcctcaatgccccaattagactgttctagtaaacgaatcaatatagttnnnnnnnnnnnnntcaatacaggttcaacaaaagagcaccatcctattagggaactgagtaacatgtgaaaatgaagttgtcattataatcaaaatgttgcccaaattctaacaaacccaagctgttatactagtaccatggacgcagtccctagtgttaacctaaagaactctgggacaagaacatgatttgaaaaataaactccaaaattataactgtaataaatggtgatacagactaattttaaagcacaagtgacatgttacactgtattgcttcttgaactttccaaacaatgcttgtccatgtcaggtttgggccattctcctgctaagacagagagcattttatttattcaaaagcccagatttcaatatcttggataaagaaatcttccttcttagaaagtgtacgattcccaaacgttttacaagaatggcttcttcccatggtagagatctccatcaagccaaagcgcaaattctccctcctccaccaccgaaagctagtgaatccatgtctcctttgataaaaaacatattatctcctgtccacttaaagacctcaaactccggacagaatgttaaaaacaaaggtctctccagtaccataaaagccatcactcactttcagtggctcagatgctaacgcaccaaaaacctgtccatcactgtctttaatcaccatcagcactggggtgtctaaacctgtcattgttcgataaagagttttcaagcttgtgccatgttttccagtaccataaacaagagtccatggatagccaattgttcttggtggaagatgcttggtaagcttttcaatttgatctggcagtaaaagttcactgggatcacttaggtttggtcgaaaagattcagactccaggtctgctttcactgtagcaacctgctttgaatttatgtcttcccttgtagtaatcagagtgtatttatgattaattggttgatgtcttctcccttgttttcccataccagagacgagacatttcctttccagggcaaattaagttacataaaatcacgtaagaactgttttcaaaagcattcttcctctgtcccccggccgtaatggccggaattcccgggcatatgtccggtaccgtcgactg

SEQ ID NO: 136784 - DNA, 511 bp, Homo Sapiens
ttcgattctacaaatatttattttgtcattactgagtgcaaagtatcagggaagtgtagctgtggaataccaatgcttaagagaccacagagttcttgaaacccacgattcttcttcaaatccagatgtgtgtgagccccacctcatcaactctgaaggctgaaggatcagctggaatttctgctgcagggtgtccctgataagctcaaaagcatcagaacggagggagctttctccccttctctcatctcattaaaatgagctttcttgttgtggggggttggggagggacctttaaaaccaaacaatggtgccctcttatcatcttttcctgtcctcctttctccaagtttccagaggggaaaataaaaccaaacaaacccctcagcattgtgctctcctgacctctaagctcttctcatataaagtgtactgttagccttctgtatcccagcctaatcacacttccctttcccttccacacttgtggacttcacagatttctctggac

SEQ ID NO: 136785 - DNA, 441 bp, Homo Sapiens
cacggattaatttaaatgattctatcaggcattctgatatttaacaactctattaaaatatttatagaaaaataaaagcaaattgatataaatttttgagcaattctatttttgtagaaaaaagataacctgtaattataaagatgttttttgaatgtgtagtatcctagaaaataaaagttcttgtgaaacttaaaaaatgaatgaaaaccaactaatagcatgcaagatcatagatcctgcattaaatttttatttgtgaaaatttgaaaattatgagctataacttataaagtttgccttcttatgtctaaaatcttttaaaggattatttgcatttatgtaaaactggaaatgaagttatatatgagtgcaaagaaattgacttctgctcaaatatgtgttgataccctacagtaaattgaattaaatttttatccc

SEQ ID NO: 136786 - DNA, 999 bp, Homo Sapiens
  misc_feature (36)..(36): n is a, c, g, or t
  misc_feature (82)..(116): n is a, c, g, or t
cgccaactgatcaccaattgggcctagccgccgtanttccgaacgacgagcgcagcgagtcagttgagcgaggaagcggcgnnnnnnnnnnnnnnnnnnnnnnnnnnnnnnnnnnncagtcgacggtaccggacatatgcccgggaattcggccattacggccgggggctgaggtggagccgcgggacgccggcagggttgtggcgcagcagtctccttcctgcgcgcgcgcctgaagtcggcgtgggcgtttgaggaagctgggatacagcatttaatgaaaaatttatgcttaagaagtaaaaatggcaggcttcctagataattttcgttggccagaatgtgaatgtattgactggagtgagagaagaaatgctgtggcatctgttgtcgcaggtatattgttttttacaggctggtggataatgattgatgcagctgtggtgtatcctaagccagaacagttgaaccatgcctttcacacatgtggtgtattttccacattggctttcttcatgataaatgctgtatccaatgctcaggtgagaggtgatagctatgaaagcggctgtttaggaagaacaggtgctcgagtttggcttttcattggtttcatgttgatgtttgggtcacttattgcttccatgtggattctttttggtgcatatgttacccaaaatactgatgtttatccgggactagctgtgttttttcaaaatgcacttatattttttagcactctgatctacaaatttggaagaaccgaagagctatggacctgagatcacttcttaagtcacattttccttttgttatattctgtttgtagataggttttttatctctcagtacacattgccaaatggagtagattgtacattaaatgttttgtttctttacatttttatgttctgagttttgaaatagttttatgaaatttctttatttttcattgcatagactgttaatatgtatataatacaagactatatgaattgg

SEQ ID NO: 136787 - DNA, 625 bp, Homo Sapiens
tagattaggtggaaatggccttttatttaaatatgaggaaaaaattagaattaaggacagtaagattatttttaaaaaagcagacaagttagaacaaacattttattattaaaataaacttttgtataaaagcattacagatcaaaagctgtatttacacttatcgattcaaggtccaattatgcatcaaacattgaatggcacagcaatggtttacatatgcaagtaaattggacatacaaacacttagattccacctctaccaaataccttgattaatgcaaagaggagggggaatactgacacaggaaacctgcccagaaactagactggcagagatgtcaggttaacaaactgctaaaagttacatctccaaaaaggcacttatcattgttataaaagtgcttaaaatctaaacttgaaccttgtgcctggtttataaatttacaagaaactgcaaagaaccacagactagtttttaatatcaagtttccatacaaaattgtccaagaatttatttgcaataccttacatgtgaactgaaataaactttgcaaactacaattatactaaagttttatactgaaaattcaaatcagcttactcataatctccagatagctct

SEQ ID NO: 136788 - DNA, 864 bp, Homo Sapiens
gaattcccgggatgcaaggccccagcgaacgggggtggtgtttcatagggtaaaaggaactgcccattctgagaccatcctaaactccatgcacaagtaccagccgcgcttccacatagtgcgagccaacgacatcctgaagctgccttacagcaccttccgcacctacgtgttcccggagaccgacttcatcgccgtcactgcctaccagaatgacaagatcacacagctgaagatcgacaacaacccgtttgccaagggcttccgggacaccgggaacggccggcgggagaaaaggaagcagctgacgctgccgtctctacgcttgtacgaggagcactgcaaacccgagcgcgatggcgcggagtcagacgcctcgtcgtgcgaccctccccccgcgcgggaaccacccacctccccgggcgcagcgcccagtccgctgcgcctgcaccgggcccgagctgaggagaagtcgtgcgccgcggacagcgacccggagcctgagcggttgagcgaggagcgtgcgggggcgccgctaggccgcagcccggctccagacagcgccagccccactcgcttgaccgaacccgagcgcgcccgggagcggcgtagtcccgagaggggcaaggagccggccgagagcggcggggacggcccgttcggcctgaggagcctggagaaggagcgcgccgaagctcggaggaaggacgaggggcgcaaggaggcggccgagggcaaggagcagggcctggcgccgctggtggtgcagacagacagtgcgtctcccctgggcgccggacacctgcccggcctggtcttttccagccacttgcacgggcagcagttctttgggccgctgggagc

SEQ ID NO: 136789 - DNA, 877 bp, Homo Sapiens
tcagctcgggcccggtgcaggcgcagcggactgggcgctgcgcccggggaggtgggtggttcccgcgcggagggagggtcgcacgacgaggcgtctgactccgcgccatcgcgctcgggtttgcagtgctcctcgtacaagcgtagagacggcagcgtcagctgcttccttttctcccgccggccgttcccggtgtcccggaggcccttggcaaacgggttgttgtcgatcttcagctgtgtgatctgtcattctggtaggcagtgacggcgatgaagtcggtctccgggaacacgtaggtgcggaaggtgctgtaaggcagcttcaggatgtcgttggctcgcactatgtggaaagcgcggctggtacttgtgcatggagtttaggatggtgaagccgtgcttgtcagagatgttgttggtcagcttcagcttgtggaaggccacaggcttagccatccactgctcccccgtggctgggctgtctgggtggatgtacatgcgtttgggcatctcagggtcggccttgcccgccaccatccagcgcgagttgtggaacttatagcggcaatcgtcagcggctacaatgtccatcagcaggatatacttggccttcttgtccaggccgctgactcgcaccttgaagggggggaacatccgcctcccggacttggtgatgaccatctccgtgcctagcttgtggaactggtcccacagctccttggcctccagcgtcaccttggggtcgtcctccacctcgtcctcgggctccaggctcttgagggagcgcagatgcgcggcgggcgggtgcgggcccagtgccgagacgtgcagccccgcctcggccgctgctgccgcacgccgccgccgcggccgca

SEQ ID NO: 136790 - DNA, 162 bp, Homo Sapiens
  misc_feature (129)..(129): n is a, c, g, or t
agccgcataatgtatttcttaataattatttcttaaataatacttgaggccatgcacctataatacaacactgagaggctgaggcaggaggctcacttgaggcttggagttcgagaccaccctgcgccnacagggtgagaccctgtcgctaccaaaaaaata

SEQ ID NO: 136791 - DNA, 960 bp, Homo Sapiens
taaaattggatcacttccctgtcattttgggcattggggctagtgtgattcctgcagttcccccatggcaccatgacactgactagatatgctttctccaaattgtccgcagaccctttcatccttcctctattttctatgagaattggaaggcagcagggctgatgaatggatgtactccttggtttcattatgtgagtggggagttgggaagggcaactagagagagaggatggaggggtgtctgcatttaagtccaagacactgcttggctcgctccccgagtcctcctgtttctgacttcctgcataactgtgagctgaagggtttcctcatctccccatcttaccccatcatactgatttctttcttgggcactggtgctacttggtgccaagaatcatgttgtttgggatggagatgcctgcctcttgtctgtgtgtgttgtacttatatgtctatatggatgagcctggcatgaacagcagtgtgcctgggtcatttggacaaatctcctcccaccccccaatccactgtaactctgctgttcacacattacccttggcagggggtggtggggggcagggacacactgaggcaatgaaaaatgtagaataaaaatgagtccaccccctactggatttgggggctccaacggctggtccgtgctttaggagcgaagttaatgtttgcaccaggcttcctgtagggagatccctccccaaagcagctggtgccaaggcttgggggcgtcctactgagctgggttcctgctccttcttgggctccatgaaggaagtaagaggctagttgagagcctccctttggcccctttccggtgcctccccgcctggcttcagatttatgagcattgccctcatcgtcctttcttgttccagggtcagtggccctcttcctaagggaggctcctgcttggcatgggccaaaggccggggtggg

SEQ ID NO: 136792 - DNA, 502 bp, Homo Sapiens
gacagccagggacaggagccagggtgggggtagttttgtgggaaagcagaactgaagttagcttaagcataaaaacaaagaaaaatcttcgcttttcatgtatgtggaatccaagaataaccataggctctaccagaccagaagggtaaggatggacactaaaatgaaacaaataccaaggtattccttctgctgcagcctggagaccaccgagagtcgagctggggcacacacacacctggccgggacccggcagggacaaggcgggccgtggcctcctccaccaagtctctctagacaattcagggcctgctttccccagctccatgcatggctggactggtgattccagggtgcagaagggattcatattcccagaacgctttaagtgtacacctgcaggataaagagataccggttacattattaaatgattctagggattcactgggggatatttttgttgcttttactttcatggttagagctacaaagaaagtaa

SEQ ID NO: 136793 - DNA, 455 bp, Homo Sapiens
  misc_feature (244)..(252): n is a, c, g, or t
aggtcatttcattgaaaaattggcaatagcaacaaatattagatgaagggctttgtgtttacagataaaatcttttgtgttgcagtatactgtagtgtttgcaaaattggaaaagatttaatcaaaataaggtgatacacatgcatcaaaatattagtattctgaagaaaaaaatttttcacagaactacagaattcctcattttgggaattatttaaatttgcagcagattttaaagatttgnnnnnnnnnaaaatcaagctagcagttttgcatatacaaacattataattgctaatatacaagaatcagtgaagagtcacccccacccagtatccctccctcctcttctagggtgaagtcacttgagacccctatttgttaaatgcatttgcaatattctgtttgtgttctaagaggcagtgccttatcaacattttattctatttttctgt

SEQ ID NO: 136794 - DNA, 489 bp, Homo Sapiens
tttaagttaatgcaattctttaagactaatctgtaactaggccccaagcctgatcaggacaactctaggacaaggcagtaacagttccaaggcccaaactctatggtttccttaatcctctaaagtatgtaatctaaatcagtctatacagtctaaatagtaccttctgggataaggattgatacatgcacagcaagggtgagagaatggacaaggaccaactccatccccctgtgtgtcaatcagcctttactgctcttctacttaggtcctaaccggcagtattgaaatggaggtgggaagatacaactccttatgaagtaagacacagcaagagggcacactagcaaagcagtcctatataggagaaatgcttataggcatgacactgcattttaaatacaaaaaattaagttctcttccaattccaatctcaacagagggagccataagaaagattctcctctgagtcttctacaaaaacaaggg

SEQ ID NO: 136795 - DNA, 908 bp, Homo Sapiens
  misc_feature (72)..(72): n is a, c, g, or t
aagtcttggtttcccttggtttaaggtgtaaaacaatgcaggggtggcctgctcgggagaccttgccagcancttagacgagggcttagggaagcaccccgaatcttcggagtgggtgcctgggttaacattccctgcaagaccacagcattgtagtgttaccagagataaagtacgtatagttaaggatgacaagaaaggtatttagtttatgtcgtcaccttatacatcctagtgatgaacctagccaaactatgcctccatgcccttccctgaaaataacctgagtcggttgacgaaacagactgagcagcgtggctctcagtccactttatcagaggttgagctggaaaaccagagggttaatgtagtctaccagcagcttgtgcggataaccaagagttcttggctgttgcagtatccactgtcccaaaggctaagccactgaggtggaaatcaatcgcagcataaagaagactgcacttaacctgcataacctgcgagactgcctggagaggacaaaagaggatcaggatcctcatttcccacaaaatgtggtgtgggttttagtgtctttatgcattagctgatacagagaagttaacatttccttcatagctttcttattttcaattaaatgctcacactcaaaaaatacacaccctatgaatatgaggtggctcttttcttcaaattttttaaaataaagaggcaccaatacccgttcatttatgtattagaagtctggtataatcaccaataaaacagaaatagcatctgtgatcgcacaccggagaaaaaagatcaagagacatccttagccactgtaaaactgtacttgagcactcagatgctctggctaagcggacgcgtggtcgacgatatcccggaaattccggaccggtccg

SEQ ID NO: 136796 - DNA, 657 bp, Homo Sapiens
tgtctcagctgtttaagtcaatgccttttatttttagtttttctgaagacaaagctcttataagaatcacagatgaaagatcaggcacaaatcacattttcccccttaataacaaaatacaaatccaataattttagaaaatcagtttttagtgacccagatgcctggagaaaagctgccaggatttttctggtctatcgcagaattttctacatcaatgagaaggatgctgcatatcttggctgtattatttcctaccgtgagaaaagagacttagtatatggaacatgcttttttcagaaaattggcagtaactgactttgaaggaaagttggttaagttggacttgcagctggaacttgggaagcactgtcccctccttacccccgaggaaggagacacagaggcacacttccagtaagttcttggttcagtgggtcactcatgtcttcaacagccagatgtcattgcgccgaccgtagggcttcatgggagggtcataacccgtgcagaagtagatgtccccccggtaggtggctgtgccctccagggcagcacgccaacaggtggcttgtgctacatagtctgcttgcttggataaccaccaggctgcattggatagacagtggatgcctcgcggtgctgaatcttaacgct

SEQ ID NO: 136797 - DNA, 875 bp, Homo Sapiens
agctgttcaagtcaatgccttttatttttagtttttctgaagacaaagctcttataagaatcacagatgaaagatcaggcacaaatcacattttcccccttaataacaaaatacaaatccaataattttagaaaatcagtttttagtgacccagatgcctggagaaaagctgccaggatttttctggtctatcgcagaattttctacatcaatgagaaggatgctgcatatcttggctgtattatttcctaccgtgagaaaagagacttagtatatggaacatgcttttttcagaaaattggcagtaactgactttgaaggaaagttggttaagttggacttgcagctggaacttgggaagcactgtcccctccttacccccgaggaaggagacacagaggcacacttccagtaagttcttggttcagtgggtcactcatgtcttcaacagccagatctcattgcgccgtccgtagggcttcatgggagggtcataacccgtgcagaagtagatgtccccccggtaggtggctgtgccctccagggcagcacgcagacgggtggcttgtgctacgtagtctgtttccttggcattaccaccaaactgcatggaatagacagtgatgccttcccgttcctcaatcttaacgcttttgtcactgggagctggtgggtcgctttgaaattggtttggaatccggaaccagacttttaatttcttctgcagagagccatcttcattggggaacacagcaaaggaaatagggactgtcatccccatcccaattcccttgtcattggtgccccccgcatactttgcgaccttgggcattgcttcctcgtgccgaattcgccacccaggcctcgctaccttg

SEQ ID NO: 136798 - DNA, 1080 bp, Homo Sapiens
gtaacccaaaagttgccaaattcccccaattaattttagagaaaaatccagtttttttaggtgacccccagatcccttgggagaaaaaagctgcccaggatttttttcgggtctattgccaggaattttttaccattcaatgagaagggatgctgcatatcttggctgtattatttcctacccgtgagaaaaagagacttagtatatggaacatgcttttttcagaaaattggcagtaactgactttgaaggaaagttggttaagttggacttgcagctggaacttgggaagcactgtcccctccttacccccgaggaaggagacacagaggcacacttccagtaagttcttggttcagtgggtcactcatgtcttcaacagccagatctcattgcgccgtccgtagggcttcatgggagggtcataacccgtgcagaagtagatgtccccccggtaggtggctgtgccctccagggcagcacgcagacgggtggcttgtgctacgtagtctgcttccttggcataaccaccaaactgcatggaatagacagtgatgccttcccgttcctcaatcttaacgcttttgtcactgggagctggtgggtcgctttgaaattggtttggaatccggaaccagacttttaatttcttctgcagagagccatcttcattggggaacacagcaaaggaaatagggactgtcatccccatcccaattcccttgtcattggtgccccccgcatactttgcgaccttgggcattgcttcccgtagagcctcatccacaggcttatctgtcacttctactgtggcaaatttgccgccttcacaggccctttcttcataggcaacttcttccttgtcccctttgcttaggacctgccaaggccacgtctctacgcttccgaacagcgagttcttgatcatgcccaacatgttgtagccgagacgctcccgacgcacgggaggacgtgaggtggcgggggcgacggagcaccacgggcagcgaccaccggcggcagggcggcagggcggcagggtggcagggcggcatcccgggaattccggaccggtaccac

SEQ ID NO: 136799 - DNA, 466 bp, Homo Sapiens
  misc_feature (29)..(29): n is a, c, g, or t
  misc_feature (70)..(80): n is a, c, g, or t
gcattgactggaagctccttttctccacntctctcaacacactcctcaccgtatcttttaaccccatttnnnnnnnnnnntctttaaagccaaaattaggaaaataactccctacttttcccaaagtgaattttgtagtttaatgttatcatgcagcttttgaggagtcttttacactgggaaagtttgtagaaattttaaaataagttttatgaaatggtgaaataatatgcatgattttaagtattgccatttttgtaatttgggttattatgctgatggtatcaccatctcttgaaattgtgttaggtttggttattttgtctggggaaaaaatatttactggaaaagactagcagttagtgttggaaaaacctggtggtgtttacaatgttgctaatcattacaaaacattctatattgaagcactgataataaatatgaaatgcaaaacctttttaaaaaa

SEQ ID NO: 136800 - DNA, 781 bp, Homo Sapiens
  misc_feature (408)..(438): n is a, c, g, or t
gcggccgctccatctcccaaggagacttaagaatggcagatggagtggccaatgttgagcacattctgaaaattggatatctaaatgatagagtggatgagcttttagaaaagtacatggactcttatgatattgttttagtacaagatgaatcattagaagtagccaactctattttacagaagattctataaacaagcattctccaagaagacctctctcctgtgggtgcaattgaactgttcatccgttcatcttgctgagagacttatttataatatatccttactctcgaagtgttccctttgtataactgaagtattttcagatatggtgaatgcattgactggaagctccttttctccacctctctcaacacactcctcaccgtatcttttaacccatttnnnnnnnnnnnnnnnnnnnnnnnnnnnnnnnaactccctacttttccaaagtgaattttgtagtttaatgttatcatgcagcttttgaggagtcttttacactgggaaagtttgtagaaattttaaaataagttttatgaaatggtgaaataatatgcatgattttaagtattgccatttttgtaatttgggttattatgctgatggtatcaccatctcttgaaattgtgttaggtttggttattttgtctggggaaaaaatatttactggaaaagactagcagttagtgttggaaaaacctggtggtgtttacaatgttgctaatcattacaaaacattctatattgaagcactgataataaatatgaaatgc

SEQ ID NO: 136801 - DNA, 1167 bp, Homo Sapiens
  misc_feature (55)..(348): n is a, c, g, or t
  misc_feature (1078)..(1078): n is a, c, g, or t
  misc_feature (1122)..(1122): n is a, c, g, or t
agtcccacaatagaacattattctgcaatgagaatgaaaagatccacaatcagcnnnnnnnnnnnnnnnnnnnnnnnnnnnnnnnnnnnnnnnnnnnnnnnnnnnnnnnnnnnnnnnnnnnnnnnnnnnnnnnnnnnnnnnnnnnnnnnnnnnnnnnnnnnnnnnnnnnnnnnnnnnnnnnnnnnnnnnnnnnnnnnnnnnnnnnnnnnnnnnnnnnnnnnnnnnnnnnnnnnnnnnnnnnnnnnnnnnnnnnnnnnnnnnnnnnnnnnnnnnnnnnnnnnnnnnnnnnnnnnnnnnnnnnnnnnnnnnnnnnnnnnnnnnnnnnnnnnnnnnnnnnnnnnnnnnnnngtatttctgtaacttctttttttaaaggcaaatgggcatttttcaagagacagggaactaatactcatcatttagatagaaattccctgctttcatcttttgttaggaaaaataagaattttggaagtgctcctcttttgtaaaatcttaatcaagtaatgaacgaaaatagtcaatacaacaggaaaagagaggaacagaagcctcaaaagatgaattcctatcaagcagtaaacagttcttttccagaactctttgtgacttataattctagaaggtccatcagaggcctcccatttctattcagaaatgcacttctaaagttagacagttgtcacagtcttagggagcaatgagttcacaatttcaatttattatcaaaatatttccatctgatgacaaacctgaaaagacaggagatgcagagctacataggtgcagatttgcccttttatcagagacactctcagggacagatttaattttgaaagtccaatttgaaaaccacaagtatatatatctctagacaactgtccaatggcaatttttaccctaaagtttgtgcttaaatcttttcatcaatatgatttataagtttaaatagtctcaaattttcatctgtatatcgctttatagatcttggttcacaactgtttattttaagctgaaacttcaatattcattgattacctataataatagttactcataaatgtagttaataattaantataaaaattattatttttccatttatataaactctgaaaaatncaagttttgagagatagaccaagaaatgcttagaaaattgcggga

SEQ ID NO: 136802 - DNA, 491 bp, Homo Sapiens
  misc_feature (83)..(83): n is a, c, g, or t
  misc_feature (174)..(174): n is a, c, g, or t
atttaagaaatctggtaaaagcctctagtccatctctatgggaaagcagtttgtcaaatgattcaccccatttcactgcctcnttcaggggagactcttgtttctttggccaagtgcccagatctactggagcggggtgtcttcatgaaactcaggtttctgcacaagaagacnttagtctatttcttttttccttagctctgattttggcttctttgcttgtttcttcgttttcctgaaccatgtattaacttgaaaaaagttttttcttttgattcacacatatttatttgagaaaagaaaagcaatgttgtttccatcttctctctaaaatgaagagatgtctaatttattacatccttccctagttcatttattaatactattccatacatatacatagtagaataaaaagttatcacaactcttacagtaatgtttacaaaaaagcagtcaagagctgcgtttctttctgtctctgcagaaatccc

SEQ ID NO: 136803 - DNA, 436 bp, Homo Sapiens
  misc_feature (19)..(19): n is a, c, g, or t
  misc_feature (49)..(49): n is a, c, g, or t
  misc_feature (63)..(63): n is a, c, g, or t
  misc_feature (98)..(98): n is a, c, g, or t
  misc_feature (158)..(158): n is a, c, g, or t
  misc_feature (417)..(417): n is a, c, g, or t
gagccacatgtccactttnctttttaaacatggcaactaactttttaanggaagaaagaagancaaagaatggtatatttttggtcccaatatgcttncccatatttagtgtcatctgttagaaatatttcaaaagggatttagggaaaaaagaattncatcttcagagtggatttataaagagaaaaaccttagtcagaaataataggtgacagcattgaaaaagaaagcaggagataaatcctagaggcccagaaaataaaaggagtatctagagtgccggatctggaaatggaaataacctggggcaaagaagggttattccagtttattatggacttgggcctctgcaaaatatgctccttagacctttcttttagtctctatggtccttattcccaagcaactccatctacntcagctctactgaaacttg

SEQ ID NO: 136804 - DNA, 1055 bp, Homo Sapiens
  misc_feature (178)..(188): n is a, c, g, or t
  misc_feature (718)..(718): n is a, c, g, or t
  misc_feature (876)..(906): n is a, c, g, or t
  misc_feature (914)..(986): n is a, c, g, or t
ggtgctcatggacctgtcatcctttttataaaaaggctcactgacaagagacagctgttaatttcccacagcaatcattgcagactaactttattaggagaagcctatgccagctgggagtgattgctaagaggctccagtctttgcattccaaagccttttgctaaagttttgcacnnnnnnnnnnncatttcccatttttaagtagttactaagttaactagttattcttgcttctgagtataacgaattgggatgtctaaacctatttttatagatgttatttaaataatgcagcaatatcacctcttattgacaatacctaaattatgagttttattaatatttaagactgtaaatggtcttaaaccactaactactgaagagctcaatgattgacatctgaaatgctttgtaattattgacttcagcccctaagaatgctatgatttcacgtgcaggtctaatttcaaagggctagagttagtactacttaccagatgtaattatgttttggaaatgtacatattcaaacagaagtgcctcattttagaaatgagtagtgctgatggcactggcacattacagtggtgtcttgtttaatactcattggtatattccagtagctatctctctcagttggtttttgatagaacagagaggccagcaaacttttctttgtaaaaggctggttagtaaattattgcaggccacctgntgtctttgtcatacattcttcttgctgttgtttagtttgttttttttcaaacaaccctctaaaaatgtaaaaaccatgtttagcttgcagctgtacaaaaactgcccaccagccagatgtgaccctcaggccatcatttgccaatcactgagaattannnnnnnnnnnnnnnnnnnnnnnnnnnnnnnagacagannnnnnnnnnnnnnnnnnnnnnnnnnnnnnnnnnnnnnnnnnnnnnnnnnnnnnnnnnnnnnnnnnnnnnnnnaagcaagttctgtctcagccttctgagtagctgggactacaggtgcatgccaccacaacctgctaattt

SEQ ID NO: 136805 - DNA, 936 bp, Homo Sapiens
tttgtatgtataatatacatatatatttttaaatatgctacacataaaaaaagactatggcactttacagaatatatgtttaacaaagatcattacaccacagatgtttgaaaactatacaaaaacccttatacaattaatgcaacattgtttgaattattagcacacaggtttaaagaatccacagaatccaaggcaaatatttctgcctcagagttcattgagaagcgcagcccatcccatcccgtcatgagactttctttaagccaatttcaggcaaaataaataagactttcctggtagtaataatggtcctatttattagaaaaataagtgtgagccaacaatctatttttaacatttctttctagcatattcctcatacccagtggtttttaaacagctgtgtggaagagcatggtttagactagcatgattttagatggtcctttcatcccaagcctggctaatggattcaaggtttaaaagtcccaacattacctttttactatttactaagtcagtgtttaggtagtttttagtggtttggggttgtgtgtgtgtgcatgcctgtgcttttgtcttctgttgcattcagattaataacataaacactatcgagtgagtttattatggccaagaagtcacactcccttgtgactgttcccaggttgatctagaggtacactgccaccttagccaaagagcaggtgatggacatgctcggaggatcctgtgagcttaggacttaacttgtaaggacactgagattgtaaacctagtgtcagaaaatggtttctctatccaagaaagaaagaaaagtgagtcttctgataagtttatggaaaaattttgtgtttttcatcaaggtttgagacttggttagaacattataaatgtacacacagagacagaagctttgtccagtggctcccc

SEQ ID NO: 136806 - DNA, 1009 bp, Homo Sapiens
  misc_feature (404)..(404): n is a, c, g, or t
  misc_feature (847)..(847): n is a, c, g, or t
  misc_feature (863)..(863): n is a, c, g, or t
  misc_feature (903)..(903): n is a, c, g, or t
  misc_feature (935)..(935): n is a, c, g, or t
  misc_feature (977)..(977): n is a, c, g, or t
gcggccgctgaggtgctggcctgccggctggctggcgacgggggcagaagcgacgagaggcgcgctcggcacccgcacccccgtgcccccgcctcagttgtctaaacttcgggctctcttccacccgctctgcgcgcccagagtcaacaacttcttcacccccctccgcccccgcccttccctccgtcagccccgggagctcgccgcgcgccggggaccaggaacctccagcgctgagatgtggccgtgaggcgttggcgggcggcgaggagaagctcggcggcgtcccggggccggagggccgtggggccggggcgcaggggcgcgagcaccccgcgcctctcccccgcctcctcctgccgtctccgccgctgcccgtgccttgcaagcagcagccggagctngccaagcgtcagggccggggagatgtcgtcgtcgtcgccgccggcgggggctgccagcgccgccatctcggcctcggagaaagtggacggcttcacccggaaatcgggtccgcaaggcgcagaggcagaagcgcttcccagggcttcgtcgcagtttcgcagccagggcagccaggcagagctgcacccgctgccccagctcaaagatgccacttcaaatgaacaacaagagcttttctgtcagaagttgcagcagtgttgtatactgtttgatttcatggactctgtttcagacttgaagagcaaagaaattaaaagagcaacactgaatgaactggttgagtatgtttcaactaatcgtggtgtaattgttgaatcagcgtattctgatatagtaaaaatgatcagtgctaacaatcttcccgtacacttcctccaagtgntaatccagattttgantccagaagaggatgaacccacgcttgagggcctcttggcncaacaattacagttggggatatgaattcttcnttgagatttttggagagccctgattttcagcctagcattgcnaaacgatacattgatcaaatcgtacaacagct

SEQ ID NO: 136807 - DNA, 611 bp, Homo Sapiens
  misc_feature (311)..(311): n is a, c, g, or t
  misc_feature (443)..(443): n is a, c, g, or t
gctccaaatgctacgacctgaagaatggttgcagattgagatatcaaaaatctcagaaaaatatataatatatttgtatatctctgtatgtctattatttaaatttcacattcctttaaaagtggttattcagtcagtagctgctgaaggaggctcttctgctgggcctggggggtctgtggtcctgacgtgggcttttgagttcccagtggaccaggctggttcaggtaagggtccccgcctacccagattcaactgtacactggacgtcagcaaacacctgaacctgttgcacctgctgggttccatcntgcttctgttttgagaaggtcagtggattgagagcttggttgcagtagaggcctgtgtgtctcagtgcgggatcatttatctgctcagggcacacagtgttcattcctggcatctgcaaagagctcatctgncatctggggccatcattgggttcatgttctgaacattcgtatttccacctgccatggaaacggtgatgctcatgttgttgtatactcctggctgtgcaggcgtgggctggttctggacagcttgactgaacacattgttgtttcctatcgctccttgctgccaggccc

SEQ ID NO: 136808 - DNA, 584 bp, Homo Sapiens
  misc_feature (536)..(536): n is a, c, g, or t
ttttttttgctccaaatgctacgacctgaagaatggctgcagattgagatatcaaaaatctcagaaaaatatataatatatttgtatatctctgtatgtctattatttaaatttcacattcctttaaaagtggttattcagtcagtagctgctgaaggaggctcttctgctgggcctggggggtctgtggtcctgacgtgggcttttgagttcccagtggaccaggctggttcaggtaagggtccccgcctaccagattcactgtacactggacgtcagcaaacacctgaacctgttgcacctgtagagcattcctctagtctgtagtcaccacagggaagaactcttctgtcttcttgtcctgggggttccatctgcttctgtttttagaaggtcagtgggatgagagctgggttgcagtagaggcctgtgtgtctcagtgcggggatcatttatctgctcaggggcacacagtgtttcattcccggggatctgcaaagagctcatctgcatctggggccatcattggggttcangttctgaacattcggattttccacctgccatgggaacggtgatgctca

SEQ ID NO: 136809 - DNA, 533 bp, Homo Sapiens
ctaatactggttgaaagccctttaatttttcagtgacatcataaagattttttatcctactgaaatcatccatagaatggttttaaaccagttttctaaatatcatgtattttttaaaacctaccactggatacccagactctgaaactgggcttctcccaatcttggcaacattagcaatgatactcactttcagtattgatggcaaccctataggaggcgtgaccattccaattttgattttatttttaaagtgtgaactttccagaaccctgagcaaaatgagtgcagcgattttctttttgtaggacaagaagacagaagagttcttctctgtggtgactacagactagaggaatgctctacaggtgcaacaggttcaggtgtttgctgacgtccagtgtacagtgaatctggtaggcggggacccttacctgaaccagcctggtccactgggaactcaaaagcccacgtcaggaccacagaccccccaggcccagcagaagagcctccttcagcagctactgactgaa

SEQ ID NO: 136810 - DNA, 1248 bp, Homo Sapiens
  misc_feature (23)..(23): n is a, c, g, or t
  misc_feature (126)..(126): n is a, c, g, or t
  misc_feature (160)..(160): n is a, c, g, or t
  misc_feature (1144)..(1178): n is a, c, g, or t
gtgttactgtcatcaccacctcntggtcatatctccactcactcccgatgtggatacagttatccacctgatgctgattttcttcttattgtaggacaggctctcatgtcccagctatctcgactntggctcagtatcctcctcctcacctcccaagtgntagataccaggtgtagccactgtcccagacattattactttttacatgctaccacttactatcatgtacaatcagagccatagagacctcaaagggaaagaattaggatcagtgagcttttcatggaatttgtacttaagcatgactttacaaagtaccatatagacaatgtcaaagcaattattttttcatttccttctatccacatgtaggggtgaggctatttcacagagatagtgtatcattttactaaaacattatttattttaactatatttaggacttaaattaaaaaaaataattttctcattcatctagggacaatttctgacccgcgacagaaagaggactccagtggagagctcaggaaactcctagaatggtgttgctgtaataagaagatgtcaacagcagtagaaaggtttggttgcctcaaactgaaaatgactttggtttggtaacttttaagatcacagtgtaagaaaaccgagatcatgggctggagagattacaaatatctttctcttattgcttcttcttcagtaagtgtttattactagccaagttgggggtggggagacaaaattcaaacagcagaaaataacatctttgggtctactctttcctttcaaaagttttcttggggataagctgggaaatagatcatcaatgggtttattgactaggaggaagagggggagtctgtctaaatcatcaaaatgtgagagagagattaaaaccacattctctcatcagagtagaaagttatatttaaaaaaagaaatagaggattgaaaatgtgagctatagcctctaattcataaataactcagctgttttatggtggaatatttagagacagagactgaggctaagaccatttggcctctccaaagatgaaatcgaggcttttctaacttccagctgtgagtccccggccgtaatggccgaattcccgggcatatgtccggtaccgtcgactgnnnnnnnnnnnnnnnnnnnnnnnnnnnnnnnnnnncggccgcttcctcgctcactgaactcgctgcgctcgtcgttcggtatgacgaccctagcgcccatagtgc

SEQ ID NO: 136811 - DNA, 896 bp, Homo Sapiens
tgggtccctggggccttgtcgcccaccgccccggtgagtccagtgttccccatgaagccttgttcacccctgggccctttttctcctgggagaccaaacacaccaggcctgccctggggcccggagtccccggcccctcctttggtccctggggttcctggagctcctgggttccctgtgtcacctttgcttccaggaagagcagcagaacctggtggccctggtgggccccgataacctttcaggccaaatatccctggcgcccctttgtcaccaggtgccccagagatgttggaagggggtgtgatgcctgggaacccctgaagtcctgggctcccaggtgggcctcgttcccctggagctccttggtctcctttctgtcctgggactcccacagggcctggaagggtgttggcctctcctgggtcacctctttccccaggagggcctgggaagcctgggtctccgtggatgtcagaacctggggatcctggaaagcccttggtgcctggcaagccgtgtaagccgcggatcccacggagtcccggaaaacctggtaagcccggagctcccggccagccatcatctcctttgccaccaggcagtccaatccgccccagctctccctgcgaccctggaggcccagtcagccctggaaagcctgtttgtcctttaagtccaggagggccttggactccagtcacgcctgttatcccagggaagccgatgtcaccttctgttcccttctctccaaagaatcccttcagacctggtattccagtggtgccccgctcccccttcaggcctggtcttcctggtaaatttatagtgtccccgatgtcaccgaaatcaccagtcgcgccaatctcgccatacaggcctgctctccctggggc

SEQ ID NO: 136812 - DNA, 860 bp, Homo Sapiens
  misc_feature (150)..(150): n is a, c, g, or t
ttaattgacaaaaatgcctgaaatcagaggattttcatctgccgaaaactggtgtctaactgtaagcaaaagttgttttacggtggcaaaaggagaatgaaggggatcgaaaggacaaacctgactttgcctctcttctaccctccaccncactatcctctggaagagagttgcccggtgttgggagctcaggagtgtcttcagaaatctctccacgaagcttcctgccatctgtcatgaaatctcctcacaagaccacatcagggaacatctcaaaatcatcctcagaaccctgcaccaatcatgtgctgatgagaagccggtggtgagcagttgtacaagatccacagagcttgatgggaatttgtcaacccccaaatgtttctaaagttgatcttatagatgctgaaaatgtcaccctccctttccggcctcttgtgccttgctcctgtcattcgaagctgcccatctgaagccctctagcctcaacctgaaggttattgccatggatctggcccagatgcacgcctgtcaaggacctggaaatgacctttacattgaagcatctgctgctctgtgtgcaggctctgatttcagtgtgtcaggaggactgcagtgggtccagcttgtagctcatggaagtgctggtgatgataatggctggctcaggtgccacaggcctccatggcaaggtttaggagacaatgaactcgatggttgcagtggagaagtcaatgtcagccaggatttcgttaagactcttttaaggatttgcaacgctatcccatcatttcgcgggttactagagtcctgcatgtttggctgtagagcaagggtgacgcgtaacttctggactttgg

SEQ ID NO: 136813 - DNA, 1902 bp, Homo Sapiens
caagcttatcgctaggtacgaggcctggggttgaattcggcacgaggggccggagcagccggaagctagcatggcggcgccggggctgcggctacacacctagaggtggcccggggcaagcgcgccgccctcttcttcgctgcggtggccatcgtgctggggctaccgctctggtggaagaccacggagacctaccgggcctcgttgccttactcccagatcagtggcctgaatgcccttcagctccgcctcatggtgcctgtcactgtcgtgtttacgcgggagtcagtgcccctggacgaccaggagaagctgcccttcaccgttgtgcatgaaagagagattcctctgaaatacaaaatgaaaatcaaatgccgtttccagaaggcctatcggagggctttggaccatgaggaggaggccctgtcatcgggcagtgtgcaagaggcagaagccatgttagatgagcctcaggaacaagcggagggctccctgactgtgtacgtgatatctgaacactcctcacttcttccccaggacatgatgagctacatttggcccaagaggacagcagtggtgcgggggataatgcaccgggaggcctttaacatcattggccgccgcatagtccaggtggcccaggccatgtctttgactgaggatgttgcttgctgctgctctggctgaccaccttccagaggacaagtggagcgctgagaagaggcggcctctcaagtccagcttgggctatgagatcaccttcagtttactcaacccagaccccaagtcccatgatgtctactgggacattgagggggctgtccggcgctatgtgcaacctttcctgaatgccctcggtgccgctggcaacttctctgtggactctcagattctttactatgcaatgttgggggtgaatccccgctttgactcagcttcctccagctactatttggacatgcacagcctcccccatgtcatcaacccagtggagtcccggctgggatccagtgctgcctccttgtaccctgtgctcaactttctactctacgtgcctgagcttgcacactcaccgctgtacattcaggacaaggatggcgctccagtggccaccaatgccttccatagtccccgctggggtggcattatggtatataatgtttgactccaaaacctataatgccctcagtgcttgccagtgagaagtcgaggtggacatggtgccgaagtgatggaggtgttcctggcaccagttgcggttgctctttgggattgctcagccccagctgcctccaaaatgcctgctttcagggcctacgagtgaagggctaatgacctgggagctagaccggctgctctgggctcggtcagtggagaacctggtcacagccaccaccacccttacctctctggcgcagcttctgggcaagatcagcaacattgtcattaaggacgacgtggcatctgaggtgtacaaggctgtagctgccgtccagaagtcggcagaagagttggcgtctgggcacctggcatctgcctttgtcgccagccaggaagctgtgacatcctctgagcttgccttctttgacccgtcactcctccacctcctttatttccctgatgaccagaagtttgccatctacatcccactcttcctgcctatggtgtgccatcctcctgtccctggtcaagatcttcctggagacccgcaagtcctggagaaagcctgagaagacagactgtgtacgtgatatctgaacactcctcacttcttccccaggacatgatgagctacattgggcccaagaggacagcagtggtgcgggggataatgcaccgggagcctttaacatcattggccgccgcatagtccaggtggccaggcatgttttgatgaggatg

SEQ ID NO: 136814 - DNA, 362 bp, Homo Sapiens
tatatactcatagctcagaaatgctgagttaatagctcatgaatctcaagagaggtgcaaacctgttggtcattggcaaaggggcagattcggaacagtaggagccagggtgctttttggctttcttttctgagccatgggcattctgtctcttgctcacccccacaggacatgatgagctacattgggcccaagaggacagcagtggtgcgggggataatgcaccgggaggcctttaacatcattggccgccgcatagtccaggtggcccaggccatgtctttgactgaggatgtgcttgctgctgctctggctgaccaccttccagaggacaagtggagcgctgagaagaggcggccgca

SEQ ID NO: 136815 - DNA, 865 bp, Homo Sapiens
  misc_feature (12)..(12): n is a, c, g, or t
gcttttgaaganaatctttaagaatgccattttaatttaatatccagaaccctgaatttaaaaaactaatgaaagaaattaactgttaccatcaaaatggttgttgctgagctgtgtgagtaggaattctatgcttttttagatgcaagaaaattaacacataatgcaagtttaatttgaaatcacacaagttatgtatgtaggctcagatagtagccatgttcacttttattactaatagcttaactgaaacagccatctattcattcctccagcaggaatagcagcaccaagatcttctaaaattctttacatataaagcttaagtcattatccaagtcccattctttgcatgctccaattcttgttatcttatttaacataaaagcaacaggatttggagagttactatttgctgtattaaaacagttacacagcatcttgtactgtcaaaaagcaaaatactgtgaatggcagcctgtcttcacagctctaaacttgaagctgccaaacagtcactgcttgtgccagcagtggttttccacagaaaaatagcagaaactaaaggaatcatggcacaatggatttctgaattattttgtctaccattggtcctggggcttagtaccttcccccttgtagactatatctgctgatcattccagaatcatctttaatgaaggaaaggcatcaggtcatatagcgggtaatggctctcagagcataaaggagttctgcttgcatcctagcttctataagaagcagattaacatgaacctgaatataaaataccccatcatataaggaagggttacaagcattaacaatcagtttttcagtgaatctaatgaacacataaactacg

SEQ ID NO: 136816 - DNA, 667 bp, Homo Sapiens
  misc_feature (15)..(15): n is a, c, g, or t
gatgctctcatcatngcagtaaaaccctcggtggtaaggcttgatggtgcttgtctcgatgatgaggaagggaggcccgccatgaagaggcagaagaggtcgaggcagatgagcagcacccgcttgctgccgctcctcctcgggttgttgttgagcgccgggctgccgccgttcttgctctccgggacgatcgctttgtcgtacttgtagttttgcatggcgctggctgcggcgcgagcctcccgccccgcgaagacgtcccgcaacagcagccacacacccaggcgcccgggtcgcctcctggccgaggctgctgcggatagtggcgggtcggccccggctccgggcgcggcggctagagtgcagccggggctgcctgcctccaactgcagaaggtggtgttttctgctcctcctgcgcgcctctgctttcctctgtcaaccctaaatcgttctaaagtccaaggggaagagagccagatcccgagcagaaacttttgcagagctgcgcagcttggggcgcgctgttgtggcgcgcgtctgagtgcgcgagcgagcgagtgggcagcgcgggcgctcggccaccttcctccgcagctggttccttaatgaatgggagctgcgctgagcccagcaactccggagcgccagccccaactctaactttg

SEQ ID NO: 136817 - DNA, 530 bp, Homo Sapiens
  misc_feature (16)..(16): n is a, c, g, or t
  misc_feature (24)..(24): n is a, c, g, or t
  misc_feature (43)..(43): n is a, c, g, or t
  misc_feature (71)..(71): n is a, c, g, or t
  misc_feature (89)..(89): n is a, c, g, or t
  misc_feature (95)..(95): n is a, c, g, or t
  misc_feature (105)..(105): n is a, c, g, or t
  misc_feature (120)..(120): n is a, c, g, or t
actccacaagactggnattaaggncaagggcacattaaaaccnaacataacaaacaaacaaacttattttncaataataaacccttcanactgtntcacaacagnctgaaatgaactggnacgtttccaagtgtgaggagaaaatattgcagacattagttttcaatggaaccccaaacatttgttctacagctttttctcccctcttatcttcctactaacggacattgagattgtggctgcaagaaaagttttccagttacttgataaaggcctagcatgaccccaaataagcacctaatgtgtttggcacaatcacatttagctttgtgatatgttgctcttcaaaatagagtcctttgttgctgagttgagttcaatttctcttgaacattaactgctcttctggaacttcagctcaagagagtggcctcctcttccacaggaaggatataggttgtgcccatttgcaattctagttcttgggactagcaattactgagaatgaagagaggctccagatctgtctg

SEQ ID NO: 136818 - DNA, 1007 bp, Homo Sapiens
  misc_feature (58)..(58): n is a, c, g, or t
  misc_feature (66)..(66): n is a, c, g, or t
  misc_feature (99)..(99): n is a, c, g, or t
  misc_feature (105)..(106): n is a, c, g, or t
  misc_feature (132)..(132): n is a, c, g, or t
  misc_feature (137)..(137): n is a, c, g, or t
  misc_feature (172)..(172): n is a, c, g, or t
  misc_feature (176)..(176): n is a, c, g, or t
tgggttgccagaccagtgtccaatgggctgaaagggtagtttttccaaccactggggncgattgcnagccacccacacctttgggggtgagaacatgcntaagannatccttttcggcaaatatggcttctngtccnttctcatgaaagcccttttgcaccaaaacaccttnttcngcagtgagagcagaagaagtgctctgggtgccaggtctggttcattgctgtcagcactttatccaggatgggagcagcgcagtaagcacagcgtggagaaaaaagttggtggtagtcgttggggcagtaggccaagccactccgctcaaagaagggactggagccaatctcttctttgcaatgagtacagacaaaatgctcaggatgccatgattgccctagagcatggatcaccttcccagcaatcggtttctggcaggatgcacaatggcccttgggcactgtggcaatgccaaggtcctgcaattcctgctcgagacccccaagcattgagtccagggaggccttgtgatcctgcttgtctggtaagtgcttcttgccagcatctgctctcactgcaaccttggcctgcatctcagtcaggtgagccatgagctcatccaactgagcagctgctgacgttttagaaggtggtggtgattcctttggctcttgggcttcactgtagacattgagctcctggatattggtagtatacacgagctgcgccggcaagggacttgtgttatcctgaatagaaaggatctccgaagtctcatcaaggttagtctcctttctggaatgctgatccaggggaagaggagctgggttggaatattcatcactgtcctgaagggtggagcgttccagttcctccaataaggcatctaactcttccattgtcctacatccaagatgctcttgtctcacaggccgtgaggaacagctttggcatgtgctgaagaagaggaccgcaaaggaactggatgagacagcataaggcagcctcta

SEQ ID NO: 136819 - DNA, 1018 bp, Homo Sapiens
  misc_feature (876)..(876): n is a, c, g, or t
  misc_feature (879)..(879): n is a, c, g, or t
  misc_feature (912)..(912): n is a, c, g, or t
  misc_feature (960)..(960): n is a, c, g, or t
  misc_feature (1001)..(1001): n is a, c, g, or t
tctgcacggctcccaggccgcaggcccaccttcgtgtccgacttcttgggaggagttcccgggtgagggtcgtgagtgtgtcaactgcggggccctgtccacaccgctgtggcgccgagacggcaccggccactacctgtgcaatgcctgcggcctctaccacaagatgaatggcgtcaaccggccgctcgttcggcctcagaagcgcctgtcctcgtcccgccgcgccggcctctgctgcaccaactgccacacgaccaacaccacgctgtggcggcggaactcggagggggagcccgtgtgcaatgcctgcggcctctacatgaagctgcacggggtgccgcggcctctggctatgaagaaagaaagcatccagacacggaagcggaagccaaagaccatcgccaaggccagggctcctcaggatccacaaggaatgcctcggcctccccatctgctgtcgccagcactgacagctcagcagccacttccaaagccaagcccagcctggcgtccccagtgtgccctgggcccagcatggccccccaggcctctggccaggaggatgactctcttgcccccggccacttggagttcaagttcgagcctgaggactttgccttcccctccacggccccgagcccccaggctggcctcaggggggctctgcgccaagaggcctggtgtgcgctggccttggcctaggtccccaggccagcccatgtcaggggaacagcctggaaccagaccacccactgagtcacctccgtgcctgctttgctccagcacagcagagaccagcaggccccccaacccagagactgggtctgctggagtctccacacagtgtggggaggccttctggacagacggcanggngccccagagcaagaaggctggtgagggaagggncagcttcccaccccacgtacagcaagggactcccaggtgcggccaagntccggaccagctggcccctgggcggagcaacgcagggcacnacaacgacaattgaatt

SEQ ID NO: 136820 - DNA, 511 bp, Homo Sapiens
  misc_feature (62)..(62): n is a, c, g, or t
gagtgaataaaccatacacactgcatttgggctccctgctgctcaagactatttcctttggnctctttatcttatgggctacatttccaggggttcccttgttttctggcttctaggtagatttggctaatgggagacactggtaggaagactaggggagagagagaaggaaagaagccaggatatttccctagatttctttcttctccctgaggtattactgccagtgtctatgtctccaaggtgggtgcagcaactttggcttctgggtccaagtacaccagctttcccatcacccctgcaaccataggagtggtcttggcttcctagttatgttcctatcagggttgcctcactatcttctgggcttctctgctctttcgtcaccagtggaattctttatattaaatttcctctgttttaaagacttcgagtgggttatattttccttgctggaccgagttcaaatgaaaagtctgagttgtagggaaaacatcttttttattattat

SEQ ID NO: 136821 - DNA, 707 bp, Homo Sapiens
  misc_feature (195)..(203): n is a, c, g, or t
cctctagcattaattcttttataaagaatgctaaataaattacattttttgttcagtaaaactgaagatagaccatttaaatgcttctaccaaatttaacgcagcttaattagggaccaggtacatattttcttctgaacatttttggtcaagcatgtctaaccataaaagcaaatggaattttaagaggtagannnnnnnnnccatgatgcattttgttaataaatgtgtcaagaaaataaaaacaagcactgagtgtgttctcttgaagtataagggtctaatgaaaaataaaagatagatatttgttatagtctgacattttaacagtcatagtattagacgtttcgtgaccagtgcattttggactctctcaggatcaaaatacgagtctgccaactgtattaaatcctcctccaccccctccaccagttggtccacagcttcctggtgggtcgttgtcatcaaatccattgggccgaaatgaacatgaagcagatgcagcttggagggcccgggctcgagcattcaactcttgttcctgtaaatatagtttattgtcttttgttatagcatccataagttctttctgtagaggtgggtctccatttatccagagtccactggttgggttattaccacttaaaccattagtactatgctgttttttatacaaaagcacataagctgtgtcctttggaaacctg

SEQ ID NO: 136822 - DNA, 1242 bp, Homo Sapiens
  misc_feature (43)..(43): n is a, c, g, or t
  misc_feature (71)..(71): n is a, c, g, or t
  misc_feature (147)..(147): n is a, c, g, or t
gggattttccttctttccagggaaggcttcttgaaagggtctnacatatggtgccttttacggttttctcnccttcaatcccggtgggacgattcgtcttgtattctggccaggtactggggatttccattgggctccactgagctncccgcgtcgggaaggcccgccggcaggttgcattggagacaccgcacaggaagcctgccaggctggggtctgcgtagggaggggttccggaacacaattggccacttgtcggtgcacatcagcttgcgaaaaggagcctcgggcctcccagcctggtcccgtgaaatacacctcaatgtcctctttctgcaccttgtcacacagtaggaagatctcatccccaccgaggcagctgccagagtttcggttcactcggcagatcttgagctcggcagtgttgggggcacgattgtcaaagatgggatgagaaaggacaggcggcaggcggaggggcctgcctgatgggtcccgcactgtcacctggaagcagagccgcacagcattcaggtcgtagtccccacgctgctcttctataggaacttggaaggggttgttgttggtctggatgcgctgactgatagcctgctccaggtcccgcttcttcacacactggattcccaggttctggaaactgtggatgcagcggtccgggcagagctcagcctcatagaagccatcccggcagtcctttcctacaagctcgtgggggtgaggccggtgaggagggtccttggtgaccagggagatgcgcactgtccctggtcctgtgtagccattgatcttgatggtggggtgggtcttggtggtatctgtgctcctctcgcctgggatgctgcccgcggagcgcccctcgcacttgtagcggaagcgcatgccccgctgcttgggctgctcaatgatctccacataggggccagaggcctgggctggctctgccgggaagatgagggggaacagttcgtccatggccggggtcccgggggcggggccggggtcgcagctgggcccgcggcgtgcactacagacgagccattcgccagaggcggaaatgcgccgcgcggcccgccgtcgcgtcactgcccggaatccgccgcgcctgcgcgctgccaccgccgccgcccggcgcaggggccgggagcaagtgcacgccgcgcggaggacagaagaggctgacagcacagcacgctgtccgggggtcggggccaagtgcgcgcc

SEQ ID NO: 136823 - DNA, 604 bp, Homo Sapiens
  misc_feature (523)..(523): n is a, c, g, or t
  misc_feature (550)..(550): n is a, c, g, or t
  misc_feature (583)..(583): n is a, c, g, or t
  misc_feature (590)..(590): n is a, c, g, or t
gtaggctgcctgatcttggctgatctcttaatcacttgggagtgaaaatatgataatataggtggcggctcactaattcttattcattctattcttaatttatttttattattaaaaaaatgtgttgcctaggctggacttgaactcctgggctcaagcgatcttcccacctcagcctcctgagtgactagctacaagtgtgccaccgtacctggcttcattctgtttaacatttcttaaaaacactcttcctttcttttccatttgggaattaattttctgttcttagtttcatgttccttagaaaccatctttcacatggttgtcacaaaaacttttttttgatacacattcacttatctgcttaaacacctttctcttaaagtattctttctgtgaaatatttcatattcaagatgctccctaaatggtgagttcacagtttgcatgtaagtttggtaattttcaggtgatctttgttccctaaacatttcgcgatatctataactctgcctaagttgtnccctcagtctggaattcctttggtgtncactactcataatcagttccttttttataggtntagaatnacagatggttttta

SEQ ID NO: 136824 - DNA, 557 bp, Homo Sapiens
aacattatcaatattaaacttttaatatcaaatactttttttacatcattactaatttatataattattataaaacaaacttcaaaagctccatgaaatcagtaaggtaaaagtccttactgaatatcatataaacatcaggtgttaccaggcttgatttcaggaaatgtcactggtttgtgatagaaattacctataaaacaatgtggtataaatgaatatctgaattttacaattatgtggctacagtttgcccattactcttcataggtattacatctttaaagttcatttccattcacacatttttgctgctgaagcctcgttcttcttaaagactctagctgctttgctctcagccatcgttctcttgacagcgttgtctgaccagcactgagagacagacaccgagccaccacgagcagctggtgaagatcatcagcagtgatgctctgagggtcgttcttccgcatttccacaaagtcatcttcaactgccttggttatttcatcagatatgctatattccaagaatctcaaaagagttagataaatgcg

SEQ ID NO: 136825 - DNA, 1451 bp, Homo Sapiens
  misc_feature (210)..(222): n is a, c, g, or t
aatttttaactgtactgaataggttccccaatccatcgtattaaaaaacaattaactgccctctgaaataatgggattagaaacaaacaaaactcttaagtcctaaaagttctcaatgtagaggcataaacctgtgctgaacataacttctcatgtatattacccaatggaaaatataatgatcagcaaaaagactggatttgcagaagnnnnnnnnnnnnncttcatgcctgatgaaagctttggcgaccccaatatatgtattttttgaatctatgaacctgaaaagggtcagaaggatgcccagacatcagcctccttctttcaccccttaccccaaagagaaagagtttgaaactcgagaccataaagatattctttagtggaggctggatgtgcattagcctggatcctcagttctcaaatgtgtgtggcagccaggatgactagatcctgggtttccatccttgagattctgaagtatgaagtctgagggaaaccagagtctgtatttttctaaactccctggctgttctgatcggccagttttcggaaacactgacttaggtttcaggaagttgccatgggaaacaaataatttgaactttggaacagggttggaattcaaccacgcaggaagcctactatttaaatccttggcttcaggttagtgacatttaatgccatctagctagcaattgcgaccttaatttaactttccagtcttagctgaggctgagaaagctaaagtttggttttgacaggttttccaaaagtaaagatgctacttcccactgtatgggggagattgaactttccccgtctcccgtcttctgcctcccactccataccccgccaaggaaaggcatgtacaaaaattatgcaattcagtgttccaagtctctgtgtaaccagctcagtgttttggtggaaaaaacattttaagttttactgataatttgaggttagatgggaggatgaattgtcacatctatccacactgtcaaacaggttggtgtgggttcattggcattctttgcaatactgcttaattgctgataccatatgaatgaaacatgggctgtgattactgcaatcactgtgctatcggcagatgatgctttggaagatgcagaagcaataataaagtacttgactacctactggtgtaatctcaatgcaagccccaactttcttatccaactttttcatagtaagtgcgaagactgagcccagattggccaattaaaaacgaaaacctgactaggttctgtagagccaattagacttgaaatacgtttgtgtttctagaatcacagctcaagcattctgtttatcgctcactctcccttgtacagccttattttgttggtgctttgcattttgatattgctgtgagccttgcatgacatcatgaggccggatgaaacttctcagtccagcagtttcct

SEQ ID NO: 136826 - DNA, 1577 bp, Homo Sapiens
  misc_feature (143)..(143): n is a, c, g, or t
  misc_feature (159)..(159): n is a, c, g, or t
  misc_feature (880)..(882): n is a, c, g, or t
  misc_feature (1500)..(1500): n is a, c, g, or t
cagacttacgggtctgatttgagacacctgtaactcatatagattcggcttccgctaatagataagtaagtccaatctccgcaaagcagtaaagttgatacagtgcattttctggacagggagagggactcacttgaacacanacgagaattccttcangccaaacagctttcagagatagatgctttgttccaacgagcatgctattccagtgtactgaacatactgtatacctcgtgttaggcacctttatgaagagatgaagacactggcatttcagtgggattgtaagcatttgtaatagcttcatgtacacatgctgcttggtgaacaatcattaattcttcgatatttctgtagcttgaatgtaaccgctttaagaaaggttctcaaatgttttgaaaaaaataaaatgtttaaaagtaaattaggcttataggagcttataactttattcagatagcatcaatcagggatgaccagaacacattaggaccccagattattcaaaaactttaacgaattttaaggggaagaattttatcttttcccttaaaatgcagtcatagaaattagaggatgactcactgccacagtgtctaaaagcatttgctagcaaagaggcaggacactaatttgtaaactgctcaactgttctgactggaagggaggcctggagctctgctatcaccaatccttcccttccctctactccacatccttctaaggagcatgatttgaaaactactttcctaggttaatgggcatgtgcatcaatggagagaatagtataagcaagtgagatgtagactaagcaaaatttagatggagaagcacattttaaaaaattaataacttaaaagtctcaagttattaattnnntttttgctaactcaattggaagtaagactatgaaatatttcagtgtgtttccaattcccagttgaatgcagtgtttcagaatttcaggtatttcttaagatcctcgaaaacactggtgctgtcaagtccaagttcctcgtacaggaatttaatttgggctgtaatctttttgtgagaatcctcaattacatgattgcctccaggctgaatatctagaataatattaggggtctgatagccttcacctgtgtccttagcatgctccgcgatggcttccttgagtttctcagtataacttacaattcctttcagaggtacccgttcatcgttttcatatgccgttatgtgaattgaaggataatgctgaggtttaatattttgatagggacagtaacgttttatgtagttcttgtgtttttcatcagatgaaggattccccccattcttctaattcttctaatgtcagaggaagtgtagtgtccatcatggtgttgagaacatccaagaaaggtgcctccaaagtcaccgctctcaccagctctggattagaattacacaatgctcctgcaagcacccctccagcactgaaagcagtcagggttgttagacttggctganaaaagccttggccatgaagcgtcttaatgcaagcctctaaatcagcaaggccattgagttttttagttaggcggcca

SEQ ID NO: 136827 - DNA, 617 bp, Homo Sapiens
  misc_feature (31)..(31): n is a, c, g, or t
  misc_feature (38)..(38): n is a, c, g, or t
  misc_feature (68)..(68): n is a, c, g, or t
  misc_feature (74)..(74): n is a, c, g, or t
  misc_feature (152)..(152): n is a, c, g, or t
tctgccggccaaagcgaggagagagtgctcncgattcnttataaaagtgaggaagtgtcctctgagcncgcctncaaggcggttctgcgcagctcctgctggggcagctgagagcgaacgatgtgctgagtgaactcctgaggttcagcaancctgcgcaaaggttccagggacccatcttctgaggggcttctcctgcaggtggtccaggcagccatcaaagacggggctgcaggggggtctgtcttccaactcaggctgccggtgtgggttggtgatctgtggacaccctcagtcctcacaccagtctccaagccactcagagctaggcaagctctgagccttgcattctgcagaatcccgggcctaagatccggccccatctcgtccaccatgagaaccgtgtctgagagggacggggagaagcaccgagactcagtcaagggaccgtggttcttccagcccaggcgcatgctgcctccatccaggatggctgcagccactccaaagctttggagagttctgtgtttttcctcttctatttttatttcctcaaatccgagaccaagagagatcagtgccagagtcctggaggggtctgagccaggaggaattgc

SEQ ID NO: 136828 - DNA, 477 bp, Homo Sapiens
  misc_feature (71)..(71): n is a, c, g, or t
gtatttggccccattttccaatgggctggttttcttccctgtggagttttgagatttctctgtatattcgngaacacacactggatatgttctttgcaatattttctcctaatcttagcttgtcttttttattctcttagcatcatccttttgcagagcagtcatttttagttttgatgaaattcaatttatcaacattttctgctatggatcacgcttttagagtaaaaagtctttgcccaagtccaggtgatgaagattttctatgattttttcaaggaggtttatagttttacatttcacacacttagatctatgatcaattttaagttcagctgtgtatgagatgtgaggttgaggtgttgttttttagatatggatgacaactattccagtaacatttgctgaaaagactgtcttttctccattaaattgatttttgtacctttgttaaaaaaaacccattgaccatatttg

SEQ ID NO: 136829 - DNA, 450 bp, Homo Sapiens
cgggttttccaaggctgagagagcctaatacatggggaagcacttccttgaggtggaagatctctcccttcacctttcctctttttccctgcaggctagtgcctactttttatcagtttgcacaatcgcttagataaacaccgaggaggagattctctttaattatcaaagacacatcttttcagggggccaacaaagcatttatttcacccgccaaactaaaggagagttattccagtttaggaggaagatgcaagcggttttgggaccttgaacaaggcaaatatggttttgcggtgcagaggggcaggatgcgccgacccagcccgacccacgggcagttccgcgctgaccaacgggggatcccctcaaactggccacttcggtacctgttccggattattattttccctgctgttgcgcgcggacccctaatcccacgtcgcgctt

SEQ ID NO: 136830 - DNA, 432 bp, Homo Sapiens
  misc_feature (403)..(403): n is a, c, g, or t
  misc_feature (406)..(406): n is a, c, g, or t
aggcagcagtgtgcattccctttccagcatgtcagccacccctttcagccaggtcccaggaaaccaaaggcttagagcggcctttcgcaaacgggttcagctccttatagaatgtctgtgttttttcaggtagtttccttgcatttcttaaaatcttcgtgtacatctgtcgtgcaggccgctgggtttgatccagacagtcacattctgggcataactgcgtttgtttttgggctgcagggggaatggactcttattgtcatcctcgccataagggttttctttagcatctgaaataggacccaactgtgccattttccctagccatgggagaggttctgggccaggctcaaagagagacatcatgaggtttgatttcttcttgctgtcagcttgggagtanganattccatgccattcaggacctaattg

SEQ ID NO: 136831 - DNA, 471 bp, Homo Sapiens
  misc_feature (292)..(292): n is a, c, g, or t
ggtctgtagagcccagtctctttcccctaaaccacaaacctctgagaaaagaataaagcagtagaggaggacagggcggggcagaatcaggggacaagttaaaaggatgtgcataggacaaggagtagccacactacctgattttcagaaagcaagggcaaaggccggggaggccgagggcgccaggcttcttctctgctcccagccctagtcaaccacaagggtctcctggctgtaggggatggatttctcgtgcatctgttctccacccttgcccatgtttgggccgggnccctggctgtgtcacccactctgcaagcagcctgaatttctggcttgagcttcagagagtaagaagggctgaagatgcccagagtccttcccagcactcaggaggagctgcctctgggttctccagaccctggaggaagcctgtctcctgcagaatttcctccaccctctcttgcctta

SEQ ID NO: 136832 - DNA, 543 bp, Homo Sapiens
  misc_feature (58)..(58): n is a, c, g, or t
  misc_feature (257)..(257): n is a, c, g, or t
aatatttaaaacttaaattagtacatgtaaagagctggcacaaacagatgaaggttcnctttcacggcagcagtagcatctgcacaacatacccccttagcccactgccctcagccccttccccccatccgagagaggttggtgctgctggcttgcaagatttcttcagcttctaattttccatagacttgagtcttcagctcgaaggctccgaatttggtcagatttcctgctcctggggctgccactactggctnttcctgctttcataccttttgacataggaatgcgggtgggtgtaggccgctgggatgacccgtcttgtcctgacactgactgggttcctcgagcagatgacgttgtgaccggtgttatggtgatagtgctcgtcactttgcttgcaccaggccgtgaggagaggtgattcctgggagagcgaaggacagtgccggtggaaacctccttttcggctgtcacgtttactggtcggacagtaataactggactgactccttcacctgaagtcccaggggaccgtttaaa

SEQ ID NO: 136833 - DNA, 833 bp, Homo Sapiens
  misc_feature (131)..(131): n is a, c, g, or t
tgttcactggtgtatggagattcggggagatccgttccgcagagacaaccacagtgtgaaagggacaccacttcccaccccatagtgccatctgtctgatcccgccagtcaagggtgccttccttttgctncaggaattctcagtcaagtatgccactggaagcagctctccaaacctgcccccacttatggttccttaagtcccctcggagacacaacataagggagcagtcttgggagaagatgattgtgagtgtagactgaggctagtacatgaatgcaatggagatggggggaatctgagcagaaatggagattctgtgacaaggagagggtgtggatggccccacctacatgaattggggaaaagtgcataacaatgtgcagggtagggtacatatggctctgtcagaagaataccatgatttaagggaagaaagtacacaaggtacatggagggtacacagggaaagtacatggataaacatggacgtgtgcaaataggaaagacatgactcagcatgctagacaaattgcacatgcctacccaaacacgctcaagggcagacccatgaccatgagaggggcacacgtagctgtgaatgcagggcacccgagagcacatgtgactgaacatgaagaaagcatacgggaaaagcgtgtgtacacatgagcatgttcagtgggcacacgcaggagaggggaggatgcatgtgtgctgagcgtgagtgcacagagcagaggcaaggagcatgtgagccttggcgaaaagaatgagctccccccggccgtaatggccgaattcccgggcatatgtccggtaccgtcgactg

SEQ ID NO: 136834 - DNA, 786 bp, Homo Sapiens
  misc_feature (47)..(96): n is a, c, g, or t
gaaagacggctctaaagggagacttgcgcattccaagacattctttnnnnnnnnnnnnnnnnnnnnnnnnnnnnnnnnnnnnnnnnnnnnnnnnnngtatttgataatgattggtctcacatgtttgcttttcttctaaaaattttcccccacttctgccattggccggaaggaggggggacctcagcagaattcctgtgtgggtgcgggggctttcccctgcacagcaccgtctcaggcgggttcaacaggatcaaaaacgttttatttaccgatggctgcagtcagatcagacccaccactaacatttcttaacaattttgagggagtgaggaaggaggtgccaaccgcagcgctgtgtctttgcattggggactccttgccaaaaactccggttggggagaggtggaacccttttcttctgccgacggttatacctcgagaagaaagcagtttcttgtgccggtccagggtccctgtgacccgcctgcctgcaccaggagggcgtgcggcggcagcctcacatcgacgcaaggcttgatgtcttggtaggtgacctgctggtggtagtaggagcccccgccggccgagtgcatggaagaggacgccatggcgttgaaagagaagacaaactcgtttcggtcacacatgctgggcgactgcgagtgataccgcgggatgccttgcagctcggctggggcgttgtggctgttctggtgcagatacggctgctccagggagtgcgtggagaggctgccggacagggggttggccgcggggttacaa

SEQ ID NO: 136835 - DNA, 541 bp, Homo Sapiens
  misc_feature (16)..(16): n is a, c, g, or t
caattcaaaaaggagntaagccttctggggatgttggatgttttcagactgagagagggtggcttgacagggccatcttttctcagctgtctgcaacctgagcccagagccctttcctggagccctggcaaatttgcccagtggcttcccagaagacatctctttggacgtccgggctccccaagaaggttttaagtttgttcaaggtctgaagtctgatgcgcagaggtagcttccatgacggcttagtaatggaataacacttccttttttggtgaggaaagcccaatgggtcttagctaacaagctctcagctatgactctaaaaataccctgcagcgagtgctgtttggcacttcaatttgtttgccaggggagcgcttaagaactccgcagaatgcttcagattctccacagctgctctaagctctgtcctcctctggtgaccaaagcaagtgtatcgctttgggaaagctgcttgttgcttttcacttttgagttcttggaattctgctctaaatgtctgaagtacaatttccag

SEQ ID NO: 136836 - DNA, 352 bp, Homo Sapiens
attcctgcttttgaggacagttgggctatgtgtcacagctctgtagaaagaatgtgttgcctcctaccttgcccccaagttctgatttttaatttctatggaagattttttggattgtcggatttcctccctcacatgataccccttatcttttataatgtcttatgcctatacctgaatataacaacctttaaaaaagcaaaataataagaaggaaaaattccaggagggaaaatgaattgtcttcactcttcattctttgaaggatttactgcaagaagtacatgaagagcagctggtcaacctgctcactgttctatctccaaatgagacacattaaagggtagcctac

SEQ ID NO: 136837 - DNA, 749 bp, Homo Sapiens
  misc_feature (17)..(17): n is a, c, g, or t
tgccatcagcaacagcnccggaggagaaggatgatcctagcagtctctgttcagaggagctgctgctggtacttgtcctcgtactgctccgcgaccctgagctgaccgtgcttatggatctggacagaggggctcgtgcagaagaatggacctgcgagtgctggagcctaggaggctggcggtgctcaggcagaccgtggagtctctcgtgtttgtgctgagtggaggggcgaggagcaggcttgagcccaggtcttgggacgacagtaggcccctctgtgtactcattggtgtttcggatggctctgatctgatccagagacaagacatgtacctgctgggtgagggcgtctctggggtcgggctccccacgctgtctgccaccgtcacggggcgtctgcagcaagggctgcgaacccgttgccactctgagctctggcctccatcaggtcttggaagtgtggtcactccagcaggcttagaacacatctgaactccgtgatcgcggctttgcatcaacccctctcccttggattctcttctttctgcgatgtgcaaataaatccagtctcgatgcaaacttttttcctttctttccaacctctgctttagaccaacttccgagcaatcggcgggagaaaaaaagagaattcggagccagattccccgctgatgaacactcccggggttcggagctggagacgactccccttctacaagcgcacgcggagtatttcctcttttgtctc

SEQ ID NO: 136838 - DNA, 391 bp, Homo Sapiens
agcctccattttctgtggcaaagcaggtgaattaacaaattctaaagccagactatatttttacataacctgttctgagttttgctctatcaagggattgaagcatgagttagttccatgtcacaaattagaataacagctacaattaagcatcaattttgaaaaacagaaatgtgttagctgagcaaagaatctccctgtaatgctgttggcaggtcagctgttattatcttacttgacggaatacattggttagaagctctatcccatttcctgaaattcagtactcttgtaggaaaatatttctcctttacttatttttttaaagaagacaaaatattttaattgtaagtggtcagaggaattcttctggtttcgtcccttatggtta

SEQ ID NO: 136839 - DNA, 389 bp, Homo Sapiens
  misc_feature (330)..(338): n is a, c, g, or t
aatacatttgagtggtagtaactaattttaaaggaaaaaaacctgaagtaatctagaggtggaacacaaatgaggtaaaatattagagaactgattcagcaaggactaaagattgggacgcaatgccctctgcacagtctggttcttgaggttgcggtgggtgtgtttccagtggcgtaggtcggtcagatacttctggcctttgggagtgcgtggatgtgacgcggtcagtgccacatgtgaaccaggtgctgcgaagtcctgtgaaagtcacacaccatatggtgcactacaaaggtataggttaaaggctgaagcttgaaacatacnnnnnnnnntcctctatagagcaagatatattcctagtattcagctgttcccaaccaaat

SEQ ID NO: 136840 - DNA, 286 bp, Homo Sapiens
tagtaaaatggcttattttttcccaaaggtggaatttagcattttgtaatgatgaatataaaaatacctgtcatccccagatcatttaaaagttaactaaagtgagaatgaaaaaacaaaattccaagacactttttaaaagaatgtctgccctcacacacttttatggatttgtttttcttacatacccatcttttaacttagagatagcattttttgccctctttattttgttgtttgtttctccagagagtaaacgctttgtaagttctttcctttaaaaaac

SEQ ID NO: 136841 - DNA, 1109 bp, Homo Sapiens
tggtcttcattcttttgcattgctgattaccctctccatgtgaggcaatcaggtatgcatttatctaggtgatcagacgggtgtctttggatagaatgggaggcgggtttgccctaagcagttcccagcttgacttttccctttagcttagtgattttgagtccccaagatttattttcccttcgtaagtgttcctatgagtattaattattcattgtgtcttttattacacaaataaggcacagatttttaagaaatcatcaacttcatggctacctatatagacataacttacacagaagctcaactaaatttgcaaacattccagagtttgggtttccaataattctttgtgattctttaaaaggtaaagtattttttcccataaaacatagcaacatttaaaatcacccgtagaatgtcccgccatttttgtttttctagtttcctcattttctgcaaagcctcgctgaggaaattgactttgaatatccttttacactcttctgttttagaaagcattgtggtaaaacattgaatcatcatggtcataagttctgttcacattctttctttctttgaatattttttcccagtggccaatatttgattctgttgtattatggctaaaaggtaggcatggcaagaaaataaagacaggaagtctttggaataattgatcccatcataatgaatcaatttgtcattggaacatatttttacaaagtcactcttttgaaaatatttggctatgaattgaaacagagtctgtaaggttaatatttttcctggtctaaggtgaacagcattttagagaatgaacccaggacacaaccccagcacaagaaaaaaatatgagaattaagtttacacatgtgtgttactacagtaacagcaaacatgtaaagaacatttgttttgatttatatgtcagtctgcactgtttaattttttgtgtcataaatgctcttatttaaaaaaataggactagttaacagtgtcaattactagtaattcatggtataaataattaaacaaggaagtgttcaaaaaacagtgttttaaaccaagctttattttacatctttttactaacacagaaattgtca

SEQ ID NO: 136842 - DNA, 628 bp, Homo Sapiens
  misc_feature (48)..(48): n is a, c, g, or t
  misc_feature (51)..(51): n is a, c, g, or t
  misc_feature (61)..(61): n is a, c, g, or t
  misc_feature (67)..(67): n is a, c, g, or t
  misc_feature (135)..(135): n is a, c, g, or t
  misc_feature (180)..(217): n is a, c, g, or t
  misc_feature (476)..(488): n is a, c, g, or t
ggttttgaaagatcaagcattcgagatcaaatggaatgttggttgggnttnaggtcaaacntaaatntgagcaatgtacaactcgtgaatagcactgacatccaaatggacacattggaaacagatcaaatgganaaaaatggcttcttggctctcttgttggaaaaagagagttgtccnnnnnnnnnnnnnnnnnnnnnnnnnnnnnnnnnnnnnntgtgtcttccatatccttcagcatcatattcttcagtgcgatgtgtgaagggctaaagaagggtttggcagagcacaaagccaggaataataggagcacatactccttcatggtgtcttagtgtagaagaccagtctaggactgtcagatgagagtagtcctcctaaaagtagaagttatccaccatgtactacttatctataatgtaaatgttctcagacactgtgtaagaagaaaagatgaggaggtattacatttnnnnnnnnnnnnncacccttcaacacagtcctggtgtggctgcaccctgggtgatactggaataaactgctcccacagattagtccatgttagtactgaggagcaagattaaaacttgttactgctcatgtgttttccatcactgtttgtatc

SEQ ID NO: 136843 - DNA, 1497 bp, Homo Sapiens
cacaaagcctgcccataagaaattggaaaatgatatagggcccaggcccagtgggctgtgaaggcagccaaaaactcccctttttggaaagccatgcgtctaggtaattttcctccgctttgccaggcggtctgaggtctgggctggaggcagcgggagggacagggtgcccagtttggatctttttcactgccggcggccacagacaccccttcttttggagatcttcagcctcatggctttggctatctccatcatccttttctcactgagcttcaagtccctctgtaacactgtcaggtcaatttggaagtcatgtatgtgcaaggcaagtatgatcacatatgcagtaatcttcgccttcatagaatccgaaattaagttccgtaatctgccattgttgtaggtcaagcaagtaaagtgcttcagcagtttggtgttgatgatgtggggaactccaggtcccagagcacttttccgcttaactaccctatgagctcgaaatttgatgagggtatccagaaaccatatgcatcgggcctggcggtctcggcttctccacatctgatggcaaagacttcaacgcttctatgacaaaggtgcaatggctgttctcctcaatcatcttcagtatttcttctgacgtgacgttcctgaaagcttcagatgggctctgaagagcttcatactccgcaggggaaagaagatcttcaaatttatacacgtcttcaggcttggctgcatcatcatagcagggaggaaggtagagggagtcatcttgcaagtcattgtggatagcatcgctgaccagagcagtcacacccttcgtatcaatgatagtctctgcagctttagccactgcacgattcaaagattcattgccaactctgttcattctcctggtgttcagagctcgcttctgtttggtggtaccaaaggcttcaatacaagaatccatcttttctctgtaagttttggtctgactctctagcgccagttcactctcaactgatacatctgaaaatagtggctgcatgttgaacaattcagcatcatatacttccatttggccagaggtcttgttcaaaattcccacaaagtgcctgcacaaagtgttgcatttgagggctccagtcccaaaattgtttcccacataggagagcctatctgtttcagctgccaggatccgttgattcctcttcctggggttggtggaatctttgttctcatacaaggtaaagcgcatgttgcctggactctgtagcttcccgttggagaactggaccagtacagctctctggctcccgtcgggcgccccacaatactgccacctcgcactcggcaacacctccgccgccatctcgcctgtctgtccgccaagcacaggagttaagacagcagcagccacaagcgcacttttaaacacgcgggagcccaggccgcgctgcgcggacgcgtgggtcgacgatatcccgggaattccggaccggtaccagc

SEQ ID NO: 136844 - DNA, 453 bp, Homo Sapiens
  misc_feature (101)..(101): n is a, c, g, or t
  misc_feature (198)..(198): n is a, c, g, or t
  misc_feature (421)..(421): n is a, c, g, or t
gaagaagacgctgaggtagaagaagtggattgaagaaggtggcagccacacaggctgtcttgcagagtatgtagcggattgtcctggatggccagcgaccnacaatgaaccaggtgttggcggcccagaagggaggcagcgatattcactatgcaggtgtggcgcatataagaagtcctgattcttggtcaccagatnttttccacaccacagcttccacaactagacaggctgccaagctcaagatggaaaagcccaccccaacataagaaataatatccaggagtattcccaggagagaactaggatctggggagtcaggggacatgaggatggagaatgatgttaggtggtcacagatacaggtgacattgtccccatcaccttcttcaacatagcacccactgctgtcccacccccntgtgttgttgcaagcctgaagttccagaagac

SEQ ID NO: 136845 - DNA, 611 bp, Homo Sapiens
  misc_feature (425)..(532): n is a, c, g, or t
ctgcagcttattcttgccatgcttaggtgacagaagtttgttaagtaccatccttgtgccctgcctcttattctcaaatcgttctggaaagcctcacttccttttctgtggagaaggtgcaaagctgttaaatgagctcagagtttacctagctaaggccactgcttcctgctttgtgaagcctggaaagtatgtgtggccacagggctcaggttcacacttctgctttgagaccaggatggggtgtaagccatagagtaaggttaacaaaaagaataaagctaatcatgtattacaaacagcagtgtgcccagacttgtggaaatgaagtcatgtcactcctctgctcagaaaccttcaatggttcaccattaccagtggaatgaagtcaattctcctcactataactgggtgtggtagtttannnnnnnnnnnnnnnnnnnnnnnnnnnnnnnnnnnnnnnnnnnnnnnnnnnnnnnnnnnnnnnnnnnnnnnnnnnnnnnnnnnnnnnnnnnnnnnnnnnnnnnnnnnngtcatgcacacaaaattagctgggcatggtggcctgtgcctatagtcccaactacttagaggaggatcgcttgatctca

SEQ ID NO: 136846 - DNA, 972 bp, Homo Sapiens
  misc_feature (962)..(962): n is a, c, g, or t
tttttttgccattttcaaaaaagatatagtagcttcagttgtacaccaccagttgaaggggttttcatccaaatgagaaactctaccccttgtctctagtggaacaggcaccagattcccacaagcagcagctcccatgtcctgtagcacgtggcatccgaccctggagtgaagagtaagctggcacagagccccgacgctgggattcagactagatggcgtttcgtggcgtgccattgtgtgtcagcgctttcagactggaggcactagtctggtgaccacagctcctgtgagaagtcacacccacctcaaaaacctcatgaatagcttttcggaaacagtggaagttgtagtctattaaaccttttctttcaaagctttcttcccttagaatgcagaccagtgccaaaaatttagtcacctcctttaaataaaggacagttgtattattcagcttgataattgccatagattctttgtcataagcacttccacttccatcttcctttaacccatatatacaagacacatcaattacaacatcgatcatgtcacagcaaagttcataagattgcatatccacaggggaactgtctgttgcaatgtagattttgctgacaacatcaaagagaaaagctttttcaatacctgaatttgatataaagatatttaataggttttccaaggtcggcagttgtggaatgagtttctgcaccaccttactaaaggcttcaaatattgaatggtcatagatactagtcagataaaagctaagatggagtttttctagcccagcatctgcaaggtcatcattggccctttgatgaatgtccctctgtgtttctattttgtgatcatcagacagaccatcaactttgtgaataaaaacctcaaaattcatgtctgggttaactttgtaggctttagaaacagtaatgtgaagtcttgttaaagcctcgccngttccgaaat

SEQ ID NO: 136847 - DNA, 761 bp, Homo Sapiens
cttagtattagcatacagctctgcagtttccagcaaaatggttaggcagattttagagctttgtcctaacctggagcatctggatcttacccagactgacatttcagattctgcatttgacagttggtcttggcttggttgctgccagagtcttcggcatcttgatctgtctggttgtgagaaaatcacagatgtggccctagagaagatttccagagctcttggaattctgacatctcatcaaagtggctttttgaaaacatctacaagcaaaattacttcaactgcgtggaaaaataaagacattaccatgcagtccaccaagcagtatgcctgtttgcacgatttaactaacaagggcattggagaagaaatagataatgaacacccctggactaagcctgtttcttctgagaatttcacttctccttatgtgtggatgttagatgctgaagatttggctgatattgaagatactgtggaatggagacatagaaatgttgaaagtctttgtgtaatggaaacagcatccaactttagttgttccacctctggttgttttagtaaggacattgtttggactaaggactagtggtctgttggcagcagcattgtgcttctccagcctttgcgtattgtggtcactcattttcgttgtacaggaacagctttcagaactatgtcatcactcccagaatcttctgcatgtgtagaaaattctgggaggtggatacatcccgaattccagaccgtacaggacc

SEQ ID NO: 136848 - DNA, 976 bp, Homo Sapiens
tgggtaaatgatgcagtaggtcctattatgttttctttcagtaagtggttaatatcccttttgtgttgtgttaatcacgtattagctttatagcattaaataaggtattattctaccttcttgatcaaagaacgtagtcgggtacttggtttagaaagttcaaaagtgacaattgtataaggggctttcaccggttaatggaccttgttaccaaacgttaaggatatacagccgaagattgtctgaggttgctggctaactttatttttcactgagttactctgcctttttgacgtttttattctttgtgtgtcagagttcaagagctcaggagccaaaatatgttttatacatatatagatatatatccatagcctggtagatttatatgcaatgcactgcatccatgcattctgatagcatttcattaattttgatttcaaatggaagataaataatatcccaaatgaattatctgtaacagaaaagccaagactttaactttcattacatatctaatagttgatatcaccagttaccattttgaattttgtatagtactaggttagaacattgcttaatccttgttaaaaaaaatgcatttacgtaaacacgaatactgaaattgttggattttttaactatatctgacataattttattcatcaattacattacacattcatttagcccagatttcaaatagtcgggggaagaaagaaactgtatttcagagtaaaatctcctaaaggaaattaatacacagagttgtaaatacacatgcttgcaaaaacattagtcgtgaaatccctagcaacaagtcactggatttttctctgtcagcacgcgtgtcagctgccaatagaatagacttaatgaagaagtgcccacatgctggcaggggccggcccactctggccagccagatactgctagattgtaatatttaaggtctaatttcgacgtgtgtacacag

SEQ ID NO: 136849 - DNA, 516 bp, Homo Sapiens
  misc_feature (20)..(20): n is a, c, g, or t
  misc_feature (43)..(43): n is a, c, g, or t
  misc_feature (125)..(125): n is a, c, g, or t
  misc_feature (178)..(178): n is a, c, g, or t
  misc_feature (262)..(262): n is a, c, g, or t
  misc_feature (448)..(448): n is a, c, g, or t
gtttcactctgtttgtgacnagcaggcatctgcattcaaaagngcccaactgtattggttacagtttcctcctttggcatatccctgggatagccttggcattcatcaaacatcttggcaaagcntccagtgcggatgttggggatggaaaccccgtcggcagggctgaggcttggcntggacacatctcacagggatgccccacgcccgtccaatggtgcacagcacagagtcttcggtgcagacaatgcctgtcaagctnccttggcacatctggttgttgacctgagtgaaacacgggcctgtcctgtaatctctttcacactgtggaccagtgaacccataaacacaagcacagcggttgggtccgatgcaacgtccaccattctgacatccattttcacagacaggttgttcacaataagttccaatatatcctttctggcanctggcagtggtcatctgcacaggtcccaccattcatgcatctcacactgcactgctgaattgattttg

SEQ ID NO: 136850 - DNA, 844 bp, Homo Sapiens
aagcagcaaataggattctgggagaaagcagacctgggatacccctgaagtgtggcccttaaatcccagttcctgttcacacttaactcccatcacccgaaagattcgaaccttaccatcttctgcaccacaactaaaaatattaccacacgaggccacagagatagaatgggctagggcagggtttaagagctgaccaggtgactgtgggccttccatttcttctgtttcatcctcctgtaaaatttgtaatccagagtggtcgggctttttgaagactccacagcatcacctgcatatccagtccacatgacaccaggctctgaggcctctgaggccgaaaagccactgaggagcagatattggaatgtctcttcaaggatctgataactttcttgttttccaagtctaggattttgattgccccagagtcgtcagcagaagccagcaggttttccgtttgattcaatgaaagacaattgatttcttcttcattcacatgaaaatggtccaaggaatctttgagggacctgacatccagtacactaatggtttctccatgtgaggcatagagcttggtgggacaggagggagaaaataagacactggtaacatcatcagccccttggaaccgcgtgtgtcctaatggagttccatcttcttccccaagccgtgagatctccgccctctgctccagaagccagcagcccttctttacttgcattcaggcagaggacaggagaagaatgcccacctgtccacttgactgccataatggtcccggagactctgcgcttcccgcctcgtgccgattcgacacccagcctcgtacctagcctaggtt

SEQ ID NO: 136851 - DNA, 968 bp, Homo Sapiens
  misc_feature (80)..(114): n is a, c, g, or t
aaatgtatacaatcatatagggcgctagtcggtatagcgaacgacgagcgcagcgaagtagtgagcgaggaagcggccgnnnnnnnnnnnnnnnnnnnnnnnnnnnnnnnnnnncagtcgacggtaccggacatatgcccgggaattcggccattacggccggggagttgcgtcatatccggcccttgcgatcagggcttgaggaacccgcgccatgaagtgcgtgtttgttaccgtagggaccaccagctttgacgacctcattgcgtgtgtgtcggcgcccgacagtctgcaaaaatcgagagccttggttacaaccgacttatcctgcaaattggtagaggaacggtggtacctgaacccttcagtactgagtcgtttactctggatgtttacaggtacaaggattccttgaaagaagacattcagaaagcagatcttgttattagtcacgcaggtgcaggaagctgtttggagactctggaaaaaggaaagccactcgtagtggttataaacgaaaagttgatgaacaatcatcagctggaactggcaaagcagctacacaaagagggtcatctcttctattgtacctgcagcacgcttcctgggctgttacagtcaatggacttatcaacactgaaatgttatcctcctggccagccagaaaaattttctgcatttttggataaagttgttggattacaaaaataaacactaaactctcaacactttaaaagcaacccccaaattcaacctatgtaatgtgattaaatcaaattagatacataatatatattttacaaaataatctaattcataaacttcctacatctatagaatgtatacggaaattttactgttgtgcacatttgcatggggtcccaaatcctaattgcagtttagtgaaaatttacttaaattttttcttaatcttcagtatgtagtgagcattcacaggtttctcctaa

SEQ ID NO: 136852 - DNA, 186 bp, Homo Sapiens
gggggttggttttaaagtgtttatagtttagtgtttatttttgtaatccaacaactttatccaaaaatgcagaaaatttttctggctggccaggaggataacatttcagtgttgataagtccattgactgtaacagcccaggaagcgtgctggccctttggcaagcttctagtgtctcaaggaaga

SEQ ID NO: 136853 - DNA, 479 bp, Homo Sapiens
  misc_feature (264)..(264): n is a, c, g, or t
  misc_feature (367)..(367): n is a, c, g, or t
cccgctctcacaggtgaggacagtggctcctacagatcttcaggaagaatcaccaacattctagagcacttgccaggtcccatgcagcaggctgggatgctcccatggattacctcactgtcccctctcagtaatcctgtgaaaatagatgttattattcccagtttccagatgaggaaatgagagctgagagaaattagataactgcctgagatcgcctgggcggtgatgtggtggtggagcctcaacccgcctctggggccntgtgctggtgccgtggggccgccagctgcttggcacttagtggggttggtatcagtgcgtctaagtccctggtgtgcttggtccttacagcgctgccctgtanaaggctcatgggaaccacaggcatcatttaaaattttccaggagctgcgtttaaaaagtaaaaggaaacacagatgaaactatcctaataatatacttgagccaagacatgg

SEQ ID NO: 136854 - DNA, 1774 bp, Homo Sapiens
  misc_feature (430)..(439): n is a, c, g, or t
  misc_feature (865)..(887): n is a, c, g, or t
  misc_feature (891)..(986): n is a, c, g, or t
  misc_feature (1209)..(1715): n is a, c, g, or t
ccatggaggaaccctttaattgccatattaataagtggaaagaagcccagtctgaaaagggctccatacctatatgattcccaatatgccattctagaaaaggaaagaactatggcgccagtaaaaagtggttgccaaagaaagatcatgtcctttgcaggaacatggatggggctggaggccattatccttaacaaactaacataggaacaggaaaccaaatattccatgttctcacaagtgggagtgaaataacatggacacaaaggaataacatactggggcctacctgagggtggagggtgggaaaagggacaggaccagaaaagtaactattgggtactaggcttagtacctgggtcactaaataatctgtataacaaacccccttgtcacgagtttacctgcacatgtaccccctgaacctaannnnnnnnnnaaagtggttgccaggggattagggaagaaagggatgaaccaggttaagccttggggaggttttagggcagtgaacctattctgtatgattctataattgtagatatcatcatacatttgtctaagcccatacaatgtacaacaccagagtgaatcttcatgtaaactatggactttgggtgataatgatgtgtcaatggaggtttattgattgtaacaaatgtaccactctggtgtgggatactgatagtggtgggaggctatgcatgtgtgagggcaggggatatatgagaaatttctttttgtccacttttgctgtgaacctacaactgatttaaaaaaataattatttaaaataattttttaactacactctgaagatgaaatcaagagtaataggagggtcctctggactcaaaaatgaaannnnnnnnnnnnnnnnnnnnnnnggannnnnnnnnnnnnnnnnnnnnnnnnnnnnnnnnnnnnnnnnnnnnnnnnnnnnnnnnnnnnnnnnnnnnnnnnnnnnnnnnnnnnnnnnnnnnnnnatgaaccaccgcacccagccaagattgcccgtttgtatgatgagactggaaggacccccctgtgccccggactcggccacaatagacccccacccaccggggggacaggggctgggcggccttccccggccgcgggagcgcagcgcgcccgcccactggggccagaggagccgggggtgggggcgccgtcgcgggagccgcccccgacggagccggcgtgccnnnnnnnnnnnnnnnnnnnnnnnnnnnnnnnnnnnnnnnnnnnnnnnnnnnnnnnnnnnnnnnnnnnnnnnnnnnnnnnnnnnnnnnnnnnnnnnnnnnnnnnnnnnnnnnnnnnnnnnnnnnnnnnnnnnnnnnnnnnnnnnnnnnnnnnnnnnnnnnnnnnnnnnnnnnnnnnnnnnnnnnnnnnnnnnnnnnnnnnnnnnnnnnnnnnnnnnnnnnnnnnnnnnnnnnnnnnnnnnnnnnnnnnnnnnnnnnnnnnnnnnnnnnnnnnnnnnnnnnnnnnnnnnnnnnnnnnnnnnnnnnnnnnnnnnnnnnnnnnnnnnnnnnnnnnnnnnnnnnnnnnnnnnnnnnnnnnnnnnnnnnnnnnnnnnnnnnnnnnnnnnnnnnnnnnnnnnnnnnnnnnnnnnnnnnnnnnnnnnnnnnnnnnnnnnnnnnnnnnnnnnnnnnnnnnnnnnnnnnnnnnnnnnnnnnnnnnnnnnnnnnnnnnnnnnnnnnnnnnnnnnnnnngcgccgcgcccgggtccctcggcgcgcgacgcgtcggcggcgcggcccgtcgcgctcac

SEQ ID NO: 136855 - DNA, 1007 bp, Homo Sapiens
  misc_feature (269)..(278): n is a, c, g, or t
  misc_feature (535)..(545): n is a, c, g, or t
gttatgtggtgtataggtggcgcggggcactcgacggtcgttgggtgaagatcgccgctccactagcgggcgggcgcctacgagtcaggtgtgcccgacccggccctggtttgcggcgggaggcccgagaggtgttgcgtcggctagccacgcctgccgggcattttgggcttctaaccccattggccggggttaaaaacgtctgtttacgttcccctcgaggggcttcaccgatctgcgggggggtagacggggtgccaatggtgttnnnnnnnnnngaactgaatgtcccctcaccaaagattcccaagctagccagttttcccaggtcccggcgctggtgaaccggcggcgcagggcctaggttataatccgactccctatagggcccacttggtacaagaaagctgggtacgccgtaaggttgggcccctcgagggatactttagagcggccgcccttttatctcttcctctgtctctgtggttggttatttgcctttcctttttaatcctcttcttactccaactctttnnnnnnnnnnnctgcccagaaaacccagtaattaagcaaaagggagctcaaagagccaaggcaagccagcccaagagtagcagggtccctcccgcaggggccaaagtctggatgctggggtctccactcagagcctggtagtaaaagctggtgcagaataaggtcgttccggaagctagcaataacccagcccagagtggctttctgcaatggggcacccctaacagggccaggctgtgtaagaagtggtgtttgttggccttgtcaaacagctccttcccgtaggcatctgggagatttgccgtgcgccccgtaggaagcgaacctaaggccgcagctccggacaagggcccaagcggcggaaagctgcagctggcccggccatagctgtagaacagcggacgcgtgggtcgcccacgcgtccgcggacgcgtgggtcgacgatatcccgggaattccggaccggtaccagc

SEQ ID NO: 136856 - DNA, 469 bp, Homo Sapiens
  misc_feature (47)..(56): n is a, c, g, or t
tttcctttgcctttcctttttaatcctcttcttactccaactctttnnnnnnnnnnctgcccagaaaacccagtaattaagcaaaagggagctcaaagagccaaggcaagccagcccaagagtagcagggtccctcccgcaggggccaaagtctggatgctggggtctccactcagagcctggtagtaaaagctggtgcagaataaggtcgttccggaagctagcaataacccagcccagagtggctttctgcaatggggcacccctaacagggccaggctgtgtaagaagtggtgtttgttggccttgtcaaacagctccttcccgtaggcatctgggaattgggcgccgtgcgccccgtaggaagcgaagcctaaggccgcagctccggacaaggcgcccaagcggcggaaagctgcagctggcccggccatagctgtagaacaggacgcaccggaccaacgccccc

SEQ ID NO: 136857 - DNA, 443 bp, Homo Sapiens
atattggttatttctcttagcagatcagcaatccctctagggacctaaatactaggtcagctttggcgacactgtgtcttctcacataaccacctgtagcaagatggatcataaatgagaagtgtttgcctattgatttaaagcttattggaatcatgtctcttgtctcttcgtcttttctttgcttttcttctaacttttccctctagcctctcctcgccacaatttgctgcttactgctggtgttaatatttgtgtgggatgaattcttatcaggacaaccacttctcgaactgtaataatgaagataataatatctttattctttatcccccttcaaagaaattacctttgtgtcaaatgccgctttgttgagcccttaaaataccacctcctcatgtgtaaattgacacaatcactaatctgggtaatttaaacaattt

SEQ ID NO: 136858 - DNA, 902 bp, Homo Sapiens
  misc_feature (765)..(797): n is a, c, g, or t
cttgataaatggtaagagacaatcaagaattcaccaaaccatgccagagaagttcctaattcatgtattcaagccaactttcacgtatgtttttgaggcttcctaaatacagaatgaataccttaggagacgttctgtcaaaagttgccaactttcccctctgaaggaaaatcaaacaattaatcagcccacctaatttcaaaagtccaatcacgcaattcacacactgcttgactttcccaaatgatgctaaatgatggtttcgaaaccaatcatagcatcgttcttctaaccacctgccaccaattgtacaaacagcataccagattttttgatttttactgggtggctgatatctcaggttaggggaaaaatcatttttgtacttaatattcaaaactgactgtcccactgtggcatttttggagtagatggtgaatctccacaagaaaacccataagcacgctttcacctctggctcaaagcgagctaacagcccaggtttaaatccatgaaagcactgagtaaactgggaccaaactagctgctccagggccttgtttagttcaagtgcatccaactggcttattcttagcactctgtttgcactcttcgcattctcttttctggaagccatgtcttctctgaaggtctctttttcctgttcctgcagctccctcaagactggacagcctatagctatgacagtgggaatttttgctccaagttcttctgtgaaatccttgcctcatacttgccagaagnnnnnnnnnnnnnnnnnnnnnnnnnnnnnnnnnttaggagtctgcgaaacgcccacgctccacgtaactttctctgaaacattctctggaaagcttgtcttttcctagccgaatctggattaccaaggcttccggaac

SEQ ID NO: 136859 - DNA, 928 bp, Homo Sapiens
  misc_feature (244)..(244): n is a, c, g, or t
  misc_feature (518)..(606): n is a, c, g, or t
cagccctcgctccacttgtttcctttctccgcttttgtaatctcctgatcctcggtgtttgcgttagggacatcctccgccgtgaaacaactttcaagctccaacaagctgataggcgtcctagcgccgggcagaaccggcaagtcgcaggagaaggaccccctaaccgggcgcaaaaaaggacgaggcaggctgccccggtgagggggcgcccacaccggctcccccggggggcccccgctgnccgggggaggagggggaggccgggccggaggctcgtcgtcctcagggagcttggagggcgagactgcggcagcagacagcggggatggcgcgggcacggtcgacgacaccgggctcgggtcccaagacggctgccgctccggggcgacggggggagcggccggcaggggtccccggggcgccggcggcacgaagtcatttccgaagtccatcaggggcgcgccggcggcaggggcggtgggcactggggccgcggacagcccggcggcgggctnnnnnnnnnnnnnnnnnnnnnnnnnnnnnnnnnnnnnnnnnnnnnnnnnnnnnnnnnnnnnnnnnnnnnnnnnnnnnnnnnnnnnnnnnacgaactggtacttgaacgcgggctgcggccggggtgggctgtccgaggacgagaccagaggagactggtccaggtcttccatggctggagggtggagatgatgctgcagctgctgccgccgccgccggggccgcgtctcagagccgcgggcggttgtgggggttggggaggactgagaggggctgggccgactgagccgagggacctactgtggtgacggctcccggaacaatgagactgctcctcctgcctccgcgccggtgatgcgccacccgcccggacgcgtgggtcgacgatatcccgggaattccggaccggtcc

SEQ ID NO: 136860 - DNA, 977 bp, Homo Sapiens
  misc_feature (242)..(304): n is a, c, g, or t
  misc_feature (629)..(717): n is a, c, g, or t
agggggtgatactcccgaggccggcgggcggggaggtgggagccgcgtccaaggcgggtcgagaacgggggaaacagagacacgaaggggcgagacggaacggcgagagacgacggacgggagggaatgagcggcggcggcgggaaagggaagtgcggcaaaaggggggagggcctcgggggcgcgccacgcccgattgtccgaagagggggtgaaagggggcacggggaggggactacaannnnnnnnnnnnnnnnnnnnnnnnnnnnnnnnnnnnnnnnnnnnnnnnnnnnnnnnnnnnnnnaggcagagaagcgcgggtcccacgaagactgcccgaaggggttccccctgcccgggggaggagggggaggccgggccggaggctcgtcgtcctcagggagcttggagggcgagactgcggcagcagacagcggggatggcgcgggcacggtcgacgacaccgggctcgggtcccaagacggctgccgctccggggcgacggggggagcggccggcaggggtccccggggcgccggcggcacgaagtcatttccgaagtccatcaggggcgcgccggcggcaggggcggtgggcactggggccgcggacagcccggcggcgggctnnnnnnnnnnnnnnnnnnnnnnnnnnnnnnnnnnnnnnnnnnnnnnnnnnnnnnnnnnnnnnnnnnnnnnnnnnnnnnnnnnnnnnnnnacgaactggtacttgaacgcgggctgcggccggggtgggctgtccgaggacgagaccagaggagactggtccaggtcttccatggctggagggtggagatgatgctgcagctgctgccgccgccgccggggccgcgtctcagagccgcgggcggttgtgggggttggggaggactgagaggggctgggccgactgagccgagggacctactgtggtgacgcggacgcgtgggtcgacgatatcccgggaattccggaccc

SEQ ID NO: 136861 - DNA, 775 bp, Homo Sapiens
  misc_feature (368)..(418): n is a, c, g, or t
  misc_feature (498)..(545): n is a, c, g, or t
gcggaggcaggaggagcagtctcattgttccgggagccgtcaccacagtaggtccctcggctcagtcggcccagcccctctcagtcctccccaacccccacaatcgcccgcggctctgagacgcggccccggcggcggcggcagcagctgcagcatcatctccaccctccagccatggaagacctggaccagtctcctctggtctcgtcctcggacagcccaccccggccgcagcccgcgttcaagtaccagttcgtgagggagcccgaggacgaggaggaagaagaggaggaggaatatgatgactaggactatgacctagctccctgaggacatctagcctccggctcggccactccattcttacnnnnnnnnnnnnnnnnnnnnnnnnnnnnnnnnnnnnnnnnnnnnnnnnnnnccatctcattaaatttttttattctgtctttagattaaacatcatttatttacacatgttctcaagtcactgaaaaatcnnnnnnnnnnnnnnnnnnnnnnnnnnnnnnnnnnnnnnnnnnnnnnnngatatgtaaaattataattttgatcacattatggttaacaattctttatttataacttacttttatatattttatcttgatctaatttatttcactataatcactatacattttattatataatgtatcctttacttttatttttctcttttatatatcaatttcttgtatcatttaccacaatttatatttcatttatatttaactaaatcaagttgtatatttatatt

SEQ ID NO: 136862 - DNA, 1694 bp, Homo Sapiens
  misc_feature (359)..(403): n is a, c, g, or t
tcccccagaacaatgggcatgcggcccccccgtgtttttatgagtgttctccccacgggaaaaaggatcggggctggggtgttccccggtgggggggtcagaaagtgtccacttatctttctggcggaacggcagtcggtttccccttcaacgcgcggtaggtttgaaactttgcccccacctttctcccaaggggtcaaacaaggagggaagcctctgaccctggggaattttcagcggtggttccccgcgggaaaagggtgcccggggccccagggggggcccccaagatttgcccttcgcttggaccagggggaggggaggggtcaaaagcccccaggagaggtgttcccttggcnnnnnnnnnnnnnnnnnnnnnnnnnnnnnnnnnnnnnnnnnnnnnataaaatgattaggggcgggctggcatgccccccagaaaacggtccagggcacagggccccaagtaacccccccgagtaacaaaggtctcatgaaagaagtgctgttctcccaggagtcctgcccctccccttccagtatccagcacagccatcaaaccatctgtggggtgcagagtaacctgagggaggctggggactctgggatatgggggtctcagcactgtccatccaagaagcctgctcgccagggctgcagtgggccacttcattcttggcgtcagcctgggttagtgcccctctgctccagatggctcacatctgtccaatcattcttctagggtcactgaagggtgcaagagctacgaacagattccgacagtccctctttgtccagggtgtcagcttcccagcgagattccctcatctgctccttcaagtattcagctcgggccatgaggttctgaacctcagtgtgaagcagctcccgcctccggcccgggggctccgctgccagcaacagcagtagctcccccaggctgtgctggtacaggtccagggcatcctgctccccgccggcggcctcctccttggccatggcagctgaagccacttccagggcagctaggaggcgtggcttgtcccgggccatctctctgagcaggtctcgggcagaggtcccctgcctcagcagggcctgattggaagaggagacgatggccttgagctcctcagcccgggacacgtactgccccacctttgccttaattgcctccttccgctgggcatccacttcatagtgcagggcaggtacaaagaagtccagagccttgcagtagagtgataaggcagctgctgaatccccctcctggtctttcttcacagcctgcaccaccagggcggttgctcgccccagactctccccactgggcatgtgctccaggtccacccaggggtgcgcaaaaaagtcctggaaggagatgcgacggctggggtcccgctccaggagccgctgcagtaggtcccggcagtctcgggagagcaggggccgcaaggggagctcgatgacccggttgctacggatcttctcttccagctccgagaacgacctggaggcaaaggggggctgcccgaagagggcttcatacaggatgacccccatggaccagaggtccacgcgggcgtcatactgccgctggcacaccatctcgggggccatgtagaggggggagccacggagcacgtgccggacgcgtgggtcgacgatatcccgggaattccggaccggtccac

SEQ ID NO: 136863 - DNA, 855 bp, Homo Sapiens
cgcgggcgcaggcggccgggatggcggggcccggctgggtgtcccccgcgcctggacggcttcatcctcaccgagcgcctgggcatgtggcacgtacgccacggtgtacaaggcctacgccaagaaggacactcgtgaagtggtagccataaagtgtgtagccaagaaaagtctgaacaaggcatcggtggagaacctcctcacggagattgagatcctcaagggcattcgacatccccacattgtgcagctgaaagactttcagtgggacagtgacaatatctacctcatcatggagttttgcgcagggggcgacctgtctcgcttcatccatacccgcaggattctgcctgagaaggtggcgcgtgtcttcatgcagcaattagctagcgccctgcaattcctgcatgaacggaatatctctcacctggatctgaagccacagaacattctactgagctccttggagaagccccacctaaaactggcagacttgtggtttcgcacaacacatttccccgtgggatgagaagcacgtgctccgtggctcccaccctctacatggcccccgagatggtgtgccagcggcagtatgacagcccgcgttggacctctggtccattgggggtcatcctgtatggtgagacctcttttccctgcttctcaccctgaggcctacagtttcctcaggcaaggcctctctgggccacttctgaagggttctgatgaaaactgactgctggcccagggcccctgctgaaggggcgtcaggccaggcttgacccattgccctcccaggctccgctctgcctcccttccacagaaggcctcttcgggcaagcccccttttggctc

SEQ ID NO: 136864 - DNA, 686 bp, Homo Sapiens
ttgtggccatcctggttcccgtcggcatgtgtggtccggcatgaccgcctacggtattcgcttgatgaccttgtctgattttgttccctatgtgtttggtgttgttttggggatgtatggccttgttgctgtgctcttcgggcttttgcccaggtgtggcccaggagctcctggatgttgtcccacttgctgtaggtcgtgcatgttttctgtctgaccatctgcgttgttctttcgtttatggcctagtggtgatcttgaactcacagcgatgataaatgttgaaattataatgcccagggtaattggtgtgtagaacatacttcttcactttgtgtgtattcgcatcaaagaggatggccactccaagagtgaagtagttaaaaaagtagtcattacacttcgatggaacttgtttatgaggggaaggagaatgaattttcatcttgtcttctgatttatagaagactttgtgctggagagccaagcatgctaagaacatcttggcaggaatcaccaaaatacactgaacgttcaaatacccgcatcttggcatctgctaataggccaggtccacaacctgcagcaagtaggcgaagtcgtaaacctgcaggtccagttccatctcgaagaacatctacactctcagcatagacattgcccaggaaacatctacactctcagca

SEQ ID NO: 136865 - DNA, 1001 bp, Homo Sapiens
tggcagtacaggctggtgttaatcggcacgagggaaacttagcagatggcggctccctgggcgtcctgcgcctggtcgcccccatgtggaatgggcgtatcaggggcatccatcgcctgggtgcggcagtggccccagagggcaatcagaagaagaaaaggacaatactccagttcctgaccaactatttctacgatgtggaggctctgagggattacttgctccaaagggagatgtacaaggtgcatgagaaaaatcgatcttacacctggctggagaagcaacatggtccatacggcgcaggtgcctttttcatcctgaagcagggaggcgcagtcaagtttcgagacaaggagtggatcaggccagataagtatggccatttctctcaggagttctggaatttctgtgaagtgcctgtcgaagctgtggatgccggtgactgtgacatcaactacgagggcctggataacctccgaacctccgcaggctggacatctcggacctccctgccgtgtccaaccctggcctcactcagatattggtggaggagatgctgcccaattgcgaggttgtgggagtcgactgggctgagggcctgaagtcagggccggaggagcagcctcgggacacagccagccctgtccctgcctagcctttagccctgtccccactcacgtggcttctcagcgggctgcatggaatgtctggtagctcaccacacttctggcttccatttgtcttcactcaacgtcagggtgggggagtggtgctggccaatcacaggagagagcgtgagttcccagtatttattcctggctgcccttggcttacaggtcacagctcctggtcaccctgtcaggcagccctttttcatgcccctgttcagggcctggggagttaaggctccaggctggtagatagccgcagagagccacactcacttgtcaggagactcttctcaaactggccctatgggagtgccctgccatttcttggcg

SEQ ID NO: 136866 - DNA, 1111 bp, Homo Sapiens
  misc_feature (181)..(181): n is a, c, g, or t
  misc_feature (221)..(221): n is a, c, g, or t
tgaagaggatttttcctgaccaagaagaggtggtggctctttggccggtattaaacaagccttgagcccttttaccttccccaggcctggaaccaggggcatgaaaagggctgcctgacagggtgacaggaagctgtgcctttagccaaggggcagcccaggaataaatactggggaatcnacgctctttcctgtgattggccaggcaccaatccccccanccttgacgttgagtgaagacaaatggaagccagaaagtgtggtgagctaccagacattccatgcagcccgctgagaagccacgtgagtggggacagggctaaaggctaggcagggacagggctggctgtgtcccgaggctgctcctccggccctgacttcaggccctcagcccagtcgactcccacaacctcgcaattgggcagcatctcctccaccaatatctgagtgaggccagggttggacacggcagggaggtccgagatgtccagcctgcggaggttctggaggtggtggaggcaggcgaggccccgttcggagatgcgggggcaaccggccagcgagagctcctgcaacgagtcggccagtgggtagaggcggctgagacaccagtcgtccacgtggcagcagcgctgcagcgacaaggactggagctccttcaggcggaggaggttatccaggccctcgtagttgatgtcacagtcaccggcatccacagcttcgacaggcacttcacagaaattccagaactcctgagagaaatggccatacttatctggcctgatccactccttgtctcgaaacttgactgcgcctccctgcttcaggatgaaaaaggcacctgcgccgtatggaccatgttgcttctccagccaggtgtaagatcgatttttctcatgcaccttgtacatctccctttggagcaagtaatccctcagagcctccacatcgtagaaatagttggtcaggaactggagtattgtccttttcttcttctgattgccctctggggccactgccgcacccaggcgatggatgcccctgatacgcccattccacatgggggcgaccaggcgcagggacgcccagggagccgccatcttgctaagtt

SEQ ID NO: 136867 - DNA, 1207 bp, Homo Sapiens
  misc_feature (1207)..(1207): n is a, c, g, or t
tttgtaaattatgaaatatttattgtttagactgagtaatatgacatgaaacaacaaacctgcacatttctaatttataacaaatctgtttccttaatgggtggaaggaaatctgaggacagttctaaggagtcttgtctgctttcagtgcgatcttctagtcatactgaagacaatacctctccagattggtctttccccttcttctcctctccccggtcaacgtcaatcacatgcaccactccaggttttagaatcaggtcatccgtctctacctgactcctgttgtcctccacctccatgtagcttccttttgtttgctgggcagctttgctgaaggcttctttaaaacgacgtttgaattcaacatctggacagaagacatactcataaaggccaccagcgaggacagctcctatgatgggccccaaccccatatatccaatggtttttcccaattttcccatgataactgcaggtccaaaggatcgggcgggattcatgctggcaccagtataattgattgcaaataaatgtccaattgcaacagaaaatccaattgctaaagctattgagccagtgacatcagtccgtttggaatcacagctggcaaagatagtaaacaccaattgaaatgtgattatcaactcaaccaggagaccatgaccagcggtaagatttccatgaaccatggtgactcccaggcctcccaccacactgggaggtgtgaccagatagaggattcctgctccaatgatggcccccaggcactgggctgcgatgtagaagacagacttggcgatgctgatcttcctggtgcacaccatggccacagtcactgcagggttgatgtggccaccgctgatatggccaaagcactgcaccatggttgcaatgctgagtccaaagcaaagggagatgagaaccatgtcgaccggtaaaggcttttctgttccaccccagttgatggtggatcccaggctgaggagaacaaaaataagcatggccagaaattccgctgtgactgctttccagaaagcttgagtccagacccctttgaaagccaccatgatgttctctctggtacacaaaggtccacacttaccccaccgccttgctgtgggtctgtcactcatgccttccccagccagagtgccccggccgtaatggccgaattcccgggcatatgtccggtaccgtcgactgn

SEQ ID NO: 136868 - DNA, 478 bp, Homo Sapiens
  misc_feature (346)..(346): n is a, c, g, or t
  misc_feature (433)..(433): n is a, c, g, or t
  misc_feature (456)..(456): n is a, c, g, or t
gacagccccccttcagcccagcccagccaggtttcctacaccgccaccatgccattcggtaacacccacaacaagttcaagctgaattacaagcctgaggaggagtaccccgacctcagcaaacataacaaccacatggccaaggtactgacccttgaactctacaagaagctgcgggacaaggagactccatctggcttcactgtagacgatgtcatccagacaggagtggacaacccaggtcaccccttcatcatgaccgtgggctgcgtggctggtgatgaggagtcctaccgaagttttcaaggaactctttgaccccatcatctcggatcgccacgggggnctacaaacccactgacaagcacaagactgacctcaaccatgaaaacctcaagggtggagacgacctggaccctaactacgtgctcancagccggtccgcactggccgcancatcaagggctacaaacagagt

SEQ ID NO: 136869 - DNA, 467 bp, Homo Sapiens
cactttttagaaaaagtttaataatagcaggttatcatcatatgtaaccataaaataaaaacaataagttaaaatcttctctcaagaaataagtatatgccacacataaaattcattacagaatcttttttgaaaacagacccctttctctgataaatcattgtttgaagggtgcaaatttcaaaaacccacattgtccacaaggcaaagcaaaaggtatcatcacagtatgagtcatttcttgttggcagacatctggaaaacctgtgacttacaagcagctcaaatctagccctaattaaatttacaggaacctttgctctttcaagaatagtcttgttggcatcatgctaggttgctaaaaagagtaatatgtgctctattcacagtaacattctctgtccagtgcttttgaatgaggataaccaaacaggttttcctgaaaaaaatcattaggaggcagattc

SEQ ID NO: 136870 - DNA, 455 bp, Homo Sapiens
tgttttaaaattacaaaccaagtaagaagtccaacatcctcttccatgaacagctttgtgacagagctcctgagtgtgtgcagcccccactgtgctctgaatacagtctctgcagctccagtgtgtcctcttttcaggaaggaaagcatattcaatacattcactatctgtaccccctggaacttgcacatgctgacgagctattataagccaactcatccccagctctcttccgggactggtcaccccttgtaaaaccattctgtataagttctctttgaaatttctgatcttgagcagcatattcagaaagttcagattccaccgccggaggagaatgtttggaataaatttagaaaatagagttggagccatctgaacccactctggtctgagggtatcaggcctttcacaatatttgccatagttgaaggtgtgactgaaatggtgttgct

SEQ ID NO: 136871 - DNA, 1034 bp, Homo Sapiens
agccaggctagcccgccctgttcttccaggatggctcgggcactggcactcacgtaacggggcacgataggcccgggcccagcttcctgagatgagcctccaccttctggcccagccagggcctgcaggctggggaagccatggtaggtgacatcatcaagctggatgagccgaggtccaaaagcctggcacagccgctccaccatgccagtgatgcgggcgatgttgttgttggaggaacagataaaagagaaaaggcattcgatggggtcttgtcgcagcagtcgcacaccttggaatttctgagccacctcttggaagtgggagtccacggaaccccagtggtgatacagttgagccagggtaacatctagctggaagtacttgcgcacggcctccagctcgtctggtgtgggcctgctagcctggctcttgtctcctcggtacacagtgcagtggagctgctcctcagtctgagtcagtgtccatacttgatccgctagtacaccactccagtgtgcaggactttgctccctccaccggaaagattgtccagaaggcagaaccaggtccaggcgcagctcagagcgagggcacgggatggaggcccacagggcaggagtggaggctagagtacgatgccccatgcgcctgggcagaagcgcgcgggcaggcatttccacagcaggcaccgccccgtagtagccccgcctacccagaaccaggcctcgtcgacgcccaaagaccccgcccagacaaggaccacgacccttaaggcctcgcccacacggtgctgtttaacaaccttccctgtttcacttaattcctccacctcctgcatgcctcgccctttgcgggtcatcaaagccccgcttcgtgccccaattctccggctttcctgaggtgtaggtcccgccccctccttgcgacttatcttctcccgcccccagagcctgtgggcgcgcacagctgtgttcttctggttactccagggcagaccctcgtccgattacagcgggagcctctacctagct

SEQ ID NO: 136872 - DNA, 802 bp, Homo Sapiens
cgccgggccgtcacgatgagcgccctgggcagccggtccgggcctacgactttctgctcgagttcctgctggtggtgcgacagcgacgtgggcaagggcgagatcctggcgagcctgcaggatggcgcggccgagtccccgtacggccacccggcgggcatcgactacaagacgaccaccatcctgctggacgggcggcgggtgaagctgcagctctgggatacttcggggcagggaagattttgtaccatattccgctcctactctcgtggtgcacagggtgtgatcctggtctatgacattgcaaaccgctggtctttcgagggtatggatcgatggattaagaagattgaggaacatgcccctggtgtccctaaaatcctggtggggaatcgcctacatctggcattcaagaggcaggtgcccagggagcaggcccaggcctacgccgagcgcctgggtgtgaccttctttgaggtcagccctctgtgcaatttcaacatcatagagtctttcacggagctggccaggatagtgctgctgcggcacaggatgaattggctcgggaggccgagcaaggtactgagcttgcaagacctctgctgccgcaccatcgtgtcctgcacacctgtgcatctggtggacaagctcccgctccccagtaccttaagaagccacctcaagtccttctccatggctaagggcctgaatgccaggatgatgcgaggcctctcctactccctcaccaccagctccactcacaagagcagcctctgcaaagtggagatcgtctgcccacccc

SEQ ID NO: 136873 - DNA, 535 bp, Homo Sapiens
  misc_feature (146)..(146): n is a, c, g, or t
gctgtagtcattacttctctcaaatgccttgctctgagaacggacacagtggccttgagacgggtcccgggaggcagacacttatccagggggccgctgacccacctcggcatctggagggcagaggtggcccccggaatagcccntgggcctacccttgctcggccgccagagccggtccatcccatgccgcagcagcacgattttggccagctccgtgaatgactctgtgatgttgaaattgcacagagggctgacctcaaagaaggtcacgcccaggcgctcggcgtaggcctgggcctgctccgtgggcacctgccgcttgaacgccaggtgcaggcggttccccaccaggatcttggggactccgggggcatgctagcgggcaggagaaaggcgaggagcatgggttacttcagtgagattttgttgtcgtcgtaatgtgggtgctctgggtcgaggaaccccccacgagttcatgtccacccagaacctcagcatgggacctcgtttggaaagaccgtctttgcagacg

SEQ ID NO: 136874 - DNA, 756 bp, Homo Sapiens
  misc_feature (325)..(380): n is a, c, g, or t
  misc_feature (631)..(631): n is a, c, g, or t
tttcttactcgagtctgtgcagagtagctttaatctgcaggtgatcccacaacaccatctaagcaaatgactgggctctcctctccctccacaggatgctttaccagagttactgatgaagttcctcaaggacagttcttagccttccttcctccatgagcagattctggctttgggggacatgcaaaagatcaataaagcagaaagcaaaaataaattagaggcctgaggaactacaaactagataatcagcctctaagtaaatgggagttggccacactttgagattaacagagtaatgtatttgaaggaatgagtatagatnnnnnnnnnnnnnnnnnnnnnnnnnnnnnnnnnnnnnnnnnnnnnnnnnnnnnnnntggtgatggtttgaattgagatgtgtttaatacacactgaatttcaaaggcctaatatgaaaaaaagtaaaataactcattaataatttttatattgatcctatgttgaaatgatagtgtttttgagctattgggttaaataaaatatatttaaatccataccatgggtttctttttacttttaaaaaaatgtggttactagaaacatttaaattacagatgtggctctcattatagtatttacagtggancagtgcatctctagatgcctataccctaatctgtgttagtaagaattatcaagcacgcttcagatcgcactctgaccatacttttagaccttggggatatagagctagacttatttatatcagct

SEQ ID NO: 136875 - DNA, 664 bp, Homo Sapiens
  misc_feature (116)..(150): n is a, c, g, or t
  misc_feature (172)..(474): n is a, c, g, or t
caagttttcttaaaatcatctcgaaagccagtgatgatacagaatacatcaatatttatctcttggacaaactggaagtatatcattacagttgctaacaaaggcccaagtcttcnnnnnnnnnnnnnnnnnnnnnnnnnnnnnnnnnnntatccttctgtcacatatacannnnnnnnnnnnnnnnnnnnnnnnnnnnnnnnnnnnnnnnnnnnnnnnnnnnnnnnnnnnnnnnnnnnnnnnnnnnnnnnnnnnnnnnnnnnnnnnnnnnnnnnnnnnnnnnnnnnnnnnnnnnnnnnnnnnnnnnnnnnnnnnnnnnnnnnnnnnnnnnnnnnnnnnnnnnnnnnnnnnnnnnnnnnnnnnnnnnnnnnnnnnnnnnnnnnnnnnnnnnnnnnnnnnnnnnnnnnnnnnnnnnnnnnnnnnnnnnnnnnnnnnnnnnnnnnnnnnnnnnnnnnnnnnnnnnnnnnnnnnnnnacgcacccataatttgcgccatattgcacaaaatgcttccctccatggcagctagagttctggatgggaattaggtaccaccaattaggtgcactcatggacaatttggaaagtggaaataaggcagaggactgctgttcttgctgcttttgattgctgcaaatatcagcagatgggcaggcaggatatt

SEQ ID NO: 136876 - DNA, 566 bp, Homo Sapiens
  misc_feature (11)..(11): n is a, c, g, or t
agtggaagatnatttccttggggaacttcagcggcctggatcttaatcacatggatgaaggctgggactggatcccaaagaaagggcctgggtcccaggtgcaatcagtcttcttgaacttaccatctccttctcagtcatctcttgaatggtggctgagcatacatttccccgggggacgaatgtaaacattattcaacagatctcagcttaggaaaacacagcttgttatatatttagtgtttaacattccagtgcaggcagtatcttagcatcagactttcctcattcatgagtagcagtttagaaaggaatacatataggatacttgataagactgtggctgaaaagaccatttgtgtgtcagacagctggctctatcctccaatcagtggagcacccaggactatcgcaggagaggtggaacagatgaagtgtaagttctctgtaaatctgaagagtccgtataatgattgttcccacttaaccccttgggccacatcttgatatggagaacatttccacctcttgcatcaacctgtgctctctatgttttggcctcgtgc

SEQ ID NO: 136877 - DNA, 444 bp, Homo Sapiens
  misc_feature (23)..(23): n is a, c, g, or t
  misc_feature (231)..(231): n is a, c, g, or t
tcttgcttatttttgacattggnaagggcagaaagcgatttgccccagtagtgtaataggagttatagaccagaggctgaaacccaaactatataaaaaggaattcagtggagggggctttgtaatctccattaatttgtgttgctacttccaggatcaccaaaaattacatgtaattttacatgttaaacacattgaaacataacctatgtttataaagcctaaccgggncttcccttccagaagctctcctgcttgtcatgaagtgagaacaatgaaaagtcatagcagatactcagtttaactctgtgtagaaccctagtagtgtttgagctgttattccgatttggattcagactgtgtgttgtttgcttatgggacactgcctgtccgttctgtcactgtttaaatttaatggagtcctataaggttttttccttccag

SEQ ID NO: 136878 - DNA, 821 bp, Homo Sapiens
  misc_feature (447)..(447): n is a, c, g, or t
  misc_feature (605)..(605): n is a, c, g, or t
aatgtagcaaattttacttatttgtcatgatcagttttcacagtgcttgtaagtgctggtaatagaagatggacatggtttaggtcaaaacttggaccagaaaccaacttcctttgaaacagctctaccagttataagagcaatatgctgttaggtgaagaactgtttaacagaaatatattatgtttttgcaaacaggcagctgatccaaaattgtgttggaaacacctcgggaaccataaatgacatcaaatactctataaattaatgctgttaaccaaatttaaaaaataaaacatacaattttcaaattgaaggcacacatcccagttggtactggcaagtttaaattgtttctaatactggtggactcttcatttgtaacctactgagcagttacagagggtactcccattgatacaaaatgctcaggtaccggcatttctngcatatccagagttctttctatattcccttctgatttccatcccttatctgttccctgcttttgtccttccccagtctcacccccatctctagccatggtaagtgagatggcggaagcaggtgcctagaagcaagcagcaggaagcagcattttcccnactcctcccagagctctgggctcccagactgtgttcctacctctggacaatgctttctcttcctcctgggctcagagggcttcaccagagcctggaccaccagtggtaatagctgcattatttagattttgcttcaggatgctcagaggttaaggttaactgatcatactgaacatcatgaactccaaaagctttcacttaatccttcaggtaaag

SEQ ID NO: 136879 - DNA, 718 bp, Homo Sapiens
  misc_feature (88)..(88): n is a, c, g, or t
  misc_feature (690)..(690): n is a, c, g, or t
ccaattcacatttgtcttgcctttgacagtggctgctctcggtgttccatacatcaaagcaagttctccaaagctccctccttccccnaacactggttgcccattcattgttaacatagacatccgtctctccttgatcaatcacatagaagttatccccttcatcaccttgctgaatcacagtctctcctgcgataaaggagaccgaaaacatggcatcaaaaatatcacttctctcattatcatcaagatgtgaaaacagcacattcttttcaatggctttggctaaagcggccattgtcttgtaatcttttggtataacctttctaacataggatgccgcatcttcctccgtgtagacctcagcgctgatagcacctcgtcgcctcctacctttaaccactgggttgggtggaggaggagaaatctcatcctcccttgagtctgtacgagtgcctgctttctgcagattctgaatctgttttgcctcctccttctccaacctctcaaagtattccctgaggaatgccatgggtctctcaggtcgagcagtgcacaactgcacaatagaatctttgagcagcgcttgaatgttatgcttctggacgtagagctcacattctcgaaggctgcgtgcctcctcactggcggcggtactgccagactccatggttctctggggacgggcgncggcgggcgcgaggctgcgggtgcgagg

SEQ ID NO: 136880 - DNA, 447 bp, Homo Sapiens
aataatgctaattctgtacatattttattccctagtccccacttccctgtttaaaaacaaaatctacttagaaaaaaatccctgtgaatcagttgtctaatgaatttagcaagttaaatgccagattgacattttgctttatagtttatacaagcatgtgtgtgtttttttctcgcagagaaccatggagtctggcagtaccgccgccagtgaggaggcacgcagccttcgagaatgtgagctctacgtccagaagcataacattcaagcgctgctcaaagattctattgtgcagttgtgcactgctcgacctgagagacccatggcattcctcagggaatactttgagaggttggagaaggtaaaaataaatgtggggagatgatgaggtgattgtgacagttgttacatttaataactggaatgttactaatttgtattttttgg

SEQ ID NO: 136881 - DNA, 462 bp, Homo Sapiens
  misc_feature (89)..(89): n is a, c, g, or t
  misc_feature (266)..(266): n is a, c, g, or t
  misc_feature (425)..(425): n is a, c, g, or t
aggtctgaatggggagattgaatccggctctcctcttcccttccaagcagcttccggtaaggtgggcaaatcttccaacatccagggcnatcttcaacgttgaagcaaggtccttggtaactcggcgcaagatggcgggccatctcatccttgaggtgcccggatttcgtcctccaggcgtgcaatgttgtcctggtagccactggcctcactggcaaatcggtcctccaattcccgcatctgcctcatcagggaatcgttaggtnccttgagggcgtcaatctcggcaggtgtaggactggatctggtgtcggtattccatcatctcctgcttggcctgggcagggcgtcgttgttcttgttggctgcctgggtcaggtctgacaccttcgacttgtaccactcctcagcttcagaaatgttcntagccgcgatggtctcatactgagcccggatatcccc

SEQ ID NO: 136882 - DNA, 549 bp, Homo Sapiens
  misc_feature (18)..(18): n is a, c, g, or t
gctcttttccttcagtgncccttaggctctaaatatggaagttcttttctggactgaaactaggggaaaaagtaaaaggtccagactgtatctctttagaatgttgaccggtttctttaccaataccctatttaatatactgatacttgtattgaagatgcagttatacagagggaaataaaagaataactggaggattagaaaaaatatttttatacataatatggaaaatattccacacatgctaagcactcttcaatttcccttaggtgtcaccctgtctctttctttatcctctcattcccttctccagtggtaggcatttgggtactcaacccaagactcacaggtttccatcaactaagtttcagagagcttaaacaagatattttcagtacacaaattctcagaagagtctactttaatcagagcaagatgattatcctttacacctataaacactccaggatcagtcttgcattcaaatgaaacacagttggagtgcatattatgaaggacaaagaaggcctggtctggcagtggtttttc

SEQ ID NO: 136883 - DNA, 458 bp, Homo Sapiens
aatggtaatttttaaaaatcctcacataaagccctttaatggtgtatgtaattggaacaccccctggtatatctgttagatttacttaagtgcagccattaaaacctcagctaaaacttttatagctgaggacacaattcaaagagattaaaatccagctagattggattcccttgaggaaaccagcagacctatcaagagttcaaggaaaatagatgtcttagattaagtgaagtcaaatgcatacataacttccacaaaggaggctatacaacaaatataggacattgagtcaggatgtctgggagcttctggctcttggattcttcatttgtaaaaggaagggtgtagactagatggactagatgatcacagagttgcttccaattttaaaaatctgatttacaagtaagtgacactatataccaagtccatgtaggatcctaaatcagacagtt

SEQ ID NO: 136884 - DNA, 763 bp, Homo Sapiens
  misc_feature (56)..(56): n is a, c, g, or t
  misc_feature (704)..(704): n is a, c, g, or t
ggagctcacaatctgatggaggaggtgacgttcttgggtggtgttccaagaaagancagatcagaggagaggagacaggaaagagaaaaagtttcactttggacatgatgagtttgctgggcctgcagaacatccgagaggatgagtggggctggagctcaaatgcaagatcggggaatacagatttgagaatcatcagccctaaggtggtcattaaatgaagggtctgcctgagttcatgcagagactgtgtgcagaatgacatgagaatgaatcaaggacaaaaccaactccaggaaatgtcaatatgtcaggggcagggaaagaaaaaggaccagcgaaggaacctgagaaactagatcagaagatcatcacagggaagtgggtcaccaaaatcaatggctgggagtgatgattgacatcgaaaggccaaatcacataggaactaaaatgtacccattagattatcttggtaagagcccttttagtgaaggagtgggagtggaagtcaatctgcaatggattcaagaagaaatgcaaagtgaagaaaggcagatgataactatacaactaaaaaaaactcagtcatgaagattaagatccaagagttctcagcatttttactgattgcacctgagaaggccagtggggtgacaaatgtcaaggatccaggatggagaagcaataatagatggagcaaagtnctgggggtcaaagcaggggaagggatccagagtaccctcgtgccgcctcgtgccgaatt

SEQ ID NO: 136885 - DNA, 1062 bp, Homo Sapiens
gggggcttttgaatgtcgtcatgtcaaatgtatgggcagtgaggtgactggagggccctggatggccaaaagcagtcgccgtgactggtcaggaacttggtgcctggctcaggggaccttggtttctgtccgtcatggccaatggtgccgcacacggccacccttttgtcactttaaatggggcatccccttccctgagtctggtgggaaggaccctgctaaggggatcctggcctgagggcactgcccagtgggcagcttcctgtgtgggaggagaggaaggtgccaggggtgcagaacacacagctagtacctggaatggagcctagtaggggtcactgcccaggaggtgagggggtcccctgtttctcccagaaccttgggaccacaggcagccctgaagctggggctgggcagggggttttgggggctgagcctagtgccagcctgatgccagtctaacgccaccctgcctggagtgggccccccagccagctgcgcctgtgcctgccagggtagggcagcaggaggctgtcagtagctatccttgggccaaggccggttgcgctgccagttccggtcactgtggttgtgttctgagtcctgggctagaagccggtcttgggggtcatgcccgttagcactaggcagccccgaggtgtgttggcggtgaggctggtacaggtcctggtaggcatctgcatagtcctcctccaggtggcgggagctacgctgtgaagatcctgtccaggcttggcgggagctctcgctggcctcatcagagggcatcaagctgtcccgctcaaggggggagtgctcctcgccacgctcccccagcagctgctggttctgaagtccggggatggcactgggaggacccagaagtccggggccaggggctgggtggtgcgtggcccgccagtaaacctccaggtactcagccaggtgctcacaggcatcctccagctggttttcatccagaatcacatcaaatgactccggtgggcactgaaccagcttatcatatgccatcatctgtacggtcaggtgcttcatctgtgc

SEQ ID NO: 136886 - DNA, 1313 bp, Homo Sapiens
  misc_feature (37)..(37): n is a, c, g, or t
  misc_feature (355)..(355): n is a, c, g, or t
  misc_feature (1091)..(1091): n is a, c, g, or t
  misc_feature (1093)..(1093): n is a, c, g, or t
gagttcttagtgcccgtgtgaaacaccagtcctctgnaggatgttgtctgcatgtccacagcaaactgtgacctgggtttcagcagctcctgaggaagcttgaatagcaagtggctggtgggaatgtccccaaactggagggctccatgattggcctgggtcttgggaagtggtgagcaagcatcttgccacaccttcacgctccttggggaggccactggtgtgtcctgcaaccagctgggttgatacgaaaagtctttggtcttgttaaacctggtagaaccctttaagcaaccttagaaaagggtggtttgtttaaactgcagcgctccccaggggacacatgtctcttgangagagttactggtcaaatctaggactttcaggactccagtgataacctctggacaaaaacattgctaatacaaccctcaaaattgctcccgcccagacgcagagactgccgggaacttgaaatgtgttttagccttttgctatttctcagaagctggtcatcgatgagaagccgtagtccagagttgtcgcttattacagatacataatgcagtaaaccatccatatacgtctgtggagatttaaaaattgggccgccgctatcgctggtgctcaattcaatgtaaccatcttccagagtgacctgcaggttccttgtccatgtctgatgatctaataatatgccactgggttgaaaggtctgaaatccaaatgaggcctggaggtggtcagtaggtggtaagcccaaatcagtgaaactcaattgtcctcctctggagaatgaggcagatcgcacaagcttccagtcttccgagcactttttggttactcccacagtatcattcaatctaacgacaccactggttttcttcaaatttttcatgcagcctcggaaagcaggcgtagaaatgttaaatctttccctgattgcaattggaattcctcccagataatatgtgctgaaatcaaatacttcaccatcaattatagtgttttgaacgtccacatttatccacatacgcttttggagttttccaattttgatctgaatcgaatggtctctgccgttgtttatngngttttccaactcctctctcttttggtagctctgaattcagtttgtatctcaccatgagcttgccatcttctatatttagagatatgaagcgatccccgttttctgcaaagaacagcaagcctctatccacggtggtctgaattgtctgtccaaaggttgggatgggagcatgtggttgagttggaactcgagcatagcccgtaccttcaaaataattttt

SEQ ID NO: 136887 - DNA, 802 bp, Homo Sapiens
  misc_feature (682)..(682): n is a, c, g, or t
  misc_feature (761)..(761): n is a, c, g, or t
  misc_feature (779)..(780): n is a, c, g, or t
tttatctctagcaggggaaggctagcctaatcagggatatgtccagttcagaaatgtggaccgttttgtggcaccgcttctccatggtcctgaggctccccgaggaggcatctgcacaggaaggggagctttcgctatcctgtccaccaagccctgagccagactggacactgatttctccccagggcatggcagccctgctgagcctggccatggccacctttacccaggagccccagttatgcctgagctgcctgtcccagcatggaagtatcctcatgtccatcctgaagcatctgctttgccccagcttcctgaatcaactgcgccaggcgcctcatgggtctgagtttctccctgtcgtggtgctctctgtctgccagctcctttgcttcccctttgcgctggacatggatgctgacctccttataggtgtcttggccgacctcagggactcagaagttgcagcccatctgctgcaggtctgctgctaccatcttccgttgatgcaagtggagctgcccatcagccttctcacacgcctggccctcatggatcccacctctctcaaccagtttgtgaacacagtgtctgcctcccctagaaccatcgtctcgtttctctcagttgccctcctgagtgaccagccactgttgacctccgaccttctctctctgctggnccatactgccagggtcctgtctccagccacttgtcctttatccaagagcttctggctggctctgatgaatcctatcggnccctgcgcagcctcctgnngcacccagagaattctgtgcgg

SEQ ID NO: 136888 - DNA, 969 bp, Homo Sapiens
cgtcatgccagatcagtttattgtttcccttcgtccgtgacacgcttgtcctgctacatgggcttttttgcgatgctctggtctcatctctggaggctccactcactgtcagtctcggtccatgttccggttccatggttgcacactatttgtcatgcccgtccctcgccttgtacttggctccagcaggtgtagatgttctctcgcgtggacactactccttgtctgggatagtcatggtggtttgtggttcatgccacagtcattggttgtcgcgttgagctccatagtacccaagggtgacacgctctctgtggtagttcgacacagttcgcagtgcacactcatactcatcacagcatctgggtcttccgaaggcgtggtcaatcggtgcgggtgggcaggagtggtggggacactcttttgcactcctccttcctgcaggcgcaggtgaagttgggtctgcactcgccagggttggtcagtgtgggctggaggccacgttcacagtgaggcactgggggcaggtcacagctcactgggtcacacacacactcatactcggggcagcactggtctgcattctggcggaggcgggctacttcacacaggccacacgtgggagctttggccgtggggcagggctgcgttgtgcagttgaccttccgcccgctgaggcacgtgcagatctgacagggctggtggtccgggacccaggcttccaggaactggtgctggactccatcctcaccaatgcactgagtgcaggcctcttcagggacacagctgccttccaacatgactttatctggagggcagaaacagccttcggagggatggtccccacaggagctctcgttgccatcacagtgccggggacagccatgctcacagtggttgtagcccagagatggtgggcatgacatagcacagaaatcaggtgtgcttcagtcaaccgcatcacccgtt

SEQ ID NO: 136889 - DNA, 1767 bp, Homo Sapiens
  misc_feature (71)..(71): n is a, c, g, or t
  misc_feature (160)..(173): n is a, c, g, or t
gggcgggtaaagaaacctttaaagggaggccgccgcccaaagggccccaagttaattgagagggagaaaanctttccatttgaaagaggtgaattttgtcctttttggatttcccagacccaaccatgggggtttattactgtttggttagaaccgttgnnnnnnnnnnnnnncgtgggccgcccatgaggagccaggcagggagccagcaaaatgattgtggcaaattcccagctaaaagaaaagctgaccactggaaatatgcccaaaggttaatctccaccagtagggcatccatccggaaaagacttggaaaacaactgtaggggcttcaaaacttacttcaagtgtctttattcttgaatttgcaggtcataaatgaaatatttaagaaagtcttttgcccctccctctcaaggagtgtttcttgcattactggcaatcattaaaagagttgaatcatagattctctggatttaccaacaccaatccacttaactggaatttgaagctcatcttcaataaatcggaacatagttttgtgcattaacaggtagttctttaaacgcccttgcatttgatatgtctgtgttccatcctgggagagtcttatattgaacttcaactttatttaagacttcttggtttgctgggatatgaggtatgatttcaccatctaacttgtaagcaactccaactttgatttccgtaaacatgtccaaaatatccaacttggtaagtgccaacgcagtaaatccattgatcatatgagcatatttgagcaaaacgaggtccaaccagccacatcttcttttccttccagtagttacaccaaactctctaccccttgtttgtaataattctccaatttcattgtcttgctctgtaggaaaggcaccaataccaactctagttgtataagctttcacaactccatacacttctccaacattttgaggtggcatacccaaaccagtacaaacacctccaacagtacaaatttgaagagtttacaaaagggtaagtcccaaaatcaatatctaatagtgctgcatttgcaccttctaccaagattttctttggtggtccatgtagggcctcatatagaaaataaactccatctctcaccattggtttaatcttttccatatacccttgagtttttgtaattcaccttcaaatgtctatttccaaagtggggtatatagatttgtattggttagctagaactttaaacctctcagagaagccatcaaagtcagaaacaaggtcgcacatcctgagtccactccgagcagctttggacgaataaactgggccaatgcccttttttgttgtacccaaattttttcctgcttgttcttgtctctgttgttcctggataccatcagctgcttgatgaaaatcaaatacaatatgagctctgtcagatataataagccttttttcccagccttctagtccttttcctttttgaacatttttctctgcttcttcaaacaatccaggtagatgaattaccacaccatttccaatgaatgcagtgacatttggattaattattccactgggtaagagatgaaaatcatattccacagaatccacaacaactgtatggccagcattatttcctccctggcagcggcacacgatgtcggcgtcctgcgccagcaggtccaccaccttccctttgccttcgtcgccccactgcgcaccgagcaccaccgtcacccggtttcctccgggccgcgccctggggcggccgca

SEQ ID NO: 136890 - DNA, 533 bp, Homo Sapiens
ctggctgaccttgagatcacaggtggtgttgagcagcaggttggaaggcttgaggtcacggtgcagaacgttagctgaatggatatattttaaccctctgaggatcgtggtagagaaaatagcagatattggtcattgctgaggtgttgtgtcttcaagagcttgtaaagatctgtttccatgaggtcctgtactatatatacatctttcatttgctcgatggttggtgctcgaataatgtcattgattccaatgatgttctcatgtctgaagcgcagtaagatttttatctccctcagggttctctggcagtaggtctggtgctcaaaggggctgattttcttgatagctactcgaactttgttgacattatcataagcagagcacaccatgccgtaggcgccctcgccgatgtacgagaggttggtgtagcgcggccccacgtcgaacacctgcccgcgttaccatctccgggtccgcgccctcggctgcaaccgccggcatgttccctgccgggccgccgccgcatccgc

SEQ ID NO: 136891 - DNA, 922 bp, Homo Sapiens
ctggatctactgctggagaagacagttacttagagcaacccctgtagagttctccagaatgtagaatgtccgtgacaattttgttgtttggccaagtggctggatttaatacaccatagatctttgctattaggaacttatacgatataccatatttctttctacaggtatcttgagcttcacgtaagcaactactcgaaaattctgagaacttgaaatcccttagtatacattatattctacttcattgttccttggcatatgacacattctcatttgcagcttgctcatgaatttggtttttaaatactagcttccttgataaagttgttcttcagtttttcttgtccaaggtgccatcctattgacatcacaaatcagtgaatgaccagacattactaagctgtttaaattatccacttagccatcacgtggataataaaaatgctttgactgaagaaagccacattctttccattaagtgttcactgttgtcatacagagcaaaagagttgctatctgctgtactttgccccatgtcaaattaggagctgttttaatgtggcggtttaagttggggcaaatcttgcaagaggatctggtggctcctactcccctgtgaaatcaagccagctttccagaacatcggacttctttttctattaggtccatcctgctggtaacttcgttctgcacattttctatgtgtgtaaggagattgagctgccactgaagatgtgagtctcctgggtcttcggtgccctttttatcattataaacaaatactgtattcccttcagctggattcttcttttcaggcattccatgttcttttgctgagtactgtaaactgtttttacttctcatgtggaattcttgttcttcttccaaactactaacatcatcatcatctgagctccca

SEQ ID NO: 136892 - DNA, 877 bp, Homo Sapiens
tatgtcctgacagaggccacatcccagtcatctgagaatcccccgcgtggcctcagggctcaagttggtgtcatacaagttcttggattatcaccttgtacagttacatcatcgtcgcaaatagatgacttttctcgtgtttggtggataagtagagggagataaaatcgaacatagttcagaggctggagcaattcaggcctcgatgagtctggtctgatcttccctttgaggaccatcgggttgaattccacgattttaaagtttatttctctcagtttggaatgttcaatccattttcgtattcgagtcagagtattccggagtcccactacatagaacaagatgttggcgtcagtgttgctgtagatgctattgatggcagccatagtggcacccatcctccctgctgcagcacaaatcaccacaggaatctcttcttccagttcttcaggagtctcggattcatcatctgcgtcattcttgggcacagtccccttatgaactttcttatacagaatcacacagagggtcacgatcagaaggaacagcagcacctgattaatttttcgtaacagagccatgtgtattcatgcggataagaactgtaacctggtgaatggtgagggtagggctttgggctcctcggtccagaagagctgcaaggcagagcgttcaaatcgtggctggccctgggctgccgccctcacgctgcttcggctgcttctaagatcccattggaagtcccaaagggctggagagccccaaggccaatattacgtttccaaaagaatattcctccccgacccgcactcccctttgcttgcgttgacttcggaacgtctcgggtttcttccacctctgcgcgaagccgctg

SEQ ID NO: 136893 - DNA, 555 bp, Homo Sapiens
  misc_feature (404)..(404): n is a, c, g, or t
  misc_feature (506)..(506): n is a, c, g, or t
gtgcagcaacactggtttattctcaggtttgaaagtcaggaaagtagacacagcggggaaaggcaagggccgcgggacacagcatggcgcagaagagtcgacaagaagacaggtgacaggcagaacttccctccatgctcctctctcggggaccatcggagccgggcagttacttactcttgttgttactgttctcactgacaaaatcttccgcaccatcggtgtcatcctcatcatctccggatgagatggcatctgtgacattcaccatgaagtacccaagtttcactgtctacagtcctactggcagtacaagcatagaggccggagtctcgtaggcgtggcgccctttatctgcaagtactccccaataagcactgtcctattgttgggccccaagtgcnccccatccttagtccaactgatcacggcggcatctttcaacaggcagcgcacctctagcgactccccctgcgcagccacgtacacttctggttgagagattnagtatttggttggtggctcccagacaccactcggactgctagcgggttc

SEQ ID NO: 136894 - DNA, 599 bp, Homo Sapiens
tttagaatatctcttccaagttttaaagttcaagtaaaattgatgtaatagcaataagtgtagtaacagtaaagtagggaatggtgactattctatagcaaagatctacagatgttggaattgtgttagaaaccttcagagccacaccacagccttctattacatttaaatgtcgtaggaaaaactgcaattttcccggaaaattgtattaaggacccaggtgctctaatacccaagagctgttttgacacatcaaaggttaagtttgggtctttgaaaatcctgcctcttactgaacactttaaaagtcattcatgttaaaacacacacattcttgcctttgactatacactgtaaaagtactacatgttaaaatggagatggggacatttttgttgtttaagtttatggaagtatgactccattttagtatagctacaatgtcgcaaacgatggaataaggtactcatcaatacattacctggtaagtataaatagttcaacttgccggctttgaaaagcttaatcctatttcttatggtgaaccttaaataaaatgaaaatacacaactgacaatgtttaacgtgcacttaaacaa

SEQ ID NO: 136895 - DNA, 610 bp, Homo Sapiens
  misc_feature (40)..(40): n is a, c, g, or t
  misc_feature (55)..(55): n is a, c, g, or t
  misc_feature (66)..(66): n is a, c, g, or t
  misc_feature (78)..(78): n is a, c, g, or t
  misc_feature (86)..(86): n is a, c, g, or t
  misc_feature (106)..(106): n is a, c, g, or t
  misc_feature (110)..(110): n is a, c, g, or t
  misc_feature (112)..(112): n is a, c, g, or t
  misc_feature (144)..(144): n is a, c, g, or t
  misc_feature (146)..(146): n is a, c, g, or t
  misc_feature (169)..(169): n is a, c, g, or t
  misc_feature (182)..(182): n is a, c, g, or t
  misc_feature (209)..(209): n is a, c, g, or t
  misc_feature (218)..(218): n is a, c, g, or t
  misc_feature (230)..(230): n is a, c, g, or t
  misc_feature (257)..(257): n is a, c, g, or t
  misc_feature (266)..(266): n is a, c, g, or t
  misc_feature (283)..(283): n is a, c, g, or t
  misc_feature (304)..(304): n is a, c, g, or t
  misc_feature (309)..(309): n is a, c, g, or t
  misc_feature (315)..(315): n is a, c, g, or t
  misc_feature (323)..(323): n is a, c, g, or t
  misc_feature (497)..(510): n is a, c, g, or t
taaagtttttattggagcatagccacattaattcctttgnatattgtattatggnggcttgtgcanttacaaactggnagagctanggtagctgcagaagatatgntccncnaagcttgaaaatatttcactatcgtggccctngnacagaaaagtcccatttccagantaaatcaaatgantacgcaggcatcacccagacagagaanccaccaccntgtgacttgctntaaaaggcaaccataagacaaggccantaggatatnaacatccattttaaganttctaatgcatgagaagtaantcagnaaaggntgggtctnacctggcccttacttaagaaatcctaatttaaagaaatgaagttttctgtaatgtatttttaagccaaataacaggtctctgacatccaaagaatgggaagaaagtgataatcaatggaatatatttaattcgggtacaggaaaaccaacctcttctttcaatctcctcacagnnnnnnnnnnnnnntctttttttgctgggaagtatacaatggaaacctctaacttgtatgttaatttgtataactcaattgctcagaaatatttgaaatagctaccagtttaga

SEQ ID NO: 136896 - DNA, 646 bp, Homo Sapiens
  misc_feature (26)..(26): n is a, c, g, or t
  misc_feature (106)..(106): n is a, c, g, or t
tgaaaaacagaaggcatctccttaanctgctttgcaggtggactgcctgtaacatctttggcaccatcaaaaaatcttttcaaatttttggtttgcgcactgtcancggttaatagtgcatcttcagtgtcctgatttttaccatcgttcttgacttcagcagcaacatcggtttgtttttccttgtgatgtctctccaagtgatacctcagagatgtcttctgggctgcagcatattcacaaaattcacatttgtatggtttttcacctgtatgcgttctgagatgaatattgaggtaataatttgaacggaaaaactttccacaataactacactctcttgaagatgtaagatgttttatttttcctccatcatcatttttatccagatggattctttcgggaagcccatcctcagatccgtcttcagaaccaccttcccctcgatccacggctccattttcatccagaggggcggcgaggtcaggagaacacgtccccggctgcctcccgtccacagacatggtgggcgactccgcgccggccctccggtccttcttgtggaccctggagtgcaagaccagctggtggtaggttctgaaagctttgccgcactcggagcagtgagtgggcttctccttgctac

SEQ ID NO: 136897 - DNA, 1153 bp, Homo Sapiens
gggagatcactaatcaacaaaccagctttcggggtctgacgcgatccttgcctcaggcctctcgaggtccagacagccgcccagcccgctctgcgacgcagcagtgaatagtgtggtacctccttgtctcggttcaggtccagacctccccgtcttccggctgccctgaacgtcaggcgacctcaggaccctgtgattggcgcctgcgccggcggaccgtgaccgaggaaacccctggagggacttgggcattccttgggctccgtgcctgttcttcgtgctcctttcgggcaaggatctcacattatcagtctttgaccgacacagaatgcctggcatttgataaatgtttgttgaacttgaagagacatatggacaatgaatctgcaaagatactggggagagataccaatatcatcaagccagaccaacagaagttccttcgatttgctcccacgggagttccgtctggtggaagtccatgacccacccctgcaccaaccctcagccaacaagccgaagccccccactatgctggacatcccctcagagccatgtagtctcaccatccatacgattcagttgattcagcacaaccgacgtcttcgcaaccttattgccacagctcaggcccagaatcagcagcagacagaaggtgtaaaaactgaagagagtgaacctcttccctcgtgccctgggtcacctcctctccctgatgacctcctgcctttagattgtaagaatcccaatgcaccattccagatccggcacagtgacccagagagtgacttttatcgtgggaaaggggaacctgtgactgaactcagctggcactcctgtcggcagctcctctaccaggcagtggccacaatcctggcccacgcgggctttgactgtgctaatgagagtgtcctggagaccctaactgatgtggcaccatgagtattgcctttagtttaccaagttggtgcgttttgctggtggaccgggaggcccggctgggaccagactcctttcctggatgtgatggcagcaggtattccatgaagtgggtatgggcagtgtgtcttccctccagaagtcctggcagcaccggattcaggactataacagtcactggctacaggaatagtaagcaactctctgaagaatt

SEQ ID NO: 136898 - DNA, 323 bp, Homo Sapiens
  misc_feature (228)..(228): n is a, c, g, or t
  misc_feature (234)..(234): n is a, c, g, or t
  misc_feature (265)..(265): n is a, c, g, or t
gaaaggttttctaaactaatggttaaaacagaattttcttgtaaatagggaagttggagcattctggttaattgagattttgctctgtattgacacagctcgcaccagtttggttcaggagctacctccttgtcattgaattgacgagttacaatgtttggtattcggatacattcagcaagaacacttgaaaactcctcaccaactatttttaaaggcttactttgnttttgnttttattttttcactggctattttggataanaggatgtttacatcttaatgtaaaaaaatgaaaacaggtataaatgttttatgtatag

SEQ ID NO: 136899 - DNA, 951 bp, Homo Sapiens
  misc_feature (13)..(13): n is a, c, g, or t
  misc_feature (38)..(38): n is a, c, g, or t
  misc_feature (80)..(80): n is a, c, g, or t
  misc_feature (107)..(107): n is a, c, g, or t
  misc_feature (349)..(359): n is a, c, g, or t
  misc_feature (362)..(384): n is a, c, g, or t
  misc_feature (531)..(552): n is a, c, g, or t
  misc_feature (937)..(937): n is a, c, g, or t
cgctacgttcctncagtaatgtggctctgtaggatctnatgccaagacagtcatagtcagccatgacacaggccttccantagccagttcagtgcccttcccaacantgcctctccatcccccacacctccccgactcccaccaaaatgaaagtggaagcacgtcttgagttgcccatttcttctgtgtctggtcaggcacacgtcaagaatgttggctggtgatgggctcaaggcagcacagcccgcttcactgtgcatgtgtgcaggcttgattgacactggcaaaatctgcaaggatatttctagacattccaagtgattggttcctctgaggaaatgaaacattnnnnnnnnnnnaannnnnnnnnnnnnnnnnnnnnnncatgtatatttaattatttttttaaagccacaattgaaaaaattctttgccactgggtagaattaaatctgacaggaaaccctaggagtttttattagtaccattattgttttctttggctccatgtattatgtcggtaaaatgacnnnnnnnnnnnnnnnnnnnnnnttgtaaaagacaaatattttgtacaaaaatacaaagttttaaaagctctttaagtatatttcatattattactaatagttggcctatatatctgtatgtctgcatatttttcctacacttgggattttagaaatgtatggcactgtttacacagtatatgcttaagttcttcccataactcaacgaccaatgataacctttttctgattggagtgttccatactttggaagacataatttgtataatcgcacggttactgacggaggagaatctatgtgattcagtccatgtgcacaatgaaaatcagcatatcaccctggggaacattttagttcccaagtctttgggtaatgacggatggtaaaaaacactagctgtcaattntttttcagtaattg

SEQ ID NO: 136900 - DNA, 1012 bp, Homo Sapiens
  misc_feature (107)..(120): n is a, c, g, or t
gtaaggaaaaaatatgtttatagtgccccccaactggaaaagtttactataggggaggaggattcccccacggggggttcccccttgggaaattccccccaagaaannnnnnnnnnnnnncccgaaaccggttaagaaaggttaagggggccagaggaacttgtggccaccgcaaaaaagagaacggtttggttcttgggcccgggtaactgcttgggttcagggggttgggttttcctttccaaaaggacccaatggggtttcggcacaggttaggcagggtccttaaattttaccctgagggaaccaagggttacatagcataggagggggggaaaatccaaggccggggccctccctgtccccccacacagggcacgcccccatccctactgtacaaggtgctgtgggagtactggggtggggcatacagcaggccatgccacacttggatgctggatgacatgtgaacacccctggccaaagagctccctctggaagggcccagtcatcacatgcagggcccaccctgagtcagcatgaggggcttacgtccaactggtagccttgccaaagatacctgtgcgcctgcgggttacagcccagtgaaatgcgtcacgtgcatgacatggagggcaccccagccaggagggcaagcaaaagtggcagtggcataacttcttcacgttgttgacctagctaggtagaggatgccttggaggaatgggagggtgtccagaggccaagagaatactcctgtcttgccctcggctcagagccagatctcatcacttctcacgctggacactcgatagatatagcccagcactgggaggcggatgaaacctcggctggtgaggaggccgccgggctccgggtccagaagctctggccggctgttgttctgagccatctgccggtctgctggtttcactgctctggaatctggagtgaggtcattgcccggccgtaatggccgaattcccgggcatatgtccggtaccgtcgactg

SEQ ID NO: 136901 - DNA, 1083 bp, Homo Sapiens
tgaacctccaaggtcccccccctcgggaggggcttctgctgcccttccaaggtagggcccacgtgttgccacttgggcaatagcggaaggcggaggccatagcctgccaaaagtcacctgactctggtcctctgatcccacaaagataatttcagctgtcacatttccatgaacatactcattttcatgaggaactccagggcatccagcagccggcaggccaccctgcagcacagacctctttgacagcacaatgctttgggctgacatccagggccgactgaaggctcctccccaggctgggtaacacccaagaaccagtttgagtgagaacttttgcttctgtggtcctgagtcacaggtgagggtggaggtgggtgcagcttcatagagaatggcctggttgtcctggtctggaaggacttcagcttccactgtcgcccactcttgtctgtcagcactgtccctgtgggcaaagcttcaagtgaggtggtcactcggctccgcttcagcgtctgagggctctgcctggtcttctgagggctacagctggtcttctgagggctacccctggtcacctgagggctcttcctggtcttctgagggctgcttttgggggttgggggtctgctcccggagcctttggatctctcagaggaactcagagtatcttcagactcagaactgtcaccatctgagaagagggataatcggggagaggtgacggtgctggaccatttcactttcttaggagaggtttcaaaactggagttcagccctctctttgagccttggaaggatgacacatgtggattgacaaaggtctgggaccctacatgctcctctacaggcaaagaatttccacagtaggggcagaatttgaatgccgcttggatacttttgccacagtctggacagaaggagatcatgctttatgaggtcacggtctggcccttggatttactgggttggaaactccatcttgacagcgaccttctcagttgcccagcgaaaacttccgctgggcggagagcgctgcctcgtgccgaattcgacacccagcctcgtacctagccgtaggtt

SEQ ID NO: 136902 - DNA, 1034 bp, Homo Sapiens
ttctcatcttatctcactctcttcgtgtggcccaattgcatgcattccaaaactcatcgagggaccggctccccccgcgccacctcaagcaacttttcacaatctttggcctaaccagccgactgagcttctccccagctggtacaccagaacgtattgtcctggtggacaccgaacccatgcagtaaggatgccaccatgggttcgagtacagcttctcccacttgttgacttgcagaggcttggcggcccgctggaagaagttctgctcattgcacaagcgcccatccttggcatccagttttgagtgagaacttttgcttctgtggtcctgagtcacaggtgagggtggaggtgggtgcagcttcatagagaatgccctggttgtccctggtctggaaggacttcagcttccactgtcgcccactcttgtctgtcagcactgtccctgtgggcaaagcttcaagtgaggtggtcactcggctccgcttcagcgtctgagggctctgcctggtcttctgagggctacagctggtcttctgagggctacccctggtcacctgagggctcttcctggtcttctgagggctgcttttgggggttgggggtctgctcccggagcctttggatctctcagaggaactcagagtatcttcagactcagaactgtcaccatctgagaagagggataatcggggagaggtgacggtgctggaccatttcactttcttaggagaggtttcaaaactggagttcagccctctctttgagccttggaaggatgacacatgtggattgacaaaggtctgggaccctacatgctcctctacaggcaaagaatttccacagtaggggcagaatttgaatgccgcttggatacttttgccacagtctggacagaaggagatcatgctttatgaggtcacggtctggcccttggatttactgggttggaaactccatcttgacagcgaccttctcagtgccccctcgtgccgaattcaccacccaggcctcgttacctagaccttata

SEQ ID NO: 136903 - DNA, 984 bp, Homo Sapiens
gacagggccccttgctttgggggtttgacatttcccgggggccgggattggaaggttccctccccccaggggctgggtaaccccccaagaaacccggttttttgttcctgggggaaccgccggaaaccccaagcaggtaagggatgggccagcagtgggggtcggagtaccagtttttttcccctgtttgacttgcaggaggcttgggcggccccgctggaagaatttttgctcattgacaaagcgcccatcctgggcatccagtttgagtgagaacttttgccttctgtggtcctgagtcacaggtgagggtggaggtgggtgcagcttcatagagaatgccctggttgtccctggtctggaaggacttcagcttccactgtcgcccactcttgtctgtcagcactgtccctgtgggcaaagcttcaagtgaggtggtcactcggctccgcttcagcgtctgagggctctgcctggtcttctgagggctacccctggtcacgtgagggctcttcctggtcttctgagggctgcttttgggggttgggggtctgctcccggagcctttggatctctcagaggaactcagagtatcttcagactcagaactgtcgccatctgagaagaggggataatcggggagaggtgacggtgctggaccatttcactttcttaggagaggtttcaaaactggagttcagccctctctttgagccttggaaggatgacacatgtggattgacaaaggtctgggaccctacatgctcctctacaggcaaagaatttccacagtaggggcagaatttgaatgccgcttggatacttttgccacagtctggacagaaggagatcatgctttatgaggtcacggtctggcccttggatttactgggttggaaactccatcttgacagcgaccttctcagttgcccagcgaaaacttccgctgggcggagagcgctgcatcccgggaattccggaccc

SEQ ID NO: 136904 - DNA, 931 bp, Homo Sapiens
  misc_feature (531)..(657): n is a, c, g, or t
  misc_feature (677)..(789): n is a, c, g, or t
  misc_feature (857)..(891): n is a, c, g, or t
cggatcgcggatcctagagcctactattagaaggttgaacttagtaacccgtattaaagtcagtgcttcattcttagattaacaatgacagagtgagatatctgtgattacaagtttataaagctctgtggggaattgagaggagacagatattggggaaagactggcagtgtgtgctgagttagacttgggaatgtggcgcaaattagtcaatattgattaggatattgttttagaaaattttaaatgtgtcctgaaacttgtggcatattgaaaacgatattaaggaacaatgactcattagccctaaatacaatttaatgacgtgccatcaatgggcttaagaaataagcagggatgggggatagagaggcaaaatgaggtgaaagagaaaatggaaagtggaaaatatgtttgaacattggagaatgtgaaaaggccaccaaactgctttagttatcactcagaagtgctcttcccattggctacctgcgttctgatcacccaaacaccaattttagagcagaggannnnnnnnnnnnnnnnnnnnnnnnnnnnnnnnnnnnnnnnnnnnnnnnnnnnnnnnnnnnnnnnnnnnnnnnnnnnnnnnnnnnnnnnnnnnnnnnnnnnnnnnnnnnnnnnnnnnnnnnnnnnnnngccgggcatggtggcgcatnnnnnnnnnnnnnnnnnnnnnnnnnnnnnnnnnnnnnnnnnnnnnnnnnnnnnnnnnnnnnnnnnnnnnnnnnnnnnnnnnnnnnnnnnnnnnnnnnnnnnnnnnnnnnnnnnttggctgggcatggtgccccggccgtaatggccgaattcccgggcatatgtccggtaccgtcgactgnnnnnnnnnnnnnnnnnnnnnnnnnnnnnnnnnnncggccgcttcctcgctcaaaactcgcggcgctcgtcgtta

SEQ ID NO: 136905 - DNA, 777 bp, Homo Sapiens
ttttgttttgttttatacttttatcaaactccccagcaaacttgctgactgcatttccacacattaccaacacctgccaggacttcacagcagggtgacccgctaagcaagctggcctaggttcagcccacactgctgctacctactcttcaagacattaggtgtgaacagagaaggggaatgaggtgacctgggtttgaatgacccagggcccaatgcacaagagagaattttgatgtcaaattagggtggcaaggagaaaacaaaaaagatccaacttagaaacagaaccatgattcaacatttgcaaaaagcatcatcaataagcctgaagaaggccacggactgtgcatccgctggctcagagaaaggctgggcagccggaacagcagcttcctgggtaaccaggcaacaatctcagcgcctgggagtcagggctgcgcactccactctggccagaacacaaacggcattggcactgtaagctctcagttacgtggccctcttttctctcctctatttctccaaacatatgtgcacacccagaggaactgagtggcaattccagggtgcgggcgggcaggaggggagagaggacaaagagagaataagatgagctaaatgttttgtgaaaagccaccgcccatccgaaagcttgtgacttcccttgccccaacaatctttgtaggttgccccttttcccattcctacccaagaacacaggggtgggggagagggaaggctctctttgtcaaaaagcagttatctacatttcag

SEQ ID NO: 136906 - DNA, 1454 bp, Homo Sapiens
aagataggctaggtacgaggctgggtggtgaattcggcacgaggcagcacaccccggcatctcctctgcggcagctgcgcctcgcaagcgcagtgccgcagcgcacgccggagtggctgtagctgcccggcgcggcgccgccctgcgcgggctgtgggctgcgggctgcgcccccgctgctggccagctctgcacggctgcgggctctgcggcgcccggtgctctgcaacgctgcggcgggcggcatgggataacgcggccatggtgcgccgagatcgcctccgcaggatgagggagtggtgggtccaggtggggctgctggccgtgcccctgcttgctgcgtacctgcacatcccaccccctcagctctcccctgcccttcactcatggaagtcttcaggcaagtttttcacttacaagggactgcgtatcttctaccaagactctgtgggtgtggttggaagtccagagatagttgtgcttttacacggttttccaacatccagctacgactggtacaagatttgggaaggtctgaccttgaggtttcatcgggtgattgcccttgatttcttaggctttggcttcagtgacaaaccgagaccacatcactattccatatttgagcaggccagcatcgtggaagcgcttttgcggcatctggggctccagaaccgcaggatcaaccttctttctcatgactatggagatattgttgctcaggagcttctctacaggtacaagcagaatcgatctggtcggcttaccataaagagtctctgtctgtcaaatggaggtatctttcctgagactcaccgtccactccttctccaaaagctactcaaagatggaggtgtgctgtcacccatcctcacacgactgatgaacttctttgtattctctcgaggtctcaccccagtctttgggccgtatactcggccctctgagagtgagctgtgggacatgtgggcagggatccccaacaatgacgggaacttagtcattgacagtctcttacagtacatcaatcagaggaagaagttcagaaggcgctgggtgggagctcttgcctctgtaactatccccattcattttatctatgggccattggatcctgtaaatccctatccagagtttttggagctgtacaggaaaacgctgccgcggtccacagtgtcgattctggatgaccacattagccactatccacagctagaggatcccatgggcttcttgaatgcatatatgggcttcatcaactccttctgagctggaaagagtagcttccctgtattacctcccctactccccttatgtggttgcggtatttccacttagggaagaaatgcccccaaaaagaggtccctgggccatccaaacataaattcttctcaccaaagtcccactttttactccaaatttgggtggaaccaggtggtaatagggaaagaaaa

SEQ ID NO: 136907 - DNA, 161 bp, Homo Sapiens
  misc_feature (119)..(119): n is a, c, g, or t
  misc_feature (136)..(136): n is a, c, g, or t
  misc_feature (147)..(147): n is a, c, g, or t
agcccacatgaggatattttaagccaagacccaacaaaggtggaaaaacacaccagagagtgcacagatgagttccaccaaaagaaaaatatttgtaaaaaacttggccagcgcagtantcacacctgtaatccancatttgggagntgagcaggagaatt

SEQ ID NO: 136908 - DNA, 1487 bp, Homo Sapiens
  misc_feature (31)..(31): n is a, c, g, or t
  misc_feature (37)..(37): n is a, c, g, or t
  misc_feature (48)..(48): n is a, c, g, or t
  misc_feature (79)..(79): n is a, c, g, or t
  misc_feature (85)..(85): n is a, c, g, or t
ccagctcttcctttctccgtctctaactgangccgtncctcattatgngtccaccatctcagcaatttctaatccctgnataaanaggccatggcagagaagtctctgtttcttttaatggccaactcaaccccatggctgaaagccgagggacaacgcgtggtcaccgaccggactcggcagcattacaatctgctcctaggccacagcaggccctggggggtttcccttttgaacctacaccatcccttccttggcctttgggaaaagctatcagtcacatgtagttgctggagggggttggggagtgtgtgctgggggactctcactcggggcttcccctaagggagaggacaccccgggagagctaggggttctcccagccctgtaccccagcagatcagactcctgggcacactaagaggaaactcaacacaaatggggccaggtatttgacagatgctgttcagaggtcagttcaggccactttctgcagggtcctggaccaacaggcacttctctcctggaggttcctcgaagccagctggcgggccgtgcggagggcccagcccatcaaagtccctcgtcgttgtaagtcggagaatggggcttcaggatgctctgaggattcttctccactagagggcgccagctcacctcccctgtcagaagcagatcctccccgttcatggagtccaggtactgtatctgtttcctcacatactctaccagcaattcaagatgtcgagggtcttcacatttccggttgaagaaggttctccagagggcagcggccagcccatgatcatctgaaaggatcccctcatcatatcccaagatcgctgcatagaaatgatttgtcatgaggatcatgttcttcttcaggatatagggatttaacccccatgactctgccgcgctgctgaacatcctcccacataaaatgaactatgatacgacacatgtacttcccactccggccttcctgcttcattcggactagacacatccagacgtggagtagggttataagaaaccatgaattgaatgtatcaggcatctgacaccttagaaagaattcctcgaagtcagttttctccacacagctagtatacatgcgcagggccgcaatcttaatcttccatttactgtatttcaaaggtcccgtgaatcccatggcttctattatctttgtgaaagcaccaaccttctcctcaacaggctgtggggaatctttggtagtagaaagcttacgtgtggtgtgatacttcctattcagctgtatgtctattccaggaatctgttctgatccaccacatgcttgggactggctcatctggggccactgggaagtgcgagacagagccctgtccccctgtccttgggtaggagacacaggtatcaatcggctgcatactggaacccactgagaaatgctagtctggttcctaaggactcgcaccagcaacgccatgttcctcaatccc

SEQ ID NO: 136909 - DNA, 1124 bp, Homo Sapiens
atatgttctcgaagtcggttatatatgcaacctaaccaagaaatcaacatgctcctgctatttcaatgatgcttcatgagggcaaggcctgggctctgctaggggcaggatggtgctcctagagctacctgagctggacaaacccatggcagacagaacagaaagtctggcacctgctgactccggccctccctgtcacttcatcacacagcaaatcttaaaacttgggttttttcaaagaacatttaagtccatgttcattttcctgcttcagggaagatggtagcaaagttgaaagccgaatcccttcctattttagcacttccaagtatcctggatgaatataggggcgaggggctacactgacaatgagcaggatgcactctaggtcattgtggacaggcacggagctcttgagagcactgctcaaaggaaagagggaatctctatctggatggttggcctggaaactaaataatgactaatgccaggccagccccgttaccctggggtgggtatggatggccctgggctcccctccgtatcctggtatcgtgacgaaggccatgagaaccagctctggtttacagactcgatgcaggagctggaggtggccagcacattaccagcctgtcaaggatgaaagaccaccttgggcatggagaggcccagaggcaagcatcagagcaagagagaggaggtgggaagtccattcagaggcagacgtagattctacgttccagttacggctgatctatggactctcctgagcccgcccccagaactgccgcaactctccaaaggcttttattctttgaaatagagttgccattgaattaaaagcctacaggagagacgggcctggtctgtggtctcactaaagcccaatgcccaattaggtccagagaagaaagaagagtgagttccctacctggatttaagaactcggaccactttggactggtttgtccaatctctcttataatgctaaattccattgctgaagcctccagaaatgatctcttctgctacatcaagcctgggagtttacacaatgatacactatgttttaccttcaaagataatgctcctaacgatcgagacagtagggtccgagctcgact

SEQ ID NO: 136910 - DNA, 384 bp, Homo Sapiens
tgcagcatttttcggcctctttatttagaacccggcggacgaggggccggggcagtggtacagacggctcaggaaccattttaacagacttgtcttcaagtttcagataaacacagtcataataagagagacagcgaaacgccgaaagagactgcaagctagatgggcatgtatggcagctacagcttgtgagtgacccccttccccagagtccgcgatgaaaataaagttacacttgtcaataaccagatgtgggagatggagagtgcctttggcataaccaataaccgagctagtgcgtggcagagcggtccacgcctggacataaatagaaaatataagttagtataactttaaaaactttttgtacaaatatacaatggt

SEQ ID NO: 136911 - DNA, 420 bp, Homo Sapiens
  misc_feature (16)..(16): n is a, c, g, or t
  misc_feature (52)..(52): n is a, c, g, or t
  misc_feature (71)..(71): n is a, c, g, or t
  misc_feature (83)..(83): n is a, c, g, or t
  misc_feature (132)..(132): n is a, c, g, or t
  misc_feature (169)..(169): n is a, c, g, or t
tgacccaatttcttgnagtactcttcccaagccttggaataatcaaccttgncagctggggctggattctnctgaccccttgncattagtttgagttgtagttggtccacctgcaggggttgctggtggtgnttgtgcttgctggttgataatagtgagcgtaataganagcccaagctgctgaatttggatccgttcctgccttagctggatcaggaggagcctgctgctgccagtgtggatatgcattttcccatccctggggagcatatggggttggaggaccatgaattgtaaataacttcatattaggatctgcatttggtggaggatttctctgaagttctattcttgcaccagactgctggcttatgctttttatgtttcacctccttttcctattattaatccagttttccc

SEQ ID NO: 136912 - DNA, 404 bp, Homo Sapiens
  misc_feature (331)..(331): n is a, c, g, or t
  misc_feature (333)..(361): n is a, c, g, or t
  misc_feature (365)..(365): n is a, c, g, or t
  misc_feature (375)..(375): n is a, c, g, or t
tgatctatagccttttgtcttcaggtgaagttcctggactctatactcttgaagaattagagcccttgctgttaccacttaaggatcaagcttcacaagatggtttttttggaccagtcttcaattacttcacatatagaattcagcaaaacttgcatattgtcttgataatggattctgcaaattcaaacttcatgataaactgtgagagtaatccagctttgcataagaaatgccaggtgttgtggatggagggttggtccaatagcagtatgaagaaaatacctgaaatgttattcagtggaacaggtggtggaggaaaataccatgntnnnnnnnnnnnnnnnnnnnnnnnnnnnnnttcnggttgatccnggattttcctaaaaaccatttttattaat

SEQ ID NO: 136913 - DNA, 475 bp, Homo Sapiens
aagttcgagacttggtagtccctggaaaatggggggcgtatatgagagtgtcacctgccagcagtgtggggtagcacgtggtcagatgcagagaggggtgctctctcggacactgcccagccttgccccacctagccgagtcacaattcggtatcagccaccacgtgttgtcttgctgaatggccgtttctggaggtggcctggccggtcccgttttcctgagcccctcggttcacactgtcctttccctgagcctcagtggaggtcccaggtccttagctatagccctggcctccaccgttttccgtgtaataagggtcttcgcccagcctttctcctgtggggctccagctgcggcgattcatcaggaaatagccagtgatgcccaagacagccagcagggctcccgaggtgaccagtgcaatcagggtcttttgggaatagctctggtggcttgcaacatcttgctcagtga

SEQ ID NO: 136914 - DNA, 239 bp, Homo Sapiens
attaatataatgtctcttttccataaagtctttgaaacagttatagttcattgttgctaagacaaagtagcaagcataataatgcatgagatgagaatgagtttttttaatggcagactaaactctcagatttggcatcacaaggccaaaactcacaagtcacacccagaaggttgatgcaggcttgattgtggaaggttcatgaggattttttttctctattttagcataacaatgct

SEQ ID NO: 136915 - DNA, 1269 bp, Homo Sapiens
  misc_feature (149)..(149): n is a, c, g, or t
agcttcctagaggatcttaaagtttccccagacaacaaattctggggatggagtgcttcggctgtgagttacacgtcggaatgttcaagataaatgatgtaccttatggtcctttacacgtcagaatgttcaagataactgatgtaccnttatggtccttgaaaggaagactcaatactttccaggagtcaaagttaatttgaatgaaaatggaagagaacaagttgacaataatttgaagcaattcatgcttctagggctgaatgacgtttagatcagacacagagtgactgagccaatcaacaggcatgtagtgtgatctttcccaccacagtgaacagagggattctttgtccaaggcaggcttgcagctcggtccagcttgagcatttgatcaggatttgatgcttcaaagatgacccactctctgtaaactcattaccaaagcaaaatgcaatgatctcttccatttgtggaacataccaccaacacaaaccacgcgtggctttgcctcctgttcactccattttcaaggctagagaaagttcaagtccaaaacaacagttaaggttaaaacgctaaacctcaataggccaaacaaagacgcgggcagagtcagaggtcaaagatgctggcagagtcagaagtcactcggcacattcatgaaacaacagcaaaaatcatcaacagtaattcctgtagtgtagaaaactagtgcagccttcactgctggtcagcatctcaggtggctggcagtgttgagagacgcctgacaatccaagatcaggctggagctcctagacaaacccaaattagggcagactcgaagccccagcggtcctgatgtggctgacattgttctttctgtctcgcgggcaccggtcactccctcaatatgtgagcctgtctccttagcacgagagagaatatttccctcactattaatggcgagataaacacaattgtacaacttgtctgtaaagagaaaatagtattaaatatgcagcaacagtttacttctgttagagtgtcatgttttgaacataataatggatttggacaattacattcattttgacttcatacaaagataatgtttaatcttcaatgaattagaaaatgattttgaaaattatggctaatattacaaaacactcaacatcacatttcagttcccaaaaaaagaacaatacatacaaataatttgccataggcggagcagagaactgagaccagaggctcagatggactccagtgatccttataata

SEQ ID NO: 136916 - DNA, 1034 bp, Homo Sapiens
tcgcgttggcgtgcctggggtgtcgctgttcttccccgttcattctgcccaggcctcgcgccgtttatgggagctgccttgactcctttggttgccttactaccggtggcctcccgatgggtattttcccccgtgacggggtcttgtcagcggcttcactccgtgcagcttgccttggccggattgaagctccaggggcccctctcgtaagtcgttccgagcaaagccatgatctctcccattgtgggacatacccccgacacaaccacgcgtggcttcgcctcctgttcacctccattttcaaggctagagaaagtttcagtcccaaacaacagttaaggttaaaacgctaaacctcaataggccaaacaaagacgcgggcagagtcagaggtcaaagatgctggcagagtcagaagtcactcggcacattcatgaaacaacagcaaaaatcatcaacagtaattcctgtagtgtagaaaactagtgcagccttcactgctggtcagcatctcaggtggctggcagtgttgagagacgcctgacaatccaagatcaggctggagctcctagacaaacccaaattagggcagactcgaagccccagcggtcctgatgtggctgacattgttctttctgtctcgcgggcaccggtcactccctcaatatgtgagcctgtctccatgagaatgaaaaagtagaaaacccacatccatcctagcttgtcccggatcagagacactaaatactggcccactgcagctccaatgctccccgaaccatccacaattcctgtgacagtggccaaagcttcactgctcctttggatgagctcctggcgacccaagtccgcagaaatagcagaactaatcatattagaaggtccaccaataaaaaatcctgtaacagtcatccgaagggcattgatggacttatcatttggagaacgactatacccgatgagggacccaactgccagaagcagactcaggcctcgtgccgaattcgacacccagcctcgctaccctagcccga

SEQ ID NO: 136917 - DNA, 408 bp, Homo Sapiens
cacttttgcctcctgcctcccaccatcagcatgccagcaaatttcctttctcatttgtagctacttttaaagtaaatgttgaagtcagtctttcatgttgactaatttctcatcttcattctcatcatttttctttctgtcggtcctaaggatcagcgttctctctctgaacacccttcagtgctgctggccatcctcattatggtcttgttcaaactagtgtttcttgagtccctcctgtaagtctgttaatcctggatttcaacctctggggcaaagagggcctgtttgaagtttccttaagttcataataatggcatctggagcaaataataagcccttgtgtgtgtttttggcagaaaagccatgaagacaagcagatgctaataaaagaatctgattcttaaa

SEQ ID NO: 136918 - DNA, 885 bp, Homo Sapiens
  misc_feature (758)..(795): n is a, c, g, or t
atccgatggcacctcccgatacaaaaacatggagagaattctttaaataacggcacgaaactgagactgtcccccgaggaacctccgtgggcctcgggctgggggagggaccgcagtgcagtctctgcagtggactgggtgccattagcagcagcgtttctttcgtttactgttcttcgtgagcttcaccacatcgttctgttgttgctgctgctgttttgcccaggttgtctttctttgctcggaggaccagctccgtgatgcagttgaacatctcttccacgttgacattctccttggcgctggtctcgaacaactggatgcccatctgcccggcgaatttgtaggcatcttccgtctccaccaccgttccgctcagggtcgtcacttcttatgtagcccactaatacttcggcacacatcatcacagttctggttgatttcgtgaagccaccgcttgacgttgacaaaggacatcggcactggtgacgtcgtaaaccacaatgaccccgtgggtcccccgataatacgtggaggtgatggtgcggaagcgctcctgccccgctgtgtcccagatctgcagcttcaccttctccccgttgatctccacggtccggatcttgaaatccactccgatcgtggtgatgtagctgcctgagaaagtgttgtctgcaaaacgcaacagtaaactgctcttgcccacaccgctgtcgctgatgatgagcagcttgaagaggtggttgtagtcccgggccatnnnnnnnnnnnnnnnnnnnnnnnnnnnnnnnnnnnnnntactggcctcgcgatccgcagctcccttcgggctgctccggcagcggcggatccacttcccgaacaaacagccggaactgacagaaacac

SEQ ID NO: 136919 - DNA, 701 bp, Homo Sapiens
  misc_feature (100)..(115): n is a, c, g, or t
cattctttgggaacccagagaattgccggatcaccaagctgtccttccacaaggggtttcttctcctgagtcaggagagagtcattaagtgaacattccnnnnnnnnnnnnnnnncaagagtaaaacataaggtccaaatttaattcacttcctgagactcacatagagcttgctgacttgaacaaaacatgtcaacattgttttaaaatattgaggacactattttctggcagcatctactactttcatgttacaagtaagccataaagatagggcttcagggagaaataaaacacagatgaacttccaaagcaatacgaagctctagcagaagacctcattctctttttatgaggcacaaacagcaaaagaatagacaaaacataaccaccatgattacagacttcaggggatttcatatctagggtttcatgatgttttatggtacagtattattccttaatacggtattattcctactgagttcccaggaaataattttcatcatcaataatatggtttaaaagttcataccattcacaatatccatgtcaaaagactttcagtcttctttttatatatacaaatagaactgtagacagtcacatctctccaggctcatgcccaactgaaacttccattacaatgaagagacagaacaggaaagggacttctggtaccatttatttcctgtgacaat

SEQ ID NO: 136920 - DNA, 636 bp, Homo Sapiens
  misc_feature (51)..(51): n is a, c, g, or t
  misc_feature (219)..(219): n is a, c, g, or t
  misc_feature (499)..(499): n is a, c, g, or t
gaagcatgttgaactgaaggtctggctttggtaaattaggcagagatgttntcagcagcaaacaggtaaaatctgacatcgagaggcattattttaatttagggccagttataatcttaaggaactgactaggttcttaaaataatagaactgggaaataggactgggaaatgacccaccatcaaggtataatacggttacacttagcaacttgtttcntattagaaaacatttccaaatccaagttctttatgatgtgaacccagattttccaaatgccctaacccacttctgagcttttaagcaaggcctcagaaattcagcggggtgcctgggaggcttcattcacattcacctctaaggagaggctaaaagaggaatttccagatggcagctactggctcagaaccagggggtcccttgccaagtctgtctctatgtggctcccggaattgctgaggtctcacttctcagagggctttgatggaaaataaagcanacagctgacgctctcgagcctcggaactctggccaggctccctgaggggtgcatcctaggagaactgaaaaatgggattggagcttttgccttatccttacaccccaagttgctttgtgtggcagaacatctatgaa

SEQ ID NO: 136921 - DNA, 2367 bp, Homo Sapiens
cagggaacactggtaataggtgaaaatggctcctggagtcaccagtgttgtacacacacatggggaacacaccacagcttagatgtgacaaagttccttctcatatgactgttccctcaaggtaagactaagatgggagggggagaaaaagaatcctaaaaaagccaatttttaaaaattctgctttggctgattttgtgctataatgggtagctgatttctaaaaatcatatttcttcaaagagttttatatcgaaaggaagactaaatgtaatgtgcctttccttataatccaggaaaacaactgtggtatttcaaaaattctaaaaatatctactttcatgaaatagtaactatttcactacaaacctatttttcactaaatacacacatttcctaatcctggagcctcctgggaaaagcagtgggttctccctgggtcttgcaagactccagtgttcacaggagagtgtggggaatagcttcaccccgtctcctgggatgggctttgtcagaggtcacgtgcagagacgctatcagacttccaccaggcatgtttaagcaattaccccatacttgtaccagttatgtgatttcccctatctccaaacacattcccacttaactaggcacaagaggaaaagaaaagaaaggtgtgcccgtgaatctcaaatcaggagaatgtgcaggaaagccccgccatgttcaggcaatttggatttccaaaaggccacaggatagggatgtggcactcttggcttggagtctcaaactgtgtgtgtgaacagtacgactttcctgtgtcaaccttcagtgttgaggcagcgtagaagagagtggctggagagtttggaatactgaccacactggctctgggtgaagggcctctgctccagcaaagagccctgccgttccctgttaagtgttgtgagtgaaagacctgcttcacagaggagcttggagtttctccatgcctaggaccttgccagtttggattcatgagccttgagggtgccaaccgcatctttcactgcatggtaaatgatgttcttcacctgcagtttatcctcatgatttgtatgagtgttagagagatgcctgaattcctgagtcaggcggaaacagtgctttacatgttctggagatacaaagtcttctgctacttttatgcaactgtatagattgtgaacctggtgtggggctccagcaggtatgaaaacagcatcacctaggaactgcacaatagcccagccttgcacgccatactcctcatagagtcgcttacggagggtctggtccaggtaccaactttggtcatgaattgggtcatgatcaggggggttctcttggccttgttcttctccaacctttcggagcagctcccggatcttctctgcatccttggctgcatagatgtgccataaagcacctggcttctcttttccatcatgaatcctctgcttcgtcacctcatcggcatctccctcgtcaattgtcttgagtacctcttcatcatgagcaccctccccgatgggaatcccaacatacaccatcacattaacagcatcagacacatctaagtgaagatttgttgtaccaactcttctatcttctgctgttatcaacccataggcgttgtacatcttggggcccagatcaggccttacaaaagtagctaggtagcctagaggccagattgagcctgccatctcgtttggtatattctggcagaggaaggttctccatcagatcttcaaacctggttggcatcatgtctcgaaaatcttccccagggaggccagtccttgagtttgagcaccattggctgcccatcttctgaccgtagtcgtttgcatatgatctcgaaaccatcccagaaatcccgaactttcacatcggaaattatagcacagttcctgcagttcaccaagtctacatcctggtctccaaattcctggctaaaggcttctggcttccagagctcagacttgagctttttatgtacccccgaaaccagcactggctgaccttgcttccaacactcccggaagatcttccaattgtttttgttgctggggtcatggagacacagaagcctcccatcacaaagccaggagtgagaagtatggggatctagcacatttaaccccatcaccatctccttcacttccttctgggtatcagtcaagttgcaggcccgctttgaagcatctgaggttttcttattttctaccactgaggcaatgatgtggtcaagaaagttgggtaggctggccttgctcttcactcctgctgaggatgtagagaagaccgggggaaagggtatgcctgtgtccaagggggtttgaggaagttttcccggccccc

SEQ ID NO: 136922 - DNA, 460 bp, Homo Sapiens
attttgatcacagatgctctcctcccgggtcgttttccccaaacgagtcttgtttacacaagcagatcttaaacagaggtgccatttaattttgtctttaaaccttgctccacggggggcagctggctgctacagtctcttggcaaagatgtctcttgatacttttcaggtgtagtcattagaaaaagaacagctctctcccttctcctctcactcccgcctccgcccccattatgaaggcgttcagcccactctcaaccttaaaagccaaaataaaacaaaaccctaagtgcgataacatatcagatttaaaaggggggaaaaaggtctcattaaatgaggcttcccatggctcaaagatggctctgttcttatgctggggaagcacgactttccatggcagccatttgtgctgtgctccccttatatgcttgggcaataaagaacttagaaaacgaaa

SEQ ID NO: 136923 - DNA, 407 bp, Homo Sapiens
tttctgtttttcactttcaatgtaatcttcaaaaattacatgagatattcaacatactttattataaaataggctttgtattagacgattttgcccaactgtaggctaatgtagtgttcggagcccttttaaggtaggctaagctatgatgtttgacttttggtattttcaactcacagtgggcttatctggacctaaacccatcataagttgagaagcatctgtatacccaacattggttatgtatactttcattaaatactcatttgaaaaataaagctttcttcacatcaaccgtgtgatgtaggtctttaatttttgaaactgcaaaacaggttccaagatgagctcttactgatgtatatggtataatacggtatggccaaaaccactgcttatgacctctc

SEQ ID NO: 136924 - DNA, 491 bp, Homo Sapiens
  misc_feature (50)..(50): n is a, c, g, or t
  misc_feature (152)..(152): n is a, c, g, or t
  misc_feature (174)..(174): n is a, c, g, or t
  misc_feature (207)..(207): n is a, c, g, or t
tggaaaaggttagggaaggatgcccccggttaaacccaggaaattttttnccaaagccccattgctgggcttacggagtcccattaaaggctttgtaagtcccatcgtggcttttccaaccaaaaatgttgcatatacattcacttgggganccaaagcagaaattaaattagncagaaattgactgtaaacctgtctcatttcaantgatttttcagtaataacctggcttgatgaattgattatatatagtcacttaaattaagcagaccagtagacagttgcccttcctgggatgttccactatggcatccgggcctggaaagccccaatggagttacattcctaaaattaaaccaaaaaaaaggtggggagtggagggtgggggataatagtttacagatgccacttgaacatgattccatcaagtcagccagttcacttagatttcttcttaaaaaggcttttgatttttgatggctttttgcttc

SEQ ID NO: 136925 - DNA, 819 bp, Homo Sapiens
  misc_feature (198)..(210): n is a, c, g, or t
aggacagcactttgtgtggtatcttgctctaggagcattttcaagccatcagaagtgggactcttgaagactatttctgactttctcagcacaaattaagataataggagatggaggctccatttgaaaaacattttggttgtataatggttagcataaaacatacttttttcaagttaactcaggtactagagtatnnnnnnnnnnnnnaaatgtactgcagcattaatgaaaactagagctgggagaatgtgtttttccttgagtaaattgcaaatgcctgtgcaccgcatttgaccaggagggaagaatgagaggctctggtagcaaagccagtggaagaagttttactaggagcagttgtatcattcgtgtactttttttgtgtcatacaagtgagagtaaaatggtccatgtctgtgttttgaggaattttttgcctttcttttcagaaactaattctgaagcaagcccttatagttgtgctgcagtggtgtttcaatcacaattttagtgttcgactgtatgctttagttgctcttaagaaactctggactgtgtgtaaagtgttaagtgttgaagaatttgatgccctgactcctgtgattgaatccagcctccatcaagtggaaagcatgcacggagcagggaatgccaagaagaattggcaacgcattcaggagcatttcttttttgcaacatttcacccactcaaggattattgtctagagaccatattttacatccttccacggctttcaaggccttattgaagatgaatggatcacccattgataaatttaccagattcactgatgt

SEQ ID NO: 136926 - DNA, 598 bp, Homo Sapiens
tatcctcaaggtttattcccttatatctaccattttctatgatcaacacactcactaccaaaaagtcccactagcgttgccccaggtgctcccgtgagttggctgctactgtgaagtggccccatccatctaaatctctcagaggaccattctaggattactaaattagcttaacttatatcctgaataggtttcttttctggcaccagaccatgggaagaatcgtgtgaacctttacctcttgtctgaggatggaaccttgattttccattaatcccctggttattatattagaagaaaaagacctaccacctgaccagccaggtccagaagccatcccatgctagttaatcacatatgctttcccaatggaaaaaagtccaattgttaaaccttgatacccttgagtaccatcatgccaaaatacttacccaccagagttccctttggaacagactccatgactgttataaaaagtcatagatttccatcccggttagaagccataaaaacatgctcatgccacgtaggccacgactatgaatatgtaatttaaattaccagttgtttctatgaattaaccccatatatttagagg

SEQ ID NO: 136927 - DNA, 300 bp, Homo Sapiens
  misc_feature (259)..(259): n is a, c, g, or t
gccaaaaagattagaagcatccatacaccccactgccccccatgaagcccaggagtaagaggcagttggctaggtggtagacagccccttccacatcctgcttccacctaatgcacgctgaaccctgcaagagaagctggcccactctgctgctgttggcgctcatctttggggcctctcaaagcctcactgggctctaatactgtcctcacataggaaattcagaaaatgaatgaatccatccgctcaggggtcttcntcactccggcttctcactaccgactccacctttcctagaag

SEQ ID NO: 136928 - DNA, 750 bp, Homo Sapiens
  misc_feature (211)..(220): n is a, c, g, or t
  misc_feature (394)..(464): n is a, c, g, or t
gtcctagaggatcccgacccactacgtggctagtttgttttagaatgtagtaagggctgagaggtgctctacttcttaacttgttttttccatgttgtagacaaatgaaatttgtctaaatgcttttgtctaaaaatgcatttgtctaaatgctttagattgatgtagggtttagatcctctttaatactttgagatagtcttattctgannnnnnnnnncttctggaaaccaagtagaattagggatgggaatacaaatgcatttattctggcttctgttttattccaagaagcttcttggaacaaatcagtaggaattgaaaagaaagcatgaccaacccaattacaggggataaatgtaagcttgttaaagtaagcaccacaccatgtttnnnnnnnnnnnnnnnnnnnnnnnnnnnnnnnnnnnnnnnnnnnnnnnnnnnnnnnnnnnnnnnnnnnnnnntgcctatgaagccacaaagatgccacatgttagtatatcagtgagaggtgactccacagtgctctctggagaagcaatatgagtgactgaagagtggggccttttgcttttgcctggatataggggtgctcttctactgtaattgggtgtggaaaaactctggctttatggtattccattaggttcttttcatttaaagtagtcttaaaatcaaagtatccaatattttaaagccacaaagtagattacataattagcagagattttagtcagtaaaatgttagaa

SEQ ID NO: 136929 - DNA, 539 bp, Homo Sapiens
  misc_feature (497)..(497): n is a, c, g, or t
  misc_feature (503)..(503): n is a, c, g, or t
ctgtttagtgctttaccccttaattcttataggtaacggtctaatacagggtaactctcatagtggagaacttgagaagcattagtacttcaaattgagtcctaatggtaaaatttttttctgataaaaaaaggtactttgtagtgctgttaggaggtaacataatacctttactaccaatcttaggatcaattcaaggttcagtaaaaggaatgtatctggaattcttgattatagacatgaaaacactcttctgtcagcgttcataagtgacgctgggaggttgcctaccgcattaagacctagcttcataaaatgactcaaagccctaggcagtttctgggaaggactgggagtagcagtctcctggcaccccttgttcattcattcattcagtacctactatgtgctaggctttgaggatataaccatgaatttttccaaccaatttaatagaccttggcctcaaagagctcacattctactagagaaggccncatggngaagattataataccatggtggaaatcccatagtag

SEQ ID NO: 136930 - DNA, 1419 bp, Homo Sapiens
  misc_feature (15)..(15): n is a, c, g, or t
  misc_feature (77)..(77): n is a, c, g, or t
  misc_feature (154)..(154): n is a, c, g, or t
  misc_feature (633)..(633): n is a, c, g, or t
ggcaggatcatgggntattaaaaatccaccaaatatgtgggctcttcaggcgctaataaatgataaaatgtcccccngtaaaaaacccaagcagtatttaccagccagctattaaggaatcttttcaaaaccactaatggcatatactccgganctgaatttggtggtttttccactctaggacccaagcttgggatttccatttctggaagtttggaattttctggagtcactagtaatgtccttgaggatgatagtctgaattttctctgcaagagtacaaagattggcttttttgagatctttaatcaatgtgtcatacgcttctttctttccatgaagttgatgccaattacggaagcagttgaactttctgttctgctgtgtcttggacattgtcattcttgatctcatctattttggcttcattgacaccattctttcggaacaaagcctttaacttgacttagtgtcatgactccagcaatagtggtgatatatttactcaagtcaacatcagataaatttattgccactgtttcaggatttaagtttggagattcatgagaaccttggttttcctttctgtgctttctgcatgttttctgtacttcctttctcttcacccaacanttagtggaattggcaaagaagaagacaaagccaccccaagttagatctggatcctttcctcttttgcacttggtgttgctggtgagtgtgcattccttgatgattccatgttcacatttggtgcaagggtcacagtgttcacatacagtagagttacaaaaaaagtttggtttacatctgcacttggtattctgggtccgggtgcagtttatttccacttctaagccatgtccttcatcacacaatctacatcttctgcatttggaagaaaaatgggctttgtctgtgtactccttcccttcttggcagggcacgcagtctggttcatccccattgactgtgcagtccctagctttcctttcacctggaggacagggcttatggcagaattggccatcatgatgcaggccttccaagttctgagtctcaactgtagtaacagtcttcctcaattccaatcccttggagttgatgtcagtcacttgggcattaacacttttggacgataatctagcaacagacgtaagaaccagaggtaggagggtccagatgcccagcatggttgttgagcaatcctccgaagtgaaagagcttccccaactccgtactgagcgggtccaccaacccgcgggagaagaggcagctccgcctgggtagccagggctggcctcagggtgtgttccgtgccagtgcccgcccctgaggctccagccaagtcactcgtaaaccgcttccctcactccccagaagcgtctttgaacacctgtgtgtcactcttgcgcgaga

SEQ ID NO: 136931 - DNA, 858 bp, Homo Sapiens
ttttttttcaagtcagaaacccaggtttgaggtttccaaggcccttttattaggggaagttcccctttatagcacaagacttcacaaatgtgttgacaacaatcagattcatttcttaaaattatggagaaaaaagggaaaaacaaaacagatgcactttttatatatattgaacataaattaaaagaatttataaaacagccacctttttacagaataaatgcagactgaattataaatgcacctccacgttgaagttgttttgagttgcttttcattttccaataataaataaatagaatttgttcttgagttttagatccacctgagccacggcaggactctaagtcatgaatgggctttcttcccttggtcgctcctgtgcgcagcatgtgagtgtgctgaggttacagatttcattggcccaccagcgtgtatgctatcctttcggggtggcattcgctcattaattcggtccagacctcgcgcttcttcaaaactccggatcttgtgctgaagcgagaaccctctgatggctgtctcgatagtctgcttgcctcctgagaggacgccagagggagtgtgcctgtgggagtcaggcccttgagagtcagcacactctcactttcttgccgaagaattggaaagacccgtgccatcttcccaatggctctgatcttattcctgatgatctccttacgaactgtagtgcttccttctgcttcatcatcagaaatcagttcgtcatcagagcatatgttgagcacatttaccagcatctctgtgactttttccctctcaaaaggcatagaccatgtgaaaacatccataaagtttggaagccagtaggggtgtgga

SEQ ID NO: 136932 - DNA, 828 bp, Homo Sapiens
atcggaagttgctttgtttgcttcgagatggctgcggggatgtatttggaacattatctggacagtattgaaaaccttccctttgaattacagagaaactttcagctcatgagggacctagaccaaagaacagaggaagcattagataccatctccagcctggaacattgagcaaatttggctgcattggggcattcacttggtttcttcaaagatgtctgttggagctattcccatacccactgaaggatctgtagtcttgtcttcattctatgtagccatgttcaaggatgtaacagactggttttgagatacatgaagctgtgtcttaagttactctgagtttacacatgaaaaggtgaacatcatcaaaaaccctggacatagttccctgagaactgcctgccgaatgacctgaaggctgaaattgacaagttggccactgagtatatgagtagtgcccgcagcctgagctccgaggaaaaattggcccttctcaaacagatccaggaagcctatggcaagtgcaaggaatttggtgacgacaaggtgcagcttgccatgcagacctatgagatggtggacaaacacattcggcggctggacacagacctggcccgttttgaggctgatctcaaggagaaaccagcttgagtcaagtgactatgacagctcttccaggcaaaggcacaacgacacggccggactcaaaaggagaagaaaagctgctcgtgctcgttccaacaggggaaaactcggatgaagaagcccccaagactggccagaagaagtttcaagctcgtgcgcaacaagtcctgagtatgggag

SEQ ID NO: 136933 - DNA, 919 bp, Homo Sapiens
atcggaagttgctttgttttgcttcgagatggctgcggggatgtatttggaacattatctggacagtattgaaaaccttccctttgaattacagagaaactttcagctcatgagggacctagaccaaagaacagaggacctgaaggctgaaattgacaagttggccactgagtatatgagtagtgcccgcagcctgagctccgaggaaaaattggcccttctcaaacagatccaggaagcctatggcaagtgcaaggaatttggtgacgacaaggtgcagcttgccatgcagacctatgagatggtggacaaacacattcggcggctggacacagacctggcccgttttgaggctgatctcaaggagaaacagattgagtcaagtgactatgacagctcttccagcaaaggcaaaaagagccggactcaaaaggagaagaaagctgctcgtgctcgttccaaagggaaaaactcggatgaagaagcccccaagactgcccagaagaagttaaagctcgtgcgcacaagtcctgagtatgggatgccctcagtgacctttggcagtgtccacccctctgatgtgttggatatgcctgtggatcccaacgaacccacctattgcctttgtcaccaggtctcctatggagagatgattggctgtgacaaccctgattgttccattgagtggttccattttgcctgtgtggggctgacaaccaagcctcgggggaaatggttttgcccacgctgctcccaagaacggaagaagaaatagataagggccttggattccaacacagtttctttcacatcccctgacttgggctagtgggcagaggaatgcctgtgctggggccaggggtcagggaggagtggatggcacagtgctgtcatcccttctctcccttttccaattccg

SEQ ID NO: 136934 - DNA, 1112 bp, Homo Sapiens
  misc_feature (74)..(74): n is a, c, g, or t
  misc_feature (104)..(124): n is a, c, g, or t
atccgcttgaacccccagggaaagtgggtggttgccagtaaaggtgaggatcatacccacttgccactcccagnctggggcaacagagcaattattacatctcnnnnnnnnnnnnnnnnnnnnncctagggaattgaattcctttatgactccagaaaacatatctcttttctattgagattactgatggcagtcagcttttcaccaagggaattggcttctgctcagcttcccctctctccctgaggtaagcaagcaggtgctgtcgtctcctccatgtgacctttattccatacttgtcctcgggggtgtctttaaccagaacaggtccaggctctgggctattaggagtgccagtgtgaagagtgcagcttagaaggctgttttccttctgatcttggggaatgagttcttccttcacagatgatgactctggggtctggatatcaggtggaatgaacacataaggtaagctctgaagtgcctgcactgacatgttcccacagctttggggactgagcactggaactaagggtcttctggaaacatccttttctgattcactggggcactctcggattaaggggatccccaatgtctctgaactggaagattgcggactctcaaaagttagatgtggaaacttggaggtggtaggttttcgacttgagtgtctcgcccggttttggtgtttctggtaggctgggaacaagcttcctgctgctgtatcaaaatcaggtgatacccaggaagtgatggtgctgtggtcaatgggcttgctgggcacctgtcgagtgtgagtgatgggaagctgtgtagatgcacagctgtgtttggggccctccagtggttgttggtggaacagcagcggggctttctgggaaggctggcggcgtttttttctgggaggcatcaaccggtgaatgaggaacagttagtaaccacatgatgctgttagccttcgggttgggggataggctccaattccaacccatgccagcccgggccggacgggccgcagctcctggcagaccgcacagccttcgagcccggaatgccgagacaagcggacgcgtggtcgacgatatcccgggaattccggaccggtccag

SEQ ID NO: 136935 - DNA, 402 bp, Homo Sapiens
tttttctatgaacaacgccactttttaaggaagtttaagtctgaaccttaaaggggtacattcactgaaaagctgaacagaaaactggccaagtgccctccaacccactgctcttatcactggcaaaacaaggtaagcaaaggtttccctaaagtacccccaactctgatgctttttaaaacaaagtaatccaaggggctgtgcacatagcatggcacaccacaactgcattattttgtgtgttgtctgctacatggcaaaacaaggtactactggcaaccaagacaataaaggcctctgcttcagggttgttcttttcagattcctttagttacagcagcttcagtttagaagctcagaggcatgagtcattccttgcactatcataaaaacccaacctgc

SEQ ID NO: 136936 - DNA, 637 bp, Homo Sapiens
  misc_feature (522)..(522): n is a, c, g, or t
  misc_feature (545)..(545): n is a, c, g, or t
  misc_feature (577)..(577): n is a, c, g, or t
  misc_feature (615)..(615): n is a, c, g, or t
cagtcgacggtaccggacatatgcccgggaattcggccattacggccggggagaacagacgtttgaacagagcaggcttctgaggtctccaaaatgcctgtcccagcctcctggccccatcctcctggtcctttcctgcttctgactctactgctgggacttacagaagtggcaggtgaggaggagctacagatgattcagcctgagaagctcctgttggtcacgctttggatagacagctactctgcactgcactgtgatctccctgcttcccgtgggacccgtcctgtggttcagaggagttggaccaggccgagaattaatctacaatcaaaaagaaggccacttccccagggtaacaacagtttcagacctcacaaagagaaacaacatggacttttccatccgcatcaagtagcatcaccccagcagatgtcggcacatactacttgtgtgaagtttcgaaaagggagccctgagaacgtggagtttaagtctggaccaggcactgagatggctttngggtgggcccggcatcatctctntactgcgctggttccctcatagcttgtccctnctggggcccatcttacgttcccctggaagcagaaagancttgacttctcccttcctttct

SEQ ID NO: 136937 - DNA, 1153 bp, Homo Sapiens
ttcccagcacagacgtttggacagagcaggctcctaaggtctccagaatgcccgtgccagcctcctggccccaccttcctagtcctttcctgctgatgacgctactgctggggggactcacaggggtagctggcgaggaggagctgcaggtgattcagcctgacaagtccgtatcagttgcagctggagagtcggccactctgcactgcactgtgacctccctgatccctgtggggcccatccagtggttcagaggagctggaccaggccgggaattaatctacaatcaaaaagaaggccacttcccccgggtaacaactgtttcagacctcacaaagagaaacaacatggacttttccatccgcatcaggtaacatcaccccagcagatgccggcacctactactgtgtgaagttccggaaagggagccccgatgacgtggagtttaagtctggagcaggcactgagctgtctgtgcgtgccaaaccctctgcccccgtggtatcgggccctgcggcgagggccacacctcagcacacagtgagcttcacctgcgagtcccacggcttctcacccagagacatcaccctgaaatggttcaaaaatgggaatgagctctcagacttccagaccaacgtggaccccgtaggagagagcgtgtcctacagcatccacagcacagccaaggtggtgctgacccgcgaggacgttcactctcaagtcatctgcgaggtggcccacgtcaccttgcagggggaccctcttcgtgggactgccaacttgtctgagaccatccgagttccacccaccttggaggttactcaacagcccgtgagggcagagaaccaggtgaatgtcacctgccaggtgaggaagttctacccccagagactacagctgacctggttggagaatggaaacgtgtcccggacagaaacggcctcaaccgttacagagaacaaggatggtacctacaactggatgagctggctcctggtgaatgtatctgcccacagggatgatgtgaagctcacctgccaggtggagcatgacgggcagccagcggtcagcaaaagccatgacctgaaggtctcagcccacccgaaggagcagggctcaaataccgccgctgagaacgcggggtggggatcct

SEQ ID NO: 136938 - DNA, 664 bp, Homo Sapiens
  misc_feature (16)..(16): n is a, c, g, or t
  misc_feature (39)..(39): n is a, c, g, or t
  misc_feature (50)..(50): n is a, c, g, or t
  misc_feature (102)..(102): n is a, c, g, or t
  misc_feature (145)..(145): n is a, c, g, or t
  misc_feature (151)..(151): n is a, c, g, or t
  misc_feature (320)..(320): n is a, c, g, or t
ggtttaattattaaantcaaacccattcccaaggggacncaactttgggnggaattacccaattgggacttttcacatacattttccccttctaataaaatnattccatggttaaaattaaccttcaaattccaattcaagcgcngacttnttcgctgatgtagccacaattcagagggacgctgaaacgtcactatggtgtcggaactccgagattcccattattattcttgtctccttgacccaaaatttacacttgggagctaaatgacaattgggtttcttacagaatttaatgaccaatgaaaaagcaggaacgnctgattgcaatcttgcaaggacaggcttcctggaagtgaggacctcggaagaggcgttgcggagcttcctgagatggttccatgtttatgcttcacctctaagcctagccctgacccaacgccgcttttgtgattggtttcttcaaggtcaagttttcacccaagacctctccagggcacgccttccaaggccagcctcacctccctccaggaccgtgaaggccaagccaagcatgtcgcacccaggcctccctgctgccttaaaaggacagacatttcaaagtccataagttatatggtaaatctctctacttctggtttctggtagggtttttgtttttgtc

SEQ ID NO: 136939 - DNA, 454 bp, Homo Sapiens
  misc_feature (11)..(11): n is a, c, g, or t
  misc_feature (32)..(32): n is a, c, g, or t
  misc_feature (89)..(89): n is a, c, g, or t
  misc_feature (106)..(106): n is a, c, g, or t
  misc_feature (236)..(236): n is a, c, g, or t
  misc_feature (238)..(238): n is a, c, g, or t
  misc_feature (240)..(240): n is a, c, g, or t
  misc_feature (243)..(247): n is a, c, g, or t
  misc_feature (251)..(252): n is a, c, g, or t
  misc_feature (431)..(431): n is a, c, g, or t
  misc_feature (433)..(433): n is a, c, g, or t
ccccagggctnaaaaggccttggattcacccntcttccttgctccacaaaattcttcccaagacaatattcgaaagtcctggggcttcnatgatgcgcaagtttanagccaagcctccttcagcttcttcagagcagcctggatctccggctcctcccacatgaagagtcgacccaccagaatgagcagacgcaggttcttggtcttgctaagggttttgataatgcggtcagcanangnttnnnnngggnntggaggacacataccaggtgacattgtaccgcagggctgggtcgaaggctggcaggatggtgttgaagaaagcttcctctgcatgggcagccgcatgctcatcctctaggtatccccgagatgcctgcacttggccccccttgccctgtgcttcaaccacatagcagaggaaggtcctntnctcccggaactgtactccacg

SEQ ID NO: 136940 - DNA, 2277 bp, Homo Sapiens
  misc_feature (34)..(34): n is a, c, g, or t
  misc_feature (113)..(114): n is a, c, g, or t
  misc_feature (238)..(238): n is a, c, g, or t
acacgttttgtgccccttgtctcctttccccctngggggcccgccgccccccaaaaagaagggtttttagaaaaatttcttaaaggcccaagaaggcccccaacaaaaaaccnntgtgtggttaagatataagcacggggcgcggcgtcttgagtatagagggagattatgttcagtgtgttgtgttattctggggatcggaatgtgtgggtggatgaggtttgattagtgggggggnaaccctgaacacaccgtggctttattattaacggatgccaaaagcacacttcccagaaccgcgctagaggcgggcgcccagaggcagcaggacactacagctccttcctctggggcagaaaggagggtgcctgggaagttcgagggctgcagtggggaggcagaggtcccagcaacattgtcaatggcaggcagcggcaggaggggcgaggcgtgggcgagtccatgagtccagtgaggcggcgcgactcacttgaggcggtagagaaccttgcgctgcatgcgatgctggatctcgccgcgccgcagcatgagctgcagcaccttgtggatggcgtgctccgggtatttctgcttggtgaagtccttgatgatgctgtgctcagacacctgggagccaatggcaaagcggcgcttgagctgcttctcgatgcggctcagcatctcctggtcctcctggctggtgaagccctccacccctgacagggtaccggacaaggcagcatccaacgtggacacttggaagagccgcagggcctcctccacatctgcctctgtggcgaagggctgcagcttcatcttgctgagggcttccgcgatgcgcacaatggcctccagctgccgcacagtgatggggatgctggagcggcggtcactgtccctctcgtgctgacgggccccgctccgcatgatgatgtagcggttcttcagtttctctgcagcctctgctgacagccgggggccacacttcactcggcagtaggcaataaacttcttcagcttggccaggtcaatctcgccctccacagcctgtgtctgtgtcaggtgcgctcacgtgcagagtgatgacatgcttggccagcatcacatccctctcctcattgtgctcatccttgacgatgaagatcatgtcgaagcgcgacaagatggtgggcatgaagtcaatgttgtcctcccccttcgtctcatcccagcgggccgaacactgagttggcagcagccaggacggagcagcgggagttcagggtggtggtgatcccagccttggcgatagagatggtctgctgctccatggcttcgtggattgccacacggtcatcttctcgcatcttgtcaaactcgtcaatacagacgaccccaccatcggccaggaccatggctccgccctccatgatgaaattccgggacgaagggtccctcatcaccgaggctgtcagtccagctgcgctgctgcctttcccagacgtgtataccccaatgggagaacacttctccacaaacttcagaagctgggacttggctgtcccagggtcccctagcatcagcaggttgatgtctcctcggcgagtaagtccatcagggagcctctttcgggagcccccaaagagcaggcaggcaatggccttcttcatgtctgtgcccccaaagatggagggggcgatgctcttggagatgacctcatagacatttgggagggcagccaggcgacggaactcctcctcctcctgggggctcacggccccagcaaagctgcggccagagccatctgtgtccacctggatgcccaggacacggatgtaggagcttcggatgcccaacggcccaccctggtcacggcccctgctggtagtcaggccaaacttcttgatggagtagatgcccatgatggtaaccctgttcccagggacgaccttgtcacacaggtacctgagaggagggtagaggagaaaggagaaaagctgagattctgacttggacagcaagtctctgattccacccatgcccaggacacgcagggtccactgcagcatttttgccacaggcaccacatgctgagctggctccagccccacggagcccagagaacggcctctctccccacgtcactcagcccatgctcagctgcttggaggatggtgttgcccacagtgacagccaaacagaaaggcaggtggtggcctgactctcgctgaactcgctaactcatttgtacgctggtttaggaggcttagtgccagcccacagagccctccaaaagcc

SEQ ID NO: 136941 - DNA, 305 bp, Homo Sapiens
cggcaatgcttgggatgcataaagtatgagtgctttttaggatgggaattgagatgtaagatttgggggtgagggtcgtgccaattacatttcatttgcatggattttggttttcatgctctgtcctcccctcctttggtcttactgggtccctctgactgctctgtgatttttagtgatggaaaagggagtgaggagccagtctgggttgttgctattttcggatggccagtttaccctgaaaattcccgtgagaagggagatggcggtagactggccatccgaagcagttgccggggtgccgt

SEQ ID NO: 136942 - DNA, 1442 bp, Homo Sapiens
  misc_feature (24)..(24): n is a, c, g, or t
  misc_feature (31)..(31): n is a, c, g, or t
  misc_feature (70)..(70): n is a, c, g, or t
  misc_feature (132)..(132): n is a, c, g, or t
  misc_feature (165)..(165): n is a, c, g, or t
  misc_feature (1406)..(1406): n is a, c, g, or t
attggcttcccaaatggaaggttngtaaggngatcactggaaggttcattttggattaactaaaataccngtgcccatttagactgtcaacctggaggttttctggattcactagcaggaaatttctggcantaccaaaaggataaccaaataattaaaatatcngctttatcatacaactttcaccccctccttaaagtgtctaaaatgattagggaattgtagcactttctttttgcataaaaccctttcctctttcataaaaccctgaggtgaaaggttattaatgtaataaaaccgcaattcattttgtattaaactgtagctttaaaaaaaatttataaagaaatgtgacaacttgtaaagctgctctgtacagtttttcaacaaaatatttcccatatcaacttagtcaaagggcttaaaatgaccctataaaaacaatgtccttttaacatgtgttagtgtcgagatgagcgccattttccatctctactactgtctcttctgttatcatagtcatggctccagtcatcatgattcctgtcttcatagaagaaatcatctctctttcctctgtaatgatggtcagacccatgatcagtgtaacgctgttcccggctataatgtctatctgctaggtagggataagaattcattctgactttacgctgtgatgatggtgtaccttggcgccactgggagcttgaagactgattgaaactatgactgtgtgattgaactgatggtgaaaatcctgattgatccagaggtgaagaaccaaattttccaccatatgacatttgtctcaaagcactgttcatcactgcttgtctctgaaaattttctggagaagagaaagatctctgaattatctgtgctgatgaagtcatgttatccatagtcctttcgtacctgctaggagatgtggaggtagggcttgaatttccaacatgatgttggggatatgacaaactgacatcttgtggggcatgactacttcctgatctaaattgaattttgataggccttccataaagtttgattccattaagtagattcattgcataaggaacagacacttcatgtttgaaattcacaaacgcaaactgctttggtttaccatccttatcttttggaattttcacctttattactggcccagcctggtggaaaagctcgaaaaggagctcctcggtcactttcgtttcaaggttgcccacaaagagagtgcgatccgcttccgccgccgccgcccccatctcagcgtcgccccctccctaacctggccaaaaggtcgtggccgacgcacccactgcgcattcacgcccacgcgtccgcggatgggaagacggacgcggggtcgacgattccgaagaatcccggtccggccccagcgggcgtgngggggtgtagtggggttccgcgtccgccatcccccc

SEQ ID NO: 136943 - DNA, 1095 bp, Homo Sapiens
  misc_feature (134)..(183): n is a, c, g, or t
  misc_feature (225)..(275): n is a, c, g, or t
cagacaaagaggtaagatgaaacagtagtgtgtttataatgtctgtgactattttctataataattagtactatttaatggtgagcttttaaaaatgtaggatagagggtacagtggcactgtatatactattnnnnnnnnnnnnnnnnnnnnnnnnnnnnnnnnnnnnnnnnnnnnnnnnnnctcgaggctgtaatgtgccatgatgattgcacctgcgaatannnnnnnnnnnnnnnnnnnnnnnnnnnnnnnnnnnnnnnnnnnnnnnnnnnttttagaacttttttaaaatcaaagtgcagattgcttgtatgtaaaacccaaataaaggtagagtaagtgtgatatatgggagtattaacaatagcttaaaatttctcgtgaaggacatgtggctaaagggtcaaaaaggatgtaagacttggagccagagcatagtatttcctgaaataacaagtttagtgctttaactatggctacatgtgcttaaggaattttgagccacttatttttgaagatgctgaggacatgtagagtgcttttgtagtgagctaaccttgatctctaaggactaactacccaggtccaggtcttcactaggggtactgacagtgtttaagctttactccacctccttacttagaaatcactttacgatttatttccattttccacttttatagaccatccttttgcttatatgctagatttttctggtgagggaagggttgtgttcttcagagggtctttgtttgaaatactcaggatggggagaggttatttaagaacgaattatacttaatggtttacactgtttgggagtcaaaggagcatttttacaccccgttaagggtgcttaattctgttgaaaaccaaaaagattggtctaacaagtgctattcttttttaagacaccctattctgaaaatggactcccctttcaaaggtcaactctttgggcaaactattcgcagggcaggtccctcaattaacttgggtgcacgttaactatacattccacgaagcactcggatgactgggaacactggaaaccggcggatttggtttgaattttggccctttgataaccca

SEQ ID NO: 136944 - DNA, 478 bp, Homo Sapiens
  misc_feature (100)..(100): n is a, c, g, or t
  misc_feature (135)..(186): n is a, c, g, or t
tcctctttaagaaattccttccagggatactttgtttccctgccagtttccttgtctttctctttctctttcactttatccttctccttacttttgtccntgttcttgtctttttccctctccctatctctctgnnnnnnnnnnnnnnnnnnnnnnnnnnnnnnnnnnnnnnnnnnnnnnnnnnnnacctccacggaggaaggcagcttggttttctcctcatacaccttgtggagaggttcgggagtgggaggagacactgacgggagaagagatataaggaaagttggggggcatatttgaaggtgttcccagttttgctttacgtacaacctcatcaatggaggcatccattgtccatgagttatcggaacttgaggttccaccggaaagaggcagaggagtggatcctgactttgtgaaactgttcgcggaagtggaagctttgggagtagtacactccgggcctgaaattctc

SEQ ID NO: 136945 - DNA, 1043 bp, Homo Sapiens
  misc_feature (833)..(833): n is a, c, g, or t
  misc_feature (967)..(967): n is a, c, g, or t
  misc_feature (984)..(984): n is a, c, g, or t
  misc_feature (1027)..(1027): n is a, c, g, or t
gtggaatcttgatgaacaacaccaccgatgtagaaatggctgccatcgattgtgacaaggcagtgaccgtggagttcaagcacgatgacaaactcagtgaagacagtggagccttaatccagtgtgctgtgctttacacgacaatcagtggtcaaagaagacttcggattcacaatcttggcttaaactgcagctctcagctagctgatctttataagagctgtgaggacagatgctcttatcaacttctttgccaagtcagcttttaaagcagttctccaccagcctttgaaggtcatccgggaaattctagttaatcagactgcccatatgttggcatgttaccggaagaattgtgcaagtccttctgcagcaagccagcttattctaccagattccatgaaagtattgccagtgtacatgaattgcttgttgaaaaactgtgtactactcagcagaccagagatctcaactgatgaacgagcataccagagacagctggtcatgaccatgggtgtggctgactctcagcttttcttctacccacaacttctgcccatacacacgttagatgtcaagagtacaatgttacctgctgccgttcgttgctctgagtcccgtctttcagaagaaggaatattcttactggctaatggtctacacatgttcctgtggttgggagtaagcagcccaccagaactgatccaaggaatatttaatgtgccatcttttgcacatatcaacacagatatgacattgctgccctgaaagttgggaaacccatactctcaacaactcagaaatgataatgggtattatcccacaaaagaggncatattcaatggagctcacaattgtaaagcagcgagaacaaccagaaatgggtttccgacagttcctggtagaagaccaaggactttacggaggctcctcttatgtggatttcccttggttgtgttcacaaggngatctgtcagctgcttnattaattggaacttcccggtcattgatgttgcatttccaaggnggataatcctcctcct

SEQ ID NO: 136946 - DNA, 680 bp, Homo Sapiens
  misc_feature (507)..(556): n is a, c, g, or t
ttaggttgtttaaagcaagcactgataccagtgggagttggtcttgatctaggagattctgttaagcatccaaaaacaatgcctaatttcagttcttaggttatggcttgtgactccagataaaagatggagaatacctcatgtactgtgacttgaaaatgaattcttaaaattcttaggctctctccatgtatctttcttaaggaaaagtttctgagtgtgatctctcttttgccatagtatcaagtggagggtagttcagaaaagttaataggaaatcttttgtgacagcagactataatagaagtttgagtaatattttaataaatttatataattcaaatgataaaaatgtatcaatgttatccaatgatttttattaaaaaattaccttattattagaactgtgcctattacataaaaagtgctcatgtatttgaattttaaataatttatttaaatcaagaccaccataagtcattaataatttaataattgttttaaatnnnnnnnnnnnnnnnnnnnnnnnnnnnnnnnnnnnnnnnnnnnnnnnnnntatggaatccacctcataacaattaagtctaaatttctggaagatggagccatgcttgtttttccaaaagctctttgagtgattctaatttgtagtcagagttgaagacactgctctaattagt

SEQ ID NO: 136947 - DNA, 585 bp, Homo Sapiens
  misc_feature (572)..(572): n is a, c, g, or t
cgagcctgggcagaatctctcagccttcctctacgccttgaggggatgtttcatccaaagtacaacctgaattgaggcttctccttcactggagtgcacctgcctctacctcatgggtataaagtaggagaactaagagacttaagaggtcgtggttcctatatcgtccaaaaaataggctgttacatatcctaaagactgctcaacagcttcaagttgaaagtggccaaggacagccccttaggtttgggaagggacgagcctgaaggattctgtctttactggggtcaaatcttaaagcacacagctctggactcaagacaggaggtttgcgtcctgatggctttgccacacattcacaggataactgcatagatccctcgctgtctgattcacttcttaccatgcactttcctttgatgctgaggagaaatggaagtgggcgaaaaatctcaaggctgcttcatgtggaccttggtcaagctggctccctcccccagcgtcaattgttatcaggtgccaaacactgctagaaagggggggcctaggtcagaagcctctttccatacggngttttggttttgg

SEQ ID NO: 136948 - DNA, 454 bp, Homo Sapiens
  misc_feature (30)..(30): n is a, c, g, or t
  misc_feature (43)..(43): n is a, c, g, or t
  misc_feature (107)..(107): n is a, c, g, or t
ttcccaaatttttttccccttggacccttnggccacatcctgnatcaggaaccattcaatggctttcttaccataaaactctgggtttaggcagaccaaagaccacntcaccaccatccttcttctgacagttacaagtactcagccaaacatagctcatcatacatactattaattaaagagaagtgattcatctctggcttttgcaggggaaatgggaaggctcaaaaactttcctgcagatgggatcaatttttaaaggctccaactctgcttgctttgctgataaagttcttcaggagatcatggtccatttctgcaaaacctgatgtttgtgttactacagtcagatggtttatgcaaaacctgaagcagaattcttctaaatcctgtgcatcatacttcaccgcagccgagagcagagcgatggcattctcctcgcagatgccttgct

SEQ ID NO: 136949 - DNA, 1136 bp, Homo Sapiens
  misc_feature (932)..(932): n is a, c, g, or t
  misc_feature (1024)..(1024): n is a, c, g, or t
tcatctgaccccaccctgggccactgccctgctccagagagtggaccttgactcttccacacctgcctatactcactaatgttaacacgtcatttcctttttgtatttttaaacaagaaagaaaaccccagtcctcatttgccttccctacctcttcctcccagagtcctccccacagttcctaagggccactgtgtacccgggctgtgtgggccagaactggggggctgagtcttccctggccccttggaagaggcccccagatgcccaggctcacttcagtgttgagtcctccattgaggatgcccactgaggcagccaggcccctcaccagccctggggggaatcctaaacagagagagaaaaagggtatctgcccttcttgccaggcagctccactctcccgctgactgcccacaccctgcagagtggcaggggtgaaaggaagaaggaagtggctgagttattaatagccagagccactgggagactggggagactggctgtaacccccttcacacctgggtttggcatcagcacagactacgggaggggctggctccctccccctcagaccctcacttcctgtacctagaggccattctggatgctgccatgttgggaagtacagtctctgcccattacctgcatgcaggcaccagagcagggactgagaaaccccaaggatgggtcatctaagtgctgtccatatgaaccctggactttctgtccttagatcctcacatgttatccctgtctttctggggtacgtttcaaactgaggaagctacaacacagtgaagagccaaggaaggcctatgaaatggtcctgatgcccaacctcccaccccttcaatgtggggacgagaccccctcatctcagagtaatgggaagaacctcccacatctccctggcaagcagatgaggtggnttcacatgcactttcctgtctggacttcagcccgtattccgaggagtagagaggcagaagagatgtcagcaaagaaagttgattgaaagcangagttggattgtcccacttgttcaaccaagctgggattggcaagcttgcgggcccacaaaacagccagtcaggttggctttcctggtttcagacatgctcataccattccca

SEQ ID NO: 136950 - DNA, 584 bp, Homo Sapiens
ctcttgtctggttttagatcctgatggtgatgttgctgtgatgatatctgggttaactctgaacaaataaggaaaagtgctttacaaagaggctgactgcgaacaaagatccttgtcgtgtatattacccattgcatccaatgttaaaaatgcacatatctgggaaatgacaattacattaaagctttaatatctacatttacttgtgtaatgttaactacaaggcacttactaatttaattaggatgtcattatatacacacttataaagcacatttcagaaagaaaggtgtagatgaaatatagttaattgaaaagcactcagttcaagaagtcaaatatccacagggggagatataaaaaaggaaaccaagaaaccggttaagaaaaaacaaggttcaagacaccaggggttaacaggtgatgccaatggccagccacagaatgagcaggaaagagctcaagcaaggctgtctgtacagtgtcagctgggcatcacccccaagttacactctaacacacagaatttttcctgaagttcctaaggaaaggccagcacctggttttcctcagctggtgggatc

SEQ ID NO: 136951 - DNA, 1057 bp, Homo Sapiens
  misc_feature (514)..(534): n is a, c, g, or t
  misc_feature (663)..(663): n is a, c, g, or t
  misc_feature (926)..(961): n is a, c, g, or t
tcaaaaggtaattaaagcttttttcattttgagaattgagtataaaacagcaggaaaaatggcccaatacattggacactattttgtccttgaaaccactgcagagatacaaaagttcacattgtatgacctggtgggtgtcttccaccatgaaggtgctctggttagattagaggtagcaacttccactgtatgctcttgtggttcagacacattttgggaaagtttatttttctgaatcaaataggcgaatgcatctacatgtaaaactcaggataccaggcacacagatgaggtcccacccccacacactgtctccctgttctcacgaccagctgtgggtggtcccccttatctttctaagcatttccgctatctgctccccacataccatccccctaatctgggaaaggtaactctttggggaataaaaggcagatgggtgctggtttagggaaaaaaatgagatgaaatttatttaatttgggaagcaagtaatttcaaatttagaccnnnnnnnnnnnnnnnnnnnnntcccgtgttaatagcaaacttctttttcttatgaatcgggccccaaagtttgtacagagttttatttttgaagaaaatattgcaactgtgcatgaaactaaatagccatgtgatttcttacattttttntcttatttttccttttaatatgaggaggtctggtgtgaagacagatcaagcatgggtacctggcttgaacattgtccattaagaaaatgtatcaggtcgtccgcatagcatcagtcaagggtcaaggaaaatgcccctgacttgcaaatgttctcagagtgtcttcgcagcacagttcttgaaattcaaatagtcggttttgagacaaaaatctcgccaggtactgatttctgaaatcaaacacccatgcttgtcccctaggnnnnnnnnnnnnnnnnnnnnnnnnnnnnnnnnnnnncgagtaatactgaatttaagtaaatgtatacctccaaaatactgaaaacagccgaaatcaagaaaagacagaatttgcgttctcagtgaaataccg

SEQ ID NO: 136952 - DNA, 321 bp, Homo Sapiens
  misc_feature (304)..(304): n is a, c, g, or t
tttagcatgttacatattcctaataagtgaaattttatgtctgaactaaaatttacttcacttcctcgtgtaagaatgccttgcttaaactcaatatataaaaatcagaattttaaaaattaaacaattagaaatgaagttattcactttacaaatactggatttatttttctaaattttttagttatctttactttttcacacatttatgttacctggcttgccatgtgggcctttgaagttccatatcccctgacagtaagggagatctgctctgagtgttgcctaagacatctacaaacanacctggtgttttattcc

SEQ ID NO: 136953 - DNA, 1060 bp, Homo Sapiens
aaagtttgtcgtttttggtcttctcttcatttttgattagaggaacttctgaacttggaaaggggaagttggcagcatctctcctgggccatgtatcaacaatcttctgacagcaggagcagtgatagttggggaattgtgagatgaatggagaggccccatcgtgaattaaagatgctgacctggggattgttaagtgctgccttagttgctagtttagtagccttactgtgaaggaataattaagattgtttcagacttttgtttgtgtgcttgcgttgatgacttttttaacttcaagataaatcaaagtaataagtttaacgtatattaaacctgttgaaatgataattatgtaaagataaatattctaggttagtcaagatttctcttaagatttaagtgcataaagaatagtaatttagaagtatccgtgaaaagttgataatgaaagaaatttgatgaaggtgaatattttataaattagaatctccactacttatccaatggtgttttatttcattaaggtagaacttgagaactcaagtttaaattgtcccccaccaccttcttctataaatgcaaacttaagaggaaaataatgacatgtatagtatactgttgccttcctaaattatgactgctgaatcatcatatctactatatatgactggaagaagtggttcttcaagtcaaccctcttacaggacttagtggaatttgctttatctactttaggccaaatccatcacacattggcttatttgaaacttttggttttcctctgtttattaaacatcttaggtataacagcacaatttcaccttgaaaaagcaccaaaattatggtgttcctgaaaagatcctattaaaagacagtagtttattttgaactggttatggaaaggtgactatgggatgtaagagtgttcaattgtgaggtttcatcatgtgtgtccgttgagcttgattttaagaagcaatgtttaggttggatctctgggtcatgaactcatttgcatttgaggtgagctcccttagtgaatctgtatctgtttggg

SEQ ID NO: 136954 - DNA, 824 bp, Homo Sapiens
agcgcgcctgcgcgttgacggcgattttgcgttctgaggctgcagctgtcggcatcttgagctgccggttcgcgagttcgaggccaggttccgcctgtcgtgggttcgcaccccggacgcgatgctattcgacaaggtgaaagcgttctcggtgcagttggacggcgctgaccgcgggcgtcgagcccgtgtttagcggcggccaggccgtggcgggccgggtgctgctggagctgtcaagcgccgcgcgtgtgggtgccctgaggctgcgcgcgcggggccgcgcccacgtgcactggaccgagtcgcgcagcgcgggctcgagcacggcttacacgcagagctacagtgaacgcgtggaggtcgtgagccaccgcgccacgctcctggcgccagataccggggagaccacgacgctgcctcctgggcgccatgagttcctgttcagcttccagctgcccccgaccctggtgacatccttcgagggcaaacacggtagtgtccgctactgtatcaaggccaccctgcaccggccctgggtcccagcacgccgggcaaggaaggtgttcactgtcatcgagcctgtggacatcaacacgccagccctgctggcacctcaagcgggggctcgggaaaaggttgcccgatcctggtactgtaaaccgtggcctagtctgcctttcggccacaagatcgaccgctaagggctacacccgcaggagaggtcatccctgtctttgccgagatcgacaacggctccacacgtcctgtgctgcctcgggcagccgtggtgcagacacagacgttcatggcccgaggcgccg

SEQ ID NO: 136955 - DNA, 635 bp, Homo Sapiens
  misc_feature (461)..(461): n is a, c, g, or t
  misc_feature (543)..(543): n is a, c, g, or t
tacagagtgagactctgtctcaaaaaataataataaaataaatgaacacacatgctgctgagtccgcagggggggcagagcagaggacagcgtgcttttgtgtactgttggaagactggctcctcctgtacagcacctctgagcccttgtgcaccgccctgccacgggcaccatccagtcctggccgtgtgaccacccacagctgactgggcagcaggcacaggccctacccgagcaggccggagttggctcgcatgactccagctgaggctgcctgtgtacatttctccagataccctatggctaattttgttataactgcacagtggctgctgaccattcttgtattaaatatattgtgaaacaaacctatctggggagaaagcaatctacttgcccgctgcttcctgtctggatccagcttgtgtccttggaaaatggctggccaggtcctattcccngtcctccagccgttctttcatgagggacaggaaggtaaaatcagccttaagagagaggtctcagctcccttttccagatctnccagtgagttttaaaggaagcaaggagccagagtgctaagttcttacagcagaaggaagcttatagatttcttgaaaccgcccttgttttta

SEQ ID NO: 136956 - DNA, 781 bp, Homo Sapiens
  misc_feature (510)..(510): n is a, c, g, or t
  misc_feature (729)..(729): n is a, c, g, or t
  misc_feature (737)..(737): n is a, c, g, or t
  misc_feature (751)..(751): n is a, c, g, or t
  misc_feature (762)..(762): n is a, c, g, or t
cgtagccggtcaccggggggggacaggaggaagtgcattaattccttccacgacccctgaagagcagcggtgggtctgagcatcctatctccaggaagcaggccagcaggcaagccagctgccacctcgtcctgtgcaaagcacaggcaccgtccccaaaagatttccaaagatgatgttaaacccagccacggttctgatctccaggaaagcaattgctgtggtacaaaaggacaagggttaaaagagaacagtgggagctctctttcccagctaactcacgcagtgtgacgcagaggctttcagcacagcccagggtgcccgggactgaaaactccttcaccagccccctccacaggatatagaagacttagatcactacgagatgaaagcagagcccattagtgggaaaaagttggaggatgaaggaattgaaaaagaaaatttggcaatattagagaaattagggaagactgaaagacaagagcatttaactgcaaactgttgtcngttgtcaactgggttgtcttcctgaagtattgaatccggtatgtattgtgtggaggagcattacgtactggaacttctcacaaaacagggctgaagcagtgcctactcgacagaaccggtcatcgtaccaagaaatgccacgtgactcaaaggcaaagccagagtgcagcttggagccaagaagatgatgtctcaatctgtcaccccagattgagtgcnatggccgnttttcagccactgnaactctggctnccagggtgactggacgttt

SEQ ID NO: 136957 - DNA, 949 bp, Homo Sapiens
gtcctgaaagccgtggctatccgtgtgttccacatggttggtttcttttcccttttaggcttctgacacaggtaaatctgtaagcatcatggataaagtcattgttaatgagttcatcaggttgaatgaggccttttagccgtccccaccacagtcaatcctttcgatcctttcagcataaatcatggccaggaatggattaggtgttctctcgtaaaagccttgtgagacccctgtatccctcaggtttgtttgtagagcatgcccagaagagcatcctagtgttttaattagtgaaataacttcaggtgcacagagtgtgttgcgacaaaactcatcagagtcctggtgatcatctccatgaagataaaccaaaagaaagcgaagctcccttttggcatcgttaagtgcctggctgtacgttccctggtagaagacagggtgtgccctcccatatttctcttcaaaagagtgcataaatgaaacaatgtccccaacggggtcagtgacccggctgcgagggtcaggccgtataaaacgaagagcaaacctaaatatatcaagtatcgtgtaataggtaaaccggaatggaagcattatcaagtaataaccccatccaagcagcccccttggttgaggtcttgagacaacatagctgtagatcctgtggtcagctgtattaacctgcaggggtcgtgatggaggtgggttgaaaacactaggtacgccctcttgctcattcaatctgtcctgtacagcagcctctatgttccagttatgctgttccaaggtatggcgacactgatccatagattcgatgccagtgagatcctgaaactgcagcagcttctctgtctgctcctgggttagatcccgctcctcaggcgccgaccattttgccgccgcccctcgtgccgattcacaaccagccctcgtacctagcctaatt

SEQ ID NO: 136958 - DNA, 748 bp, Homo Sapiens
  misc_feature (26)..(26): n is a, c, g, or t
  misc_feature (220)..(220): n is a, c, g, or t
  misc_feature (336)..(336): n is a, c, g, or t
caagagtccaataaatgggaaaaatnttagaggtcatctgaaagcctgatcccaatgctgtcctttgtgggtgagtagtgtcatgttggtatgttgtactcaaactgaagtggcttgaacagctggtcagcacagtgaaaagggcagccaattaggaatatattgtacatttagttccactggatactttaatatataaactgcttgacctattatatcnttatggggactgaacaccccatattatcactttaaaaggtcttctaggcttccattttcctccaaaaaagaaaaacatcgacttttaaaaagtaaacgtcaagaagcttactttcnagatacaatatgagactaaaaaccgggatactaattagataaacagtagtgttaacatgatgtaaacagaagaattttaagaaaatttcccttaatttaacaattaagcaaaataataattatgcatttagagttcatatggtaattttcaagtaagtgtgtttattcccccaccacatacaaacccagccttggtgctcacatctctctccaaggatgatcacattgtccccaattactacaggacagtaactttgcctttctcttcaaattgctgattctgactgcttggacaacataaccatttttggttcttggtctgtgggactgtcagctggtatagctttaacatcaacatttgtaattcctatatttatgttgtgtcttcgcagatcagacttgattaatgctc

SEQ ID NO: 136959 - DNA, 1784 bp, Homo Sapiens
  misc_feature (366)..(386): n is a, c, g, or t
  misc_feature (1379)..(1399): n is a, c, g, or t
  misc_feature (1639)..(1652): n is a, c, g, or t
  misc_feature (1696)..(1708): n is a, c, g, or t
gccaaaacccagctgatccactgttggtataatcttaaaaaaaattacccatcaagaaagtcaatcgtgtgcagaagacaggaaccccatgctctgctaaggctgtggctgctgcagagactaccaaagagtaggattaggttgtagatagacgtgaccaaccatagttcttgaactttctcaaaggcaaaggctgacttcaaagtccattgtctgtcaataaaatggcatcaggcaaaaagctggggaagagaagcccagatggatccttggttgttttcagatgtcaaaggttcacaaagctggccaagctgtttctggaagggacttttccagttcactatattatagtgtgctgggggatgnnnnnnnnnnnnnnnnnnnnngcagggtggggtgggagaaatgggtggtaacaaatgtcacacctgtaccaccaggcccatcacatcttgagcattccccagtctgtgaaagcctattaaacagggtcacctagaaaaaaaacaagtttataaatccatttcccctcattttattaaatgttccacttatgtacattttaaagacgaaccatttacaagcttgtgcagtttgcctccttggctcacaggaggggaacattgtggaaagcctcaggataaacagaagacttggttttttgctccttttctctgtacggtacagtacgttttggtttacaaccatgagtacatacaattaaaaaaatccctcatgcaaattgtagaaaaaattttctttccttgaagctggcagtgaaaaataaagattcatgtcattttctttgtgcacacccctgtgcgcttcttcctgtcagattcttccctaagtattaagagaaataggggaaagccacagagcacgctggatttcaacaagtggtcttgtctttttaaagttcaacacttcttgaacaattagctcctggctgtaggaccagtaatcccttaaacaggcatgctctccatctaacaggatgaagttcagtaaagcagggactgcccctgggggcttacaggatgaagactcaaactgggaatggcttccaccctaaaactgtttgatcgcttcagtatctcttgcttgctaataacacctgtatgatcctttgtccagagggatggatggtgttgagaatggggaaaggggccaaggatcacaagtgcaaaaaatattgtttatgtcatgttttggagggaaggtggtgaggaaaagacaaatctattcattctggataattaaaggtggtttcatgcatttttaaagccacaattttatatctagggttgctgtagaaaccaacatctctggagagggaaggaaagaaaaggagaaggaagagagagttcagtgggacnnnnnnnnnnnnnnnnnnnnnatataaaagtgttaagaccacaatgaaaaaagttttttatccatatatataataaaccagtttgtgagctacataatttgtctttcccatcttcagaaatgttctcacattaacaatgattagatagcatcatgcccaaagacattggccacacaataaaacaaacaaaaaaacccagtactatgatacaattgaggtaaaaggggaaacaaaaaaatttaacatttgcccacaaataannnnnnnnnnnnnncttaattttgtcagaaaaataccaaacacagtgatttaaatttnnnnnnnnnnnnngtcacaaaaacctgtttttagcagaagtgaatgaccaatgggccagctccttggctcagacgtgattaatattggt

SEQ ID NO: 136960 - DNA, 1409 bp, Homo Sapiens
  misc_feature (246)..(296): n is a, c, g, or t
  misc_feature (510)..(510): n is a, c, g, or t
  misc_feature (514)..(553): n is a, c, g, or t
cggtgtggcgcgaggcgacacgggggttgagtcaacaaggttggaggtgcgcgcgtgtggtataaatagacggcgggcgtgttaggataaaggatatgcacgcgtggaggtcgcgaggaaataaggaaatgtgggtacggagaatgggtgggatgaggtgcgacttgcaatctattgttagtacgaaggctgaggatgcagggtctgctcggcagggacaattgagtaataacatagggttgcaannnnnnnnnnnnnnnnnnnnnnnnnnnnnnnnnnnnnnnnnnnnnnnnnnntaggtataaggacttgtgggggggacagaaaaaggggccttgattatgttaggggttggtcggcccagtgtttgggatttttaaaagccaggtccgggcggggtactgttgaccagttgtaatgtaaaaggtattgtttcttccataaaagccaagggaaaaagcaaaagctttttagtttcactggaaagaattctctctctttgtctgtctntcgnnnnnnnnnnnnnnnnnnnnnnnnnnnnnnnnnnnnnnnnacgattacaaagaagttgttttttactgaataagagataaaattttaaaataagcatacgtctgtacaaactgttctggcaaaactatcttaaatatttttccacagtagtaaaatataacccttctacaaatattggttcgctgcatttaattaatccactgtatacctattttcacttcctacttctacaaaaatagaaataacagctaacaggaggtttggagtttcctcatttatgtcttttcctatgaaccttgatttaaagctggacttgcaggaccattgacagaatgttctggcccctcagtgccactcgtgggttcagaaccttcagcctgttcctttgcttcagggagcttttctggggcaccaagtggattaacacaattagcatcctgctttactttgtccacttcattatcaaattcaattttatcttcttgatggttgtttttctttacttgtccattctgagcagggtaggtgctggcaatgacgtcatataggaattgatattgctcgaatgtggaaaccatgcctggcctagctttgcgtagagcttttaccacttgaaaaatatccactacctcttctgtttccgcactttctaagagatttaacaaagcacaaaatattcccgtttgctgagatccatccctgcagtgaatgagtagaggtgtactcttgtgatgcttgttcccttcagaggaattcttctggggaagtttttgtttgacgacctgaatcatagagattaattccttgggttctgcaggaagctgctccacactccagtttgtatatcccggccgtaatggccgaattcccgggcatatgtccggtaccgtcgactg

SEQ ID NO: 136961 - DNA, 1228 bp, Homo Sapiens
  misc_feature (286)..(295): n is a, c, g, or t
  misc_feature (1001)..(1179): n is a, c, g, or t
aaactgtggggtccgaaaaggtttgtggcaccgtggccggcggccctaatttgggcccctgccggccaaggggctgtgcggggccggacgaaggcccttttgaggcatgaacgtggggccgggagttctcggccttattgctttgaggccaggacatactggactcatctcggatgaagagtagcttagtccagaaagagaagcctaatgaatttgtaagattccagacagtgccaagaaagttcaaagggaaattgcagtaaaattgtaccatgttcacagttgnnnnnnnnnntggctctgaattccagcattcagttctatgctcaagggtatgtattagctaacactgcagttgtcagaggtgggaggcccctgagaaatgctgagaatgccaggcaccccagttctgagagccaccctagctaaactcaaagcagcattcttgagattttagcaaaaggctccgccccaagccacaaaaagatcccaatccaatcttttcagctttatcctctaaaaccttttgtcagatgagatagcatttgtgtttcccaggaggagaaggttggggaagaaaatgaagatagcttacatacagattttggatgacccgctaatctttccccttccctaggtaaagtgaaaacagataaaatgtttctgggcagcccaaaggtttaccacctgtttcactagaatggccagtctgtgtaaagaggctataatgacgaaagcattttccctgcagggagaagctagaaacaaatgggtcttcctatacatcagtctgccaaatgcagcctctctcaatctatataagttcacctcgaaatacatattaagtactgctgtcatcattgttttaaacagagcgtctttcattttttctaatagtgactgattctatcggcaagggaacaaaagggtgagaaagggagcttcctgcttgctgagttttctagctattttcattctggttattttcatccgccagatcnnnnnnnnnnnnnnnnnnnnnnnnnnnnnnnnnnnnnnnnnnnnnnnnnnnnnnnnnnnnnnnnnnnnnnnnnnnnnnnnnnnnnnnnnnnnnnnnnnnnnnnnnnnnnnnnnnnnnnnnnnnnnnnnnnnnnnnnnnnnnnnnnnnnnnnnnnnnnnnnnnnnnnnnnnnnnnnnnnntttcggacgcgtgggtcgacgatatcccgggaattccggaccggtccag

SEQ ID NO: 136962 - DNA, 307 bp, Homo Sapiens
aatttaaaagtacgaatttatttctcatagttgtgaagactgagaagcccacgatcagcgtgctggcagactggtatcatctattgagggcccagtctcagcttctaggacggggcctgttgctgtgtcctcatatggtggaagggaatcgaagggcaaaaaggaggtaattggttcccttgagcccctttataaaggcactaaatccattaatgaggatggagctctcatgacataatcacctcctaaagcctcacctatcacgttggtggttgcttcaacatacgaatttggtggggggacattc

SEQ ID NO: 136963 - DNA, 1403 bp, Homo Sapiens
aaattgaggtccgggttgcattgaggtccgggttggatagctctgggtcttctcgtagctgctcacatttttggccttagtgtcgtccttctcactgacggtgctgcccgtgtcgtcctcatcctcgaaggggttgtagctggactgtgactgcgcagactgggcggggttgctcgggacattaagggtgctgctgggcttactcggcagagactggtcgcctgtcttgttgatgcccgtcagggtgacgccgtcagtggccttcttcttctctctccggctgagggttcgattcaggtctgcggaccactcctcaaactgcggccagttcatgggcatgcccggcccgtgattggctcggaaccacctcaggtcctccactgcatcagctgctctgatgctctgctccaggtcatggtaaatggctttgtagccagccacattggacaggtctaggtgcttctgaacctccagcagaacctcccggaagaagcgaaggcgtttctcctcgaactgctggcactgctcaaacacctgctccatgttctccatgtactggggtgtgccctggtcgagttccttcagggacttctcatactttctctttggtcttaagaacatcttgcttgcacttttctattttgtcttgcaatttcttgagctgttcaggtttgagggatgggtctgccttgctgttggcttctcgtgagatagccagcttctcctctttgcacgctgcatggtgggctttctttgctgcttctacctctttcagcttcttggcccagggcttctgtgccttccgaaagccgtcctcagcttccttggtctccttgaagccgcccatcatctgcttgtgaaaggcttccttctgccagttcttgatcttctcgaagtcatcgttcatcagtgaggccttcacctcgaggtgcagctcgctcaccctctctgcctcggacatgaaggccatccaggccttctccacggtcccgtactggggccctttctccacgagctgcctccagcgccgggcccactcagtgagctgctgcgcatacgccttctcgatgcgcgcccgctcatgcaggcagttcatgaggtcgctgcacaggcggtggccatcgtcgatccgcttcacagtccgcttgtagttcccgacctcccagaagctgtcgctggacacttctactccaacggaatcatcatatgtgacagacattttttcaaaggctgagggagcagcaaagtatacttagtcaggggtcaacttcgaacgctcaaaatctgtagacaaacctcccaatccgtcgcacactccgttcaggctgccacggcgtctccagacccagctccggccgggctcccgctaccctcgtgccgaaatcgccacccaggcctcgctt

SEQ ID NO: 136964 - DNA, 452 bp, Homo Sapiens
gccccttaaccctagaggtgcaagcctccagatcccctgatgagcccctgctttgaacagtgaggaggggctccaggtcgtttgggttcataagtggggcatggggagcctgaggtcttctgggaacccagggagagctggggccctgagtctacacatcagatgcacagagccaactgcaggctcgctgggcaggaactgaggacagacgtggcttccagcaagtagtgaacctttggtttctcttcctcggcacctgttgcctaggagtggtccgcagacctgaatcgaaccctcagccggagagagaagaagaaggccactgacggcgtcaccctgacggtcatcaaccagacaggcgaccagtctctgccgagtaagcccagcaggtgagtgggcgccacctccatccaaaagaggccgttccatggtgggggccctgggcaatctgc

SEQ ID NO: 136965 - DNA, 650 bp, Homo Sapiens
catgaacacagggtaaaatatttatttgcatcttcattttagtctagtgataactatacaaatgtggacatggataatgaacaggttttaccccagaacatgaccgtgcatcagctgattcggtgtgtctgtggtgttcgctgatttccaatgtccatgaatgctcagtaggcgggcgctggcacattggccgccccaccactatcaagccaggtgctcacaaaaccagtgcccatgtgtgataaaaacatgctgatcacaacaaacagttattccatgatgggtttttaacttatgacaaatatttcacatgcagaaacacccctggtgtacttctcttccatagtcacatcttaccttccattttaatgtaggaaatcaacttgttcctgtttgggggcaagaaaatgcacagagtcataccagcatttcctcttgcaccatatgtgagcttgcagaactgcaaagggttgagaatgacccacagtgactctgaaaagatctacaaccttaaaaagggcaacatcccttctgtgttctaggcaagttaaaaaggttttgccagaacactgctaggcttcataatctgttgatgaatcaagtaagaagaatacataaaattctcttatatgaaaatatcttttacttga

SEQ ID NO: 136966 - DNA, 974 bp, Homo Sapiens
  misc_feature (425)..(425): n is a, c, g, or t
gggcggcgcgcccctatgcgatggaccacggagtcggagtgtgcgcgaaaagtgaatcccggtgcattttgatcggctaatttgggaagcacgaaaaagtggcaccggcccccggtgggggttgagggcgtagaacaccgtgaaaggaaaagagtgttagcaagagcaggccggcaggaaaacgttgtgaagaatggaacaagattgcacgtcggggaaagggcgggtgacccacggcgtaatgccgtcggagcaggctccaaatgtgtcccacggacggatgggcacgctcacggtctggaagtatagtggtgtgccattgtaagggaagtcgggctacgataaagtgccttctgtccgtgcgtgaactggccatttttgtaccaagcaattcacggtaccacattgcaggcaatgtgcttgcntgttcagccccaaccaatctgtggttcccacaaacaatatttagcctttaaaaagcaataatcttctacccttagtaacagacaaaactagaagtggacctttccctatgctctgtattggcatggattctatactgctgtactgcataccttttagaatccttccctgtgacatgcatcataataatttgtaccactgccacccagggctacaaacatgtcccttttcacaaagcggaccaagttttcaagcgggcacatgggcttgggagaacgcttgtggtggtcttggcagaaagaggtgtggaatgtgacatcgacgccattgtaaagaatccggacggaatgttcactgggcttttctctgtcttgccaaagctcaaagatcaacctggctgcaaaccttgggaacctggcttctgaaaggcccaaggcactgagaactggtgacagagtgacatcatgagcagagtagagggcaaagagctcttctttcctgccctcggtggcacgatcggacgcgtgggtcgacgatatcccgagaattcc

SEQ ID NO: 136967 - DNA, 823 bp, Homo Sapiens
  misc_feature (44)..(44): n is a, c, g, or t
  misc_feature (257)..(257): n is a, c, g, or t
cccacccattaggctttttttaagacatctgtgggtagaaaatngtaccccccattttccagatccagcagaaattgcatttttcagcttccccataggcagggacctggtggaacaccaaggtctctaagtttctgtgcattgagtttacctgggcgtttcttttccacgactgaaaacccaaatgagggaattctgtgaaagaggcgaaatgcttttacaacaaatggttcatcatcaaacagaaggtatgagtnatgttctgagtctaacaggatagttcttccttgttcctctttgggaggactgtctgctctattcacatgcgcaaattcttttagttcttctgcaggacattgatgtgctgtaggaaccagttcatgaaccacataatggaagaccagctccgtgtgagagagttccatggttcgccagataaagtcccgaagccctacagggccatagatttcaataggctgtttggacaccatggagccactctgcaggctgattgtgcagaggagcccaggaaggccaaagaaatggtctccataaaggtgtgtgatgaagatcttggtaattctccctgctttaagttggcttttcataagctgtgtctgttgttccttccccacagtcaaagagccagcactcgccttcacaccgaaggaccacagcagaggcaccccgggttggagatgggtatgctgcacccgtccccaggaatgtcacatccatagacatcttccacccctctccccgaggcccgcgccaggagccgagggaggcgcaggcccctcgtgccgaattcgccacccaggcc

SEQ ID NO: 136968 - DNA, 470 bp, Homo Sapiens
  misc_feature (372)..(372): n is a, c, g, or t
  misc_feature (403)..(403): n is a, c, g, or t
  misc_feature (431)..(431): n is a, c, g, or t
  misc_feature (449)..(449): n is a, c, g, or t
atacacctgcaaagttgtttgcatagattttattctctatgaattgtcctcttcctttttcatggacatatattcctccagtctgcccatggtgaatttcacatcgaaccactgtagggttagcataggcttttacttcaaagcctgctatcctatttctgtgtatattgcaactttcaaagtaacccatgccatgatcaaatgtgaacacaccaacatcacgtccatgatgaatatgattccgtctaataattgggtttccatgattttttaaccccaaatcccagctaacgcattattggaaatttcattatcctcatatattccctgtgcatgatctgttatatatagtcccaacatttttcacagttnactggatggttaacaagtggcttgatgggtngggacaatggctcccttgaaccactaancacatactggcaggaacnaactggtacatgtaacttttc

SEQ ID NO: 136969 - DNA, 232 bp, Homo Sapiens
gctggggcactgtgatttttaataactctcatgccacccagttgtctacaatccagggacaaagaggtttgggtccccgtcttacaaaaaaaagaaaccaaagatccaagaggctattgaataagtgacgtgttgtctgactgcttacttcctgctgagagctgcctcaattacattacatgcctgtaaccattcattctcaccacccctgtgaagtgggtggagtaccagg

SEQ ID NO: 136970 - DNA, 948 bp, Homo Sapiens
  misc_feature (483)..(483): n is a, c, g, or t
tgatgctccactgtttcaaggaagagagtcaggctttgaaaagttccagaatcttacagtaaaatcatacgagcaagaggccagcacagaagcatgaaatggtgaaaatttcaccctcctaatagcataggtatgaccaagaagttcaaacactggtttgtcgtacattccttaagtcccagcctctcaaactacagtcaaccgccccggtcaccagcaaattctcattgtatttacaccagtcacaactcaagatttctgcctgatgtgcaggaatcacgattcttactcctgctgccttcacatcccatattctcagagtctgatcacctgaggctgaagcaaaacaaccagggatgtggggagaccagattgtgctataaataatactttcatggcctctaaaggtgcacagagactttccaacagttggatcccacaatttgacagtttgatcccatgagccagacaccacaagctgtntcacctctggtttggctccaatcaacactatacacctcctgagcgtgttctttatagacttgcagtggccctgcagctttggcagtgtcccagagctgcagcgagccatcgccactacaggtgatgaggacatgttcgttgttctcactccaagtcacatcaaacaaaccatcattccagtcaaagcttctaaaaagccttagcccagcttcatctggatccaatattagtagggttccacagcccgcgatgccgtagtgctgcgcggtggcgcaggccaggcggcccggcaggtacggggagaactcggcggcgtagccgtggcgtcccggcaagtccgcagcatccgcgccgctccaccgcacacacgcactcatcccgcccgccgcccccggccctcgctgccccggcacgcaggaagccgttccgagtcggaggcacactggcgcggttagagagaccagg

SEQ ID NO: 136971 - DNA, 941 bp, Homo Sapiens
gcctgtttttccccttttttccaattttaaattagggggcctgggcttcggaggggaaaccttcgggaaatggggatttttcccattcccaggtaggtaaatggtttcttaaaggtttaccacaaattacccggagcttctggtgggaatttggtaaagaggtccattatttttgaaggtccaacgttggtcagattttcccatcatcttcattttctgaggtcccacagatccaacctgattattactaatcagaattgtttcaagtgtgaagatacgatatagaacttcaggtagcattttaaacctattaaaggaaagattgatcgtttgcaggtcttaccagtgattccatttcttctggcaaagaatttaaaaaattgttcctgagatctaaaaaagtcaatttctgaagcacacataactccaaggatataaaggaaagtttattaaaactgagatcgacatcagaaaccatttccttcagttctaccatcctttttggaatttcacatagttgattcttactgaagttaatagaagtgacgatgttgctttttactgcatcaaacacctcatcaggaatcaaagttgcttgtttatcactatagtctaatatttttaatgtaatgatggcatgtatattgactctggattcacttggtagtgtcatggcagtctcagtagcagactcactttggctaggtccatcatctttgatcttgcttcgtagatattttaggacttcttgtgttcctttacttataatttctcttcgaattgttctcaaaggatttccttctaatgccaaaaatttcaaatgaaggttccccaatgaatagggaagactactaatatcattgttgcttaggtcaagcctttccaaggacccccggccgtaatggccgaattcccgggcatatgtccggtaccgtcgactg

SEQ ID NO: 136972 - DNA, 690 bp, Homo Sapiens
caaatgcagctactacaaatacatgagtaaagtttataaacagcaaaaggaaaacttggaattacttgatgttttgtggtttaagaacgatacttgagtatgatcttatgcatgaaaatgtgtaagatggtatttctctaattttaatataattgttttcaagatgaagatgttccagatttgagtcatcatcctcttcagcattgcaaatttcttctggaagaatgttccgtatcttgttgttgttcagcctcagaaaatgtagtgctttcatttcttggtatccccaggtggtatagattttaagtccattgtgatcccagaaataattctctcagagaatgatatgccccatagaaggagacacgggtccatgccatcatcagcaagtttgttaaatgacaggtacaagtattccaggcctggttccatgtggccaaacacatagccagggatccgttcaatctggttcccaaggagtactaggtgcagcaaggacttgggtagataggacggggacgtgatagagcttgttgtaggagagatcaatggattctagattttcttgatttatccaggctaaaggagcaatcctattttcttcaattttgttataacgtagtacaatgacattgatctttctggtatgattgaaacaaatttcagttatttcttcaatttggttatttc

SEQ ID NO: 136973 - DNA, 647 bp, Homo Sapiens
  misc_feature (549)..(549): n is a, c, g, or t
aattattcataagctttggtatattaactaaaaagagttgggttccagcagttcgttttgtttcatagctacctgagaagtaaatccattggaactggacactaccatcacataaggctgtggctgctgctccgttttctcagtgttctctttcaaatgatcttcagattcctttttctctacttcctgtgtaagagtttttgtttcttgagttttgataactgaagtgattacagtgccaggtgggtgagcaaccagctgtgaactgcgaggagaaaaggtcaccacaggtgcagtagcactgaaggatggagaggaagccacactgacggttccattgcaaatggtctgaacattgctagtaaggacctgctgaacctgggcagggcccaagacaattgaaggaggagagcccgccttttgtgactgcagcatgacattttctttcagtactgtcatgggctgtgatgatggaatggcttgtaaaataaacttctgagatccagtacctgctgatggatctgtgctggctttaactgttgtgagtgngcactgtttggagtgttactgtttgcaactgctgattcctaggagacacaaccactggaaaactggttggagcctgttagtcctatactctgaacgga

SEQ ID NO: 136974 - DNA, 608 bp, Homo Sapiens
  misc_feature (36)..(36): n is a, c, g, or t
  misc_feature (40)..(40): n is a, c, g, or t
  misc_feature (521)..(521): n is a, c, g, or t
  misc_feature (576)..(576): n is a, c, g, or t
ccgcgggcggtggggacggcgccctcaccccgagtnactngtcagcccttgtctgaggcggagcagccccgcgccgcgccggacccgagcatatttcattttctgtcattggactttgagccattagaaccatgagcaactacagtgtgtcactggttggcccagctccttggggtttccggctgcagggcggtaaggatttcaacatgcctctgacaatctctagtctaaaagatggcggcaaggcagcccaggcaaatgtaagaataggcgatgtggttctcagcattgatggaataaatgcacaaggaatgactcatcttgaagcccagaataagattaagggttgtacaggctctttgaatatgactctgcaaagagcatctgctgcacccaagcctgagccggttcctgttcaaaaggcccacagtcaccaagcgtgtgttcccgagacttctcaggaagcttagcagagggaccagagaagaggattccaagggtgacagttaacagccaaatgngaaaatcccacctaaacggccacccagaaacacattgtggagcgctatacagagntttatcaagtacccctcacagtggatgccagg

SEQ ID NO: 136975 - DNA, 458 bp, Homo Sapiens
ctcctgcctcgggcctccccaaagtgctggggattacatgcatggagccacccacaccccagccaatttactttttaataggaatataccactggttggaattctatcttcatggattttttacaagaggttgctatagtgtgctatgtgtgtaaatattcagatcctgtatataaactaatcaaaggctccatgtcagttcttaagtttgatatttaaatgtctgaccagggaccctccaaatagtattcacagtattaaacggtgagataaattttcatttctattttttcctatcttttcaaagtcccattaaacatctgaaattattggtagaaatgaggtgataataaatattttctatttaagtctgacattgatttgcaatccattttaaactgttacatctaatatgctattctgtttttctcatgagtctttaattgctggatatttga

SEQ ID NO: 136976 - DNA, 563 bp, Homo Sapiens
  misc_feature (273)..(273): n is a, c, g, or t
  misc_feature (525)..(525): n is a, c, g, or t
  misc_feature (542)..(542): n is a, c, g, or t
ttcccaaatcttaatgtctgtttcagaattttagtgattttaaagtgatagtagaaaataccaagcatatgaggtatttcaatatgataggcttcttacattttaatagttactcatctttgttccaggacccttgactgatgctagggaaaggataaagcatagaataccagccagtttggctctgattttgagttatttataataaaggtttgggggattatcctaacatctcatatctttgtgtatgttgttttaatgctcggcagcacnaacactgatgataactattaaaaatagaaaataacagccattttactttcaaatctgatgtgatgcaatctgtgaacactaggaggggataaaataagcattgcagggaaactttatttgtaaatagcttcctcacctaaacttttgactttggcaatcaatactttctactttggtgggagggggattaagaatagaatggggcagggatgagaccatggaaaattataatgattccatgggataattggnaatgatgcctggaactnttgccaaggccttttttaatc

SEQ ID NO: 136977 - DNA, 594 bp, Homo Sapiens
ttttttttcagcacagagaggcttctttattccaaggatctgatgttgcaagatctaacatttctacccccaggcattctccacctgcccatccaatctgctaaatagaaatcatgattccttcttatagactcctccgccttcccttcttccttctttaattctgcagtggggccatggggagaaagagggaagagggagaagagtagctttctcactagtccccaggcgacagccactagaactgacttattgttgaagttctaccccacaaattcaaaagtgcttcttactttctaccctcgtcccataatcagataagccccagggcaacaaggggcagaactatcaatcaaggcttcagcgcttcttctaacatttcagagactccacccagccaagaggcaaccctgttcctcactttctacctacctggcctacaccagaaactgcacccctcaaccaacctcttaatcctacttgaaacttggtcaactagaacaggcctttggcctatgggctagtcaatcttttacatctgtaatgccaacaataatcccaaccaaactacagcaaacccagaatggaactcag

SEQ ID NO: 136978 - DNA, 443 bp, Homo Sapiens
cttccgcgcgcttactttgtttataacttgaaaaatcctctccgtctcccttccctgcctcctttcctttccctttcctctgccagtacaactagacccggcgtctggcgtccccggtgcccagcattctgcggggcaggcggattaattggaattgttcaaaatgtcaggtgtggtacccacagcccctgaacagcctgcaggtgaaactggaaaatcaagacaaaaccaccagatccaatggcctgatgctcctccctgaatacaattctcattattttaccatggaccacccttggaacaggcttgtcccttctacacctaacttggactaaccccagtggaggggctttgacctaaatgcgcgattactaaccagttcccagcaagcaaagcacccagttaacccattttcccactatttggttaccccaaggccccag

SEQ ID NO: 136979 - DNA, 840 bp, Homo Sapiens
  misc_feature (260)..(297): n is a, c, g, or t
  misc_feature (596)..(596): n is a, c, g, or t
  misc_feature (804)..(804): n is a, c, g, or t
ctctctgtttggtgctctaagtgggtttgtagccacttttctgttactttatgattctcatttcaacaggaatggccagtaaaagttgttttatttttcctgttaaggtttataacctttttacatttttgacctgtattagattagaatttcattatgcattccttttagttgaggcgcttcatagttttctggagatagtcaatttttagttttttattatacatttgaatggccgttttcctgctttgtctgcctgnnnnnnnnnnnnnnnnnnnnnnnnnnnnnnnnnnnnnngtctatgtaagtttcatttagaaagacatgcatttatattttgtttctgtaatattctactgtaggtgaaatcttttcaaaaatcaagagactgggtagataagaatatatgaatgactaatatacaaaagatttaaaccattgtgatggcgtatattctcaaatggtaatatcttgcaatggcacacagatttaatggataaaggtatacctcagacttcactgtgctcacaaatctttgaggagaaagtttggtcacctgtttggcttgatttagttactgctgcctttggttttcnccaggaatgaagtattcagcacagtgactcagtaatttttagttattttgcatgggctgggtagtacctctgttatgctctcagttacaatcaatttaaaactgtataacagtcttggtacctaacagtagctatgcataatcctgtggcacagtacactcccaagccaccaatggcagttaaatatgctctcatagtgggtttttcnatgctatatgaaaatagtcttcaagccttgggtctc

SEQ ID NO: 136980 - DNA, 525 bp, Homo Sapiens
cattttaaaatcaggcttttctgtagaaaaatggccgaggccttgaaggcctaagaataacatggactttgcatgcctttgatagtttagctggatgtaaaattcagccttcaaatatttccttcaaactctgaggatggaacatcacagttttctggctctccgtgtttctcacgtatagtctgaggtcaatttgattcccattcttttttctctgggactttagaatttatctttgacattgatgttcttcaaggtcttatggcttttttatgttatttttccaccttgtgcatttccaggctgactgagatcattcacctttagatctgagaacgtcttggtcgtcgttgcttcatgtcaatgacttcttacttttgtattttgcagttagatggatgtgaatgaacacctcccttacccatttccattcatctatctctgtacgttgtctctctttacgcctcctgtattcctgggagacgtaaagagagtctccgtcgaactggtaccgagctcgatgac

SEQ ID NO: 136981 - DNA, 1103 bp, Homo Sapiens
gcagtgagcagaggccggccatggccagcctggggctgctgctcctgctcttactgacagcactgccaccgctgtggtcctcctcactgcctgggctggacactgctgaaagtaaagccaccattgcagacctgatcctgtctgcgctggagagagccaccgtcttcctagaacagaggctgcctgaaatcaacctggatggcatggtgggggtccgagtgctggaagagcagctaaaaagtgtccgggagaagtgggcccaggagcccctgctgcagccgctgagcctgcgcgtggggatgctgggggagaagctggaggctgccatccagagatccctccactacctcaagctgagtgatcccaagtacctaagagagttccagctgaccctccagcccgggttttggaagctcccacatgcctggatccacactgatgcctccttggtgtaccccacgttcgggccccaggactcattctcagaggagagaagtgacgtgtgcctggtgcagctgctgggaaccgggacggacagcagcgagccctgcggcctctcagacctctgcaggagcctcatgaccaagcccggctgctcatgctactgcctgttccaccaactgctcttcttcctctgggccagaatgagggggggtacacagggaccactccaaccagagccaggaactatatcaaccctcttctgcgcccacatgatggacttgaaccccagagctgaggccatcggatacgcctaccctaccccggggacatctttaatgggaaaacatcctgcttctgtgggaaggggcggccttccccccaatttccaccaagctccggccggctggaagcgcattccccccctggcaccaacccgccatgaaggcatcctttccgggtccccctgatgccctaagaattcaccatttttctccaccgcttatccccttacccaccaacgatttttctccagcgcaatccgtaacaaggttacgaaaaccacacattttccctattaatacaacccgcgccctttccacccaatggcgtgccttcctcgcttggggcccccttctaacaccccctgtgtaaccccccaa

SEQ ID NO: 136982 - DNA, 436 bp, Homo Sapiens
tggatgatccaatgattcgtaaaacaggaagcaaacctagtaaggccaggagggcagtggcatgacgtggattgccagctgacaatgcacgcacgggttccggaagttccgagcatgccgggatcacacactgatgccttgcttaggtgtacccacacgttgcgggccccaggactacattgtgagaggagagaaagtgacgtgtgcctggtgcagctgacgtgaggaaccgggacggacagacagcgagccctgcggcctctcagacgctctgcaggagcctcatgaccaagcccgcctggtcaggctactgcctgtcccaccaactgctcttcttcctgctgggccagaatgatggggatgacacactagggaccacgtccaacaggagccaggactatatcaacctcttctgcgccagccatgcgtggataca

SEQ ID NO: 136983 - DNA, 1688 bp, Homo Sapiens
  misc_feature (80)..(140): n is a, c, g, or t
  misc_feature (856)..(856): n is a, c, g, or t
gacctttgggcgggaggaagtcccccccagattaacctcttttaaaaaataccgcaaaaaggcgggcctttcttatggtnnnnnnnnnnnnnnnnnnnnnnnnnnnnnnnnnnnnnnnnnnnnnnnnnnnnnnnnnnnnnaattaattttcagggagggtcaggaaggaagcccttacttcgaccaggaggggagtttattctggaaggaaaggaaggccggcagcctgaaatttagcccaaagaaagaaggagaactgggggggttagaattttcccccacatttcccgccaagtgtttcaagagccccaccaccttgaacctcagagagaacccaggcagtctcttaaggcaaaagatgtgggtaataaaattccaggaatcgcttagcatactgctccggatggacagtagagatctctgccccagccccatgcttgacagttttggctgcatgagctgctttcttcttggcatcatactgtgtaaggatatcaatgaggcccatgaagtagacctctttctggggggctccttcagcactccggatggcatagacatcaatgaaggactcaaactctcctgggcccaggggccgatgggaatggatgtagcctccgataccctctggggaggtgccataggagcccaccagagcaggaggtccagtcaggctgcagtccccatccacctctgactcatcctcccgcacgggcgcttcctcctctggttcagagccccgaatgatgtcgtggatgcctagcagaaggctgtagtccatgatcttcagctgcactagaaactccacatctctcttcagcttctccagaaatattttcttctcctcttcaccaantatatactttctggttcttgttgagaaagtccatatccttaagggtgggcaattctttaaccttttccttatcgctggcttcccgggacactagggaacccttgaggtcatacttcctgtgcacaggaagacggtggctaaacatattgcgcatcacaagcatgtagctgtcttcgttgtccacactgactcggtacatccccaggaactgggtcagaagcgtgttgccatggcacttcacaatgtactggtgatagttggagaggttgctatgcatgtcagcaatgtcctcactggatacttctttgatgaccagagtccgatcgtaggagataaggaagcgaccatcactgccttcactttcgctgggggggtttcgggtaagggacaccaagtaatcttggtcatcaatgccaaatcgatcacggaggttcctgaagacctggggacaatactccttgaacttgaaatgactgggcagattttccctgtggaaaaggtgattgttgaccttgatcttggagctggccttaaagtcatctggcagcagcatcaccgggggaggcacctggctgagctcattgatcgagtgggctacgccccacaggaacacacccaccagcgggtcagccgcccggaacaccttcaccttctgctgcacgaaatgcttcttcttggtcttggaggcgaagccgaaacctgggccggggcctgctgtcgcacgccgatacacgtggctggtgggaacagaggaggacgccatagtctcccgcgcaaccgaccaagtggaagccggagccggcagctatcaaggcgcccgaccccggaagcg

SEQ ID NO: 136984 - DNA, 692 bp, Homo Sapiens
  misc_feature (287)..(304): n is a, c, g, or t
gcacatatctgctgtgttctgtgcctttaggacccgccactctactgcctctttcctgaagtgacactcttctccccttcttaccaaactccctgatttctattaaccttattctctgaacccatttccccctatgacccgaggactcccttactctacccacgcctaaatctggcctgctttcttctaatttccgtacacagttgctttgctgtaaaatgtgtatttttttaacaattcaaaaacgtggcaaaagcccacatacacccccccgcctttaccccacnnnnnnnnnnnnnnnnnntcttccccgggaagcactttcagaagtttaagcttctacttgttcttaagccacagggcaagtgccaggtgagtcctaaataaccgttcactcacactgcagggctggcaaccccggggcccacagcacagaagcagagtgggctccccgggtgagccagggaagggcgcctagcaggcttcctagagtgctgcattgctcgtctccccccgtgtcacctgggagagttacgttcttggccctaactctcctcgctcagagaaccgccacactgtggggagggctctctgccctctgcactggctgtcccatccacagggccgggggcctggggctgccagggaggcggcaggcccctccccacagagcagccgccctcgtccatctc

SEQ ID NO: 136985 - DNA, 1150 bp, Homo Sapiens
  misc_feature (736)..(988): n is a, c, g, or t
  misc_feature (1032)..(1066): n is a, c, g, or t
gggttaaagagccccatttaaattgtttaaatgaaataaatacatccaaagtaaatgcacggtgaaaaatacattttaatccaaaagttttgaatattggcacttagaaagttatttacaatcaattttactataccctttgtgaataaagagataattatgtacgtgtagctacctatagttgtttctttccaactcaaacaccataactatgtggaaaaagggtaagagttaaagctgctgcagctcaaaatcattacaatcaacttagattctgcaaattttcccagggttgaaaaatgctggttaaatcaggacaaaagaggaggcaagtgagtacaccccactcctctcccattttacgtgttgctcccttacttaaccggcaaagacctgcacctgaattctagacaatttcatatacaacaggcctcttattatgggtccatagcagatggtttagggtagatgttttaaagatatcaatgctaatggcctaccaatgactttcatgacctcccaatattcgttttaatggtagtcaagagactatcaagcaggaagcctgatctcgacatgtttcctctgcggctttggtgaagctgactatctgcagtataaaatcttatggtttgatcgaagtctcatttttgactagaaacagtaaagagcagctttattaagatcaatggaatggttctgaatgcctgtttctacagaaggattaaattaaaannnnnnnnnnnnnnnnnnnnnnnnnnnnnnnnnnnnnnnnnnnnnnnnnnnnnnnnnnnnnnnnnnnnnnnnnnnnnnnnnnnnnnnnnnnnnnnnnnnnnnnnnnnnnnnnnnnnnnnnnnnnnnnnnnnnnnnnnnnnnnnnnnnnnnnnnnnnnnnnnnnnnnnnnnnnnnnnnnnnnnnnnnnnnnnnnnnnnnnnnnnnnnnnnnnnnnnnnnnnnnnnnnnnnnnnnnnnnnnnnnnnnnnnnnnnngtaatggccgaattcccgggcatatgtccggtaccgtcgactgnnnnnnnnnnnnnnnnnnnnnnnnnnnnnnnnnnncggccgcttcctcgctcactacatcgctgcgctcggtcgttcggctcgacagagctaagccgccctatagtgatcaacagtctt

SEQ ID NO: 136986 - DNA, 1224 bp, Homo Sapiens
  misc_feature (30)..(30): n is a, c, g, or t
tataactggttttcccttgcttcaaccggntcactcctctctggatgtaatccttgaaagacatggttggcttattgaggcagagagactggctgcagtcatcttcgaaagctctcgaaggaaggaacccgttgcacatccagccaaggacgactggctgttccaggactggaggagggagtctgagctctcgaagctgtccgcaccgttctccaggggagtcgtggtctttgggcgtcccagaattgttggtgagcaaattcaagttgctgcctgggaagtcctgactgacagagcagtaggtgacgctgacggagctgagccgagacttggggaacatctgaaactcctgctcagagctgagtacgctgggtgtggaggccggacacatgctgtccaggaggccgcctttggggtaattctgtgtctgcattccatagggcgcctgctctgtgccaaaacctaatgtattgctgttaatccaatgaggaacggaggtgaggtgtgaattttcttcatattgatcttctgtcttttcttggttttctttgatcatttgctccagatgttcccagagaatgtcacccacaaagtcaggtgccagctccagaaagcgttccttgccaaggttacacagcatctggccattcatgccgaacctctgcagattcacgttcaccagactgaactcattggtggcccagagaagccactggcatacctgttgctcactccacagccaggggttctttggaatgcccaggcgccgctgttcctttttgaagccactgaaggtagcgttttaaggcttgactcatcacagccttgctgcacggggttaacaaaggcgattcacagttggcggagtcatgagaaatggaatccaagcctgttggcacttcttgcagtgtttgctcttcatttagagaaggaaaaacagcaaacagggacccatcaaaggtgtcaaaggctggctggcgcttgagtgtccctcatgtaactgttagccacaggggctacctggtccatattcgttgattccagaaatcattcatcctgccgctgcgggcagggccggcgcttggtcgggacggtggctgctcggcgcccgcggctgctcggtgcgcgccgggcgagggcgagggcgccggccagagacgatccgggaggccggacgctggccggcggctccgggagctctgagctggagcgacaccgcactcg

SEQ ID NO: 136987 - DNA, 744 bp, Homo Sapiens
cgtgctcacagcttcccttggggcctgatgccaacaggagttgaggccagggagcagctttgggctgtacggatctttggatttgaaggtaggggatggtgatgggctgcccataatgctctaggtgtaaaggctgagagcggctgagcgggatctggtcattaccatgttctccacagtttgagagctgccttgtgcagaccagcaagaagcaagacacagatagttctcagcccccttatatctctgtggaccccgacttttcttcccccagctgctgtcctcccaagcacagccccgggaggatgtagggagagggacccattcccctgatgccccagaacccctttcatgtaatcccaatatccaggcctggggtccccttctttggatcgacctttcttttcttggaatgaaagggttacagggtctccctcccagatctccactgtgactcactcaccctaaatagatgtcttgctctacagttatcttctgcatagtgttttctgaagatgtgataaaatattataagccattaataaaacatggaagttaggttctctttttggattctgaggatctgctgtgctggggcaggggcaggtggggagagaagggcaggtggaggggcaggagctgagtggtgtgcggcctcgctctgtgctcagtaaagctcctgctgtggtcatctcttgtgtatttgtctggatccctccatgtgctgggacctccgtgccgaag

SEQ ID NO: 136988 - DNA, 902 bp, Homo Sapiens
  misc_feature (792)..(792): n is a, c, g, or t
  misc_feature (822)..(822): n is a, c, g, or t
  misc_feature (868)..(868): n is a, c, g, or t
  misc_feature (879)..(879): n is a, c, g, or t
  misc_feature (890)..(890): n is a, c, g, or t
cagtcgacggtaccggacatatgcccgggaattcggccattacggccgggattattataatgtataaagtaagaattgacaaaatatgattcttgggttgattggtcatttagaaactagccaaaagtgagacttttaatgtagaacatttttcagaaatgggtacaaagaaaaatgcatattactgtatatttcagagtgtttatgtgaaccttgtatttaattgagagtcccatgtacgttctgcagccttttgctgcttctatcatctgaagttgtgtagtacaaataaggcctttgggattcttaatgacatttatgttaaaatgttctcttctctttaaacaccgttttccaatccacctgtcagggagtccaaatcgtgtctgtgttgatgatgctatactttgtagctagaaaaacaattttagtgttgtgggctctgtattcagacttccttttttacaagaccgatgggcagtggatagattattttatcatattttaatgcatgggaaatagtgtgctgaggaagctattaaaaagtattactcagtgaattgggtctgagttttaaatgagatattttcaaaattggtttgcccctgtaaaaagccgactaaattatattatgatactgttctttatgatcttgtcatgtttcactgatatgtttgggggtcttcactatggtaaaaaatggtccaaaattggtaatgaagccagcatggtaccaagtagtccgtaaatcaaagggtttaaacaggactgcattttccattaggaaaagcngtttggcagatagcatccaatgccaaaacngaaatatcgtaaccgtccgcctagtgggccagatagatagggaagnctgcccaaagngccaaagaacnttgccatccatc

SEQ ID NO: 136989 - DNA, 629 bp, Homo Sapiens
  misc_feature (170)..(252): n is a, c, g, or t
  misc_feature (499)..(555): n is a, c, g, or t
ggatgtgtatactttacgcatctttccttttgagtagagaaattatgtgtgtcatgtggtcttctgaaaatggaacaccattcttcagagcacacgtctagccctcagcaagacagttgtttctcctcctccttgcatatttcctactgaaatacagtgctgtctatgannnnnnnnnnnnnnnnnnnnnnnnnnnnnnnnnnnnnnnnnnnnnnnnnnnnnnnnnnnnnnnnnnnnnnnnnnnnnnnnnnngtatctctaaatacaggattataatttctgcttgagtatggtgttaactaccttgtatttagaaagatttcagattcattccatctccttagttttcttttaaggtgacccatctgtgataaaaatatagcttagtgctaaaatcagtgtaacttatacatggcctaaaatgtttctacaaattagagtttgtcacttattccatttgtacctaagagaaaaataggctcagttagaaaaggactcnnnnnnnnnnnnnnnnnnnnnnnnnnnnnnnnnnnnnnnnnnnnnnnnnnnnnnnnngcaccggcgcccggccaggagccttcttaagctgcacacccccaacaccagccacaagggcagacccttgccag

SEQ ID NO: 136990 - DNA, 909 bp, Homo Sapiens
  misc_feature (15)..(15): n is a, c, g, or t
  misc_feature (47)..(47): n is a, c, g, or t
  misc_feature (78)..(78): n is a, c, g, or t
  misc_feature (86)..(86): n is a, c, g, or t
  misc_feature (91)..(91): n is a, c, g, or t
  misc_feature (104)..(104): n is a, c, g, or t
  misc_feature (115)..(115): n is a, c, g, or t
  misc_feature (163)..(163): n is a, c, g, or t
cttttaaccaacggnttcggcatcaaccaaccaccaaaatggcctcngcaaattaaggggtgtagcctgccggaattnccaaaggnctgcngataccaggagtnccggctgaaantccaaccaatactttttaaggaaaacttggtagtacacgttataaaangtaggagcttgtacttcgtattaaaaactggtaaagtgtgaagcaatttggaaatactgtaatgagaagcttagggagaaaataccttatgttttttcatgttcattttttagaaacatttcagaaatacttaacgacattcactctccaatatgagattaggttttatcgacacagatttcttgatctgaataataattctgacaatgagacccaaacaaataaaaggtgatttttttcctctctctctcttttaaaaagatcttttggtttgcatctataaatttgtaaattaattttaaattatttataaaatcattggcaatgtagcatctctcttaaaaatatatatttaaatatattacagaaggttttaaccctgtccttctaagacatcaatcttttaatatctcctaatagctaattttctttttaacacgatggaaaagaattttttaaaaaagcaaaggactgatcgaaagaattcacagtagctgaaattaaacatttcatatggagtaacttaaatttatctaaaacacttaaatatatctttatacacaaattttgtagtaaaatatagctataagtgacttaaagactctagtcttctttgaagacatctttaaacttttttatacatagaatatgctgaaacaatacattccaccgaaggttaggcaaagcgcaatattttcaaacacaggtagcgtaatctaggtcctccactctgatacccttctgtt

SEQ ID NO: 136991 - DNA, 967 bp, Homo Sapiens
  misc_feature (43)..(43): n is a, c, g, or t
tttcaggataatttttttcttggctttttccattaaggtttanctggccaaaaagggtggaaaaaaggaacctaaattttctgcacaaaagcagttctctgaaacctgaactttaccaatctgtgtaaaagtactctacagaaaatacacaagcagaaaacagtaatgtaagcttcatctgaagtaacggtttagtcacatgacaaatttggttgtcgatttagtatgctgtagcccttatctatctaaattcagtatgactacatagacatttattctctggtactgaatttccatttgaatagaaacggctgctttgtggaagaaagaaacttcaatttaaaaacaatttcagcatcgttgaagtgccaatcagttttcaaattatgtgtgtgtatacatatgtatgtatgtgtgcatgcatgtatgtttgtattatgtgtattttttcctcctctctccctctcttgctcgctctagagagagataccaaatactggcttggtgctatactgttttttcctagttaatatttttattatttctgtctacgtaagaaacttcaaatattctgaatgcaaccacacaatcgagtaagttgacagacatgacaaaaactacgaaaagagggaggtaactagtattaatacttggcaacctttcgttatttttagtttagagcggcctccctctgacattttggagtcaaagatgaaaactcaactttgaagcataatggacataattacacatttaccacagtcatctacaattttatataacatcacaaaaagacatctaaacatttttcctacgtctttttttcatttgttaaaacagctatgttaaatacctttttccggaatggatttgttcaccccccttggataaacttacctaaagcccttccaggaacaataaccctcggttacccttttaatctaaataaatgggaccaattacttgt

SEQ ID NO: 136992 - DNA, 892 bp, Homo Sapiens
  misc_feature (28)..(28): n is a, c, g, or t
  misc_feature (33)..(33): n is a, c, g, or t
  misc_feature (53)..(53): n is a, c, g, or t
  misc_feature (65)..(66): n is a, c, g, or t
  misc_feature (75)..(75): n is a, c, g, or t
  misc_feature (102)..(102): n is a, c, g, or t
gaaccaccgaatgatgcttcaacatcanttcgnccccgttctttcatgtttcntaaatcgcctgnnttctgtcanccacgagcagtttcttaatgaggtctnttacatggaaatccaaatgtctggggaaatctattttgcctgcaagaattttctgataaatgccaaacgggttgtcatcaaaaaacggaggaaaccccgaaagcatctcgaatatcaggatgccgagggcccaccagtccacggcctttccgtggcccttgctctgaatgacttcgggggctaggtactcgggtgttccacagagggtccaagtcctgtctaccagcttcttggcgaacccaaagtccgtgagcttaatgtggccatccctatccagcaggatgttctctggcttcaagtccctgtagacgatctctttggagtgcaggtactcgatggcacagatgatctctgcagagtagaagagccccgtggtgctggagaagcgcccccggttgcgcaggtagctgaagagctcgccgcccggcacgtactccatgagcatgtagaggaagcgctcgtcatgccacgtccagaacagcctgatgaggaacgggtggctgacttccttcaggacagacttctcattgtgcacgtgctgctcctgcttcaggcggatgacgtcgggaatgctcatcaccttgagggcgaagaaatgcttggctgtcttctccttcaccaggtgcacccgcccgaacgtcccagtgcccacggtggccagcgtgtcaaagtcctgcaggcggtaggcaggcggctccggcgaccgcgcctcggggctggggcagagcgcgggcgccccgtcgggggtatcctccgtcacctctcgggagttgctctccgccgcggccgc

SEQ ID NO: 136993 - DNA, 899 bp, Homo Sapiens
  misc_feature (519)..(550): n is a, c, g, or t
gggcctctagaaattgctgaacaatggttaattaagatattgctaacacaatcgagtgataatacagttttactgcaaaagaagcacttcaaacctattatgtccttagaacttccagagtagccactgctcccagttaaaggtgggtcagtagccttgcagaactgtcctgagaagttattgctggtgctggccagccatggttaggactccaacagccactctgagggaggggagaagggagcagaggccacgcagaatgaaccgatggggtattcagttgctggcagctacattgtgtggcattctagcatcttcaggtctttagatcttggacaagttggcagggtattttaaaagctataactactgtagttttccagttttcattgctgctttagcaaaccacgctgtcttacagtggtactttcttctggccactgcactgtagataattcattggaaacaagatttacccactacataaaaggttaaactccttcagtatgttggagtggnnnnnnnnnnnnnnnnnnnnnnnnnnnnnnnncttcaggtttatatcttctctaatacctgcatgtggcgtttaaagattcaagaccacggtcaaagcccctcttctaatcacattaatggtttccattctttttaccctgagtgagcacttttcactttccagctaggtctgtttttcagcttgcagacaagattgagaaatccttgaaaattgggttgggttcacaatttccggtctaatttatttgaaatccaatctcccttggaaactcttaagtgctttgtgcacttctgttgtgtttgtctcaaagaagggactgtcacaatctgagttatttccaggtcctcttccttattcctctagtggtttgaagctgagt

SEQ ID NO: 136994 - DNA, 444 bp, Homo Sapiens
ttttttaactggatatgctgaacatttattgaagacttaatgggtggaatgaattgtattaagggcatcccatctctaatttcaggagagtgaatctatctcttgagctgcctgataattcggtgcctccctcacaagagctcttccaggagttcacttcacaaatgtgtactgagttcccactctgtgttaaccagaatggttccagcgatgtctgcaggaaacaacgtctgcttggaggagttcagagggtactggagggaggaagcacagttggagctagacgctttcttcaggagcttacccgggagcccagggtcctgtcggcgaccagcgcaaccaaatccgacggagagatggtgctgccaggcttcccggacgccgacagctttgtgaaggtgagttcgcggggcctcgggggtaccaggagtcgcccgcggccgc

SEQ ID NO: 136995 - DNA, 1229 bp, Homo Sapiens
taccagaagttcatccaggaaggatatgaaatggcatggtgtctcttctataggtctgtataactggggtttgtggcttttgaagcactgcatctgctggggtataagtgatttagttcatattgataaggatgtgcaaacatgtcttgctcaacctgctggggttctctgctgatggatgaaatcagccagtgcaggggggacgtccaagtcctcaggacgatcctgtgggcgttcccgcctttccttagagagagcttgagggagaggtttctgagcattgggtttgatgaagattttaggaagaaatggtgtgttggaattgtcaatcttctctcgaaacttgagctgaggtcggatgatattttttgcatgaagcagccggaaagtttcagattttgcttttttgccatattctgctgccttacggttccagctggacactaccgttttggggacctgcaagccggcagggaggacaggctgttgattcttgtttacacctgaggcttcatccagtaaaatacccactctctccagaattacatcattggcatcaactagtaaatcaaacttgtcttccagctcagtcactttacttcgatccttaatgttgctgcgacacccatggtactgcattactctgctcatgcactgaagcaacctgtctccctgtgtttcgcaaaatgcttggaagccaggaaaacttcggtaaaaatcatactcatcgccaaactgtggtaggcccccagatgccttggtgactgccaccacggacccaagagcaaacttcacaaagctgtcggcgtccgggaagcctggcagcaccatctctccgtcggatttggttgcgctggtcgccgacaggacctgggctcccgggtactgggtggcgccattttttcagcctgcacggctcgtctcgcgagagcttgtcggccgaggagacgggacgcgtgcgcaccacgcatgcgccaggtaagctcctgaagaaagcgtctagctccaactgtgcttcctccctccagtaccctctgaactcctccaagcagacgttgtttcctgcagacatcgctggaaccattctggttaacacagagtgggaactcagtacacatttgtgaagtgaactcctggaagagctcttgtgagggaggcaccgaattatcaggcagctcaagagatagattcactctcctgaaattagagatgggatgcccttaatacaa

SEQ ID NO: 136996 - DNA, 449 bp, Homo Sapiens
cgaatctgggcattccccctttcaagaatccaaggaccaaaggtctggtaaagcccctgaaagtcggtccagggtgaacctctgcgttctctggggcagacgtcgatccgatcgatgacctggtcctggtcaaagtcagactcatagatgtctcccactccgtcgctgttgctatcctcctgggctgggttggggaccagccggcagttgtctggtccagggggcaccagggtctgggataccatcattgtcatcatcatcatcacactcgtcaccaattccatccttatcggtgtccagctgggcactgttaatgacggtgtggcagttgtctgtgctgtcctggtgcccatctccatcactgtcctgattggtgtcacaggagtccccaaccagatcattatccacatcagactggttagggttgctgacatcaggacaactgtcac

SEQ ID NO: 136997 - DNA, 734 bp, Homo Sapiens
  misc_feature (51)..(51): n is a, c, g, or t
  misc_feature (543)..(593): n is a, c, g, or t
  misc_feature (683)..(683): n is a, c, g, or t
ccagctcagtggctcttcacccctcaaactaagtgaagtcatccttccccncaaggacccctgggagatgttctggccctctgctgtctactccccggaatcagcccctccaggactatttgagaatgttgtgctctctattggtcaccttgagactccgttcccctgctgcccactcttctcttctgccctgtgtattctgctgtgatccccttaacggcttttctgtgctactagcttagccctagcccttttatgaatacctgagtcttataaccatgaacttcttgagccggccgtgtcccacttctttgctcttcagggacctgagtgtgcacctttcccttttgccggtctatttgacatagtaatctagtgtgttggggaggggtagcccagccggctgccgtgtctgccatgccgagggcttggggaggtttgggtactctctgctgcccactactgggatgatattccagaagagagaggacctcatactgtgactggaccccggaccctccctggaagagagctcagcccagnnnnnnnnnnnnnnnnnnnnnnnnnnnnnnnnnnnnnnnnnnnnnnnnnnnctcatgtgcacctgggtgtaaaatgactgttatctggttgtgttactcagggtgggctggggactcaccagaagaatcccccccaacctngcccaagacaggtttttccccttgtaccatcttcagagaaggtcagggggt

SEQ ID NO: 136998 - DNA, 922 bp, Homo Sapiens
ccttttgtctgttattatattttttagcaaaaatgcaactacatcccctccatgtgcatttcatacactaaaggccattttgtggtggtgtggtgggttttcccagggttttctaaaatccttttcaggtacatttcctgccccgccccctgcaggtcttccaggatgcaaagccagtgtgctcactcttctcaaagtgaggtgccaggccaccgagcgtagggtccttcagcagtgcacaggatgtgggctctggcttcttcaagtaccgtggaccacggcccttgggtcaacagcaccggcggctggcttgcatggttggcttctcaactttgattgttccattgtttccattttcatgggggtccaagggtgggatctggcggctgattccttgaaagagctcttcgatattaatagcattttttgcacttgtctcaaccacgatggcacctatggattcagcgtattccttagcatccttcaggggaacctccctaatatctgagaggtcgcacttgtttccagcgatggccattacaatgttttctggaccatgttctttcagctccttgacccatttcttcaaggtataaaatgaatcctgcttggtaatatcatacacgataacagctgcagctgagcctcgatagtacatgggagccaatgaatgaaaccgttcctgaccagcagtgtcccagatgaggaacttgtgaagttcatttccacaaggcacagttttggtcataaaagatgccccaatagtagggctgatgttgtggtcaaagtgatcctggacaaatcgacacacgatgcttgatttcccaaccccagtgtccccgagaaggcacactttgctttcccgtatcgccatcatgtgctcgcagccaggcagtgccggggctcagcagcatcctccggg

SEQ ID NO: 136999 - DNA, 1138 bp, Homo Sapiens
  misc_feature (1001)..(1028): n is a, c, g, or t
  misc_feature (1057)..(1074): n is a, c, g, or t
cagtcgacggtaccggacatatgcccgggaattcggccattacggccgggggagggccatgccacctacccttggctaaacagggacagtgaacacattttggttcctatcccagtgggtaagaggcacttatctctgggaaatttgcctctcttgggactctccccctcccaggcattttccattcctggaaaggctcctttggggttcagaatccagagaccaaaccctgacccacctccttcctttcctccagcccacgctggtctgtccccatgccttcccagggcttcttcatgtcagatgcacccaagtccttagcccagctgtgccacctgcaggagttcgctcttgcgtttcttcccctccccaagaagggagggggctacttcaggcccttctgtgtgttgcctggcaggataccttgtccaaccagctacccacctcaactcccctgtagtttaggacacaaaacagctaccagcggtacagagcggtgatcaaagccgagtacttacaactctggtaagcctagcttctccgcctcagcccttctgcttctggaagggctatcctgggggtgaacttgaaactctcatcaggcttctgcaaaagctcttcttcctgaagacagacccagcctttgtgctctcaccctccactctggtaaagctgcacctctgggggaatgaggggctgcaggaatctctggagagcctggtgcttcacgatgctgctctggtgattcttgtacctaatctggtgtgctcaccaatgagtgaaagggatcgtgggtcagggacaccgagagagtgaggtcacttccacttcaaaccttcagtgagggggtgggatggagagaatgctgaatcttttttttgacgggatggggtttttctctttgtaattatttctttagtttaattaaccttttggttgtttgtgcaatattatatattttaaattataatgcatctccccagagtattttgtagctgggnnnnnnnnnnnnnnnnnnnnnnnnnnnngattctaccagctgttagttttataattnnnnnnnnnnnnnnnnnnaactttgtcctgaaccttttacagacttgccgttaacagcattaaagtgattcccccgaagctg

SEQ ID NO: 137000 - DNA, 695 bp, Homo Sapiens
taatattgtgactttcttgctctttaaaaaaatccctgtctccttcttttcaggatgatgaagccccactagacattacaaacaactgcaacaaatgagtttggcagcataaataatgtctagttattcaaatcttcatagtgagattaatttatcttgtacacaatttgttgaatgtttttcgcagcaggtgaatcaaacccaaagactccggacagtctgtgaaagggagtaagaattgcagttctgaaggcccctgactttggttgtttacaaagttcaatcctgtttattgtgatccttggtatcttcttcatctgtatattctgatggttcttctcctggttttaggagtctgcctacataatcatatttttctttaaactgcatttcccattctcgaacactctccatttgtactgcattcaaatctgagagatcatcatattcatctctaagtgcatctttatctaggcaaaatgtggccagtcctctggaggcatccctaccagcaaatattccatatggacccgcttgttaatcatggaaagcaactccgaactaaaactggtttaaagagagtccgaggtgttgcttatacgtctggacttcagagactggagggttgggactttacatacccctaaacgtggcttacggagtaatacagcgagggaaaaaaggagatcagtggc

SEQ ID NO: 137001 - DNA, 1081 bp, Homo Sapiens
  misc_feature (889)..(889): n is a, c, g, or t
tactgtataaatacacaatttttttaaacagcaccatttccaagttatacacaatatgattatgacttggcacaacttttaaaggtggaaaaggctagttgctagttcagtaataaaatacctggtacatagaacgataaggagctgtattctacctgctacacattgtgcattttacacctccagctaggacagaaacaagccacaagcggggaatacccgcccaaattaatactggaaagtttacaaaaccttcacttctcataagggtgatgctaccagcggcttgcttcacctggaattagagtaactgatttttaaagacaactgagaatattaactcgcttcaaacaataaaatagtcattttgccgacatttcataaaatcgccagttttaagctcagttcagaggcttttaaaaaaatattctagacctagtaaagtgcctccattcataaaatgaaacatccaagattgagacaatttcatactgatgcgcatctaaaataggtcgacgtatacagtaaataaacagcgcctctaagttgccatatttcagttagtggaatacacacccagccttcgccgttctggatgtgcaaactagaaactgaagacaaatggggatttcagcgtctagtcccaatcgttcagcacggaagtactccacacggtcggctgcttttcaaaaaccaccaggacgacgtcccatgtcgagccgaccgctgagccgcacgcctccccacggcgggggcgagatggtgcgcagacctagcggtgcgaggggcggcggcgaccctgggcggccgggagcccgggccttcagcgcagcttcttgccaggcgggccgtccctggcgctgcgggtcggcgggcgggcggacgacgncggcactttggagagcgggcagtacttgatggtgtgcgcgttgtcgccgctggcgccgcacaggggacacgtgtagcggcgcagcacgggacacagcactcgcccgtcggggcccttgaggatatgggtggtgtagagcgccatcgcctccttgttgttccggcagaacacgcacacctgcagctcgggctt

SEQ ID NO: 137002 - DNA, 1214 bp, Homo Sapiens
gctcattttgtctctgggatagttgactaagataacacgcacaggtccttcagcttgggaaaccaaaaagattcttgctgtttcttttgctcctctgatccagccctgccattcagagtcaggaaaatcaagacttgtccagttaccaccagtggcagttcgcagcctccaggacttggctcgcatcgccatccggggcaccattaaaaagattattcatcaggaaactgtgagcaaaaacggaaacggactaaagaacacccccaggtttaaacgaaggagagttcgccgccgtcgaatggaaacgattgtctttttggacaaagaagtctttgccagtcggatttccaacccctcagatgacaacagctgtgaagacttggaagaggaacggagggaagaagaagagaagaccccgccggaaacaaagccagaccccccagtgaacttcctacgccagaaggtcctgagcctccctctgccagatcccctgaaatactacttgctttattacagagaaaaataagtctcctgtttgaaagggggaaataggaagagcagattgctgagtgtgaagttcgtgctgcctgtgtgctgttgaagggtcacctggaggcagacgttgtggggaagggaactgctgggctcatccacaccatggttttcttctagttcctgattgacctctaaaattctattcagttgtatgatttgtttacatagttccacaagaccttcattgcatagaagattgttttcccaaagtggagagaatcttcatagagaaaaagagaaggctgtttctttttcggctctgacgaaacactgaagtctgcgtaagagagactgtttgatgaccgtccctcatgcaacatgcacggtactcactaaaaatgaaaactgaagtggaaactaacctgtgttgcttataaagtgtgaaagcacaagcttataaatgtataacaatcttttctgggtgtgacgcaccctgcgtccaagtttcgaatttttatgatattgtaccacttaattactggcactgagtatcactgcaatttcttagttttctagtggggaaacattattgagaagccctcccttattttaacgtaagttgattaactcttttgtgagttgccagttgtcatttttccaaaggaaaaaattttgatggggttggaggaatgaattgccagataatccttccgggaatt

SEQ ID NO: 137003 - DNA, 716 bp, Homo Sapiens
cccattttttaaagccacacggagatttttaaatgtgtcggaattttgtggggaaagagagccagaaagctctgaagaacagtggaagagatgtgaggacatttcagcagtaatgagacacattcatgcaacccaccagggaggggtctgtagttcgggagtttccgttaatccaatgcttaaagtgagttcaccgggcaaatgaacccaaggtgttgggacatgcgttaggccagaaccgactttggaaggacgagagaaagcacagagaacaccaccttgatgtgggggctgattttggcactgccgttggtgatgtgatccagcggggccctgtgctcccccaagtgaggtatggaaggtcagagctagtagtgtttcccaaggcaagaacctgagcctctgctaagtgaccgcagcgtcaggttttttcagtgttattcttccaggccaagagagacctcagtcaaatcttcagaaatcccattcacggcaaagctacagtgccacatagcttgagcttctctgggaggtccatgctatacccagcacatcacctgccaggacagggctgcaggagcccatgtgcttcttctgaggagggcactggggtcctcccagccctgagagccccgtcagtactgtgcccacagcacagctttgcatcctttgtccacactgacaacgtgcgagccagaggcgaccacgccaccgca

SEQ ID NO: 137004 - DNA, 342 bp, Homo Sapiens
  misc_feature (152)..(160): n is a, c, g, or t
ggttcttttctctcttcctctcaccttgtcccttgtcagttccaaacagacaaaacagataaacaaacaagccccctgccctcctctccctcccactgttaaggacccttttaagcatgtgatgttgtcttagcatggtacctgctgggtgnnnnnnnnnaaaaggccattttggggggttatttattttttaagaaaaaaagctgcaaaaattatatattgcaaggtgtgatggtctggcttgggtgaatttcaggggaaatgaggaaaagaaaaaaggaaagaaattttaaagccaattctcatccttctcctcctcctccttcccccctctttccttag

SEQ ID NO: 137005 - DNA, 892 bp, Homo Sapiens
ttgtgagctataggagcccagaatgggaaaaagcgtttcttgccagtttgggccattccatatggcttctctccactgtgaattcttaagtgctcttttaggtgatgtttgtatttgaaagcttttccaccactcagtgcatttgaaatttacggattacaccgcagactgcggtcacatgtcttttgatctcttcctgatttatgtgatgtcatgtgacgttcaagttgggttctgtatgcaaaggtgtaactgcacagggagcaactaaagttatcttcattcttttcatgacgatatttaatgtgttctttcagagaggtaaagcgtttatagcctctatcacaatatggacaggtgagtaattgtgaaaatgcatctggtgttccattttcatcatgaccactggcttctggtgtgccctgcctctggtcctcttcaggtgcctcaggaaaaatgacagcagtgtcttgttgttgtagaaactcttcaacattaggatcatggttttgctcattttctgcatctgactcgcattcatcatcttttactgtacatcctgcttcatctgcctgagcttcaggccccaggatttcttgcccttcctttctgtcatcctcccagcagttcttagcattcccttctctttcactgctcctccctggtaacactgtctggtctgttggcaggtcatcctctggtacaccttcacagtcagctgcatctgtaacactttcttcttccacaatatgcagtttgtcttcatcatctgaatctgaatttgtttctaccacagtattataatttgtaacgttattgcgccgcgggttcgcctgctttctgcgcttacacctggggccatccgccatgatcctctcgcttgtgtctcccc

SEQ ID NO: 137006 - DNA, 1327 bp, Homo Sapiens
atggggccctccgggtggtctttgggggccctggaactggaggtggggacgcaaaggaagctgttccaggtctcgggcacagttggtagaactcattaccacgccccaatcacacgttcacggtggatgacttcaggcccaggcagcagctcccggactgcagcccagtaggaggggttggcacagagcgggttgctgagccgggccaaagggtctcggagccgcaggtactccaggcacggtagcccagccaagacactgcagctggcccggggttgccagtaggttgcctgcggcatttgagactctgcaagttctcacaggtggccagtggctccaggcccgtcagccgattgttggagacattgagcacagctagctggcgcaaggaggccagcgggcccaggtgggtgagcgcgttgcctgataggtccagccactccaggcccaggcactctcccaggcagcccaggtcagccagtcccaagccacgcagcttcagtagcaggatggactccagggagaactcgcctgtgcgtgacttcagcagctggggtgtgatctgcagtccgccagcctctcccggcttctccgctggagggtccatgagatggaagtcggttgggatggcctgggccctggcaggactgtcacagggttccactgggggtcagctggtgctcgccctggctctacccaggccagtgccaggaggcctggttccgatgccctgctcgaagccagccagtcccttaggctattgcttcacaatcttcaaccctcgcaggcccgtcaggtagatctgggattttgtgtcatcactggtacaacagtgacaccaccatgttctcttccacagaagtactttaggatgacagtgcagctggcactgttgagagccaaccttgaatccaaatgaatctgaggggtggagccggcagcctgcggagccactggccaagctgggaagtccggcgcaactccgcaccgcagagccggcgcctcctcggcaggtaagagccgcagccccgccgcccgccgcctggcggcccctgacccctgggccgcgtgcccaccacccaacttgttggccagcgtgcttctcccagcgccgcaggcctgagctcccggaacgcgcccagggggcctggccaaaggccgtagtgggcgctctggattccgggatgcgtcaggggttacttccggaagcgcagcctgcgggggtcttcgcgcgcaccccccgcctccgcagttggtacgttcctcctaccatgccctcgtgccgattcaccacccagcctcgctaccttagaccgtatggtactgt

SEQ ID NO: 137007 - DNA, 639 bp, Homo Sapiens
  misc_feature (592)..(592): n is a, c, g, or t
  misc_feature (623)..(623): n is a, c, g, or t
tttcctgaattgcaggctttacaaatataatatagggtttaaattctgaggtcctcagttgtttcagtgcttctggctccacatccaccaaacaaactttgtttttggccataacagcctgaatggcctccaggctggttccatacagattttccttatattcaccatgttccaggaacttgttgtgatgtaagtcggcctcaaatgcttgcttagacacaaagtgatattccactccttccttctcatggctctttcggggcctggtggtatcttttaaagaaagaaggaaagctgggcaaagagatgtcacatcacagcacgcagggacagcagcaggcttaggcactcatttgggagttcactgctgctgtgtctaaaccaggcacttccacctcattgcatgtccctgtatcaggcactgtgcctttccaggcaggcgtatcactgattcacacaacaactctttgatgtaggcaaaaggaggcttttccttttgcagctgagaaaactgaggcacggagaggttcagcactgtgcacagtgacccacaaccagtagagagcacagccagaatcggtctctctgccanatgcccagcttatacccttaaccactctgcntactgactccctgatg

SEQ ID NO: 137008 - DNA, 464 bp, Homo Sapiens
ttttttttaatgctgaggtcagttaacagcagtagtcatcatcaaaggaacccctaaatgacactgctggtattttctgcctgcaaaacaggcttgaaggaatagcatttggctctttagaagtcataaccaaatggtaacagatcactgggactccttggtttctcaaagaggcaagctccttccaccctgcccggctggtgaccctaagcccgacatgcagagaagtccacgctgagaaataatttactcactgggattgttccaccctggccccttctctaaaaagactgacaattgccctgaattatggatgtactttttgtgatatgtattacagttcagaagaaaggtgttgagaccatcgtaccgtttcacctcccattagaggctggtcttgaacaataatcccagaagatgaaactgatgctgaactatgaccctcaatttacaaatcatttttc

SEQ ID NO: 137009 - DNA, 233 bp, Homo Sapiens
agttgaacccaccgtagtgcgtaataaaggagatagacggtaaaatcataatgtgaatttttaaggtctgtggaatactaatatcaagtaacagataagttgggaaggggaaccagttttagggagaggatggcataaaccctaaacaatgattttgaagcagtcatgaaaaattcaagtggagataataattaaagaagtagattaattccctaaagctgaggaggaacttt

SEQ ID NO: 137010 - DNA, 1539 bp, Homo Sapiens
  misc_feature (95)..(104): n is a, c, g, or t
cataaggttccgaaaaggtaagggtttgccccctggggccccttaggttcttcccccaaaatttttcccagggcaaaagcaaggccttgggctannnnnnnnnntggtttccaaagagggcaccggatttcaaattaggggaggaagccgggggcatccccttcccttggaataactggctgttaggggggctgtagttttttggagaactggccccaggggcaaccaggggcaggcattgcgtacaacttgggagggggttcctccaggcccttgcacccaatttgcagcagtgggggcagcagtctctgcctgatgtggtcgccagttcggtcagacagcccggccagcaccaggagtccagctttgcgctggtatgggctctcgctccgcaaagcctcttccaacatgggcatcagctggggacagagcttctcggggggcaggtgtagtgccagcatgtccacaacttgtacagcgaaatgcttgggagtctcccccatcagctcaatctccaactcttcctcttctgaatcctggtcctcgggatccaactggcctggtgggggctcagcagccacaatggggaaaagggtgtgcagcaagggtggcaggagacgattcttcagtaaggccttgctcttgactttgaccaagaaagtgaggcagcagagaatacgtatgcgtatcgcattgcccagggccacatttctagctacctccaggcagaatgtgaggacttcagagaggtagggggtgatgaccggcacctctgactccaacagttcatccaaagcctcaagggcctcacaggcctttgcctcatctatggggatcagagtctgcatggccatgatcagcttgggcaccaacatccgagcgagaggcacatcttcagtgctgaggtagggagccatggtggtcagagtgcgcagggagtagaagagcagcccaggagagcccacctcaccaagagtctcattcagaagccgaagaagctcccggtggtggggttggaaggcctcgggccgggaggtcaccaccacacttagcagcaaaagccccatctctctctctgggctgtgggggctgtgggtactgtgctgaagcagctgcaaaagctgtggccaggcctccaagccttcctttcgaaaaatggtggctgagagctgggccaggctgaggctcacacagtgctctgtttctctctgcagggccgtcaggatcagggacttgaggctctcccgttgctccgccgccagccgtcgccagcgggtgttcagtcgtctgcgggtcagcacggccgcaaactggcggatctgggggtcggccgccgaggctagcaggtcgcagagagccggcaaagcggcgggggcccgaagaacgatctggagctgttccgtggcccgacggatgcgctcggtgtccggtagcagcagctcccgtaggagctgctctagcccggctgactccatggcagcaactgagccgccgccctcgtgccgaattcacacccagggctcgtacctagcctatttt

SEQ ID NO: 137011 - DNA, 2001 bp, Homo Sapiens
gctttttatacaaatattcaatcagcccacccccaccccaaatcctccttcctcactaacccccgtcttgcatggtctcgtaaagcccaggacgcagtggtgaatggcacttgcagtggcatgagattcaacatcgatgggactcagctgggactgtcctcactcaccgggtgcagagtctggtccatgaagagggtttctctctctgctcccaggggagggctggggtaagcggtgggtgagactccctcactctcagttggccctgatgatggaatctttggtgcagcctgagaaaggctagagtggtgggaggggccgggacccctgcgaaggtcacaggccagtgcctgtgggcatgagagaactgcagtggtcacagtgggtgctctggggtgcccatgggcacaggtggcagtgacccacacctgggaaggtgtcagggaagtgtacagaggtggcgcccgggggcaggcagggcaccatgccatgcccgttggcactgctccttggcaaaagtcagctagtcctctggttccagagagcagaaggcacctaaggcagcgagtggtccacgggaggccaggtcagcctgaccaatggcaggcgtcaatcccagcagcgggagaggttcaggatgaaactggagtctggggtaccctgggctggcaggtgggaggaaggcgcccagctggcctgggccactctggtccataagtgcttggctaccagccagccagaccctgggaggatgccctcagaagatgcccttggcaatcttgagtcctttctgcttcatgcgagggagggtggagctggctccgtgcttgaccttcactcccttggtgaaggtccgcttcttcaggacaaagtcatagttggcagtagagttcatggcatagaagacgttggcgttttcagggatcttcagcttccggtcatctgagagaatctgcagcagctcatagtcctccggctcctcctcctccaggttgtgtttgtccatggccttgcggattacagccggagccttatcttggctggtcaccaggatgctcttgtacatgttgccattgtccacgtccaggctgacgcggatgatacagcagtcgcccacctgctggttgtagagcggcagcgcggagctggagttgcagagccctgagacagagcgcttgtgggtgcgtgtggcagccacgggcgtggtggaggctgaggaggacgaggtgctgctggaggctgagctgatgccggaggtctccggggatgactgtgaggctgattcccagaacttcttttcctggccatcaggagactccgggacgaagctgatgttgatctcctccacgtaggagctagaggagccggccgagtgcacgctgagcgcgtcagcgatgtccccgctgctgaggtaggggccacacctgagctggtcacaggacttggagtgggagctgccactggtactgagctcagtgctgggggcctggcggtcgctccagcgcttgacaatggctgtgttcttcttggtcctgagggtgttgctggctgactcggatgggggctccagctcgcacgacaggttgtagctctcagtctcgctgagccgctccacggcccggaaccaggccccaaattgctcatctggcgcgatgctgtagttgttgcaggccgactgcagcagcttgatctgggcgatcacctcgaactccttcctcctcttcttaaagttgatgagtctgccatacagatagtccttcatggcagtgtccagcatcaccaggtcggtgaggaacgtgcccaggtagggaacggtgccctggatgatgcccgtctccttcggccgtttctgggctctcttggggttcatctccagggtggcaaacttggaggtgccctctagtgtggggtcctgggccggtggcctggccttcctgagcctgcctccccctctggaaagtgcggatgagaactccgcctgctgcatggtgcggtggctca

SEQ ID NO: 137012 - DNA, 1107 bp, Homo Sapiens
  misc_feature (21)..(21): n is a, c, g, or t
tgttgcccctttcacttcagnttgtattggacccaagttaccattttcagggacagctctttctacatttctgttcaaattaatagtctggaagtccctataactgtgaaagctctcagtccttcttgcccttgctaataaaggactttctctgtaaggcctcatggaaccgtaagtagctgcttcatgggtggtatcatggtgctgaagctgaaggctagaatttgattctcgtaagtggctatgctgaactacggaagttgctggactgatgttaggagtagcacagcgagatgtgctcaaatcacattgatcgagtaatttgagtagctcttcttcgggttggaccacttacatccttatcttcacttttgttaaccatatccatagcagtggtcagatcccacatttgaatactgccatttgtatggcctgtgaacaagtagcgccttggtcttgagcccatcctactggatccctcacattccctcactgtaaatgaggatattgtagtacagtcaacagcctggatctcacatattctttttccagtcgatgagagtcttacaaatagtttgttggtgatgggaacaactttctggataaacacctgttgatcgtctcgctctccaaaaggtcctatgtcatttccagaggaatagctaccatgactttctgtctcctccagggatagtatcttgaatgacgctaaaggagtagaacctggctgagtagagatccattcctctgaatcgtgttactgtccacgtccggacatgattattatctgcacagactgatacaagatgcttctctgatagcatgatttttgttacgggacttcggtgaactgtgaaagtctgaaaaagctgaggacctgacccaactgtctctgggtgttgtacaatcactcgtactgctccagagctcgtaccataggcgatctcgatccagttaccactgccacttgttttgggtgtgaggtaaacactcagagcagtaatagcatcatttgaaggatcatgatacagttcagttacaagaagatcattatctttcattcgcaagggcgaacttctgcatatctatgtaatatattgatccacc

SEQ ID NO: 137013 - DNA, 3166 bp, Homo Sapiens
gcggccgcgtcgccgctgaggatgtcccgaaaggggccgcgagcggaggtgtgtgcggactgcagcgccccggaccctggctgggcatccatcagcaggggtgtgctggtgtgtgacgagtgctgcagcgtgcaccggagcctgggacgccacatctccattgtcaagcaccttcgccacagcgcctggcctcccacgctgctgcagatggtgcacacgcttgccagcaacggggccaactccatctgggagcactccctgctggaccccgcacaagtgcagagcggccggcgtaaagccaacccccaagacaaagtccaccccatcaagtcagagttcatcagggccaagtaccagatgctggcatttgtgcacaagcttccctgccgggacgatgatggagtcaccgccaaagacctcagcaagcaactacactcgagcgtgcggacaggcaacctggagacatgtctgcgcctgctctccctgggtgcccaggccaacttcttccacccagagaagggcaccacacctctgcacgtggctgccaaggcaggacagacactgcaggccgagctgcttgtagtgtatggggctgaccctggctcccctgatgttaatggccgcacacccattgactatgccaggcaggcggggcaccatgagctggcggaaaggctggttgagtgccaatatgagctcactgaccggctggccttctacctctgtggacgcaagccggatcacaagaatgggcattacatcatcccacagatggctgacagatctcggcaaaagtgcatgtctcagagccttgacttatccgaattggccaaagctgctaagaagaagctgcaggcgctcagcaaccggctttttgaggaactcgccatggacgtgtatgacgaggtggatcgaagagaaaatgatgcagtgtggctggctacccaaaaccacagcactctggtgacagagcgcagtgctgtgcccttcctgcctgttaacccggaatactcagccacgcggaatcaggggcgacaaaagctggcccgctttaatgcccgagagtttgccaccttgatcatcgacattctcagtgaggccaagcggagacagcagggcaagagcctgagcagccccacagacaacctcgagctgtctctgcggagccagagtgacctcgacgaccaacacgactacgacagcgtggcctctgacgaggacacagaccaggagcccctgcgcagcaccggcgccactcggagcaaccgggcccggagcatggactcctcggacttgtctgacggggctgtgacgctgcaggagtacctggagctgaagaaggccctggctacatcggaggcaaaggtgcagcagctcatgaaggtcaacagtagcctgagcgacgagctccggaggctgcagcgagagatccacaagctgcaggcggagaacctgcagctccggcagcctccagggccggtgcccacacctccactccccagtgaacgggcggaacacacacccatggcgccaggcgggagcacacaccgcagggatcgccaggccttttccatgtatgaacctgggctctgccctgaagcccttttggggcccccctggggacgagctcactacgcggctgcagcctttccacagcactgagctagaggacgacgccatctattcagtgcacgtccctgctggcctttaccggatccggaaaggggtgtctgcctcagctgtgcccttcactccctcctccccgctgctgtcctgctcccaggagggaagccgcccacacgagcaagctttcccgccacgggcagtggagccgacagtgactatgagaacacgcaaaagtggggacccactgctggggctggaagggaagaggtttctagagctgggcaaagaggaagacttccacccagagctggaaagcctggatggagacctagatcctgggcttcccagcacagaggatgtcatcttgaagacagagcaggtcaccaagaacattcaggaactgttgcgggcagcccaggagttcaagcatgacagcttcgtgccctgctcagagaagatccatttggctgtgaccgagatggcctccctcttcccaaagaggccagccctggagccagtgcggagctcactgcggctgctcaacgccagcgcctaccggctgcagagtgagtgccggaagacagtgcccccagagcccggcgccccagtggacttccagctgctgactcagcaggtgatccagtgcgcctatgacatcgccaaggctgccaagcagctggtcaccatcaccacccgagagaagaagcagtgacctctctccccacaccctcacctgcaccctaggacctcactggccataggagctgggccactccagacattaatccccaccccaacagagccactggcacaagtgcccttagtgctgccacactccctggcagccaggtgccctggtgcccacccctgtcgagcccctaaggatggggaggtgggggggcaggagcttctgtcccccacattccatgcacctcccctctgtatatagcatctcccccctcctagtgagcaggggcctgcaaggcatcactcccagcccctcgccttctagggcaccctcagcaaaggggcaggtggggacactccaagtggggcagctctccgtacatgcgccaccacccccatgagccagttcatgccacatactgggggctgagctgggggcatcccctcctttgtacatagtctccatggatgtccctgcacctgtagccaacagccccttgctgctctccctttaatgccatatggaccctgcctagggcacaggccccaacctgtgtgcttggggtccccagcagcaaacacatggaacagtctgtaaatataaaaccttatcttatcttccccaacccccttaattttaaacttttgttgtgtcaccttgatgtgccccccgcgtggcctgcgtgctcgagatgtgtgggcggagagccggaccggagagcatgggtcaatcggggagttatggcggggtggtgggccagatcagtgggccagcatggggatcagttcctttcccacgtgaccggcctgtcggtacccagttgtccgccacggcccatgtcaccaattgcct

SEQ ID NO: 137014 - DNA, 1047 bp, Homo Sapiens
  misc_feature (842)..(842): n is a, c, g, or t
ctagaggtacgaggccgcgcggtgatcggcacgaggcgtcctgctggcgtttacggatccggaaaggggtgtctgcctcagctgtgcccttcactccctcctccccgctgctgtcctgctcccaggagggaagccgccacacgagcaagctttcccgccacggcagtggagccgacagtgactatgagaacacgcaaagtggggacccactgctggggctggaagggaagaggtttctagagctgggcaaagaggaagacttccacccagagctggaaagcctggatggagacctagatcctgggcttcccagcacagaggatgtcatcttgaagacagagcaggtcaccaagaacattcaggaactgttgcgggcagcccaggagttcaagcatgacagcttcgtgccctgctcagagaagatccatttggctgtgaccgagatggcctccctcttcccaaagaggccagccctggagccagtgcggagctcactgcggctgctcaacgccagcgcctaccggctgcagagtgagtgccggaagacagtgcccccagagcccggcgccccagtggacttccagctgctgactcagcaggtgatccagtgcgcctatgacatcgccaaggctgccaagcagctggtcaccatcaccacccgagagaagaagcagtgacctctctccccacaccctcacctgcaccctaggacctcactggccataggagctgggccactccagacattaatccccaccccaacagagccactggcacaagtgcccttagtgctgccacactccctggcagccaggtgccctggtgcccacccctgtcgagcncctaaggatggggaggtgggggggcaaggagcttctgtccccccacattccatgcactccctctgtatatagcatctccccctctagtgagccagggctggcaggatcaatcccagccttccctctaaggagcttagaagggcagtgggactccaagggggacctcggaagggccaacccatgagataacaatgggagaagagga

SEQ ID NO: 137015 - DNA, 694 bp, Homo Sapiens
  misc_feature (270)..(314): n is a, c, g, or t
  misc_feature (347)..(355): n is a, c, g, or t
  misc_feature (673)..(673): n is a, c, g, or t
cattaaagtatttcctttttttaattcaagaaaagtttacctttcttatgcttatgttagctatgccagctcttaattgcatccttttctaattaggattattaataaagcgtgaatattttgttttttattatagacagaaatttgtaacattacttctgatttgaaaatgcaattcacaaaatatagggaaatttttattgaagtaaatttgaaatgatggagaaatttcagaagcataataaagttcacaataaggataatacttannnnnnnnnnnnnnnnnnnnnnnnnnnnnnnnnnnnnnnnnnnnnactgcacattatattcaaacttaaaattgagcnnnnnnnnnaaaggcccaaaattgtacagtgatacaaggagctatttctaaaatttggcttatgtataatatatttaaatggggaatttcatctaaaacaatgatgtagtatttttaatattctgattggtaaaattaaagaggaaattaatctttatatattatttcttgcagaaacattcattattttattaatattgccctaagtacaactaggcaagtgattgccacctaaatcagaagacgttctaaagtcagtaagaaagtgtgaaatgctagtataaaggttattttttttctttcctaaataactaaagtgaggtgtanattgagccttgatattattta

SEQ ID NO: 137016 - DNA, 469 bp, Homo Sapiens
  misc_feature (16)..(16): n is a, c, g, or t
  misc_feature (64)..(64): n is a, c, g, or t
  misc_feature (111)..(111): n is a, c, g, or t
  misc_feature (118)..(118): n is a, c, g, or t
ggaagagttccccgtnttcaagaaggggaaaccaggcctgggggaagctgggccaaccaggggntaggttgatggagaccaagtttggggacaactcaggagttaaaagtnttggganggtaaagggaagtgtggcccggtgaggcgggagaacacagaggtggcatcagagaaacaagagagggaagatttttcagggatgtcatcaactcttcagccagcggaatgcaggcggagttgaagaagtggaaagagaagtcccccagtgctatactaattgtgtcaccaattgaagcaccctgctttccctattcttgcatctaattgcagtacgctaccatgaaaccagttcattctgtgctcaatttgctgttctgcttaaagggacttaaacttgatacctgaaggccaactgctacgggccattacatttatttccttccaggcattgtatgtagataagcaattc

SEQ ID NO: 137017 - DNA, 604 bp, Homo Sapiens
gcacaaatgtgtgtgctgaagacaagctaaacagactctctcaggacaacttgccccaccaattctcactggtgtggctaaagtaccagaagcaatatgtgcggggtcagcctgatgggctgctggctgaaattctgtactttcaaattcgtgtccatacttggagaaagccagcccaaggtgagcaccttcaaagtaaaagcttctgagccaccagaagaaggagcaagatgcccattcatgatggcttccaggcggagtacgtaggtctgcagcagcaggtaataggaggccatcatggcagatgggaaggtcaaggccacgctaatactgagtggcatctttcgctggcagaggtttccctttgtaccaaaaaacagggggaattacttcaattcccaagataaaggaggaggcatcacccacatccagtactagggtttagctgttggatatggtagcaggacacctttattacagaaatatgaaaagttccagcaggaaatagggtagcattataccacccgttcagaaagaacaggatttccagcggggtggaggacaaccgtttacctcgcggcgccatcttcagtccccgtggccc

SEQ ID NO: 137018 - DNA, 969 bp, Homo Sapiens
  misc_feature (242)..(287): n is a, c, g, or t
ctggaacccggggaattctccggaggagcccgcagggtgatggcagctacacgagacgggtctgaccccagggttctggtccaagacaggaggacactggagggacaggcctggggccaaaagagtcacagatctgagctaaggaaaggtcacaggggaggctagaaaggaacagggcccacaggccgagctgtaatgatacacgtggaggccactatcccacaggatcagcctcatgagcnnnnnnnnnnnnnnnnnnnnnnnnnnnnnnnnnnnnnnnnnnnnnntttgtggctcaagtgcaggtccacagggtggaaggaagacttgctttagttggccaccgtcgtcctttgcatgacatctttctcaacacaggcctttggcagtgggaaggaagaggtgggaggcacaggccactcctggaatgcaaggattggcttctctgggtcaaacctcccacctactgctcctggaaggaatggtgtgctgggtgtaatctctacttggacttttgccaactgcccctggcagtccccatccctgagtccctctgcctgagtccttggagctcagctactgggatagctgacatggcagtctggatgctgacaagtccaggacaggccctggaagcccaacagaagtaaagactagaatggtttccctggctgggtgtcagctgtccttcactggcagcactgtggtgccttggagtgtggccagagaaaccagggggccttacgccactgcaacctggtctcctcctggtagagtgagtcagtttgacccttgccccttcacagctcctgggtaggctctgaggctggctcttagcttctggggaaggaacaatgacagctgggattctctttctaattttaggttctaaatcctgaaaaggtaggtgtgctgtcttaggctcctattacagtaccaggcataccccacaccagtcaggtatctgtg

SEQ ID NO: 137019 - DNA, 377 bp, Homo Sapiens
  misc_feature (77)..(77): n is a, c, g, or t
  misc_feature (132)..(132): n is a, c, g, or t
  misc_feature (272)..(272): n is a, c, g, or t
agggctactaccaggtgcggcgtcctagccacgagggctacctggcagccccaggccttgaggggccagggcccgantggggacgggcagatgcagctggtcaccagtctctgagggcacctcatggaccantgggctggtggcccaggccagggagggaaccctgggcagggctctggtgggagagtgagacagatggaggcagtggctggtgggccactctctccaggtgcccctcagccatgggccctacagtcccctcaggggactcntaacctgggggcctgaggtgccatgggttcacagacagggtttcccaccagccacacgcaccaagcctctatttggggggaagtgtagtgaggaggagcccaaga

SEQ ID NO: 137020 - DNA, 537 bp, Homo Sapiens
  misc_feature (39)..(39): n is a, c, g, or t
  misc_feature (44)..(44): n is a, c, g, or t
  misc_feature (55)..(55): n is a, c, g, or t
  misc_feature (101)..(101): n is a, c, g, or t
atctctacatctattctcaagcatatgtatcataacttnccatncacaaaattgnctggcactgatatcctcctttgtttggcacatttatccaaatttgncagcataccaatttgtaatgatcattcatcattagtgacaagatgatgggaaatgaggtgacataaggaaagagataactagagaaagggaacggaaactaagaaatttcatggcatcaatttaaaactatcaagacaaaagcttggggtggcagacatcttataaaggtttacaagagggaagaggagttgcacatttacaataatgtctgaaggaatacaaaagccaggcagtacagtctttatgcttgctataagaggcaaaaagtctttggtttggtcaaatatttttaaacattccccactggaaaatacccaaggctagaagcttacaccaaaaagtttagagactgtgttgcgttctttgtggaacagagatatacaactatcttcctgcacatataccaaaggaagactcttcagttctaggattttt

SEQ ID NO: 137021 - DNA, 1199 bp, Homo Sapiens
  misc_feature (161)..(234): n is a, c, g, or t
atctttttaacgctgattctaggtgtgtacaagatgggcctacagagtaatgaatgcccgattagaagggaaatttggaataggggagtgaggaatatgaaattttaaaagaaggaagtaagagtaccgaggattcttaagacagggaattgaagcctccnnnnnnnnnnnnnnnnnnnnnnnnnnnnnnnnnnnnnnnnnnnnnnnnnnnnnnnnnnnnnnnnnnnnnnnnnnggtgcgtgttgtgttgtggtttggcaggcctaagtgatcctgtttgtttagtgtctctgagatttgagttgtgcctttttactttgcataaagtagatacttggccatatgtagtttccaaggagaagtcagagttccacctttggagtctttccttctgattcacgatgtgttctttcaacaattttccacttaggaatccatcacaaaagttttgcacatgttctacggaaacttctgctgtgggcagtgtatcccactcgtcatctagagtctggtaaattgccaaagctggcagttgagactcctttagtttgaaaaatgatatcaccttcccattttctttcataccactgtccaccagaataaagagaatcttcccctggaagagcttggctgccttctggtatctgtgcatgttctcttcatactctggggaggccttgttcattatcaggaggagatgaatctgaattacgctgttgaataacccaatcacagtcacagggttgtactctgtcaccatgtggaggctgttgatctcaatgaaacggctcaatttggtggcatcaatgctttcaatgtcttcgtcctctaaattcagttgttcattgtctaccaggcgaaagaggcagatggtgttcccagtgatgttgtagtgtgtcagaacctcagaatcagtgctgatcccaaatgacacgcctgggaatttttgcaccatgctatggagtatgggcactgctggtatttctaaatcctggaagaagcctatgacagccacctcagtggcagcaatgaattccatggcagctgggacatctgtgagccacgtgggttcctgggcagcaccaggaccatctgaggatttctcaacttctgcagcaacttctgcagccagctcacacgtgaggagaaataagaggaacatgaacctggacggggcagcttccattgtccctctcctg

SEQ ID NO: 137022 - DNA, 1545 bp, Homo Sapiens
  misc_feature (52)..(52): n is a, c, g, or t
  misc_feature (376)..(376): n is a, c, g, or t
  misc_feature (1392)..(1392): n is a, c, g, or t
  misc_feature (1416)..(1416): n is a, c, g, or t
  misc_feature (1525)..(1525): n is a, c, g, or t
atgatagagaggagcgtgcgtggcgtgataggctgtcgggtgggcgcggacnaggcgggggtaatcgaggaggtagtagagtagagaggggacggtgtgattgttagtgagggatggatcgggcgtcgcggggcgggcgggcgtgtgagtgttttagtgtacgcctttttcgcgttcccttcgtagtgcagcgacgagacaggacatattggagatctatggggtacccaaaattagtgttctaccctccacggtgtggtgagtgcaattgaggcggcgcgcgtcggtctgaccggccccgggggtggaatgtaaagcgtgtacaagtgtccgggggagaggaggggggcaagtgcagcagaggggagacacaacncctggttctgtgggccccgccttgtattgggcgtgcgtgtgtttgggggggtggtaaagtgagagacccgagtgaagtctcctatccatttatccgtgcgacatcggtttctctgcgttctccaccttcgcggccatgcgtatctctctctcacgccattgggtttgagccacggcgcgcgcgctctttcgaggggcatggcggaggtatggagtgtgttactctacgagaaaagtccgcccccgaaagtcctcaaggaaagtggggcggcatccccttgtggggtgggggcggcggggttagtgttggtgggcacggccagggggaggtggccttgcaaggggccataagggcgccaggtgttgcttcttttctccgtctgctggtggaaaatgtgggtgcgacgccagcttgcgtggggaggggattggggctggggtaaggaaggaacttggtatcctgcggcaccggctggttggggtccccagtgttggcgaagttgttccagtaggtcatgcgcggggcgctgagcatgacgtcattcttggggaagttacaggggaagaggtcggtggcacccaccatgggcacgccaaagacatagggcagttcatccccgtgcgccgcatctgcccactcaggccggccctccgcctggcagtggtggtagaaggtgtaaaagtagacgggagactggtagtcggcgtgcagcttggcagtggccacagctggtgccacccattggtggtcagtaaagagcgccagcagggttttgcggcgcatttcgccattgtcccggtcggcccagtctgtgtacataaacttgatggtctcccgaagcacatccttgccttccgggtagccatacaggttgtccacaaagttggagacagtgaagtcaaaggcgctggcagacacaccgtcctcgctctctgcagagtcctccacgaacttgaggccctctccctggttgacacccgatgaagcatgtcgtagttgaggaattctcccatgcntgcatgaggatctcagggtcatcnggggaccacgtcgccatccaccacggggcccaaaaggcgattgttggtaaccgggcaggctgcacgtccttggtccaccaacttcccgggaggctttccgggcgcaganacttcacagcttaacactgt

SEQ ID NO: 137023 - DNA, 762 bp, Homo Sapiens
  misc_feature (690)..(690): n is a, c, g, or t
gagattaagctttatatttgcttatttgttgtagctacattttaaaaaaaagattgaacttgatgacttaggtttgcattgatcttttttcccccttaaacataatgtactatgtattaacatctaaaggaaacctgctcatctccctgaagcagactgctgaggaattacatttgctcaagaattttttccgtcaaattgtgaacttttaattcttgcattgtaattggctgtgtccataagaaatcatttattcttcaggcttagacattcatggatatgcttttctttcattaggaacattttgctggtgatgaggaagcatttagctgaataagtttaaagccctttatacagagaattcctacaagtttgcaaatattttaacaatattaaatgtgcaatagaacttttataaaataattagaacagagattttacagttaagggtttccaattgtggcaggtggtactgttgatctcagggtactttctgggattgctcacatttctctaatgtactgcacttgatgccagtaggaaagaagcttaagtgtcttcagttcaagattgatagagcccttggcattttattatcacattcttagttctcaggttggaacttcaattactgctgcagagcagtagtggttaaaaataagatattggaatttattaaaagatttttgntcaatacattttagattaggattgacaagtaaagatactgctatggaatgatacattggattttctgcattg

SEQ ID NO: 137024 - DNA, 520 bp, Homo Sapiens
cgcagaacccgttgctgatggtgatggcaaaggggatggcgagcacacccaactgcgatgtcggccgccgccagtgacaccacaaagtagttggtgacgttctgcaggttgctgttgaagccacacggcccagcacaccagcacattgcccaggatggccagcacagcaatggccagctccaccgtgatgtacaccgaggagcccatgatgggcatggccacagacgacaggcaggctcagcacggacgcgggctgggccagctcacggtccattgctgcagcccagccgcccgcctggctcccagcccggcccaggcggaggggcccagacccctgagccccttcctcacaggagccaagtgcagcctgctggggcgctctccaagggctttttcacagaggactctgagtctcctgaaaccaggccctctgcaggggttctggcagcagcatcatgctcagcccagcttcagggttcctgaggcacctaagggacaccagccgccctgtgaaaggacc

SEQ ID NO: 137025 - DNA, 514 bp, Homo Sapiens
acagttagctttatcctagacagaacatctatcaaactacaggtcaatatgctaatcatatttttatattatacattaaatatataactaaatagaaaatattaatttgaataccatctaaaatcttcttgtgaaccagggatacacacatcagacattggcaaacagtagtacagatttaagtgtgagaaaacccaggcataagaaggaagaaggtaagttatttgctcaaagacaaaggctaaggtgagcaccagggtctctggacccttcagtagggtttttcataggtcactgaatgcatcctttggtgcacagaccagaaatgactgtgaatgcatccaagactcatctgtgaggctaccaagcggggggaaagatcagtcacttaccagccatgtacgtgaaattgcttgggaacctgaactcccgctggaatttctacctggaaagggttgctgatgctctatttttgttatccaacctcctgcccgctctggcccctaagaggccc

SEQ ID NO: 137026 - DNA, 777 bp, Homo Sapiens
  misc_feature (61)..(112): n is a, c, g, or t
  misc_feature (239)..(553): n is a, c, g, or t
gtgccaagctaaaattaaccctcaactaaagggaataagcttgcggccgcatacgcggtcnnnnnnnnnnnnnnnnnnnnnnnnnnnnnnnnnnnnnnnnnnnnnnnnnnnngaaccaaaggaatgagttagctttgaaaacataatttgggatattatagtagggattcttctacctttgtttcaactccttagtaatcttgattctagcaaactagaatgagatttaagagataccnnnnnnnnnnnnnnnnnnnnnnnnnnnnnnnnnnnnnnnnnnnnnnnnnnnnnnnnnnnnnnnnnnnnnnnnnnnnnnnnnnnnnnnnnnnnnnnnnnnnnnnnnnnnnnnnnnnnnnnnnnnnnnnnnnnnnnnnnnnnnnnnnnnnnnnnnnnnnnnnnnnnnnnnnnnnnnnnnnnnnnnnnnnnnnnnnnnnnnnnnnnnnnnnnnnnnnnnnnnnnnnnnnnnnnnnnnnnnnnnnnnnnnnnnnnnnnnnnnnnnnnnnnnnnnnnnnnnnnnnnnnnnnnnnnnnnnnnnnnnnnnnnnnnnnnnnnncaattaccaactaaaaacataactccagtttggcagtttgcatattataaggagataaatgttaaaacatacttgactactttcagaaatgttctcctggtactttttgcatttctacattcagataaaaagatttgcatgcacctggctaacggcaagggaacttcatttttttcttcactattatgcactttcatggtatagtctttctcagttcttttatt

SEQ ID NO: 137027 - DNA, 481 bp, Homo Sapiens
  misc_feature (29)..(29): n is a, c, g, or t
  misc_feature (68)..(68): n is a, c, g, or t
  misc_feature (110)..(110): n is a, c, g, or t
  misc_feature (129)..(129): n is a, c, g, or t
  misc_feature (168)..(168): n is a, c, g, or t
  misc_feature (193)..(193): n is a, c, g, or t
taaattaagcccattattcttctggtganaaggataaggttctcagaattagatagtttggtaggggntagatgttattgttggacctgaagaccaggtgcagttccttnccagttgctggtagccaantatcagttgtatcacacaaaagagaactgggggtgacancaaagttgtaggtgaaggtaggtanccatgatagggtattttcgttttcccaaattgggtaactgccagccagagcggcacctgtaagggcctgatagggagtcttggctagggagttgatgaaggctgtttggttttggagagagaaagaaattgtctttgtcaaccgttagccattgctgccccggtgtggtggctgtcaggtaccagtcacaggtgagggaattgttacattttttccagggggcacctttaaactggagacatagagagcagagttggcagcggggaagccaggaattggatggaagga

SEQ ID NO: 137028 - DNA, 618 bp, Homo Sapiens
  misc_feature (432)..(442): n is a, c, g, or t
aagtaaggtcctggcaggcagacccggcatgtagccgctggccatcttgaatcctagggcatgaagttgccccaaagttcagcacttggttacgcctgatccctctggtttatcacaaagaataggactgggataaagaaagtggacacttaaataagctataaattatatggtccttgtctagcaggagacaactgcacaggtatactaccagcgtttggatattgatatatacatggcaaatctgaatattgttttatgagaggcctggcaatgggtaaaacaccaaacttgaaatcagaacataggtgcaaatggccactcctgtagtttcttttctgtaaaatgggatctggacgaatgataccaaacgtttctttctaacattgtattttataactctggcctatgattgtgttgtgtcttgcattnnnnnnnnnnntttgagagtggtagaattacttctgttatctgaaatacctgagatgcactttaaactgttgaaatgtaagctctgagggcagggaccgtatcttatttactgttagtatccgttgcatctagtgtggtgcacctggcacacagtaggcactcaataaatatgtattgagttaaaac

SEQ ID NO: 137029 - DNA, 1026 bp, Homo Sapiens
  misc_feature (77)..(86): n is a, c, g, or t
ccattcccctccctaacatgtgtggtgcccctccaggatcttcagttcaccggcgaatgttggttttggcccaactnnnnnnnnnncccgggcgtcaaaggcaggcacatttgttttgacaacctcatcaaaaaaccatggtggccagctgggagtgcagcagagaacgaaattcaaaggaaatcgaaaagtccacagtgcaggttcgaggataggcaggaataccagggctgaatcgccaaatagtctctaagtggttgaagagcttgccatcagtacaaacagccttgaccatgtgaggtttgaccatggaaactgcagaggtgtaacgttccatgacaggtggaaagccaacctccagctgggctttcaaatgacccttacggctggataccaccagagacttcttacaccagggcacaaactcacgatactcctggacgttggacaccacctcatacatctcctgcattgagtaccccatgattctacgctccgagtaagcctttcgcttgttggtgaagggagcagcaaatcccatgaaggaacggctcgaaggtaagccagcctcagccgccaagatctgggcagcccgaggcaagaggaggctgcaggaggtcagaaacctcattggtcgcggcggtggcagagggcctgggggcggggccggttgcgcgcccgggctgagcgagagccggcagcagcgctcggctgccgcgcgcgtcccagctgggacccgccgcgagcccgcccaggccatgcgcgcgaccctgcctggccctctaagttctgacgcgggctgcgccctcctcactccaaaggcggagcggcaagaggcagcggctgggctggttcgggacctctgagcgcaggggcgacgggaggcggcagcacctctcgccttgctcccgtccaggctgccgggtaggctagaactgaagccgggaccgctgctcccgcagatctcggtacccccacgtcacgccctcgtgccgaatttaaacccagcctcgtacctagccgtac

SEQ ID NO: 137030 - DNA, 502 bp, Homo Sapiens
  misc_feature (159)..(159): n is a, c, g, or t
  misc_feature (428)..(428): n is a, c, g, or t
  misc_feature (438)..(438): n is a, c, g, or t
  misc_feature (460)..(460): n is a, c, g, or t
  misc_feature (481)..(481): n is a, c, g, or t
gtatatctctctctcatatatacatatgaaaggcactcggggcgtatcgaggctgctgctggctgtgaagacttcgcacagtctcctccgcacagggtgaggtggcagtggcagcacgtcttcctcatgagccgagccaggtccatggccaccacgtgntaggccccttcctctgctgctcttggagccttggaagcctctcctgtccttggctcttccctccatgcctgtcagctgcctggggagtgagcctccctggtccttcctgcctgaaacagcctgaagggaattctccctaggtctcctgggagtcgagtcccaattcttggcttaagctgttttagtcagagaccacccaacttagcgtgcaggtcaccggagtgggtggagggtcagaggtcgggtttcggccctgagaagtagaaatncaggggcgtnctgtcctggtccccaggaacanaaggaaggaatgagctttcanaaggttctgtccgatgttgtg

SEQ ID NO: 137031 - DNA, 1122 bp, Homo Sapiens
tggtccggtccggaattcccgggatagggaatctggcttgattggcgtgctgagacgcacctggcgcaaccctcccttctgaatcgaagttcaagtcccgcggacactgcaaccatgaaggagagacgggccccccagccagtcgtggccagatgtaagctcgttctggtcggggacgtgcagtgtgggaagaccgcgatgttgcaagtgttagcgaaggattgctatccagagacctatgtgcccaccgtgttcgaaaattacacagcctgtttggagacagaggaacagagggtggagcttagtctctgggatacctcaggatctccctactacgataatgtccgtccactctgctacagcgactcggatgcagtattactatgttttgacatcagccgtccagagacagtggacagcgcactcaagaagtggaggacagaaatcctagattattgtcccagcacccgcgttttgctcattggctgcaagacagacctgcgaacagacctgagtactctgatggagctgtcccaccagaagcaggcgcccatctcctatgagcagggttgtgcaatagcaaagcagctgggtgcagaaatctacctggaaggctcagctttcacctcagaaaagagcatccacagcatctttcggacggcatccatgctgtgtctgaacaagcctagcccactgccccagaagagccctgtccgaagcctctccaaacgactgctccacctccccagtcgctctgaactcatctcttctaccttcaagaaggaaaaggccaaaagctgttccattatgtgaagtggaaattgggaggggggagacaacccctaattcctcccttggggtgcagaggcacggggagcagggacggatgagacaatttaggacactggacatgagttcttcagatggcacggtgagggcttggaaggagaccggaatggggcgaggaaggagccaggccggcatgaggacctgacgctgagagagaaccatcatacccaagtcaggcactagatttcggcagggggcgataaccgggggcccccgctccagaggaacggaaagctgtgggggccgggggcatgctggctccatgggcttggg

SEQ ID NO: 137032 - DNA, 504 bp, Homo Sapiens
gactaggggcacttcttgagagatggtattccgcaggactttagggcttaggcctataggggaaggaaaacaccatggctcaccatcagctctttctggcctacaccaggatctccctactacgataatgtccgtccactctgctacagcgactcggatgcagtattactatgttttgacatcagccgtccagagacagtggacagcgcactcaagaagtggaggacagaaatcctagattattgtcccagcacccgcgttttgctcattggctgcaagacagacctgcgaacagacctgagtactctgatggagctgtcccaccagaagcaggcgcccatctcctatgagcagggttgtgcaatagcaaagcagctgggtgcagaaatctacctggaaggctcagctttcacctcagaaaagagcatcccacagcatctttcggacggcatccatgctgtgtctgaacaagcctagcccactgccccagaagtgcgcctggtg

SEQ ID NO: 137033 - DNA, 642 bp, Homo Sapiens
actcatagtccttacaatgttaagtcagggtctatgatagaatcatgacactttatggaaagatatgaaaatcaactaggtaggtttaagaacagaccttattggtaagtaactctctctgaaaaatttagaaaagcttggtcagtgacctgttgaatatcaatggccaaatgccaagcagagtgaagggatatctcagagaactctcagaatagaacaagcagatttttctctatcctatggattcatcgtattcaaaacacaggaatgttttcctaacactatgtgactttcccctcctttatatttccttgaggaaagctagttttgtcagcaggaagtaagcttataaaatagtatggctccccaatagtgagtcatattttatgggagtcttgtgttgactaggctactattatgagaaaatggaaaaagaatccaattttttcttgatctttactttgaggactacttccaaatggtcataagaataagctctggtatctgctgaggcaccagagggacaaaccactggagacaaggcaaaggccatttctacttctcttgtgcttaaagaaatgtacctcaaaaggtggcgatctgaaactgccttcaacaattggcagtggaggcttggctact

SEQ ID NO: 137034 - DNA, 591 bp, Homo Sapiens
  misc_feature (29)..(29): n is a, c, g, or t
  misc_feature (63)..(63): n is a, c, g, or t
  misc_feature (69)..(69): n is a, c, g, or t
  misc_feature (78)..(78): n is a, c, g, or t
tgatggtggctaccggaacactgattggntcctcatggagctccagtgacatggcttgcccanggactncagccattnatctcattttagactctggcctccagacagaaggggataaatgtgtgtagtttaaaccaccaagttgtggtaatttgttagtatagcagccataagaattaatacaggtccaaatcaaattaaccccataagagccacacagtttgagaagcattttatttgcctcacagttttgcctattatacagtttctagttatttagaatttaagccactaatgtcaccatataactatcaactgtgattcccttcatctatgactatttttaagaaatgtaagatttggataagtcataatcacagatcagaaactgcagacattgaggcctggatggccgtttagagagaaagagttaacatttcagtggagacctttcctatcttgtatttcctacagtctcctcctatcttcagtgcagtgttctggcagcacctcaagctcactgtcaccaaatgggattcaacgtctttcctcccaaacatgctctacctcaccatgtcgatagatgtacag

SEQ ID NO: 137035 - DNA, 1366 bp, Homo Sapiens
  misc_feature (929)..(938): n is a, c, g, or t
gggtttttctaataaacatttatttcaagtgttatttgttaaacatttaattgttgagatttgaaaatgaacattattatttattagacacattttataggctcattcaaaattcttaacttttgagttcctgctttcttcacagcagtgcactcactactttctggtatacaagaagaacagcttgtccccactcttacagtgtaatgaaattagcagtataatgaagaaaagtgctgtgtaggaatgactgagctctaagacaaactggtaagaacaattaggtactaaacaatgggagtactagggagaagattcattttgagtgggagatgttggaacactttggaaataacactgaatttgggttctgaaagatggatataattttgatatgcaaagttatgaggaaagagttactgtataatccagccattctcctaggaatatacatccaagagaaatgaaaacaagtccacataagatttgtacacaaaagttcatagtagcattattcatggtagccaaaaagtacaaacaacccaaatgtccatcagctgatgaatggatacataaaatgcgacatatccatatgatagaatattatttggcaataaaaaggaatgagatgctgattcatgccacagctgggatgcaccctgaaaatatactcagtggaaaaggcccccatgtatgattccatttatatgaaatgtgtaggcatgggcaaatctatagggatggagagtagattagtggttacgtagagttgtgagaaaacagagtgaatactaacgggcatagggtttcttttgggggtgagaaaaatgatagttgcgcaactctgaatatagtaaacactactgaattgtatactgtataggtgaattgtgtggcatgtgaattatatctcaataaagcagttattnnnnnnnnnntgaagagaatttcagatagaaaccacaggagagagccactgagtgcaaaagcctgttgaggtaaaactgcagacctgcatgggtcaggcttactcgggaaacactgaatatgggatgcatcatggaagcctccagaggagcatggccttgcccagtgaactgcagcccagtgaatctcattttagacttctggcctccagaacagaaagagaataaatgtgtgttgttttaaaccaccaagtttgtggtaatttgttagttatagcagccataagaaattaatccaggtccaaatcaaatcaaccccataagagccacacagatttgagaagcattttatttgcctcacagtttcgcctattatacagtttccagttattcagaatttctgccgaaacggacgcgtgggtcgacgccttcttggaccc

SEQ ID NO: 137036 - DNA, 879 bp, Homo Sapiens
  misc_feature (128)..(128): n is a, c, g, or t
aagttttatattcttgaaactttttaatatttactttgtcagtaaccatcactatactaccttttttcctgaaagacagcttttatatatttgattttatctaaatttgaaagatcttcattattatncagctgttactatcaaatgaaaatttcattatggataataaactgggtcaaagtaaaagcctaaaacgaaaattcatcctgcaaaagtaaccaaatactatcatacaataatcttacctagactggtgggttttatcagttcatccagtaaatcataaaatggtaatttttgaagttttatatccggatggactgggtgaagagctgatgtaagatgtgggagttccagttcatgtttaggtcccagaagagaaacagggagtaatggcgatgatgcagggtgaccatcgtaagtgagttgtggaatggtagatggagacaaagttgctggcataggacttgaatgtacgttggggatggacaagtctgcaggcgtcatgattttctgtgggaaccgccgcctatagagttccttaattttcatttgcacagcaggactacagccagcctttagcaaatgcagggcttttgtgagaagttcgtgtttgcgtccgtgcttgtttctcccggcgtagcccaacagtacttggagttcagaaactctaaggctcataaccatttgcagaaaactctgaaggaagggttctagggaattttcttttcatgtgacactaacactcatagtaacttttataattacggtttctcttcccatttaatttcattatttactccactaaaatgctgatggacttcttctctcccactcttcttcctttagttccgcactgtccgccatcttgcgtctccc

SEQ ID NO: 137037 - DNA, 462 bp, Homo Sapiens
ctttatgtaaaaattagtgaatatcttatgaattaaggcattcctctttccctaaccccgatggctccattcccaagtaccccaactcactgctgatcctattaaaggaatgagtcctgctacccgagtggtagtcatagccctagatgactctcaactactcttcaaagggaggcatcaggaatagaatgaaactgtgtgaaggataagattgttcgcatcaagatccaaatcttgatttcatattaacgcctaaggattgcctgtgtgctggaaatatatttgaaactcaaccagtatgcccagcctattgcatatcattgtcagaccatttttgctgctgtggtcaccacgatttcatttgcttataccaggtgaaaggggaagggtgaatgggactggctggttctttaatgttaacttatggaatgctagttcaaatggtaatgtccagtgtttgtt

SEQ ID NO: 137038 - DNA, 1634 bp, Homo Sapiens
  misc_feature (61)..(62): n is a, c, g, or t
  misc_feature (99)..(99): n is a, c, g, or t
  misc_feature (180)..(181): n is a, c, g, or t
  misc_feature (283)..(283): n is a, c, g, or t
  misc_feature (298)..(306): n is a, c, g, or t
  misc_feature (385)..(385): n is a, c, g, or t
  misc_feature (442)..(442): n is a, c, g, or t
  misc_feature (445)..(445): n is a, c, g, or t
  misc_feature (481)..(481): n is a, c, g, or t
  misc_feature (488)..(489): n is a, c, g, or t
  misc_feature (715)..(725): n is a, c, g, or t
  misc_feature (1004)..(1049): n is a, c, g, or t
  misc_feature (1475)..(1475): n is a, c, g, or t
  misc_feature (1490)..(1490): n is a, c, g, or t
gggcggggacaacaagtagagtgtcgttggcccgcgcccgctttcgtccggcaaaaaaatnnaaaatcttgcgggtgcacttccacggccccccccgtngagcctgtttttttccctgcttcaacaaaggggggagtgacaaccgcggctcctttttttgcctgccagtagataagtaanngaagcgcgaaaaaaggagggggcctctcccccttcaaaataataataataagggtcctcttcctccttcgcgggtgggtgcgcccgtcccgtcggtgccttnacccttttcgtcatnnnnnnnnntaagggtggtgcccacagcacagtactccgctgtgtatccttcttatttagaaaagtcaccttcctccggcggccgcgncccgcaccgctgccttccgggcggggggccgccatcatggaacacatccgacttttncgngctgcccgcgacaaagagaagatgtcttggatcttntatcgcnnctcgtccgggaggcaagggggggcccacttatattcttttcgtggatatacgaaaccgcgagaaaaacgcgtattgtgtccggggcggttttctatttttttggctccgcagcctgctgtttccccgctttgagaaaagtatttcttttgtttgttcgctccacgcacgggggggcggagacaccctctggcgggggagggcgataggttcccccatagagtattnnnnnnnnnnnacaaaaacgtagcaatgtccccctccgctaagaaagcccccgccgcccgttcctgttgtttcccccgtgttggggggtgaatgaaaaaaggggccgcgcgggcgagtagcttgtaaaacgccgccccccctgggcggcccccctctcttcccaaaaacgttggcgcccacatgaacgccgggccccccccggaggatttttaaagcgcggccccgccggtgttgggtgccgctcttcccgccgggctgcagggctttcttttggtatccgatgtatagnnnnnnnnnnnnnnnnnnnnnnnnnnnnnnnnnnnnnnnnnnnnnngtgtcgcagcagcagcactttaattccacaaaaactcagaaagccaaaactgattagaacactccacaacaggtgagcttcaaaaccagcaacattctacctgaaccctgagagcagtgagacgcctcccacctcaccccctccgccgtgcaacccattcctcctagctgcacgccggttctggctggggaagtggtatggtagagggccagagggcagaagcagaaggctctccatcagcaggggtgcatctttgcctgcggggtgtttggccaaggacggcacaagctcccacagcccctggcacctgagatgtggccactggagtcaggatagccacagtgggggctggggcttcctctgtccctttctcctgattacatgtgggagtcacgtcctcaccttcaagcagacgtaaagccccgngttcccagggctggngctctagctagggaggagagttgggaagaacagggtagctacagatggccaactgaatacaagcagagcaacatccccttcccaccaggagagccgttagaacttccccacatacaccagcctaaggcccagcgagtgggcacg

SEQ ID NO: 137039 - DNA, 992 bp, Homo Sapiens
  misc_feature (819)..(819): n is a, c, g, or t
  misc_feature (976)..(976): n is a, c, g, or t
tcggccatcgggcccttggtggtctttgaatgccaccggaggcgactccccatttaagtggtcccctggggggctgttccatttcaaaaggcgccggggagcccaccctttttccaattcttggaagtcccatgggtgcctaaaccaggcaagggcctggggtgggcacagtccaaatgcttggggcccacagggttatcccaggttggccattcccaccaggccccaaattgcccaggctgggagagccccctgggggaggcatccatcctccagagccctggagggggcaccacatcttcccaggggtgagatcctttcaccacgaggcatctcattcctatacctgaaaactactccagacacttctgttaagggataatccctgatttcctgcagcgaaggcagctctcctaagcctcaggcccagctcctgagaacactgtcctgcaaagcctctgggtccaggcacttggccgcttcttacaccagggcctgagtctggtggtggtggcacctgatgtaggattgagagtgccagcctatgaacgcagctccagtttgatcttctccgtgtctctggagtctggcttcctcactcccagtggcgtttcatcagtgtaaatgcctgtcctgctgaaagaacccgcctttcagatggctgaaaaggcaccaatggggcagtatgtgctccccgttccctgcgtccacatcaggactgtggtccccagcagtaggggtgccacggtctcgcagtctccatggatcagcgctgccgtggggccacgctcctcggcagtgggatacccagggcagagntgcgcctgccggctgcgggcctcggccacctggcggggggagcagaagtcctccaggaagatctgtgccaggttccggagcctggcgctggccgagagggagaagcgcagcatgcactgcaccacgggcgtggcggtcagctctgggagaaagctgncgcccggcgggctcag

SEQ ID NO: 137040 - DNA, 793 bp, Homo Sapiens
acatacccagttttcaggggcttgcctgtgcagtttcccttttccacaggaaaggtgaataaaatgcatacccctctattctggaccgggacagtggattccatcataagaaggtagattcccaaatggtccgggcgttctcaaaaaagggggcaccaagtcatcgctcatatgaatcccttggtattttgcctacagagtacctccgttccaattccaggttgcacgccagagtacacactgtctggtggaggaccaccatacttcctctgtcctgtggttacatccagagtataaccagttctctcaagcaaggccttgatcttcgcttcatcaggtccctttgtggactcttgcaccttgctcccctgtttctctctctgcctgtaggtcttcataactccacataaaaatgcacttttgttctgaacatgtgataagtcactttccttgaactgctgtagtacagacagagctccttcttcattaaattccctgagagcatcaattgctctttcatcaagatcgacataagctaccaatcctgtctgaaatatttcatcaagtctttctgccaccttctgtgggaggcctgcctctatcagtgtcttgtagtgttctgtgtgagttacactggaagtatccattggttcttcctcttcttttaactgtaccgcattaccattcacctgattagccattttattatgcagggcagagcgggggccggcagccgggcccgtgagaatcagcgcgaggcgctttgaaaacgactagaaatggcgcgcgcccc

SEQ ID NO: 137041 - DNA, 835 bp, Homo Sapiens
  misc_feature (37)..(37): n is a, c, g, or t
gggatttctagtcgttttcaaagcgcctcgcgctganttctcacgggcccggctgccggcccccgctctgccctggattggtagcttatgtcgatcttgatgaaagagcaattgatgctctcagggaatttaatgaagaaggagctctgtctgtactacagcagttcaaggaaagtgacttatcacatgttcagaacaaaagtgcatttttatgtggagttatgaagacctacaggcagagagagaaacaggggagcaaggtgcaagagtccacaaagggacctgatgaagcgaagatcaaggccttgcttgagagaactggttatactctggatgtaaccacaggacagaggaagtatggtggtcctccaccagacagtgtgtactctggcgtgcaacctggaattggaacggaggtatttgtaaggaaaataccaagggatttatatggaggatgagtttggtgcccccttttttgagaagggccggaccccatttggggatcttaccggcctaatgagggaatccactggtcccggtcaaaaataagagggggatgcaatttattcaccttcttgggggaaaggaaaacctggcccaggaaagcccgtggaaacctgtgggggacacccctatggaaaattcccccccctggttaaaaaaacccctcgccaatgggggaatttttctggtgggcaaacacacagcaacctttttggggtggggattcctctgcgccggaaagaaattacgaacttcaaggaaaaacccctttcttgggaacagaaattccggtcaacggccccaaagaaggggtgtttgtgcggcggaactc

SEQ ID NO: 137042 - DNA, 758 bp, Homo Sapiens
tgtgagctaaagacaggatctcagcagcagcctggactgaggtactgtagaattcaaggtacaacagtctctttttcattaaaacgacttttctctaattatttcaggaaacaaagtaagagtcagacactggagaaatcttaaggtacgtccctgctgctcccgccccactaccacagagctgctgggaagtggggggcgactgcccagccccgggatctcagagtgccgctgcctgcttactcagcactgctaaaggaagcgcggtcctgtgctgctgtgttacagactcccgggcaggaaggttcagaagtccccaaggggaaacagacatgaacctggtctagccactgacaaatacaccttcaggtggaaatgaggctctctgtggatagggcaaatcccactctctctcaagggaaatgtggccaagaaacccctagatcagctgcagtgggaggaagaggcaggggggtgggcccttggagaggctggaagaccacctggcacctgggaggaggggccacgggcagcgggagggcctgggctgctgagaaattccgggggctccaggagagggctgagagagtgcctcccagatcttgtgaacggcattctgttggaactaaaagtggggcaggggccttgatcgcttaatatttagaaagtgttgaagaccgccgctagaaagtcgtcactgacactgggctcataggcattcataaatcctgacgctgaaaggaacttcctctcgatac

SEQ ID NO: 137043 - DNA, 553 bp, Homo Sapiens
  misc_feature (24)..(24): n is a, c, g, or t
ccatgcaggccccctcccctgccncctcatcccctgggtcctgataaataatgaaggggctgtgactggaagcttcgttttcagtgggggcagcccccttcccttcggaaccttcaccgtcctcttcccctccacaacagttctgctcctaggaagggtaagcccccaaaggcagaagctgtggcagagaaaaggctgtccccccactccaaggcacggaccctggggcttcccgatcctccccagagccagaggccacaccgctgagcaggggaggtgaggggggaacacacagacctttcccccacaccctgttccctccaggcaccaggcaaggccctcatgaaaagaactcgccccagtcgatagcagagggacccgtacaggcagatgggtggggtggggggtcaggacctcttccaggagggagtgggattgttcctaaccccctgcccccagctgtcctctggaacactgattctggggtgggggtgagctgctgctgccctccagttgagggaggtctctgtgctgtgaaccatcttagatcccc

SEQ ID NO: 137044 - DNA, 1117 bp, Homo Sapiens
  misc_feature (116)..(116): n is a, c, g, or t
  misc_feature (156)..(156): n is a, c, g, or t
  misc_feature (169)..(169): n is a, c, g, or t
attgtttgttcagtgtttttaaggtttggtatagcggaagctatgggggtcaatttccctgaatttcaaataaagtttcttctgttttaccaaagttccctggggttgtctctgancttcaatattaaaaattctcttggcacactgcctcagacngtggcaggactanggatgcccggtctctctggagtgctatgtaagaaagttgagtcattgtccataggtggaaacttgacattgaatttagaaagtgattcaaaagaggtgtcttcctcatctctgcacagtcctcttggtgtgacagatgtgatggatggtgcacctctatttatatcatctttagcctgaggcttaaacagcgcttcttgtttatctgttttatccgtacactgtataggcacagagcactgtgtttcagttgcagtgtctggtatattaagtttgcttaagtggtctttctgtgcttttgctagcatgcatattttatgaaattcttctttcagatcccagaaagtcttctctatattacccctttcatggagcaaaggactgccaagactccttgctgaagtttcttttctaggagaagaaacctcttgtcttcttacctttggtagtttttctcttgctattcctgaaatcactttatcttgtggctgatcaagagtcaaattattctttcttgtttcactgtcttcaagcagaggaacacagccataattgttatcttgagtggaattcacaagaagtaactgagattttagcttgtcaataatagtctgttgaagtgacagctgttcctgttgttcacgtattctctgctcatagttctcagtcttttgctgtaattcttttactgcagaatctctatccatgcatgcctgccggaaggcttcatacgctttattgagttgctcgccaatgtttttatccattcctcttcgtcctgtagcatcactataaaggatggagtaaatgacaggtacagttcacgctttcagctgcgttccctctcccctcaggtcgccggcgcctggccgagtgactccaaccggaagctcgcattttgttccagttcagagggcagtgcctgcgcgcggagccattaactcttcac

SEQ ID NO: 137045 - DNA, 922 bp, Homo Sapiens
  misc_feature (181)..(181): n is a, c, g, or t
aggtttgtgtgggacatatgtaggacgtgattgttccgcatctgcaggcaatccaggcacattgtcttgggcaacagtgcgtcatgaacatgggccacaatccaggactaggtttctgggattgccagtaaaattaactttggtaaactttctgactccagttttagtaaccagttatggncttggaaagtttcgggtcccaagattttttcattactgcacatgcatgttgatttaacaagctgctttctcttaattcttttgtaactgttgctgcctttgtttggaagcattcaactgcattttcagctttgcagcaagatggaattattttgtcatagcgagcagcccaaagaagaattgtaggtgcatacaggaagggatgccttcttgctatctcataaatgaatttgttcatgaatgtctccctgtcttcttcatatgcttcacagcttgtgacaggttctggaacttggaaaagtgggatcgatgctggagtgggctttttgtgtgcaagaaaacagttatgtcttccctcttcactttggctgcagcagtctgaatgtccgtacttctccaaaatttctttctcatggcaaagttcttccagaaaggcaggtagctggttttctaaacaccctgaagactgttcatctccagtgggtttctcaattgcagtcaatgcatctttcaccattttgcttacttccttgtaagtggcttcttgaacaaactgggcaaaaaatatggtagccaggtcagctaaacttatctctgcagtacattggtaagaatccaatatggaagctattccatattcatttctatgcagtgttctggattcagtaaaatttagtaggaaaattaaaaaaattgattccacccacttcatggttgctagttattttgttattggcagtgg

SEQ ID NO: 137046 - DNA, 855 bp, Homo Sapiens
gcggatgcctttattgggggcttactatgttggattcaaaattccattttcccagggtaaggagtggggatcttaaaaaatatgatttcgcgggggagaaggcctggttagccataggtttccccaggaagctttcccatggatctgcagaacacctttagacgggacgccgggcatactttgggggatgctgctcgtccactcgctccaggtaccaagtacctgggaaaaggctgtttgtgtcaccagggtggggagaaattcaccttatggtagaattgctctctttggttcattatttctgtgaactcctcaggagacacacactttcgggaggctaggcgttttggcaggtctgatgtgctggacaccaacttgtccaggggagagcctggagcagcatcctgggatactcgaaatgaaaagaaacttgctgctaaaccagagccataagagaaggcaccaatcctggagccagccagttcttgggcagagtggtgggacagaagcgaggccaggcacccgtacagggatgaggtgtacatgttcccattgtgagtggagaggtaaagggaagccttggttttcttgtcgaacatgtcctgagaggcctttagaagtgctttatccaggtccttgttggtgtaggtgtcttccagctttagccccccgaaagcctccagccccttatataagctggtttgtgtgtcactgctggctgacaggaagtcattgaacatcaggcgagccagagacttctggaccatcttgcaaaagggtgtatgaaagatcatgtactgtaaatcgtcaagggtgaagggtcgatcgctgccagcttgcttccactgattctcc

SEQ ID NO: 137047 - DNA, 717 bp, Homo Sapiens
ttgggtcatcagggtgaccagaatcttgggtgctgctcccacagtccacacaggccatcacatcaagagcccgaggcagttggcccttccggacccaggagtgcacagcacccagttcccgccgctggtcctcagaaaaccgaggctgctgcttctgcatggctcggagccgctcccgatcctgcttcagcacagaggtcatgtccctggagggcacctggtaggtcatcatgacgcgctggtcagcattggccatgagcagccaaatgggatcctggagcacgtacttaatcacctggtccccaggctcagccccgccccgagcagccccagcctcagcctcggaagagtcgatgctgccaaagtatttgcttgtgtggctgctctggctgctgcgagtgatgctggctgaggtgctgcccccttcatgggagcctgaaccagacccagagcccaagccagagcccaaggagcccgaggctgcggagcctgtgccggagcgcgagtcctcttgcagcagaagttcgagcaggtcactggagccggaaagtgcgtcctgattggaggactcagtgacctccgccagtctggcctctggctcagcagcctccgcactgggaggtgggggcccggcactgctcccagggcctcctgcaacagcagccccctcagcacgggggagctcctccagctgcagcagattgagctggagtggag

SEQ ID NO: 137048 - DNA, 1515 bp, Homo Sapiens
  misc_feature (629)..(629): n is a, c, g, or t
  misc_feature (657)..(657): n is a, c, g, or t
  misc_feature (1347)..(1373): n is a, c, g, or t
ttttataactgaaactgaagtaagtttaattttcagtacatgacatattttcatgcatttgctttatccctgtaatactaagaatctttaacatacatttcataggttttctttactaacattgcggtcctttactaatgagtaaacagctctaaaacatgaattcataattacattgtcatttatttcaatcctgtggcacacactgaatataacaggcttgaaaaacactttgatatttcctttgtagattactaaatgctaccattgatttctgtaaattaaatttactaggaaaacccacagtttaaaaaaagtacacaagaataagctagctgatcacaatgaaatgaatgaattcaaaatagtataaagtcaggaacagtttatcttcatggtaaacattcactttatgcaaatcccacttggcttcatttaattaaaaagctataaggatagccgtggtacttggaacgaaatattgaaagtagaaaactgaagaagaagaccaccaggcccaatcccactaggcaaattatccgtctttttccaacatcgccttttggaagttgctgcttcatttggaagacccatcccccatggtgatagcggcattcagtcccagaatnaatgtgtgattctgccaccaaactgagncctggctgctcccatggatgtagctcactggtgcatggtgtgggttcttatgagcattatggaggtccccggatatggttccacatcttggccagaagtcataggaaagactattcacagagacaccatggcccaaccagtcttgttatagatgaactccaagttgttccttctcaaataaagcaaacctccaacaagcgacactaacagggccaaagcaatggtaccagagtagttgggtggtctgaaaacccgaatatgaacatccgttctgtcagcaatccactttgctagttgctcagctgcaaatccaattctttggaggtcaaaagtatcagctctcttaggtctgccttttggaggaaaatgcatgaatgtaggagcagagttcatgttgagctgctgaaaaacgtctgtcccctcatcatagtccaccatactgaagaagagcttgttacaaaaagcagatgaatagcgccaggagttcgccagtatttgatattcttcattagcttgcctgcacacagaacactgccgctgaggctgaagagcagtgaacataacaatcatggaatagtttcgaggtggtgcctttataaattttcggaatttatcaccattcattcggaagattgagcgtctggaactccattccatcagctgctctactttttcagctaaaagattatnnnnnnnnnnnnnnnnnnnnnnnnnnntgaggaggcttcaggaaacttacgatcatgcatgaagccgaagaggaaggaggcagatccgacgcgtggtcgacgatatcccgggaattccggaccggtaccagcctgctttttttaccacctgttcatattccatgcgcgt

SEQ ID NO: 137049 - DNA, 1198 bp, Homo Sapiens
  misc_feature (123)..(123): n is a, c, g, or t
  misc_feature (144)..(144): n is a, c, g, or t
aaggcccccccagggcccccaaatcccatttagggccaaattatccgttcttttttccaaacattcgccctttcggaagtttgctgctttcatttaggaaggaaccattcccccatgggttantagcggcattcagtaccaganataatgtgtgattctgcccacaaactgagcctggctgctcccatgaatgtagctcacttgtccattgtgtgggttcttatgagcatatggaggtccacggatatggttccacatctggccagaagtcatagcaaagactatacacagagacaccatggcccaaccagtcttgttatagatgaactccaagttgttccttctcaaataaagcaaacctccaacaagcgacactaacagggccaaagcaatggtaccagagtagttgggtggtctgaaaacccgaatatgaacatccgttctgtcagcaatccactttgctagttgctcagctgcaaatccaattctttggaggtcaaaagtatcagctctcttaggtctgccttttggaggaaaatgcatgaatgtaggagcagagttcatgttgagctgctgaaaaacgtctgtcccctcatcatagtccaccatactgaagaagagcttgttacaaaaagcagatgaatagcgccaggagttcgccagtatttgatattcttcattagcttgcctgcacacagaacactgccgctgaggctgaagagcagtgaacataacaatcatggaatagtttcgaggtggtgcctttataaattttcggaatttatcaccattcattcggaagattgagcgtctggaactccattccatcagctgctctactttttcagctaaaagattctcctttttcttctgtcctcccccgagctggatgcagagcagcagcagcaggagaaggaagggaaagctcccggtgggcaggtaccgcagccgccgccccgcttgcctacggcgtgaaggagcgccccgggcccccatcgcggcagggcagtgtctcctccacgcgcggtagccgtgcgcgcccagctcctaccgcgcaccacgcctgcccggccagcctccgggagcccgctggctgggccctccgggatggcagcggctttgcgagggacccgggccgcggccgaggacgcagaggaggagactgacagagcatccggttcaccggacctcgtgccga

SEQ ID NO: 137050 - DNA, 137 bp, Homo Sapiens
ttaaatagaaaatatatataattaaatttacaaagactatttacagttttaattacaaaccttgtgggggtgttgggcagagagttctcttttaaaaagcaacctaaaagtgaaatggtttcgatcgttttttattt

SEQ ID NO: 137051 - DNA, 976 bp, Homo Sapiens
  misc_feature (41)..(55): n is a, c, g, or t
  misc_feature (774)..(774): n is a, c, g, or t
  misc_feature (781)..(781): n is a, c, g, or t
  misc_feature (789)..(789): n is a, c, g, or t
  misc_feature (795)..(795): n is a, c, g, or t
  misc_feature (806)..(806): n is a, c, g, or t
  misc_feature (841)..(841): n is a, c, g, or t
  misc_feature (847)..(847): n is a, c, g, or t
  misc_feature (849)..(866): n is a, c, g, or t
  misc_feature (872)..(872): n is a, c, g, or t
  misc_feature (935)..(935): n is a, c, g, or t
  misc_feature (955)..(955): n is a, c, g, or t
gctccttcttcatttaccatgttgataatccggtggtgacnnnnnnnnnnnnnnngtaaattgtattagataccccacaggaatgtgacaataataggatagctttgggggctggtgatttgaaacagggactattaagtagattttcccccatcctctaggttcctgtagtctgtgctcagaacttggtttttggcccctattgtttttgcctattttgattttcagagatgatcacatggggacagttaacttttcttctgctgtgttgccttaatgctactagattgtgttgtgttgttggagttttctgacttcttccctataaaaagatactgagagctccataatgaaagaagttgttatactttctcagaatattctggaccactgaatgcacttctaatagagctttaatctaaagaagttagttcagtggttattaactgattttattacaggagaaaaaaactttaacaaaaaggcagggagaaaagtgtgaagggcatcaagcaaaatgacaggggcttcaaaaaacaaccaaagacaaaaccctatcttctgaagaccaaaggtccaactttacttactggctggcacagcttttctgaactccttgagtttagaatagagctcctagaataataaggcgggccaatttaaagatcagtcaatacagtagggacctgctattgatctctcaggcactgagtcttcccatccagtgtcaagcccagcccagcatatggggtggatatgagcagaaacacacanggtgtgncttgattntcgcantgtgtatgtgncatgagaagtatgtttggtgccacatattcccaanctgatncnnnnnnnnnnnnnnnnnngcattnacctattcatgtgccaaatgattttggacctgctgccttgccataaaactgggggccagttanctccagaatcaagttggacntcctccatatttggtttcttt

SEQ ID NO: 137052 - DNA, 139 bp, Homo Sapiens
tgttgtttaatattttgtgacagatttggcaacttttaaaaagttgtttgaattgaatagtgcataaaattaatagatgtttttcagaaaatccattattaagagtagaggaatgaggagaaatattcgttctaaagag

SEQ ID NO: 137053 - DNA, 1100 bp, Homo Sapiens
  misc_feature (308)..(317): n is a, c, g, or t
gcttgttgttgttccatttacagtaattattttctccagaaacaagccacattagtttttgtcattggattccccccacttcccattttttaagaagaaaaatttggtcaactactgtttcgttttaaaaatgttaaatgcacctgagattgccggttgagctctctatatgtctcctggagataacactgctgtgatgaacagtgaaaccaaaaccaaccaaacgaggtaggttaaaacaggaagcgcaacacagatattgtttgcaacacctcgataccacaggcggccatgcttgtagctttggnnnnnnnnnntcccagtcgcataaaagttcaaatcatttgagtaagagtttataaggacacaagtcaacctgaactaaatacatacatacttctgcacaaatgttgtttaccgtatgttgggtaatttggaggaaggtaaagtgattagggtctcaaaattttgtccaaagccttgctttcaagttctctaaaattggagccaatgatgcctcttgtatctgaggcaggcttaggagtctagtcccttctctcacccacacagggagaacacaggcagctcagaaacatttattattaattttttcagtcacagttttcatcttgagaaagtggcaccctcgggagagcgctgggaatgttcagagcctgaatatcatccactctccaagtcccagaaagaactcaacaaagtctcagtcctaatgaagcccaaaccaagtgacctcttagctgggaggctttgtgcattttaaaaaagactatgtaagcttgtttcccagaagctctttctgtctgaccccatctgtcatcccatctttttccctgatctgttgcataatagctgagggaaagttgtgttagagtgtccctccatcgctaggccagctcaactcaatggcgttagtatcctgttcaacacactccattctgtaaagggccatataaaaatgtggcctgtcagattcacaaaagtggtagttgattttattagactagtagttttaaggctagtagtttagccatttaaaatctatttcccaaaagaggggaaaactagtatttttcttctct

SEQ ID NO: 137054 - DNA, 705 bp, Homo Sapiens
  misc_feature (593)..(650): n is a, c, g, or t
tcaacccgcaggccacaggcatcctggacttagcttacgtggagtcttactagcccaggggtcggtcagagtaaaagcatcggggtaactgtggatgtgtaagcagtggttcatcagtgtgctagatctgtttcctctgaagtacagcagtttgcagcatgaagcatgagttgttccactgttctactgggtgtatggagctgggcctacaacctcagcagactatctaatgttctaagagccttcctcaaagtaaatgtttcaggacgggggtagaaggccagaatgcatctgcaattccaacaggcaatcgctatgctcttccttggtctgtaaggactggatgcctggagtagactgttttaagtaccaaaacaagacacccattttagtgtggaggaagaccagcctatatggcccagagcaataatatttggcatgagtatgccactcttgagaaaattctccttagcttagaaaatgcatctttcacacagctgctgggagaaaacgctgcaatgcaccaaagcctttagccggtgtacccagaatgagcctatgtgggatcaataggcacggggagaaagatggcnnnnnnnnnnnnnnnnnnnnnnnnnnnnnnnnnnnnnnnnnnnnnnnnnnnnnnnnnncctcgtgccgaattcgccacccagcctcgctaccttaaaccgtagagtactgccg

SEQ ID NO: 137055 - DNA, 614 bp, Homo Sapiens
gtgtgttcaaagatcagcattttgatcaaaatctcaacttcatgtacatagaagttgataaagtaacagagagggagaaagttactgttatgagcaccattaatccaactaaggacctgttggctgacttgattgggtgccagagacttcctgaagaccaacgtaagaaagtacaccagctaaaggacttgttggaccagattctgatgttggacccagctaaacgaattagcatcaaccaggccctacagcacgccttcatccaggaaaaaatttaaacaagatgaagaaactccaagggtttgagtaaatacaaagactgaagaaatttcacagcagtttattaatgtatataaacttataaatatttctccagcaaatttgaggaagcatgatatatttgaattaacaccaagggtgatatttcttttagagatgttagttaatctgttttgtgtcttacgtgaaatttcactgtagactgttttaaattgccaagactgcacaaaattacagtgctaatgtatatggttgcagttcacataaagacaaaagcatctgttatgaaatgagtagtaatattgggtggttgatttgttcttagcagacttggc

SEQ ID NO: 137056 - DNA, 593 bp, Homo Sapiens
  misc_feature (49)..(49): n is a, c, g, or t
  misc_feature (74)..(74): n is a, c, g, or t
aaaactaaaaatcccacattccttggatttgcctaacaaagtgaggttnaaaaaagtttattaggggtgaaganaaaaaagtttgtcactctcaataattccagtatcactaatgtgtgattttagaagatctctcctcaaaggacctcattattttctagcagccccctaaactagtacctagtattgtttctacaggtagagcccacaggggtaagacttattagacctctaacaggtcactgcagattaggcagcagagcctggcttttctgacactgacagtcatcctttcccaaaggcaggagaaatttctagtcagtctcattggatatgtgtggccctggcttagccttcacaagaaacagctgtaggttttgagtgtataaggggaaaacgcaccaccctttgttcttttaagccactatagaatagaggctaaattaaaatcctttagccatcttaccagcaaaatgctaagcatcaaatctggaagctgatctggtgccagctcaacctcattacccaaaggagtcccctggactttggtgaaatatttcaatattaagaccatgattcaatactcccaaact

SEQ ID NO: 137057 - DNA, 754 bp, Homo Sapiens
  misc_feature (727)..(727): n is a, c, g, or t
  misc_feature (734)..(734): n is a, c, g, or t
taccctttttctccttaggccaagtttagcttattcttatctttccacccaaacacctacacaacgtttaggcttcctgtaaggtttgaatgagacagatgtactctgaaggctggtggtaaatgtgtttgatgaccagactcttcatacagtcggcttgggccactttaaaggacaaaagccagagctcagctttatccctctcccagtgctgggagccaaaaaactgttgacggttttttgtgcagctcaagaaaactttgaaaagaacatgctttaactgaagcattggactctgcagctttctgtgtaaggcccgtgtactcccactgggcagggtgaggaccaaaaatctgaaactcttatgaatctgacatattatatggaaattatatcttgtgaccgtcttcaagtgcatggacttaaaattcatgagagactaaatgtgagggagaggtggatttaaagaggccagaccttaaccaaagatgctgagatacagcattctgtcccccctgccctagaaactccataaatgctgtcacaaccctatcatcgctgatgctttctgcatgtcagcagtccaggaggatgctttttgtctctctttgcctccactttacaaaagataatatgatagaggcaacgtttataacagtcacatttaattataatgtacatcaaaggcagaattcagaatggttcttaaattccttgggaaccgttncacatanagttatagcaaaggcatggg

SEQ ID NO: 137058 - DNA, 960 bp, Homo Sapiens
cttcttggtctggttggtacctcgaggccattgagacctgcctgagctgaagggcacctcgccttgcacgctggttcgacacctggacgcccgtccccctgcaattatgtacacgcatcattgggcttcaatggattgtggaaaaggggagcaaaggatggtttggggggtacgtccggctttagccgagggcgtacgctttcagccccgaccctgtcagtgacttgtaggcgttgatgctgggcctgcctcgagacagtcacggcctggccagatgtctgggagctgtgcacctggatggagtccaccctctgcgggcgtgcggcgggttgtctcccctgccaaagctctggtttctggagaggtgagaggaattggaggagttagtgttgtttcttttgagagtggtggcctggtggcttctcgtgagcgagttcgtggggtagctcctcttatagtcaaccccgtaggaagaggagtggtgcatttccagccgcttgcttagaccggtctgagacagggaggctcccgggggacccagggaggcctcccgctgtggaactttggggggcaggctgtccaggttctccacaaggttcaccccatggttgggactcttgctgctgagatgttccttgatggtcttatactccagtgtggcggcctggtcctccagcgccatctgggccacctcgctcattttgggctggtccacgtactcatgctggtagccctgctgcgtgatgggcaggaccaccacgctggggatgtggctgggggaggcccgcaggggcaggtccgtgggaatcacaggggagcccatggggggcatgtcctttgtgcaggcattgatgaggttctggttcctctcccactcgcggctgccgcggctgggcttccgcttctgctgcagcgttgggcctcgtgccgattctaacccagcctcgtacctagcgtata

SEQ ID NO: 137059 - DNA, 1292 bp, Homo Sapiens
gcccgcatgaaaggaggggtggtcccattgggtgaacatgtgtggcccaaaacctgggggtgggggtggagcaatgccagggggcggtggcagagcaatgttcaccacagctggaggaccacttgggggcaagttgaagtagttggcagaggcttcttcttctgctgcaggaggaggaggaagagctcctggcaatcctgaacaggttctagtttgatcccagagtctgtagttccatctcttctcttgtttctttttcctctggctgcctgggatcttccccatttcacattcagtctgcggccatttacaatcaacttattaaaggacttctcagcagccacttctgcagcctgccgtgtggcaaactggatgaaagcacactgctgtctctgcacaacagtgatcgtccggatctctccgaactggtagaaatgatttcttaaatctgtctcagtaatggtatcacctagaccaccaacatatagtgtggtgatagttttatcctctggtgggtccagccgaggcattgttgaagcccgctttagaagcttgtcagctacaggatcattgattccgtaataacggtctttaatattctgatcagcaagggggtcatctggatctgtaggcttctcatgtctgtatggacattcctctcctctcttacactctcctttcacccagaaggagcaaatgtggggtcgattccttttgtagtagggtgtggtccgggccagtttgagcagcatgtcactggtagatgtggctttccccagcatgccaactggccgtgttccatcagagttagaaatctctctctccatattctgtgtatagtactctttgttgacatctgactttggcatgtcatctttaaaagacaatcctgcgtcacgaacctggatgggcaggccatactctaggtctaagaggcaggtctgacagacattcttcaatttactgcaggtttggcacacttcagtcttcttgaaacgcatgcggactccagggcaccagcgaaacactgtgaatggcctggcacagattttgcattccttcccatacttttctttggtcattcggatatatgggttttctccaagacatgtctggcacagaatggggaagtccgcatcctcccagttctgcctgttgtaggtgttggaacccagagaggtcgccatcttgagagcgtccggaggtagctgtagcttccgaattgggagagaggaccgccacaatccccggacgcgtgggtcgacgatatcccgggaattccggaccggtcc

SEQ ID NO: 137060 - DNA, 878 bp, Homo Sapiens
  misc_feature (493)..(493): n is a, c, g, or t
ctaccagggggcccgccgctgcagaggggtacacggcctggtacatgagtggttggctgcgcatgaagttgatcacttcatcaggataatccttggtgggacttcatagatggcgtgaaggttccaccaggggcacgtgcccggccgtgggtagggcatcttccctgagaagggcatccactggtagttgggcccctctttgtgggcaaagggcccgttgaagaccatgcgaatatcagccatggagtagacacacacggcagagcctcggaacacggagccagaggaggtaaagacagcgtaaatgacagggttcctcacgtcctgggtctgctggacaaacacgtcctggagctcatcaaagtgagtctcaatgccatcctcgcccgggacagagcagacgagccgcgccttcaggaatgtgctccacttgttgaccaggcaacagtgaccaccgtcatcgttcaggcaaatgcgcccgatgcgggcgtancaccgcggggctctgcggcgcctctgccgaccgctcacggaagaagaagtaaagcttatcatcattgcgctccgcactgtcaggaatgagctcagcatggatgaacgacgggtcgttcagccaccgggagttgtactgatccgtgcgcatggctgtctgctttccaagtgtgcggaagatggctgcatcagtgcccataaaatcgatgtacacaccagcatagagctcctcattgatgagggccgatgctgtgtccagcttgggatcgtacggacacttgcccttccctgactcgagtcgctcaggctccaggtagaagatgtaatcctggcgtggggctgtgggcatcgggcggagggcaccatccgtggctctgctgccgcgg

SEQ ID NO: 137061 - DNA, 608 bp, Homo Sapiens
  misc_feature (42)..(42): n is a, c, g, or t
  misc_feature (63)..(63): n is a, c, g, or t
  misc_feature (112)..(112): n is a, c, g, or t
ggtggcaatgggccatgtggacatcagctatagtgccaaganatctcattccaccagaacacntggagagaaaatgggaatgcagaatgagtggctgctattctgtttccanatcagaggtaaccatagcttctagttcgaacgcctctaaggagaagcaaatgtattcttccttgagatgactgaggtctctacggtgcacagggcgatgggacatactgtacctcgagcagtgtagcatgctgttactaaggccttgccgtgtgcctagacagcgcttccctcctggggcccgtgttttgtggtgaacccaccactgagaatggagcgcacacttttctctttcctgtgcctatattaattttaagtccccctaatctctgtggtttccctttccaaaacctactttctgtctatgtaagttttcaacattaatttgctgcttcagaggaaagagaacatttccatttcacatgtgccttatcaggttgatggtagataaaagccattacgtgctacttcttcaaaacacatctgtgttcacggaatcatttttctaataacaaaatcaaatttgggagggaattcccccaaatgtccatttagat

SEQ ID NO: 137062 - DNA, 508 bp, Homo Sapiens
  misc_feature (409)..(409): n is a, c, g, or t
  misc_feature (477)..(477): n is a, c, g, or t
  misc_feature (483)..(483): n is a, c, g, or t
actggttttaattgccatgctggccattacttctgctacataaaagctagcaatggcctctggtatcaaatgaatgactccattgtatctaccagtgatattagatcggtactcagccaacaagcctatgtgctcttttatatcaggtcccatgatgtgaaaaatggaggtgaacttactcatcccacccatagccccggccagtcctctccccgccccgtcatcagtcagcgggttgtcaccaacaaacaggctgcgcaggctttatcggaccacagcttccctctcacatgataaagaatccacctcacttaaatgggactggaccattgaaagacacgccaagcagttccatgtcgagtcctaacgggaattccagtgtcaacagggctagtctgttaatgttcanttctgtccaaactggtcagttaatagggtctcagtgatccagaacatctaagaaacaaaaaattcaanagtatnacaacaagttgctgtcgcagtgtag

SEQ ID NO: 137063 - DNA, 784 bp, Homo Sapiens
gcttttttgaatgattagtatatttcatggtaaagaaaacagcctgtctggctcaaagcaattaaatagaatgtaatggtgagtacaaatgagtgcacatgtcaggactcaggtctaactccttgtctcctgagcctaaagattgcaacatacacaagaacacactcctattcctaccccacacactcagggacaagcccaactaaagcttacaaggagaccagggtggctctgtccaggggagaagccagttatggaacagtgcattgagagccatggtaggagaggcccacagttctctggagcatgcagcaggggcaccccacctggccttgaggatcagggggagtcaaaggataaagcatggggctgatgacgtctgagggagtgtgatcctccatgtatggcctctgcctgctgtctcacatgtcccttctggtggtcacttgggctctaggagtatacgtcacctcagaccatctggcagaaatactccaggctcctaccccaaagtcacatgtcagccttgctgctggagcacgaagacaatgtcacatgatacatgaacatggagcgagttgtgagaccctgaccctgagtccttacttgaaagctgctgctggtgttctgagtgtcttttggactcttatttcttgcccttttccttatttaggcaagcagtaacttaggaagtaggtaagagcaataaatgtgaccatgttatgtcatcatagtaggagctcatgggaataaaagtcagtggcttgatgcttctgttagaggc

SEQ ID NO: 137064 - DNA, 1300 bp, Homo Sapiens
ccctgagacccagaaccaccagatgactgcatataatatggctgattctgtagctttgcatacatggaatacatcggatcttcgttcattaacttggtatataaggaaagggcctccatcactttcacattaagttctgagagttctgaatgttttctatcaatatcttccagcttttcatcaatgagaggtcccatctggtgacacattgcttcaagatgaagcagctctggtaggtctggctgatcatcactggggtctgtactttgcagcatctgtagcaactggtccattttatcttcatcaataaaggctggttccggctctggttctattgtctctacctgaacatcatcactaaattgtaccgtcttcttctctgttttaatcatttctggttcagcagtgagatctgcagtcacaaaattagaaggaaataaccctatgccttgatgggtttcacctttccaccagttaggatcactgtcatcaagaactgtaataatttctccagctttaaaagtaagttcattgtcttcagcagcttcaaagtcatatatagcacgaacttttcggccttcatgttggtggttagttaagagactggatgtgcttggatacaaagtggaaagggtggttgactgctgcctttgttccttgagagacaactcaatggcttttgctaaatcttcttcttcttttttgttagccacagtaccaggatccttggctacaagagctgggcttgcttttgcttgttctgcagcctgagagccaatagctgggaacgtaactccttgttccttaaggttcttaatcattgctgatattagactaagctgtggatcattcttaaattcatctgtccattcaaccataagagcctttaatttttcacatactttaggatgacccttatttaatacgttgcttacttcactagcaaaatctcttgaacatacttctaaatgaaaaattttgccacagtttgatacacatgctcctagaagagtcaaagcctgcatagcaacgtgaggatctttgtggttcactcttctcataatagaccgaagacaatccttaggtccagtgcgagactgaccaactttatcacagatatccaaaatgaggccccagtcctcagcagtattcatctcgctggttgctttctcaacatcctgatcgaagggattggtggcaaaaagaggcatctccgctgcgtgccgaggtgtccccggggactccctctcgacagcacgggagtcagagctcgacgtaggatcccgggaattccggaccg

SEQ ID NO: 137065 - DNA, 381 bp, Homo Sapiens
tgcgtaactgttaccagatgtacacaaaaacatcagacgtcatgtcccagcctcagtttccccagctgtacaggaaggcaatcaggtgtcccactcccaaactgtatcccatctgtacacaagggcggccagctgtcctgcccccagcctcaatttccccagctgtgcatgaggacagtcaggtttcctgccccccatcagcctcagtttccctagctgtgcccaagagcagtcagatgccctgttctgtctcatcagcgtgagatgaggccggcaaaacccacactggacgcttaaatttcacaagcacactggcaccacccctccgaggagggcccccgggaatgcctgttgaaagggcactttgaggcccggctcggt

SEQ ID NO: 137066 - DNA, 499 bp, Homo Sapiens
  misc_feature (30)..(30): n is a, c, g, or t
  misc_feature (44)..(44): n is a, c, g, or t
  misc_feature (62)..(62): n is a, c, g, or t
  misc_feature (80)..(80): n is a, c, g, or t
  misc_feature (98)..(98): n is a, c, g, or t
  misc_feature (155)..(155): n is a, c, g, or t
tcatgcataaagccacactgggtttgcaanctaaggcctgaaanagaaggaagggtgagcanttctccctcagtctggtnttgcatcatctggagctntggatgaagagtgacctctgaattcagcctcttaatcagaagcgttctcaaattggntgagtcattgctaaagagccagccctgagcacaggtcagagggaagagaatacgcactgccccaggccccttgcaggccttagcaccaaaagtctggcaccagctggccaacccccaaaatctcatacccccatccatcctggctgactggaatgggcagtgatggcagccagggacagcccaaagagaactggggccctgatacaggacagagattcaggccccagactaggccctggagtgggagtatgggaggaaaaagaggcccttaggtcccaggctggggcattgtggggaggaggacgggcaaaatgcaaggcatgaaatggggagggtgtcccttc

SEQ ID NO: 137067 - DNA, 775 bp, Homo Sapiens
gcatatttccccttcctagagtttacaattctttcaaaagctccaatgtatccataaaggagtgctgatttttgtggggttttttcccagaaggaaacaaagaataaataggggaaaaaaagtttccatccctaaattcacatacacaacaagttaagttaaactataagctagttttagactacccagtgaaacagcattgttggtactatctgaggcaggtgctaccctccctagtcagttcaaaacatgatccagtaaaacaaatacacattgttatgcctcaaacaactataaagcatttcattattcttcaaatatcatgtttaattaactcctaaggtaatagacttctagaatgttgtatcttaatggtgtacctgaatcaatactagcaatagaatgcaaaattcaaaattgctataaaggtaaaatcatcataaaaaggaaactcaatcctttatgtaaaaaaagggagaactgagtgtgaaatactaacaccaaatgtctgaaggcagaatttttgtttgtggaagacagagcgaagagatagatgcacctaatcaagaccaaatagaagacagtgaagaatatgaaaaatgcttaaaaaagaagaaggaaaatggagaagagacaggcagcaaaagaattactagatagatcaaaaataagagaaaatgaggcatgtgcatatggcttttttgtctgtcctttgtgttcctaaataacttaaaacgtaagtggcatgtaggccatactagcaggcaagaatgag

SEQ ID NO: 137068 - DNA, 754 bp, Homo Sapiens
  misc_feature (671)..(671): n is a, c, g, or t
  misc_feature (677)..(677): n is a, c, g, or t
ggccgatcatccgggggtccttcctggaccgatctgggttggcgtaggtcatgcgacaggccactgcccactggttcagcacaaggcctgatgtactcttgcatgggtatagaggcagcgggaatcgtcctcaatccgaccgtcgaggtctccagtacatcctggctgcttgtatgggctccagatcttgataatcttttctacaccagaagagcagatcatgtaggtgtggggattaaatcggacttggttaacaatagatcgatgccctttcagcaccatgaaggctccgttgaccaccctaccaatgccacctgcttctggatctgcaggaattctccacatgtacaggttgaagtcatcagagcccgaaaggatatactggtcacgatctcctgcaaaacagcagcttttcatggtgcatgagttgaagtaaccctgattgtcaaactgaaacacaggcaggcgggaatggatgtcatagagcacagggggcaggcgtcgcctcagggccaggagctgggtcccgttgctgttgaatcgtacactcatggcactttggagggacaggtttccaccatagcgcaggagagaactctgaggttttcgaatgtcccagagtcccactccttcctttgaattggctgtggccaacaacctggggtccacangggttnaaacatgacactatgaaaggctgatggatagtttgccagcggacgcgtggtcgacgatatcccgagaattccggacc

SEQ ID NO: 137069 - DNA, 865 bp, Homo Sapiens
cggtagggcccctgacaccaatcagggcaatccaggtgacataggtccgacggccccaggggctccgcatagcaggcccagcaggtcagtgaccccgctgccaccttccacgttgcgctgggcgaagatgaagagctggggcaggctgagaaaggagcgagaaggcccaagccactagcaccggccggttccagtgagccccactttccatggcggtacgccagcatgggacggcagatggcacggtggcggtccagcgtcatggccaggatcatgtaggaggaggcatacatgcccaccatctgcagatacttcacggcccgacacagggcatctggcccacggaagcggtcggtggccttccaggccagctggggcagcacttggaacagagccacggccaggtcggccaggcacaagtggccaatgaagacgtgtatgggtgcccagtggccccgccggccccgccgagctagggccgccagcaccaggccattgctcagggccacagccacaaagactatggagagcagcgccagctccgcccgggctagcagcgggtcccgggtgtccagtggcctctcctggctgctgttgctgggcaggctgggcagagagggatgcccaggcacagcggaagtggtggacgccatgagcatggtggggctggggcaggtgttctgagggcctggaggtgatgtgcggactcagcctctgcctgaggagcaagttcaatggcccagggtctctggactggagcccttatagagatgccagcatggcagatgcctgttggcgtgtgtgcacgtgtgcggtggcagtatggccagtcctggctgggctcctgggcagctgggcggtggcg

SEQ ID NO: 137070 - DNA, 1263 bp, Homo Sapiens
aggtagcgaggcctgggtggcgaattcggcacgaggctttcaaccttgtcaacccgtcggcgcggcctctggtgcagcggcggcggctcctgttcctgccgcagctctctccctttcttacctccccaccagatcccggagatcgcccgccatggctttacttactgcggccgcccggctcttgggaaccaagaatgcatcttgtcttgttcttgcagcccggcatgccagtgcttcctccacgaatttgaaagacatattggctgacctgatacctaaggagcaggccagaattaagactttcaggcagcaacatggcaagacggtggtgggccaaatcactgtggacatgatgtatggtggcatgagaggcatgaagggattggtctatgaaacatcagttcttgatcctgatgagggcatccgtttccgaggctttagtatccctgaatgccagaaactgctacccaaggctaagggtggggaagaacccctgcctgagggcttattttggctgctggtaactggacatatcccaacagaggaacaggtatcttggctctcaaaagagtgggcaaagagggcagctctgccttcccatgtggtcaccatgctggacaactttcccaccaatctacaccccatgtctcagctcagtgcagctgttacagccctcaacagtgaaagtaactttgcccgagcatatgcacagggtatcagccgaaccaagtactgggagttgatttatgaagactctatggatctaatcgcaaagctaccttgtgttgcagcaaagatctaccgaaatctctacagagaaggcagcggtattgggggccattgactctaacctggactgggtctcacaatttcaccaacatggttaggctatactggatcatcagttcactgagctcacgcgcctgtacctcaccatccacagtgaccatgagggtgggcatgttaagtgcccataccagccattttggtgggcagtgcgctttccgacccttacctgtccttttgcagcagccatgaacgggctggcaggggctctccatggactggcaaatccaggaaggtgcttgtctggctaacacagttgcggaaggagtgggcaaagatgttgtcgattgagacgtacgagagtacatttgcacacactccactcaggagggttgtccaggtgatggcatggcgactacagaagatgtccggaaaaaccgtagggaaagttgtcgaacctggtatgacccggtgagg

SEQ ID NO: 137071 - DNA, 1032 bp, Homo Sapiens
ggctaggtacgaggcatgcggttttaattcggcacgaggcgggctgggcgccgcgccggttcgtctactctttccttcagccgcctcctttcaaccttgtcaacccgtcggcgcggcctctggtgcagcggcggcggctcctgttcctgccgcagctctctccctttcttacctccccaccagatcccggagatcgcccgccatggctttacttactgcggccgcccggctcttgggaaccaagaatgcatcttgtcttgttcttgcagcccggcatgccagtgcttcctccacgaatttgaaagacatattggctgacctgatacctaaggagcaggccagaattaagactttcaggcagcaacatggcaagacggtggtgggccaaatcactgtggacatgatgtatggtggcatgagaggcatgaagggattggtctatgaaacatcagttcttgatcctgatgagggcatccgtttccgaggctttagtatccctgaatgccagaaactgctacccaaggctaagggtggggaagaacccctgcctgagggcttattttggctgctggtaactggacatatcccaacagaggaacaggtatcttggctctcaaaagagtgggcaaagagggcagctctgccttcccatgtggtcaccatgctggacaactttcccaccaatctacaccccatgtctcagctcagtgcagctgttacagcctcaacagtgaaaagttacctttgccccgagcatattgcacaggggtatcagccgaaccaagtactgcggcgcttggatttattgaacgcactctgtggggttctatcgcaaagctaccctgttgttgcggaagattctacggaatctctaagagagggcggggatggcggcctggccttatccgggctggctcctcatcccccttttggcttctgcttcgcaggaccaccgcggtctccacaccgacaggggcgttgccacacctgggcgggtctccctcgctgtggcgacgggggcccccagtttct

SEQ ID NO: 137072 - DNA, 651 bp, Homo Sapiens
gagaagcccaagatccctggtcccttctgttggggataagttccatttaccaggcagcccaaaataagccccttcagccaggggttttttccccacccttaggcctggggtagcagtttctggcattcagggatactaaagcctcggaaacggatgccttcatcaggatcaagaactgatgtttcatagaccaatcccttcatgcctctcatgccaccatacatcatgtccacagtgatttggcccaccaccgtcttgccatgttgctgcctgaaagtctgtaattctggcctgctccttaggtatcaggtcagccaatatgtctttcaaattcgtggaggaagcactggcatgccgggctgcaagaacaagacaagatgcattcttggttcccaagagccgggcggccgcagtaagtaaagccatggcgggcgatctccgggatctggtggggaggtaagaaagggagagagctgcggcaggaacaggagccgccgccgctgcaccagaggccgcgccgacgggttgacaaggttgaaaggaggcggctgaaggaaagagtagacgaaccggcggcggcgcccagcccggcctcgtgccgaattcgccacccaggcctcgctaccttaagaccgtagtgagtgactgccg

SEQ ID NO: 137073 - DNA, 897 bp, Homo Sapiens
agatcagtatacctaacatgtgtgaatgttgagaccatccaggtaagagttcaatggccccaataccgctgctttcttctgtagaaattcggttagattctttgctgcaacacaagttagccttggcgattagatccatagaatcttcataaatcaactcccagtacttggttcggctgatagcctgtgcatatgctcgggcaaagtttacttttcactgttgaggctgtaacagcgtgcactgagctgagacatgggtgtagattggtgggaaagttgtccagcatggtgaccacatgggaaggcagagctgccctctttgcccactcttttgagagccaagatacctgttcctctgttgggatatgtccagttaccagcagccaaaataagccctcaggcaggggttcttccccacccttagccttgggtagcagtttctggcattcagggatactaaagcctcggaaacggatgccctcatcaggatcaagaactgatgtttcatagaccaatcccttcatgcctctcatgccaccatacatcatgtccacagtgatttggcccaccaccgtcttgccatgttgctgcctgaaagtcttaattctggcctgctccttaggtatcaggtcagccaatatgtctttcaaattcgtggaggaagcactggcatcgccgggctgcaagaacaagacaagatgcattcttggttcccaagagccgggcggccgcagtaagtaaaaccatggcgggcgatctccgggatctggtggggaggtaagaaagggagagagctgcggcaggaacaggagccgccgccgctgcaccagagccgcgcctcgtgccgaattcgccacccaggcctcgctaccttagaccgttatagttactgccgtc

SEQ ID NO: 137074 - DNA, 1868 bp, Homo Sapiens
  misc_feature (44)..(53): n is a, c, g, or t
gaccatctccccaggcccttaacttttaattggaatagtttttnnnnnnnnnnttccaaccattggggggccagtccacaacaaaatggccatgcctttatggtcccttggttagtataaaaaaaattgcccaaggcatgtcccagttaacccaacaggtcttgttaggaggtgtttgtgtgcatgggagagggccaagggggcttggtacagctgacttatcccaacatgattcttatggaaacagaagggggcagagtcctggtttgctggcttattgagggcttggcagagaagctaaagctccaaagtgactacagattctctgcaaccggctttgacccatggaaacaggagccagattctcactctagagatagtgagggggccaaacctactcataccacatgcattagtcctggtcatcctccaggaccatgcgtatgatgggcaactcataccaggcaggggaagggagctgattagggaagaagggaccatttttcatcttttaaagtcttaatttatattttaacctcaaacatattatcagtgcctcagatataatttaatcttaagtctttaaaggccccctgaaacaaaagtatactttttatttaggcttcctcactttctggtagtcactttcacccagtctccagttttaccctgacttagagtccacaaacttcatcagaccctctgtgctcatggacttgggcctttctagagggaagcctaaggctcggctccagatgagctgtgccagtacacccaatgctcgtgacaccccaaacaggaccgtgtagtaattcatctccgtcatgccataatactggagcagcaccccactgtgagcatctacattgggccaaggattcttggctttaccctgctctaagaggacattgggcacaatcttgtacagctgagcaaccaacttaaacatggggtcattaggcaggtgtttcagagcaaactctcgctgacaggtatatcgcggatcagtcttccttagtactgcatggccatagcctggaacaacccgtcctgagttgagtgtgttccagatgtagtctcgtaacttctcatctgacacatctttgccaacttccttctgcagctgtgttagccagacaagcacttcctgatttgccagtccatggagaggccctgccagcccgttcatggctgctgcaaaggacaggtaagggtcggaaagggcactgcccaccaaatggctggtatgggcacttacattgccaccctcatggtcactgtggatggtgaggtacaggcgcgtgagctcagtgaactgatgatcagtatagcctaacatgttggtgaaattgtgagaccagtccaggttagagtcaatggccccaataccgctgccttctctgtagagatttcggtagatctttgctgcaacacaaggtagctttgcgattagatccatagagtcttcataaatcaactcccagtacttggttcggctgataccctgtgcatatgctcgggcaaagttactttcactgttgagggctgtaacagctgcactgagctgagacatggggtgtagattggtgggaaagttgtccagcatggtgaccacatgggaaggcagagctgccctctttgcccactcttttgagagccaagatacctgttcctctgttgggatatgtccagttaccagcagccaaaataagccctcaggcaggggttcttccccacccttagccttgggtagcagtttctggcattcagggatactaaagcctcggacacggatgcccatgtccacagtgatttggccctaccaccgtcttgccatgttgctgcctgaaagtcttaattctggcctg

SEQ ID NO: 137075 - DNA, 891 bp, Homo Sapiens
ttaggggggaagagtatgaagtcgacggcgcgccgaattcggcacgaggtcaccttgtcaacccgtcggcgcggcctctggtgcagcggcggcggctcctgttcctgccgcagctctctccctttcttacctccccaccagatcccggagatcgcccgccatggctttacttactgcggccgcccggctcttgggaaccaagaatgcatcttgtcttgttcttgcagcccggcatgccagtgcttcctccacgaatttgaaagacatattggctgacctgatacctaaggagcaggccagaattaagactttcaggcagcaacatggcaagacggtggtgggccaaatcactgtggacatgatgtatggtggcatgagaggcatgaagggattggtctatgaaacatcagttcttgatcctgatgagggcatccgtttccgaggctttagtatccctgaatgccagaaactgctacccaaggctaagggtggggaagaacccctgcctgagggcttattttggctgctggtaactggacatatcccaacagaggaacaggtatcttggctctcaaaagagtgggcaaagagggcagctctgccttcccatgtggtcaccatgctggacaactttcccaccaatctacaccccatgtctcagctcagtgcagctgttacagccctcaacagtgaaagtactttgcccgagcatatgcacagggttcagccgaaccagtactgggagtgattatgagactctatgatctatcgcaagctacctgtgtgcacaagatctacgatctctacgagaagcacgtatgggcatgatctactgacgtcccattccactgtagctacgtttatctgactgcctgactctcaggcagagtg

SEQ ID NO: 137076 - DNA, 537 bp, Homo Sapiens
ggcggccgcccggctcttgggaaccaagaatgcatcttgtcttgttcttgcagcccggcatgccagtgcttcctccacggtaaggtttggaaaagaagactaagaataagaatcattgcggccagcctgaccttggggcagaggatttggcaaccacctggcctcttattatcctgagtatttcctggaagtgtttgttactattgttattgttatagctgctattattattatattactatttaacaaataatttactcagtggtatagtgagatgggaatatcaatacatttgcctaattcttttaaatgttttaagtagtgtaaaatatacataacataaaatttaccattttaatcatttttaagtatatggtttagtggcagtagatatgtttacattattgtgcaaccatccatctccagaacttttgtctgcccaaaccgagaaactgttcccattaaacattaactcctcattccttcttccccctgcctaattcttttaccctcatttgtgcagagtagttgaccaga

SEQ ID NO: 137077 - DNA, 726 bp, Homo Sapiens
  misc_feature (146)..(183): n is a, c, g, or t
  misc_feature (319)..(327): n is a, c, g, or t
  misc_feature (687)..(687): n is a, c, g, or t
ccctcctgcagtgaattaattggatatatatcagctgacactgatagattgatatttctgatcgttatttttgtgtaataagcatggaaatgaactttatacacaccacctgtgttgtcagagataaatattaggggttgtttttnnnnnnnnnnnnnnnnnnnnnnnnnnnnnnnnnnnnnntcctcctataaatattctttttctttacagtttttcaagcatgcaaaacagtttattgtaacttactgaaaaatattaacaattaattgtgaatacatgctgttaccagcttccttattcctaatacctggaaaannnnnnnnncaacggatagattttgatgtaaaaaagaccgaaattatcaaggtatcttagttgaaggacttgggaaatactatcaaaattaatttcttaggaaaaatttaaaagtatatttaagtactctggatagactgaaacgtttccatgttatttctgcagttgtagacttaggcttatttgtaaagaagcatgctccattgactgccatctctagtcttgcagtgggtggtattaacccatagaaagcaagcagttgtgtatcacatatacaatggttatgatgtaaacagattcagttgttttgttgttcattcgtcatatgtttgtgatagggatgttgggagcacagctctattcctgctnctccagccttagttaggccctttaacctttaaaattatg

SEQ ID NO: 137078 - DNA, 1004 bp, Homo Sapiens
  misc_feature (196)..(326): n is a, c, g, or t
  misc_feature (358)..(390): n is a, c, g, or t
  misc_feature (393)..(441): n is a, c, g, or t
  misc_feature (469)..(527): n is a, c, g, or t
tactggtaggatgtgatttggggaactattagttaaaccaatgagctacaagaaatgaacctagtaaaactaagttgaatgctttagagagacttgattaaggtgagttgttacccctcccaactcaaaatgctgctgaatgagaagtgaacaagacaactgtaaaagatttgggaggccggacgcgatggttcannnnnnnnnnnnnnnnnnnnnnnnnnnnnnnnnnnnnnnnnnnnnnnnnnnnnnnnnnnnnnnnnnnnnnnnnnnnnnnnnnnnnnnnnnnnnnnnnnnnnnnnnnnnnnnnnnnnnnnnnnnnnnnnnnnctgtagtcccagccacctgggaggctgcggtnnnnnnnnnnnnnnnnnnnnnnnnnnnnnnnnngtnnnnnnnnnnnnnnnnnnnnnnnnnnnnnnnnnnnnnnnnnnnnnnnnntgacagagtgaaactctgtctcaaaaannnnnnnnnnnnnnnnnnnnnnnnnnnnnnnnnnnnnnnnnnnnnnnnnnnnnnnnnnnagagagacagagaacggaacaactgaagatttttggttggtttatgtaaggaaaatggaggggaacaccgatacaggtttctctgtaaggtagagccttagcccagggtcattgtcgaatgtgttttacgttggcatacaacatttaagggatggatgccatttttattatttctcctttcaatgaacttttccaattgtctaaccagatgtggattacagtggtttcatataagaggatttctaaatcaggattacagagcaaaaccctccaggggtgcgtgacaggttgggagctgtggtgggtccaggcagaaatggcttccctgggaagttgcggaagaggcgtctctggagacgtgcttcgtgaggagagaagctgaagtgttgcaaacaacactggttggggtgggtgaaacctgggaagagggggtgaaacctgggaagaaatggggtgtggcactagagttcataaata

SEQ ID NO: 137079 - DNA, 1203 bp, Homo Sapiens
aacttgaagtcgctcggtagccggggaagggaaggaagagaggcaggctctttcctagaggtgccgtgatcgagggtctggcactccaagccaactcctgagaacgggaaatgggcgggagtcggtggggtggagagggcagccgtggtcgcgagagcgaaggagcggtctgagaatccggcttgagtgttaaaggctaagcgtgtctagctggacccgtggccccgaagaagcgagacaaggcgacgcggagctgtccctgacaccccgaggaccgagggacagcgaagggccggggccgccggccattgccaggcgccattaggtgacgcggccgtcacgcgatgacgcgctgaccggcagtggcctccacgtcgcaggttccgcaaagacctgtgggagcgacccgggagaaggagggccaagatggcggaagcggaggagtctccaggagacccggggacagcatcgcccaggcccctgtttgcaggcctttcagatatatccatctcacaagacatccccgtagaaggagaaatcaccattcctatgagatctcgcatccgggagtttgacagctccacattaaatgaatctgttcgcaataccatcatgcgtgatctaaaagctgttgggaaaaaattcatgcatgttttgtacccaaggaaaagtaatactcttttgagagattgggatttgtggggccctttgatcctttgtgtgacactcgcattaatgctgcaaagagactctgcagatagtgaaaaagatggagggccccaatttgcagaggtgtttgtcattgtctggtttggtgcagttaccatcaccctcaactcaaaacttcttggagggaacatatctttttttcagagcctctgtgtgctgggttactgtatacttcccttgacagtagcaatgctgatttgccggctggtacttttggctgatccaggacctgtaaacttcatggttcggctttttgtggtgattgtgatgtttgcctggtctatagttgcctccacagctttccttgctgatagccagcctccaaaccgcagagccctagctgtttatcctgttttcctgttttactttgtcatcagttggatgattctcacctttactcctcagtaaatcaggaatgggaaattaaaaaccagtgaattgaaagcacatctgaaagatgcaattcaccatgga

SEQ ID NO: 137080 - DNA, 361 bp, Homo Sapiens
  misc_feature (257)..(318): n is a, c, g, or t
  misc_feature (329)..(329): n is a, c, g, or t
  misc_feature (341)..(341): n is a, c, g, or t
ataagggcttttaacagtcttagatctaactggtaacaagaatagaatcagttttctaaatctatgtaataaggattatgaaacttctttttttggtcattgctttgtgtggacctctacatgataggagttggtaaaaagggaagttggtggtaaagatccttgactttgaggtcaggctgcctccattcacattcttactccacctcttaatgagcacttctgaactgcttcatagttgataaagggggcagagnnnnnnnnnnnnnnnnnnnnnnnnnnnnnnnnnnnnnnnnnnnnnnnnnnnnnnnnnnnnnnttagtgtcctngcatgtgggtcngctgctgcttactaatttga

SEQ ID NO: 137081 - DNA, 928 bp, Homo Sapiens
  misc_feature (785)..(819): n is a, c, g, or t
  misc_feature (823)..(864): n is a, c, g, or t
gaaatgtggataaaatttttatctttataatatcaatattgctgctttctcagcctggtgcaacagtcaagacatcacaaggtttctgaacacgcagtattcactctgccatataagttggagcaataaaatctgataggactggtattcatcatttccagttatttcaactgcaggaccaccttattcgctgcttccaaggactgtattagattctgcagctcctctctactcatttcaatagaataaggttttacttcaccattttcttttacatctagatgcaggcttaaaagtggcattcgtaatgcagcaatcttgtcactggaaagtgcaagctttacctgccaatcaaaatcctgtagctgtgcagaggaaatagcaactatttctcttgacagagcctgtttgatttcatctttcctacttttcacgcatttcatgatagtttcttgatgaagtgaattcaactgattcaactgctgaaatatctcttcatcaggtaagtttttaccaactatggctttgaaaaatttggcaatatcttctaaaacgtgcatccattcttctgattcccaaacagtgtgataatcttggtacacaggataagctcgaccacaaatgccatcaattattttgtgaagaagctgcgggcccagctcggccggcagcttctgcagccgccacaagggcgtcccctcttccggctccatccctgcgcgaagctggggctccccggccgtaatggccgaattcccgggcatatgtccggtaccgtcgactgnnnnnnnnnnnnnnnnnnnnnnnnnnnnnnnnnnncggnnnnnnnnnnnnnnnnnnnnnnnnnnnnnnnnnnnnnnnnnnagaacagccccgaccgtctaagtcggctctcttagtaaggttgagttcgtagtagcaagtctag

SEQ ID NO: 137082 - DNA, 761 bp, Homo Sapiens
tcaaagccaacacaggcctgaatccaggcctgatccctgccaaatcccgcctggcactgacgcagccaggcagtagaggccggggagaccctcagttcttgggcagtacagcaggaagaagatggagaggaacccagtgcagcatacatgggggtgggatggacaccgacagaagagccccttcgttccaaagaaaggtgtgtaggggtgcatcttggaaagtcacctagaggcaacagcacagcaggcctccgccctgcctggccacaggccctgagtgtcctcctttagggaccctgacagaaccggggctcagggcagcaggcagatgggccagaaggagatggggagcccaggacaccaccaaagccacagactcaaatgccccaggagagggagagggaggtacctccctgccccctccagggacatcatctggagaaggtgccccctcctgtcccactccatgtgccccctaacacatagcaacagccaccgccagccggctttacaggggtgctgtcgatcttgagattgggccgctcgcccccagaggctgctccaggccccatccgctttttgatttcagcagccatggtcatgaacgcctgctcgacattggtggcattcttggcgcgtcgttctccaagaaggggatgcccagagagtctgctaactccttggctgtggtgttgtccaccaccattcttggtggtgagcctcgtgccgaattacacacccaggcctcgtaccttagccga

SEQ ID NO: 137083 - DNA, 911 bp, Homo Sapiens
aacctaggctaggtagcgaggcctgggtgtgtgaattcggcacgaggccccgaatatgactacctgtttaagctgcttttgattggcgactcaggcgtgggcaagtcatgcctgctcctgcggtttgctgatgacacgtacacagagagctacatcagcaccatcggggtggacttcaagatccgaaccatcgagctggatggcaaaactatcaaacttcagatctgggacacagcgggccaggaacggttccggaccatcacttccagctactaccggggggctcatggcatcatcgtggtgtatgacgtcactgaccaggaatcctacgccaacgtgaagcagtggctgcaggagattgaccgctatgccagcgagaacgtcaataagctcctggtgggcaacaagagcgacctcaccaccaagaaggtggtggacaacaccacagccaaggagtttgcagactctctgggcatccccttcttggagacgagcgccaagaatgccaccaatgtcgagcaggcgttcatgaccatggctgctgaaatcaaaaagcggatggggcctggagcagcctctgggggcgagcggcccaatctcaagatcgacagcacccctgtaaagccggctggcggtggctgttgctaggaggggcacatggagtgggacaggagggggcactttctccagatgatgtccctggaggggggcaggaggtacctccctctccctctcctggggcatttgagtctggggcttggggggtgtcctgggctccccatctcctttctggcccatctggctgctgccctgagcccccggttcctgtcagggttccctaagggaggacactcagggcttgtggccaggcaggccggagcctgtctgtgctgtgcctctagataattcaa

SEQ ID NO: 137084 - DNA, 1582 bp, Homo Sapiens
aggaaagttacgcgccaggggaatgaagggcctttcccgtggtgggggctccaaaaaaacgaaatggggaagtgaagccagatgtgctaccctggggaaaaggaaaggaggttctagccaaaatgagggttaaaggttggtgcccaagcctcgggcccgggtgggcctttccgcctcgcccctgacatggggacaaaaggggcccggtgggcaggcaagggcatgggtctgtctttggcagggcagagggcggcaggaagcagattccctccagggctcaagacacaggcccagcactgttacccgcccacccgccctagatatactcagatcccaccgcagctggacggctcgagctgggagtgtaggaagggagaggaggcagtggggagaggaaagggtgggctgctgggcccctgtggcctccatgcctgtcctgaggtccagcccagggccctggatcccaggtcctggatcccctggccacattcctcgccctgggcactgactgcagccagggcagtagaggccggggagaccctcagttcttgggcaggacagcaggaagaagaaggagagaacccagtgcagcatacatgggggtgggagggacaccgacagaagagccctcgttccaaagaaaggtgtgtaggggggcatcttggaaagtcacctagaggcaacagcacagcaggcctccgccctgcctggccacaggccctgagtgtcctcccttagggaccctgacagaaccggggctcagggcagcaggcagatgggccagaaggagatggggagcccaggacaccccaaagccacagactcaaatgccccaggagagggagagggaggtacctcctgccccctccagggacatcatctggagaaggtgccccctcctgtcccactccatgtgcccctcctagcaacagccaccgccagccggctttacaggggtgctgtcgatcttgagattgggccgctcgcccccagaggctgctccaggccccatccgctttttgatttcagcagccatggtcatgaacgcctgctcgacattggtggcattcttggcgctcgtctccaagaaggggatgcccagagagtctgcaaactccttggctgtggtgttgtccaccaccttcttggtggtgaggtcgctcttgttgcccaccaggagcttattgacgttctcgctggcatagcggtcaatctcctgcagccactgcttcacgttggcgtaggattcctggtcagtgacgtcatacaccacgatgatgccatgagccccccggtagtagctggaagtgatggtccggaaccgttcctggcccgctgtgtcccagatctgaagtttgatagttttgccatccagctcgatggttcggatcttgaagtccaccccgatggtgctgatgtagctctctgtgtacgtgtcatcagcaaaccgcaggagcaggcatgacttgcccacgcctgagtcgccaatcaaaagcagcttaaacaggtagtcatattcggggttcatggcggcggcggcggcccgctcggtcgccccccagaggctgctccaggccccatc

SEQ ID NO: 137085 - DNA, 1109 bp, Homo Sapiens
  misc_feature (1037)..(1037): n is a, c, g, or t
ctctcatgctttagtttacaaagcactttaatatgcacctttctgaaattttttgttctatgagaatacttttccccctttggtagctctagcacccagcatggtatctggcacattataggtgaccacaacaagcttagtcccttatgttttcagtatattttaaagtttaaaagcagtttccatgtgttttcgtttctgatacctggaatactgcatttttactcaaaattaccagagcagcaaacacaaattggcctcaaatatacatataatttattcatttatcaaacaattccttgtgtctgcatagtactatatccttttgaaagagcacttttttatgcttgctcctttctttgtatccacaacgcttatcacagtagaatacaagtgctttacagtttacaaagcacattcactattttttttcaggtcacctagatatcaataatcattgcatttttagtgcctagcacagggacaggcacagaaaaggaaactagtagtattcagaaattttctctgaataacaaataatacatcagggggtggtaagctatgaacagcaggccaaatccaattggctcaaaaactaagaatgattttgaccttataaaaacgttgtttaaaaaacaaatatgtaacagaaaccatatggcccacagtctaaagtatttatgatttgaccccttacagaaaaactgtggacccctgatttacataatgcttcacaatttacactgcactttcaaatgttaactgcatgattgccaatacactaattggtttttctcttatgttttacagtgctttcatacacattatcagtcatttaaatcaacttcccacataaacaggaagaaaaaaatcaaggaaagtattaaacatgctcaacagtcccaggttctctcatctttaagcctagagatgggtattaaacccaggagtagcgttggcacagtccaccaaattatttggccactactatgagcagggagtgcacgctgtccccttgggacctcgctttgtcccangcacagtcaccctttccataaccatcactagaaatcccaaaccccagaatcctgctcacctaagctcaaaga

SEQ ID NO: 137086 - DNA, 429 bp, Homo Sapiens
aattagagtaataaaataaatattttaagtacttactacatattactcattaacacaaaagtaactttacgtataaaatgcatgacaagactccattataaagaagtgtctgaaagctatagggcagaaaggtatagaacacagtatagactagaaggagataaagacaatcagaagattttattcattcatttattcaacaaaaatttacagagtacctccaattatcagcagctgtgctgaacgattaggtatattacctacacagttacaaattttgctttcatgtagtctgcaggaagagagacattaatcaaagaatggcactattgacacttgtgcaggaaagggttaccgtcaacaggcctgggctgctcaaaccttgcgtattccccagagtctccaagactgggtcctgggcctggctcc

SEQ ID NO: 137087 - DNA, 649 bp, Homo Sapiens
tctgtgccgctttaggtcacacccagtggctgcattgcagccctgagctcctgctgcaccgtgtgtcctgctgcccgagtgggccccaccctgggttctgaagatgcccttcttaatggagagctcccgatggagggctccaggactgatgctctccctaaggaagggaggcctcagatttggagagggacaccaacaggaccagaggaggactgaggggcactggcaccaataagtggaagggaacagcgtggtaacaaaaaagagccatgccacttgcatgctggagggagtctttttgtgtcagcctaaagcttaggctggtgtccatgtggaacatgacatctttccagtatccctgatccaggaaactgcagtgagacccaggtgacccagctctgtgtcatttggagcccattaaaaagtgaggcagccacatggcggggacattgaccccactccagaccacactcccatctccatacataggatagaaactgttcatcaggaaggaaaaccaaacagaaatttgtggtctaggggaggggtctgcattcagcatggccatgctgggctggagtggctgtggggtgtccagatagatgggcatgtagactagtgctttctcacctaaatgcgccggtaccgc

SEQ ID NO: 137088 - DNA, 916 bp, Homo Sapiens
aacgctaggtagcgaggctggtttgaatcggccgaggaaacatggcggctccactagggggtatgttttctgggcagccacccggtccccctcaggccccgccgggctttccgggccaagcttcgcttcttcaggcagctccaggcgctcctagaccttccagcagtactttggtggacgagttggagtcatctttcgaggcttgctttgcatctctggtgagtcaggactatgtcaatggcaccgatcaggaagaaattcgaaccggtgttgatcagtgtatccagaagtttctggatattgcaagacagacagaatgttttttcttacaaaaaagattgcagttatctgtccagaaaccagagcaagttatcaaagaggatgtgtcagaactaaggaatgaattacagcggaaagatgcactagtccagaagcacttgacaaagctgaggcattggcagcaggtgctggaggacatcaacgtgcagcacaaaaagcccgccgacatccctcagggctccttggcctacctggagcaggcatctgccaacatccctgcacctctgaagccaacgtgagcaaagggcagaggcagttggcctatgagtgggctgatgcgtgaggttggccacacattccttcctgtggacttgacattttggaagaactctttgccagataatgagttcattttagttttatgctcccattgaaaaattttccactatttttataagctgttaatttcttgagtactttataacatgtctgtagcttggataaaccaagtaagtattttttcttttggtctttagcgaagtttagactgtgaatttgatgacccagattctttttaatggtggcttgcttgtttcaacatttttgcatgactttcatcttttatgtgtgttacctg

SEQ ID NO: 137089 - DNA, 475 bp, Homo Sapiens
cgaacagaggagcaacatgatctgacttacatttctaaaaggattccttcgcctgctgtattgagagtagactattggaagaggaggagcaggggaggatggtcaacaagggcagaaaagtgggggtagttaagaggccagtgtaataatccggtattactatgtccatcttaatgggctaatcatgtgttcttgccactgaaatgagggaggtttttctgtgcccctgctgtgtttatacacactgggaggcatgaaagtcatatcattgtggaagtcatccatgctggtgttttactgtcatctagtagattgtgagacctaacagtcacatttgcatataactttatctgtgccctgcttgtctggggaaattttcttgtaagagaaaggagcactttaccaaaatgggactctctttggtcagtttgtcatgctggagtgatctgtggtgattgtccctacgggaagtgct

SEQ ID NO: 137090 - DNA, 1108 bp, Homo Sapiens
  misc_feature (636)..(636): n is a, c, g, or t
  misc_feature (959)..(959): n is a, c, g, or t
ggaattcccgggatgccactgtgcatgctctatcaccagcctcaccctcctggtcagccttacaagagtgacactggatatactccagaagttggacccaccacagcctgcacactggacttcttggcttttatgagctattcaagagatatttagtcatcacgttgtgtcacaatgggagtgactcacagagcaaggagagaacctgaggattcctcacacatgtagtactcagagctctacggaaacccaggcacctcgacctcaagaggatcagcctggccagggtggcacaactcttccttccccgtgcacagcaggaaagctgccatcagctgagcaagtccaccaacagtttctgtgtcccacttcatctttaataaggacaccatcttcttgtattatacaagaaaggagtgtacctatcacacacagggggaaaaatgctcttttgggtgctaggcctcctaatcctctgtggttttctgtggactcgtaaaggaaaactaaagattgaagacatcactgataagtacatttttatcactggatgtgactcgggctttggaaacttggcagccagaacttttgataaaaagggatttcatgtaatcgctgcctgtctgactgaatcangatcaacagctttaaaggcagaaacctcagagagacttcgtactgtgcttctggatgtgaccgacccagagaatgtcaagaggactgcccagtgggtgaagaaccaagttggggagaaaggtctctggggtctgatcaataatgctggtgttcccggcgtgctggctcccactgactggctgacactagaggactacggagaacctattgaagtgaaccctgtttggactcatcagtgtgacactaaatatgcttccttttggtcaagaaagctcaagggagagttattaatgtctccagtgttggaggtcgccttgcaatcngttggagggggctatactccatccaaatatgcaagtggaaggtttcaatgacagcttaagaccgggacatgaaagcttttggtgtgcacgtctcatgcattgaaccaggattgttcaaaaccaactttggcagatccagtaaaggtaat

SEQ ID NO: 137091 - DNA, 1071 bp, Homo Sapiens
  misc_feature (77)..(111): n is a, c, g, or t
ttgataatcactatagggcgctagctcttagcagccgaacgacgagcgcagcggagtagtgagcgaggaagcggcgnnnnnnnnnnnnnnnnnnnnnnnnnnnnnnnnnnncagtcgacggtaccggacatatgcccgggaattcggccattacggccggggccggcgcgtggctcgggctcgggcggagctggagacgtgtggagctgttcgaggactcgcgggtgtgcagtgcacctatgatatgtgttttagaaatagccgttaaactttggtttgaatgaagaatgtctctcaatccacctatatttctcaaacgaagtgaagaaaatagttcaaaatttgtggaaacaaaacagtcacaaactacttccatagcttcagaagatccccttcaaaacttatgtttagcatctcaagaagttcttcaaaaagctcagcaaagtgggagatcaaaatgtctcaaatgtggtggttccagaatgttctactgctatacatgttatgttccagttgaaaatgtacctattgaacagattccacttgtgaagcttccattgaagattgacatcattaaacatccaaatgaaacagatggcaaaagtactgctatacatgcaaaactcttagcacctgaatttgtaaacatttacacgtatccgtgtattccagaatatgaagaaaaggaccatgaagttgcactcatttttcctgggacctcagtctatctcaataaaagatatttcttttcatctgcaaaaaaggattcaaaataatgttagaggcaaaaatgatgaccctgacaagccatcttttaaacgcaaaagaactgaagaacaagagttctgtgattgaatgacagcagtgcaaggcacaaattgaaaaaaatatatttatagatagcacctgggacgcgaaaacaaattttcactggtgagcgacttcagggtggttacaagttggagttgaaaaccagaaaaattgctttggggccatcaaaaggaaagcgatatttctttttacattgaaggcttatacttttggtgactcacctacggtttttcaggaatc

SEQ ID NO: 137092 - DNA, 461 bp, Homo Sapiens
  misc_feature (283)..(283): n is a, c, g, or t
  misc_feature (327)..(327): n is a, c, g, or t
  misc_feature (338)..(338): n is a, c, g, or t
tggggtcctgcaggctgggcgcaggacagggaaccttccagagaacaagcatgggagaaagtggacagacagacgctgagcacaccagcccgccccacccagttagatgcccagtgacagatatcctgacttcaaccactgacccagcggggcagggagggcacaggcccaggcgtgccctgtgccagtggagaagcccgctgtgctcagtgaatatacagcaagcaaacagacaccctagacacaacgacaaagaaggcagatactgaaaatcgcttgggcngctgaatggctgagttaaaaacccacaggcaggatcacctttgnggttccttccngcctctaaattctaggcttctggactggtcacagtggatttgttctccatccacttgatccgacgctccaggtctgtgggctgcactgctgctgttactacacagctcatgggttaagtggta

SEQ ID NO: 137093 - DNA, 604 bp, Homo Sapiens
  misc_feature (182)..(208): n is a, c, g, or t
ttttataataaaatattctttatgctcagaattttaaaaatagatgtagactggaaaacctgcaatttcctcattaccatctaatacatagaaagtcaaatcacttacggacagaaacagacttgaaaatttcagctgagaaaacattttagaataaaagaaacattttattcagcacagtnnnnnnnnnnnnnnnnnnnnnnnnnnntgtttaaaatggactttctgttagaggtggccgtttcacagtcaaaattatcccagagaattgtttatattaaaaacaggctgagaatagtttgacctctgatcaccaaaaaacctggaggataaacattcatctgtcaagatttctctggaaaatccctgcgctgcttcaaagagacagaacaaaggtaaatagcatctgccacccaaatcttgctgaatagagtgatttatcttcaggcctactagccggcgacaggagcgcacctcctcccttctcctagctgtcccgggtttattcattccctgagcctgaatcctgattagggagcagagtagggtttaagacctcggaccccagaatacaccactgcaattgaattttggttccacctta

SEQ ID NO: 137094 - DNA, 869 bp, Homo Sapiens
gcatcaaattccggacatttttctcatgcacacccgcttctctgtaatgagtcaaagtcttcaccatggactgtgctccaaatctatggagagctgctcagctgagtgggttctgaaactcccgatagaaggtccccaggtccatcggaagaaatgtcatctttagaaaaagctggtttaaaagtctatcataacaagtcatcatgggtattgccactgttgcccccgctggagccatctgagtgcaggctgccctggagaggagattcagtctctggggaatctggaggattcaccattggatcggtatcctccagctccaaattcttgggagcaaacatggcaaagggtatatccaaactcgtcagggtcacctggttaatgggtttgttgacaaaagcccccacttttcggacaaagatggtctccaagacatcgtgaggggaggcccgtccctcactgctgtttgatacggtttcagtatcctcactactggagggtgtggcagcacagtgggttctgtcagaaggggtgcaggttgccagtctctcctggtcagcctgggtaccatggacaggctggttgggagcaaggggtaccccaccttccttcccaggaaccatcagctgggatggtggggaggtggaaaaagaggtggtacacacttcttgagagtcttctacagacgggtatattactccagtgtcctcaccagcagttctgtaattgcaggggtgcatgggagaggagctgggatagggacggtccacaaagtgatcaataataatccccatgataggtggggtcctctcaaattgcctggtagacacctcgtgccgaattcacaacccaggcctcgtactagccta

SEQ ID NO: 137095 - DNA, 883 bp, Homo Sapiens
cgcgcggtttcatgctggtatcgcagattcgagtcagaagatctgtccatgagagcactcctccactgtcgacagataggtgggcagtatcatggagctgtatgcttgggcacaaaggggtgctgtggactcaggatactttactgcaggttccacaaggcatcaactcgcggacatcttctcatgcacagccagcttctctggtatgagtccaagtcttcagccatggactgtgctccaatatctaatggagaggctgctcagctgaggtgggttctgaaactcccgatagaaggtccccaggtccatcggaagaatgtcatctttagaaaaagctggtttaaagtctatcataacaaagtcatcatgggtattgccactgctgcccccgctggagccatctgagtgcaggctgccctggagaggagattcagtctctggggaatctggaggattcaccattggatcggtatcctccagctccaaattcttgggagcaaacatggcaaagggtatatccaaactcgtcagggtcacctggttaatgggtttgttgacaaaagcccccacttttcggacaaagatggtctccaagacatcgtgaggggaggcccgtccctcactgctgtttgatacggtttcagtatcctcactactggagggtgtggcagcacagtgggttctgtcagaaggggtgcaggttgccagtctctcctggtcagcctgggtaccatggacaggctggttgggagcaaggggtaccccaccttccttcccaggaaccatcagctgggatggtggggaggtggaaaaagaggtggtacacacttcttgagagtctcctcgtgccgaattcggcgcgccgtcgacttcatactctctc

SEQ ID NO: 137096 - DNA, 926 bp, Homo Sapiens
atgaataccttttcaaggaatgggccaaaatttccggttagttatgccaaagggggaatttaaaattgggtaaaggctagttcataattatgaagtcccattcatttccaagtttctccttttaatcccttttaggaaaatgaatatttattaaaaattgggtaaaatttccaggaaaaatattccctatttgttctagttcaggaggtcttgcccacatcaatggattgtctggcatcagccactgtttcaggcactcgaacagtcatattgtccatagattttgtcaaacagatttggcagcccaaccgtgatctgtctgttagtccatatgccagatcgagcatgtcattctcctcatcagtgattgcatctaacttctcatatatgtgatcttcaaagatgaggtgacaggttgaacaagccagggttccctcacatgcaccaaagccatcaatatctagattattttcaaccacaacatctagcagagaatcaccaacttttcctttggttgttaatgtttcaccatcacggtttataaagtggactgttattttatcttctgagctgctccgggcccgcgccgacacgctcagcgaccggctcgcctccgcgctcccgcccggcccccggttcctcagcaggccgctggatccagcgcgggacccagcgtggtgcagccaccggccggccgggccgccgaggacagcagaagcggcgcgcagcagccgggcgcccccagcggcagccatcgcccgcggtcgggaactgccggaagcgacgcaggccgcgctttgaggccgcgagagactccaaagaggcgggggcggcagctgcggcgcagacgcccgagggccgcggcgaggggcgcggggctggagtggcggagagaccctgctggaagcaccgcgccgaggttccgc

SEQ ID NO: 137097 - DNA, 737 bp, Homo Sapiens
agtttgagtgtcctggttgtaagctcctttcttctctttctgcttcagttgctgtcagggcagcagttccagttctgtaagtctcactttgttcagctgccacaatagacatcatcgtttggccctctctgttagcagcacattcaaccatttgttttcagtcagatttcttattaaaactggggcgaacacagcgtgtttggtttgatcttgtcttcataggatcttctggctgattccttctctggatgagtcctgagaatttctagaatctcgggagagtaaaggagggtctggagccttctccaaaggatgaagcagtacaaactgagcccatccaaagaattacgactactagtgagatcagatctccaaggagtccctctctcctagagcacggaagcagctgtgtctctgcagactatcagacagcccagagaagggtcccttctgatttggtgcctctgtcctctctcctctcaggagagtctggcctgggcaaatccacacttgtcaatagcctcttcctcactgatctgtaccgggaccggaaacttcttggtgctgaaggtaaggaaaggagaggacaatcaggcagacttgccttgggaaattaaactcacttccagagtctggggatggggctctcccccacatgcaggaaaccatggcctcctagagagactgacagcagctctccataggcctaactgcctggcagcccaccctgtgccgaa

SEQ ID NO: 137098 - DNA, 517 bp, Homo Sapiens
ttttttttatctgttattaaaattaaacattttattatataacaagagttaaagtttttgaaaattaacatcaacaaaaccaaagccattctaggcacaaccaaaaatttttactatcaaaactacctctcacttttcagaaatctgactgaaaacaaatggttgaatgtgctgctaacagagagggccaaacgatgatgtctattgtggcagctgaacaaagtgagacttacagaactggaactgctgccctgacagcaactgaagcagaaagagaagaaaggagcttacaaccaggacactcaaactcaggccaggagtccgtctatgatccaattccaatcagtctgacaagtcactctgatccagcacgattatcctggatgattcggaccaacctagtcgcttccaaaaacaggattttagttcatcttcttcagaagtccctagaacaccctctgatttccttctttctggtgtaatgctatcttccctttttcttttctcttcaccaact

SEQ ID NO: 137099 - DNA, 1025 bp, Homo Sapiens
  misc_feature (144)..(144): n is a, c, g, or t
ttggtccacttcgggaggtgtcagtgtgtctgccttagccaggataggcacgatgttgacccgctgatgcagggccttcatgaattcaacatccaatgccggagcctggggaacaggaacctgtgaccacctgctagtggcagnccctgccctggtgctcttggcctgttcccttgacagcacccggtggtgccaggagcctcaggcttggaccatacccatggccgaagggtgagatgaagtacaggcagcagtgcaccctgttgtcttggatgttctttcggttcaggccactctcgtctgggaaatactgctcaaactgctgatcaatgtattctgccacaggcttccagcactctgtgttgttgactgcatccccgaaacctggtgtgtccacaatggtgagccgcagcctcacacccttctcttctatgtccactgcatgcttagtgatctccacagtttgcatgatcctctcttcagcaccaagaagtttccggtcccggtacagatcagtgaggaagaggctattgacaagtgtggatttgcccaggccagactctcctgccaccatgagggtaaagtcaaagcctttcttcacggactttcggtggacttggttggggagggttgcaaagcccacatactccttgtcatcctcagaggaatcatagggatcaagcttgccccatgggctgcggggcctggcagatgggctgagaggggctggggcacagaagtactgctggttgtcagaggactggggccgcgaggggggtctgaactccaggtcatcatcatagaggtccggggcctggggccttggctccgggacttggggcctggatgcccaggtcttagcctctggtgggtggcagctcgcatttcctgagaaatccttcacgaacttgctcagttctccatcatccgtggtgtcctccaggaaacgcttgatcatggctgcagcccgggcggggccggctccgcctggacagcgcccgagcgacccgcggcggagctgcgcg

SEQ ID NO: 137100 - DNA, 507 bp, Homo Sapiens
  misc_feature (92)..(116): n is a, c, g, or t
aaataaaactgtttgtgaaacagctattttatccccatggcagagtgacccctgaaagatgcactaaccccttcttaaggccataacaagannnnnnnnnnnnnnnnnnnnnnnnnaaaactcagatatttaaaaattatacaatttacaaaacaaaacaacacaacataaagaatcacgtagcatggggctgcctatctgacaggtcctcttttcctttataaaaatgaaagcaaaaagaaaaaggggttaaatgggtgttcctggtcagcttaacccactctgatcacagcgacagtccctccccgtccctgcctacagctcacactgccagctctggcaacacaggcctggacctcctcccatccccacgggtccctgtgggtcagggcacagctgcctggaatgtgctgaggacagggggccccagaggagggtcatcccttgattttgctgctgctgtgtacacttgatggggtccttgaggtcctcaccagccacagtgac

SEQ ID NO: 137101 - DNA, 518 bp, Homo Sapiens
  misc_feature (103)..(127): n is a, c, g, or t
tttgtttttttaaataaaactgtttgtgaaacagctattttatccccatggcagagtgacccctgaaagatgcactaaccccttcttaaggccataacaagannnnnnnnnnnnnnnnnnnnnnnnnaaaactcagatatttaaaaattatacaatttacaaaacaaaacaacacaacataaagaatcacgtagcatggcgccaccttgggctgctacaacaaaggctgctccttccgataccattacccgtgtgccattgatgcagattgtttgctacatgaggagaacttctcggtgaggtgccctaagcacaagcctccccttccgtgccctctcccccccttgcagaacaagaccgcgaaaggcagcctcagcacagagcagtcggagcgggggtgaggggggcagtgtgctcgtgggaatggaaaggacagcaagcacaggtgagactgtggagatgagaaggtggtggacactcgtgatggaatggaaatcgtcctaccgtgcagccacacc

SEQ ID NO: 137102 - DNA, 514 bp, Homo Sapiens
  misc_feature (370)..(370): n is a, c, g, or t
  misc_feature (429)..(429): n is a, c, g, or t
  misc_feature (452)..(452): n is a, c, g, or t
  misc_feature (457)..(457): n is a, c, g, or t
  misc_feature (473)..(473): n is a, c, g, or t
  misc_feature (480)..(480): n is a, c, g, or t
  misc_feature (485)..(485): n is a, c, g, or t
  misc_feature (501)..(501): n is a, c, g, or t
tgttaccaataaaaccgacaagcacgtcaccaggccggtggtgtccctgccttccacgtcagaggctgcggcggcgtccgctctcctggcctcgtccgtctcggccaagatctcctctttaatgttgccaaacgctgccagtatttcatccgcctcacccttctcatctcggtccccgtccctgtcccccaactcacccctcccttctgaacacagaagcctcttcctggaggccgcctgccatgactccgattccctggagcccttgaacctgtcatcgggctccaagaccaagtctccatctcttcccccaaaggccaaaaaacccaaaggcttggaaatctcagcgcccccgtggtgctctccggcncgacatcggctccatcgccctcaacagcccagcctcccctcggatccctcacccagctnttaccgacagacacaaatgattntttgntcgagtcatgtctcanataattntgganagcttagtcagttgtncgtgagtctgcag

SEQ ID NO: 137103 - DNA, 558 bp, Homo Sapiens
  misc_feature (486)..(486): n is a, c, g, or t
  misc_feature (522)..(522): n is a, c, g, or t
  misc_feature (535)..(535): n is a, c, g, or t
atgttttgcaagaattttgcacacactacatgttctttcccattgttgcaaaatatgatttctaagttgagaacacacaaatattggtataatttgcttaacaattaccatgtgttaatttcattttcttctaaaaaggaatgaaatcatcaggcaatggtatcgggctctctcaagggtctagcatctagaacggtgccaattatgtagcaggtgcttgcaggtttgttagatgattagatgtttggaacaaccaagtaaaatccatgacagcaaggacttgatgttgttacatcttgttgtcttgagtgcctagaactgttcctgccatgtactaacatatgctccactgattccaactactttagcatatactactcgagcacatgaacagtcttttgctgaggtgctttggcattctttctaaaagatagatgggtgtttcattaatgtggtatccatttgggttgtgagtcctggatgatncagtagtatgtagttagtaaatattcctatttcccncttggagttgttncctattaaaggcttgaattagta

SEQ ID NO: 137104 - DNA, 1114 bp, Homo Sapiens
  misc_feature (104)..(122): n is a, c, g, or t
  misc_feature (1001)..(1001): n is a, c, g, or t
acagacacaacatataaacaacaaccacatcgacgcaatcaaacctacagtagcgaggcctgggtggcgaattcggcacgaggccgcgcgccgctcttctcccnnnnnnnnnnnnnnnnnnngcggcgcccgcctcggcgcagctgtcccgggccggccgctcggcgcctttggccgccgggtgcccagaccgctgcgagccggcgcgctgcccgccgcagccggagcactgcgagggcggccgggcccgggacgcgtgcggctgctgcgaggtgtgcggcgcgcccgagggcgccgcgtgcggcctgcaggagggcccgtgcggcgaggggctgcagtgcgtggtgcccttcggggtgccagcctcggccacggtgcggcggcgcgcgcaggccggcctctgtgtgtgcgccagcagcgagccggtgtgcggcagcgacgccaacacctacgccaacctgtgccagctgcgcgccgccagccgccgctccgagaggctgcaccggccgccggtcatcgtcctgcagcgcggagcctgccggccaagggcagtaagatcccaacagtttgcgccataaatataactttatcgcggacgtggtggagaagatcgcccctgccgtggttcatatcgaattgtttcgcaagcttccgttttctaaacgagaggtgccggtggctagtgggtctgggtttattgtgtcggaagatggactgatcgtgacaaatgcccacgtggtgacccacaagcaccgggtccaagttgagctgaagaacggtgccccttacgaagccaaaatccaggatgtggatgagaaagcagacatcgcactcatcaaaattgaccaccagggcaagctgcctgtcctgctgcttggccgctcctcagagctgcggccgggagagttcgtggtcgccatcggaagcccgttttcccttcaaaacacagtcaccaccgggatcgtgagcaccacccagcgaggcggcaaagagctggggtncgcaactcagacatggactacatccagaccgacgccatcatcactatggaaactcgggaggcccgttagtaacctggacggtgaagtgattggaattacactttgaaagtgca

SEQ ID NO: 137105 - DNA, 549 bp, Homo Sapiens
  misc_feature (436)..(436): n is a, c, g, or t
  misc_feature (474)..(474): n is a, c, g, or t
  misc_feature (536)..(536): n is a, c, g, or t
cctaggaccttttcccaatactagccccccagtggtgaacagaacctcccaaatttgagttgcacccttccctgtggccttatgagctcagcctcgctttgaggtacccaccgtcctgtcagctccttgacctatgagccggggcctgactaggaaaagttgggagttaaggaggaaattagcattccttaatgttttgttttggtgctctgaatttcttctttattatagtcctatagttttactcctcagttcctcaccatcatcatcttgtctaagacccccattataatattcatgcgctgctttttcatcaaaacctaccctgtcctagagatctatgggcatttggtggatgataatgagcagcccctcccagatagaatgtcaatatttgagcagtaggatattggcatttgttagttaaaggttaaanaaaagaatgtccaatggtaggaatttcaaggtgtaggncagatatttgagaataggggattttttgatgtgcttaaattatccaaagattctaatatccncttgccaaaatct

SEQ ID NO: 137106 - DNA, 1191 bp, Homo Sapiens
  misc_feature (524)..(524): n is a, c, g, or t
tgcggccgcgcgggcgggctgagtgagcaagacaagacactcaagaagagcgagctgcgcctgggtcccggccaggcttgcacgcagaggcgggcggcagacggtgcccggcggaatctcctgagctccgccgcccagctctggtgccagcgcccagtggccgccgcttcgaaagtgactggtgcctcgccgcctcctctcggtgcgggaccatgaagctgctgccgtcggtggtgctgaagctctttctggctgcagttctctcggcactggtgactggcgagagcctggagcggcttcggagagggctagctgctggaaccagcaacccggaccctcccactgtatccacggaccagctgctacccctaggaggcggccgggaccggaaagtccgtgacttgcaagaggcagatctggaccttttgagagtcactttatcctccaagccacaagcactggccacaccaaacaaggaggagcatggggtaagagagaagatagggcatgggctagggaagaangagggacccatgtcttcggtaatacaaggacttctgcatccatggagaatgcaaatatgtgaaggagctccgggctccctcctgcatctgccacccgggttaccatggagagaggtgtcatgggctgagctcccagtggaaaatcgcttatatacctatgaccacacaaccatcctggccgtggtggctgtggtgctgtcatctgtctgtctgctggtcatcgtggggcttctcatgtttaggtaccataggagaggaggttatgatgtggaaaatgaagagaaagtgaagttgggcatgactaattcccactgagagagacttgtgctcaaggaatcggctggggactgctacctctgagaagacacaaggtgatttcagactgcagaggggaaagacttccatctagtcacaaagactccttcgtccccagttgccgtctaggattgggcctcccataattgctttgccaaaataccagagccctcaagtgccaaacagagtatgtccgatggtatctgggtaagaagaaagcaaaaggaagggaccttctttcccttctgattcccctccaccaaaccccacttcccctcataagtttgtttaaacacttatcttctggattagaacgccggttaaattccatatgctccaggatctttgactg

SEQ ID NO: 137107 - DNA, 425 bp, Homo Sapiens
aattttgctttgtggtgtttttaaaaagaatgtcagagccctccttgggggcttcagaaaagcaggtattgctggcccatggcttctcaagatcacagtccccaacctatgctcactgcgaagatacccgcttacttccccagtctcaggcagagagttcgtggtgaagtgataagtagcaggagaggccagcagacaggaagccacggggtcaccaaggggcagggagagaaggcctggctgcggccccgtcacccgccaagcgagcccctgaaaaggctgtgggcagcccccctgccagtgaggcctagctcctgtctggtgggagcagagccgcctggatggcccagtgtcactcgatgctccatctctctccccgctaatgagctgtcacctcagtgggtgatttaactggatctttcctg

SEQ ID NO: 137108 - DNA, 1464 bp, Homo Sapiens
ctcgggtgtagacctctgaagctgagatcacacgaaaacctggcctccccgccatgtagctgttggagagtagaaaaatagagcacgcctgatgtttctaaatgagaagactttcaatagtaatgaagaatccatggcactctccgtcaccctctaacacatggcagtcattcacatacaggccccaaagcccctgttagtgctgcagtagctcctgtggacattggaaagcccggagagggcgtggaagaaatcagctggcccccggcaggttctctgggcttttgtgcccaaggctcctggagccctaaaaactttcaaaagttaactccccacgtccccatcctgcttgggtttctggacttttctgaggcaccggcagaggggtctcgttgctcccttgagtgtaggggcagccctttaacctggctccttgagtccctgctttttctgcttctgttgccttcttcctcgtcttcctctctctcaatatctccctctctttgtccctccccagttcctgacctggccatcccggggtgcccttgaccagccccgtgtctcctcagggtgtcccagcaccagcctggcacagagtggggctcagttagagtatgtgggatgttggtttcgcctggtgagtgaatgaaaggactcgaccaccacagctgagccactagctgggccatgcgaagagttctaggtgcaaaggctggagggtggaattcatttttgagaggtgtgtgagcagcttccgacccctgccccatttgaacgggggccttgctggtcgcgtccctgcattcacctgcgcggccatcccgtcatccaacagttgatcctaactgagcacgcccacggccctggtctggcctgggcaccggccaccgtagcccatcccttgatggcctctgtgtccccaggagggcgggccggggggttgcccaggggctggagcagtggactgtggctccatagaggtaggctggagggtgtgagggcagattcaagctatccccagggctctgctctggtcggagccagccccttctccctctctgccttccccgccccattcctgatgctgaactgttctggacccctggccctgagtctctcaggacccaaggtggggcccgggaaaacggctggtacttgttgtgccccgccgcgggcttgggccacgaggtctccctctcgagggtgtggcttgtgactgcagaccctttcccttgccgtgatgccttcctcccccggggcttggtccagctccttcactctctagcagctgctgtggccacctcccatgccgaggaccagcaccggaaaccttccaggcaacatctgacagcgctctgattctggccggactgtggcttgctctccctggtggctctacaaaggccaccacctcacacaccgggcatctgcaagaccagactctgaggcggactgacaactacc

SEQ ID NO: 137109 - DNA, 773 bp, Homo Sapiens
  misc_feature (762)..(762): n is a, c, g, or t
aggtcagggttatcggtgctgttttctatgctgaattgttcgatctctggtcccacctgagcaacaaatctagccagtttctctgcagtctccattgtcttcatgtcaatgtcagcagatgggcagggagaagaggtctgaggtgcttcagagatgtccactcctgctggcttgggggatgggcctgaggcttctaagctggggtcctgaggagaaggtccaactgggtctggcgggcagtccttggcagcatcatttctgtctggcagggatggttttgcctgtgagaggcctggagcctgccggccgtggtgtttcagcctggtgcctgaggataggagggtctgggtcccggtggtcgctctcctcgccttccagccccggagcccttgagcacggaggagcccccgccgctgccacggaaggagtttcttcttgaggttgcggacagcccgggagtacagcatggccctcactgcacagtctgctgaggtcggcttctggtcggctcctcgcaagttctcgctcatccgctgcatttctgccaacttcagcttgtaatatttatactccagactattttcatcagacaaaaaccagtaagcagggtcctctttgagaagagttctctctttgggagacaggctgccttcgatgacacgtttcacaagcttggtcgatggtgcccactaccctgtgatctgctcgctgggggacagcatcactcagactacttggagccttggcctgaatttcagcctngtgccgaaatt

SEQ ID NO: 137110 - DNA, 632 bp, Homo Sapiens
tgagtaaactgtataaacagcaatggtgctaccatatggtacaaaaacaaattctgaactgcagccacaggagacagtgaatttcaatccttttttactgttattacaaacttttccatagttcacaagtgtgttttctccattggaactattccagagcctcattcgattatctgtaccaacagtgaggaggtgaagtccatcacttgtaaaacataagccattaactttcccattatgagcagtgtttgctgattcaacagcttgtgactttttcccattatgttgatcaagagtaatcaaacatcctgatgctcttctcacatcccataattttactctactgtcagcacttgctgttgccaagatatagtcataacgtggagaccaggaaactgctaatatttcttgtctgtgaccctgtagaatgtgagaacaggatccagacttcaagtcacaaagttgtactttgggtcctctagtaccaactgctaccaaacagtgcttggtggagactggagacatatgatgactataaactgtttcctcaaaattaaatacatctgcagtttgtaatgtatttgtatcccatactttcagagttttatcaaatgagcttgatgtgaacatgc

SEQ ID NO: 137111 - DNA, 840 bp, Homo Sapiens
cgccgcgggggcaaggcctggagctgtggttcgaatttttgcaggcagcgggtgctggcttttagggtccgccgcctctctgcctaatgagctgcaccagaatgatccaggttttagatccacgtcctttgacaagttcggtcatgcccgtggatgtggccatgaggctttgcttggcacattcaccacctgtgaagagtttcctgggcccgtacgatgaatttcaacgacgacattttgtgaataaattaaagcccctgaaatcatgtctcaatataaaacacaaagccaaatcacagaatgactggaagtgctcacacaaccaagccaagaagcgcgttgtgtttgctgactccaagggcctctctctcactgcgatccatgtcttctccgacctcccagaagaaccagcgtgggatctgcagtttgatctcttggaccttaatgatatctcctctgccttaaaacaccacgaggagaaaaacttgattttagatttccctcagccttcaaccgattacttaagtttccggagccactttcagaagaactttgtctgtctggagaactgctcgttgcaagagcgaacagtgacagggactgttacagtcacaaatgtgagttttgagaagaaagttcagatccgtatcactttcgattctctggaaaaactacactgaacgtagactgtgtctatatgaccaatgtgtatgggtggcaccagatagtgataccttctcatttgcccttgacttacccctgtcattcaactgagccgacaattgagtcggattcttacctgctaatgggcagccttgggaccaaatgatgccgaatttg

SEQ ID NO: 137112 - DNA, 783 bp, Homo Sapiens
cggggttcaagaagacaaagacgccccatctgaccaaggctgcaatgctgggcccagggccctggccccagctcccaacttcagcacaccatctctctccaccagacccagggccagggctgcgattctccaacggtgcccacttctgccgggtgtccaactaagccccatgccggcccgaagcactagcagaaggcaaaggtgtctgcatctaggacctgcaggctactcagctcctcactgtcactgacatctgaggtgtacgtggtcttccgggactccagatcaacgacctgcagacttccggagcctcgccccatggaggactccgggtgccaatgtggagaagacggccaccctaggccagagactctcctctttctcatgcacagcaatggtgctgacagctttaatgacatcactgtcctctgcaacctgccacacctgcagataacaacctggaaggccactggtaaccagcaatctggtatgtggcacatgctttagatcaaagatagacctgtctgaaaatcctccatggcgcactttgaaatctctttctgggaataagcccttgttttcctttacagaaagtctgagaggtaatttcagatgaagaatttcattctttttcaggctttcatagccagcaacaaagactcctttgtcatcaatccattcaaggactcgagtggctcctgacaggtcgaatgcatagaaatcctggtacaagcgcaaggattccaccagccagtcgtccccaggatccatggcaacgacccc

SEQ ID NO: 137113 - DNA, 780 bp, Homo Sapiens
gcacacagaaagccaaaggtgtctgcatctaggacctgcaggctactcagctcctcactgtcactgacatcattgtctgctcagctggttgggtgctggtgcctgggactgcctaatcctgccccagcataggagcccttagaggccagggcttacctcttattcactgtgtatccccgacacctgaggtgtacgtggtctttccgggactccagatcaacgacctgcagacttcggagcctcgccccatggaggactccgggtgccaatgtggagaagacggccaccctaggccagagactctcctctttctcatgcacagcaatggtgctgacagctttaatgacatcactgtcctctgcaacctgccacacctgcagataacaacctggaaggccactggtaaccagcaatctggtatgtggcacatgctttagatcaaagatagacctgtctgaaaatcctccatggcgcactttgaaatctctttctgggaataagcccttgttttcctttacagaaagtctgagaggtaatttcagatgaagaatttcattctttttcaggctttcatagccagcaacaaagactcctttgtcatcaatccattcaaggactcgagtggctcctgacaggtcgaatgcatagaaatcctggtacgatttacaagcgcaaggattccaccagccagtcgtccccaggatccatggcaacgaccgcttccggcgtctcacttccgcctgcgagccttcgggggccgcgcggctctcgcgagatccc

SEQ ID NO: 137114 - DNA, 814 bp, Homo Sapiens
ggcccctggccccagctcccacttcagcacaccatctctctccaccagacccaggccaggctgcgattctccaacggtgcccacttctgccgggtgtcaacaagccccagccggcccgaagcacagcagaaggcaaaggtgtctgcatctaggacctgcaggctactcagctcctcactgtcactgacatcattgtctgctcagctggttgggtgctggtcctgggactgcctaatcctgccccagcataggagcccttagaggccagggcttacctcttattcactgtgtatccccaacacctgaggtgtacgtggtcttccgggactccagatcaacgacctgcagacttcggagcctcgccccatggaggactccgggtgccaatgtggagaagacggccaccctaggccagagactctcctctttctcatgcacagcaatggtgctgacagctttaatgacatcactgtcctctgcaacctgccacacctgcagataacaacctggaaggccactggtaaccagcactctggtatgtggcacatgctttagatcaaagatagacctgtctgaaaatcctccatggcgcactttgaaatctctttctgggaataagcccttgttttcctttacagaaagtctgagtaggtaatttcagatgaagaatttcattctttttcaggctttcatagccagctacaagactcctttgtcatcaatccattcaaggactcgagtggctcctgacaggtcgaatgcatagaaatcctggtacaagcgccaggattccaccagccagtcgtccccagat

SEQ ID NO: 137115 - DNA, 250 bp, Homo Sapiens
ttaactaatcatttgtttttctaaatcagtctataaaagaacaaaacttttaaaatcttgcagaggctgtttcatcagtaaactctcctagggagctactactgctgtctaaacctctgtgaaatggtaggcaaaaaaagccatcaaaggatcacaggagataaaacaccaatcagtgtaagctgttaaagatgactgtgattaaataaccaaatatcaaatatccaataaggtaattaaatttaggatt

SEQ ID NO: 137116 - DNA, 604 bp, Homo Sapiens
caatcccgctgaagaattggaacatagttatattggctggaggtttggacattcctagagcaatacatatgcctttcaactcttgaaagacctcactaccgcctccttcttgagctttttttggaggagcattcacacagagcattctggcagcttctagttctgagatgaggtatgtgagcaagaggaggcagttcttctgaatgagaaggcgcttggtcacatccccagatgtcagtgaaagatacgggcagttcatctcccctagtagcccactcacctcaagctggaattcttcagcttcactcggactgttagttgcttgcacgttttcctctagtttacagagcactcttaattcagacaccagccaagcacagagtttggtaaactcgggggaactggctccagcagagactgcctgagagagcgctccatcttccaacaatgggcccttgtaacctagatcttccaacgactccaagatgtcagtctccatgaggtcacactccatgctactgtggtattcaaatttccgagtcgtcaggctcccctctcctcgtgccgaattcggcgcgccgtcgacttcatactctctcgccct

SEQ ID NO: 137117 - DNA, 359 bp, Homo Sapiens
  misc_feature (111)..(186): n is a, c, g, or t
ggaagttgccctgatcagagcatgcactgaatatagattttccatttccccttcccagcctgggttgtctcaacaatgctagtaccttgagtgctctggattccccttgtnnnnnnnnnnnnnnnnnnnnnnnnnnnnnnnnnnnnnnnnnnnnnnnnnnnnnnnnnnnnnnnnnnnnnnnnnnnngttagtgttatgcatcagctattattcctttgatgtccaaacatctagtaacagaataggaagagaaggttgctgctgccaagaagtttgggctggatgagaccatcaggagtcatggataatatcctggcctatggctttgcaaacacgttgagccgcgcagtggcctcagc

SEQ ID NO: 137118 - DNA, 969 bp, Homo Sapiens
tggcccaggggagcttcttttgttccccgagtcaggggccttcacctgggtttttaaacctgttccaagttcccattcccttggttaggcactttttcactgagggtcgggagttcatcctctagctccagggatgcgtgcccacatggtcttccctgttcccggctcaggatgtccctctcttgctgtgatctcccccatgggaccgggaaatccccttgtactgttccatcagctccgtgtgctcctgcctggcagttgccagagccctctcgagctcctgcactcggctcctcagctctggtcacctgtccctccagctgtagcttcagctgcatcaggtcattccgttcttgctggctctcatcgagctggttctgtaacacagttgccttggggacaaccagcaggatgtcagagcccccatcagcctcctccagggtcaccagttcatccatgggccttggctctcggaactggaaaggggggctctgcccacacacctggccctggcggttcacatatcggaactggtagagctgagctcctggtttgggcaggtagctggcttggaactggacactggtgtgaatgggggaaccatcagttgtactttcaggcacggaagaccacacaaatgtgtggtaatcccgaacacaggcagcctccaccttgaagatgccaatccagtcactggcactgggcatggtgcctgggggaagggtgtagtgacattccaccttggtgttggggatgtaggtccgggctacattgagaaagttgactccaccacgggatggtgcccggcttagtggtgattcttccatcctggccttgagatatctgtcctcctactcctaagcttgttgacccagctgtatccaggaatgagttatgacatcagaaagcagcaactaatctccaacagacggatcagctcggacgcgtgggtcgacgatatcccgggaa

SEQ ID NO: 137119 - DNA, 1136 bp, Homo Sapiens
  misc_feature (40)..(40): n is a, c, g, or t
  misc_feature (68)..(68): n is a, c, g, or t
  misc_feature (93)..(93): n is a, c, g, or t
  misc_feature (212)..(212): n is a, c, g, or t
ggtgctccttcaagggttccaggttcggccaccccgttgntggccctggcctagggttttcttcattntgggccaccttgtttttccagtcgntgagcctgagcattctgttcctcttgccagttttttggcttcttcaggtcccaaatttaagtgatgttctccctgttgtgccactggaagctcagcttcactttgctccttgtctgctngtacttctttcagttgcccaaggagcttctcttgttcccgagtcagggccttcactgtgtctctaagcttgtccagttccggttcttttgtcagcattttctcagtgatggtctggatgtcatcgtctagctccaggatgcgtgccacatggtctgcctgttgccggctcaggatgtccctctcttctgtgatctccccatgggaccgggaaatccccttgtactgttccatcagctccgtgtgctcctgcctggcagttgccagagccctctagagctcctgcactcggctcctcagctctgtcacctgtccctccagctgtagcttcagctgcatcaggtcattccgttcttgctggctctcatcgagctggttctgtaacacagttgccttggggacaaccagcaggatgtcagagcccccatcagcctcctccagggtcaccagttcatccatgggccttggctctcggaactggaaaggggggctctgcccacacacctggccctggcggttcacatatcggaactggtagagctgagctcctggtttgggcaggtagctggcttggaactggacactggtgtgaatgggggaaccatcagttgtactttcaggcacggaagaccacacaaatgtgtggtaatcccgaacacaggcagcctccaccttgaagatgccaatccagtcactggcactgggcatggtgcctgggggaagggtgtagtgacattccaccttggtgttggggatgtaggtccgggctacattgagaaagttgactccaccacgggatggtgcccggcttagtggtgattcttccatcctggccttgagatatctgtcctcccaacagacggatcagctgttcccctcacctttccctcgtgccgaattcggcgcgccgtcgacttcatactctc

SEQ ID NO: 137120 - DNA, 1105 bp, Homo Sapiens
  misc_feature (65)..(65): n is a, c, g, or t
  misc_feature (174)..(174): n is a, c, g, or t
  misc_feature (194)..(194): n is a, c, g, or t
  misc_feature (208)..(208): n is a, c, g, or t
gccctaggggttccttccattgtgggcccaacttgtttttcagtccgctgagccctgagcacttntgttccttcttgccagctttttcgcctccttccaggtccaaaatttaggtgatggtttctcctgttgtgccacttggagcttcagctcaccttgctccctggtctgctngtatttctttcagtgccccnaaggagcttctctngttcccggagtcaggggctttcactgttctttaaagcctgtccagctccacttccttcgtcagcactttctcactgatgttctggatgtcatcctctagctccaggatgcgtgcccacatggtctcccctgttgccggctccagggatgtccctctctttctgtgatctccccatgggaccgggaaatccccttgtactgttccatcagctccgtgtgctcctgcctggcagttgccagagccctctcgagctcctgcactcggctcctcagctctgtcacctgtccctccagctgtagcttcagctgcatcaggtcattccgttcttgctggctctcatcgagctggttctgtaacacagttgccttggggacaaccagcaggatgtcagagcccccatcagcctcctccagggtcaccagttcatccatgggccttggctctcggaactggaaaggggggctctgcccacacacctggccctggcggttcacatatcggaactggtagagctgagctcctggtttgggcaggtagctggcttggaactggacactggtgtgaatgggggaaccatcagttgtactttcaggcacggaagaccacacaaatgtgtggtaatcccgaacacaggcagcctccaccttgaagatgccaatccagtcactggcactgggcatggtgcctgggggaagggtgtagtgacattccaccttggtgttggggatgtaggtccgggctacattgagaaagttgactccaccacgggatggtgcccggcttagtggtgattcttccatcctggccttgagatatctgtcctcccaacagacggatcagctgttcccctcacccctcgtgccgaattcggcgcgccgtcgacttcatactctctcc

SEQ ID NO: 137121 - DNA, 1063 bp, Homo Sapiens
ttctctatttagcgccgaatgagtccgtttgtagaatattctgaaaatgaagggaattgaaacggtaatcccaggacaaatgcaagaataaatccggcggaaataaaagacgcacttctgttttgcccacagaagtaaagggtaaagcgtttaatgtgtcttgagttaacggaatggagtttgtcagccttctggggagcgtgtcctccccatcagcttccagcttttggtgacgacctaacgaatatcccggtcccaccaccgtttcccggaatcccaatcgtttctggctgcatggacccacgtgagatcgatcgacttgttacacttccccttagtggtaaggaacaatattcaatataactcccacagtagttaaatggaagaaatacatccatctagaaataaaacgacacgattgctgctacaccaagaaaggattttaaaaaggcctgtttcacaagctaagtgagggccagaggaaaggtgttcgtttaaactgaaattcgagctgcgataacacctcctaatgcaatcaaacgctgttgcagcacacttcttaggagatcgggttcaacggcagggattgggtaaggtgagaatctggcttggcggctccggccccggccatctggttcccttgggctccggccgccaccatccactcgacggctctcggcccgaacgcttggtcgcaccgcctgccgaggtcctagatgaatcgcttcaggcctggaaacgaggaagccgtctccggagaccatcgccaacgctgacgcccgcggtctgaggtcgccatgggaagagcggtaggccaccctgctcctctgatcaccggaggacagggacacattgttcagggccatattcaaacactgcccgcagtacttgcgttacgtccctttgtgaaggcaggcccttcgcggctccccagatcagtccagcctgtgtcggacccgatgactaagcacacaggaacccataactgagcctgcggaagagcccctcgtgccgaattcgccacccaggcctcgctaccttaggaaccgttatagttacttgc

SEQ ID NO: 137122 - DNA, 628 bp, Homo Sapiens
  misc_feature (595)..(595): n is a, c, g, or t
tcacgtgtctcatactgctgggcttatcacgaaccagagaattcagactcagaaatgggcctgatgctctgggctgtcatgcacacttcatttgggtttcctgcttgctctgagctctacaggggaatggggtagagatgggagccaccttgggtggagggtggggaaggtatgttctgcccaccacaggtgtcatgctcactcagcctgatgcccaggctgccaagtataaggcattggcaggggcccagccaccctgggttccttggtcccctattccccatctgctccctgcagtggccccatgggttctctgccatcttcccaggcctgctggatgtgtatggatttgaatcatttcctgacaacagtctggaacagttgtgcatcaactacgccaatgagaagctgcagcagcattttgtggctcactacctaagggcccagcaggaggaatacgcagttgagggcctggagtggtcattcatcaactaccaggacaaccagccctgtttggatctcattgagggaagccccatcagcatctgctccctcataaatgaggaatgccgcctcaatcgacccagcagctcanccaagctccagacacgcattgagactgccctgg

SEQ ID NO: 137123 - DNA, 449 bp, Homo Sapiens
  misc_feature (28)..(28): n is a, c, g, or t
cattccaccagagccagctatcaatttntatgtttttcttttgctgtaactgcctgttcactattcactcccttcccttccttgtgtgaagctgaaatttatgtagcacatagttccaactgctttgaaggagctaaatttagtattaatacactgactaagttgatacaggttactgtagatactttaaacagacacaataaagtcaaggatcatagatgtgacctcagtttgtcctggaatcctttttgttcctcttctttgcctattggtttttacatttgcaggattcaactcaggatgtcggccttccatgacatccccaatctgggttagatgccctcttgtgatgctttagcatcatggccttacatctaacagagcacttgccacactagtcatgtgctacatgatgatgttttggtcagccacagacagcagatacaatg

SEQ ID NO: 137124 - DNA, 1908 bp, Homo Sapiens
  misc_feature (105)..(105): n is a, c, g, or t
  misc_feature (108)..(108): n is a, c, g, or t
  misc_feature (159)..(159): n is a, c, g, or t
  misc_feature (181)..(190): n is a, c, g, or t
  misc_feature (263)..(263): n is a, c, g, or t
tcattaagtagaccggttaagtattttttcaaatgtttccaaggaatgttcccctattccccaaggtccatatgcatttagtaccatagcttttcccatatttcngtntttaatctcggaatccacttttgtgtatagttcatggtctatttccccctnggagaacaaactacctccactnnnnnnnnnntagtcccatatttccctcatttcctgatgccacttgtatcatattccaaattctaataaatgcataggtcttnttttgaaatctcttctgctctgctcaatcaataccacaggagtcttaatattagttgtagatgaccatgtcatctatttttgtctgttcctttccaatatttacaacttaatttttcttgttactggcgaagatctccagatctatggtggtagcaataaaaaacaggcctccattttctgttcccacttttagtgaaaatgtgcctaaactttcaccattatctctgctgcaggtttctctgttggacacagggttttaatcatatgcatgtctttctcttcagtacaaattttctggtgtcccttaagtttttagtacttgttaaagttaacctcattcgtggtgctttgcttcagaaggattatttctggggcatgatgaggtgcaaatttctaatgaaagctttcccactttcaaggctttcatgggttttttagtgagtatgaattttctggtgtctaatgtggtgtgacttctggctgaaagctttcccacattcactgcactgataaggcttctttacctgtgtgtgattctcaaatgcagagcaagggttgagaactgagagaaagctttcccacattcattacaaccatagggcttctcccctgtatggcttctcacatgcacagtgagagatgagctttgagagaaggcttttccacagacattgcattcgtaaggtttatcacctgtatgaattctcacatgtacaataagtgatgttcgctgagagaaggcttttccacattcgttacattcatagggtttctctccagtgtgaatgttctgatgttttatgaggtacttcttctggccaaaggctgttccacattcactacatttaaaaggcttctctccaatatggattttctcatgctcagtaaggttggatttgccactgaaggtttttccacactccttacatacaaagggcttctctcctgtgtgagttctctggtgtctgatgaggtttgacttctgaatgaaagctttcccgcaatctttacactcaaaaggtttttctccagtgtgaattttctggtgcgtaaggaggttttccttctggctaaatgattttccacattcattacattcgaaaagcttctcgccagtatgggtgttctgatgtttaatgacatactgcttttggctaaaggcttttccacactcgttacattcaaaaggtttctctctcgtgtgaaaatgctcatgctcagtgaggtttgatttgtggctgaagacttttccacataccttacaggcaaaggggttttccccactgtaaattctctgctggctgaggtgtgacatctgaatggaagctttcccacattcacaaggtttctctccagtaaaaatttcttgatgagtgaggatttacttttggctgaagatatttccacatctcttacatttataaggcttctctgtgtatgatctcccaaatgcagagtaagggataaggtttgagaggaaatgttatcatactcagtatattcaatgctttctctctagaaaaattttctaatattcaatgaagtattgctaccttcactagtttctctccagcatgaattttctgcttctcaatgagattgtcatctagctaagggcttgtcaatactccttagaagcacacc

SEQ ID NO: 137125 - DNA, 739 bp, Homo Sapiens
gagatgctgctctcgggctgacactccataaaattacccgctgtgcaagaaagtaagccacagccaggacaagcaactggtgcttcaccatgcgggccccggtggtcttcaacacagcacggaggagcggggccttgttggaggggcgcatcagctcatacttgaccacgctgtttgtgcaccggcccaattcatggtccacgctctctgtagccatgcactggttgttggccagtgtggtgatctctcgactcttcggtgtttccatccggcagctgcagagaggcacttcctggaggccgtctgtctccagcacatctggaccgttggccaacccttctgcttgtgaagacagaattcctttgactcggagatccagggagtccagagaaacttccatgtaccctgtgctgtctcctggtgccgtctgctcagcgcttcctgcagatgacttatacgactcagaaccgagggcaccgctgggcttctttctacttctccgcctccttttcctggctggcttgatccagggactgtcggtctttcctttcctcttgagaaatttcttcttaatgctggattccgaactcaggtcagactcgtcaccgccttcctcctcctccccggtgtccacggactcctgctcctcctcggactccccgtccatcttctgggcgcgatcagcctccgacatgctctccttggaagtcctgctgtcctctgtggggaacgcggccgc

SEQ ID NO: 137126 - DNA, 561 bp, Homo Sapiens
agtggagcttctgttctggccttggaagagctgttaatagtctgcatgttaggaatacatttatcctttccagacttgttgctagggattaaatgaaatgctctgtttctaaaacttaatcttggacccaaattttaatttttgaatgatttaattttccctgttactatataaactgtcttgaaaactagaacatattctcttctcagaaaaagtgtttttccaactgaaaattatttttcaggtcctaaaacctgctaaatgtttttaggaagtacttactgaaacatttttgtaagacatttttggaatgagattgaacatttatataaatttattattcctctttcatttttttgaaacatgcctattatattttagggccagacaccctttaatggccggataagccatagttaacatttagagaaccatttagaagtgatagaactaatggaatttgcaatgccttttggacctctattagtgatataaatatcaagttatttctgacttttaaacaaaactcccaaattcctaacttattgagctatacttaaa

SEQ ID NO: 137127 - DNA, 1470 bp, Homo Sapiens
  misc_feature (80)..(92): n is a, c, g, or t
  misc_feature (345)..(374): n is a, c, g, or t
  misc_feature (1106)..(1123): n is a, c, g, or t
  misc_feature (1359)..(1393): n is a, c, g, or t
caatctgtacaaaaggtctttcttcataaattaatttttttataatttaatggctgtctactatgtgatgtttaactgannnnnnnnnnnnnatgtacagaggttatgtttcccaaatcttacccagacgagtatggcacttagttcagacatttctagcagcagatttcccctcccctctaaccgagctatcaaatttctgtcttaactaatgcaaaaatatcaagtagtgagagacccaggtttataactgtactaggtacacagagggtgctgcgttcagtctggactttcacaaagcagtaatattccagggagcatagaaccaataataccacaactttnnnnnnnnnnnnnnnnnnnnnnnnnnnnnncacatttctcttatgactatgtaattttcactagaatctacacttctcagagcagcaaggacttttgaaactatgaaatgtcactgacatctatcatcaaatacaagcataaaatttaagaactaaaaaatacttgaaagaaataactgcttagccctagctcctgagctaggaggatttggtctgtggaaacagggagggccagcaacctgtcccagcacaaaagaaaatagactctgaggtagataactgatcatacacagctgaccagacaagtacacagttttggaagacaacttaatttaccattgcttttaaaacatatgcaattgccttaataaaagagctttaataacagtgaattatcttatatgtactaaagtagaaataactgtgtatttatgaatcaggaatttcatagtttcaaaattggttttctttacacttgaacacttgtagtgatgatgtaaagtgtggcactgcttggatccaaatcttccttcatgcttttttgtttgtgtgtgtccatacatcaattaaaattataaaacctaaatgcaaaggtacaaaaaaggcacattctcctaaccgcaaactggtccggcaaaaataaagagcacagaagatgtgatgctgagacaagttggagctactggttactggctcttcggtctttggtgaagttacctttaaaagtgccaagtcatttttatttttcaaatttacctaatnnnnnnnnnnnnnnnnnnctagtagccaatcgttttgcttctattcgttatctcagcttatgtttgaagataaatccttacttttagcttttgccactttgttgcaatagcaacatttttcggtttgccagatttcaggcataattctcattctaaagcactatcattagtataaaggaaggacaaacattcagtgactcccccccggccgtaatggccgaattcccgggcatatgtccggtaccgtcgactgnnnnnnnnnnnnnnnnnnnnnnnnnnnnnnnnnnncgccgcttcctcgctcactgacttcgctgcgctcgtcgttcgctcgtacgagtagcccctatagtgatcatcactct

SEQ ID NO: 137128 - DNA, 1456 bp, Homo Sapiens
gggagagtatgaagtcgacggcgcgccgaattcggcacgaggcctgcccccttcacattcacgagtcattaccagccagggaaggtcatccaagtttcctccagcatgggcgatatctttgggaccgagactttccttggagagctgctgagagcggacagtcccaaaaacaagtgtcaaagggcccaagggaaaggggactgtgccctggaggctcacttcacagggatcagtgtttgctccacagctgtagctctgggctgacgccccccagaccccttccttctcggagtgacccgcccccaggccacctgctccggggagttctgtgcactttactctttggacttctcctcacgtgtgccctggttttatggggagagggaatcgctgttgggaaggcagagcagttgcaaccctctctgcccttgcttcatgtggctggagcccaggcaaggagagcaggagccagcgtgagactgaggccccctggtgcctatcaaggaccagagtgaaggggactacatctcccagcccttcaccttttaaatatgagtggttttaaaaggaaaaaaatgaaaccaggcaacagcaacaatattctgttttttaaatagggacaagactgttgtcactttttagacatgtatcccattccttttggctctgcaatatttggggctgtagctccttccaagcccatggtagtccctccccgagtctctcccagtagaatgcagcctcccttccctggccccttccctctcagtgacggtgactccctggggccttctcgtggaacccagaggggctgaaggactgtggcctggctggcgggccagcgtggtgctcctcaggactgcagcactgagatggaacctggcctcagtttaggaacaggggccacaacagggcaggaacccaccaccctccacataggaatacaaccagtggggccacatcatgtgaggcatcagacccacactgtcagcccagcaggccgggctgtgtccttcagacccagtgctgccctagactctgactcgggactccagcttgccacgtgccctctcccctcttgaatgtactctggtcttgcagtgtgctgctgggactttcttgctcagccatcactctggtcaccttgtttgctctgggtctggctgaattttctgccctgagatctgggcataaagtggatgaaacttgaaagaccttcagtgtagatccagatggccaacctgtccttgttaagttacttgcttcttgggaatcagtgtcccctgctgagctgaaaaggaaatggattccaatctcttccaacctttaaggtgatagatagtttgagcaagactggagaatggacaacactatgaagctgtggcttagaaagggactgtgcatgtcccatccttttggccagattggactgggggatgttccggacagatgcctg

SEQ ID NO: 137129 - DNA, 879 bp, Homo Sapiens
ttagtgtcatattcttctggtcagcacataacaggcaagagggcaatgttgctcccacatgatcctttccctaaacaaggcaccgtagggagtccaagataaagtgcacagactcccggagcagtggctgggggcggtcactccgagaaggaagggtctgggggcgtcagcccagagctacagctgtggagcaaacactgatccctgtgaagtgagcctccagggcacagtcccctttcccttgggccctttgacacttgtttttgggactgtccgctctcagcagctctccaaggaaagtctcggtcccaaagatatcgcccatgctggaggaaacttggatgaccttccctggctggtaatgactcgtgaatgtgaagggggcaggatgtggcaggagggaaagagtacattatagaaaaccagtggacctccggttctgagagcagggatacttggatgaccctaaaggcagagtctctcctggggaaggtttggagaagatggtcaggatcctaccagtgaggcctgctggggaaaggagctcctctgggtgcgagaggagctgcagagttgagggaggggctgccgaggaagagagcccagggctggcattagggtgtgtaagcagggggtggctggaactggttgatgacctcatattccgccgggtagggctcgttctcttccatctctgagagcagctccagcgcctgctcctcttcctctgtggggtagtggcgcaggaggttggctgtcgtggccaggattgaggctccaccagctcctgccaccaggtagaagctaacggcgaaggtgacatagacctgggatcccctcgtgccgaattcggcgcgccgtcgacttcatactctctcc

SEQ ID NO: 137130 - DNA, 1200 bp, Homo Sapiens
cggtccggaattcccgggatcgggagttctgagtgcgacggcgcaggtctgcaccatggcggcccggcttgtcagccgatgcggggctgtgcgtgcagctccccacagcggcccgctggtgtcctggcgcaggtggtccggcgcctcaacagacaccgtgtatgacgtggtggtgtcgggtggaggcctggtgggcgctgccatggcctgtgccttgggatatgatattcactttcatgacaagaaaatcctgttgctcgaagcaggtccaaagaaagtactggagaaattgtcagaaacttacagcaacagggtcagctccatttcccctggctctgcaacgcttctcagtagttttggtgcctgggaccatatctgcaacatgagatacagagcctttcggcgaatgcaggtgtgggacgcctgctcagaggccctgataatgtttgataaggataatttagatgacatgggctatatcgtggagaatgatgtcatcatgcatgctctcactaagcagttggaggctgtgtctgaccgagtgacggttctctacaggagcaaagccattcgctatacctggccttgtccatttcctatggccgactccagcccttgggttcatattaccctaggtgatggcagcaccttccagaccaaattgttggtagttgaagattcttattttgctaggggtcttgtatatctacatcttatcctagattctagggactctggttttcgatttaagctatagtttaattttaggcaaaacttttggttatgaggaccagtacctattcaggccagctccagtggagatggtctcatcgtaaatcctgtacagggagcaatctcatgggccgtcttaggttgtgaaataacagatagctggggctcacaggacaggcaccagagtggttgggaatgggggctgttctttccctctgaggagtctgtggtcattgaatctcttgccctctcattttttctcctttctgctcccaagcttcccctttttgcgatggtagcctttcctaaccctacatcggaattattccgctccagtgtgtggccccatactgaaactttccttattgctctctagttcacatatcaggagggcctggctgagtttaactcatggctggcacctgttcagtcatgtccagctttggctctgttggctgaggctgatgt

SEQ ID NO: 137131 - DNA, 970 bp, Homo Sapiens
  misc_feature (59)..(59): n is a, c, g, or t
cagccatgggcacccagctggtgtcgaatgaagtcccgtgtggtcagcatcactccaanaaggcagagttaacggcatccacaaattttttcctcatccatgctaacttagctctgctgcatgttcatgggacgtgggccaaaccaaggaactcaaggtgtctgagagcgggagcagagcaataggcccagagggaagaaatctctgccaggctacgttgttttctgtggcctctgataaatgcagagtagccacaacagcagactggtcatagttccagctcacattctggattccaacagcctgccgtactccggagttgtgaccatctgcacctatcaacaatttggtctggaaggtgctgccatcacctagggtaatatgaacccaagggctggagtcggccataggaaatggacaaggccaggtatagcgaatggctttgctcctgtagagaaccgtcactcggtcagacacagcctccaactgcttagtgagagcatgcatgatgacatcattctccacgatatagcccatgtcatctaaattatccttatcaaacattatcagggcctctgagcaggcgtcccacacctgcattcgccgaaaggctctgtatctcatgttgcagatatggtcccaggcaccaaaactactgagaagcgttgcagagccaggggaaatggagctgaccctgttgctgtaagtttctgacaatttctccagtactttctttggacctgcttcgagcaacaggattttcttgtcatgaaagtgaatatcatatcccaaggcacaggccatggcagcgcccaccaggcctccacccgacaccaccacgtcatacacggtgtctgttgaggcgccggaccacctgcgccaggacaccagcgggccgctgtggggagctgcacgcacagccccgcatcggctgacaagccgggccgccatggtgcagacctgcgccgtc

SEQ ID NO: 137132 - DNA, 1786 bp, Homo Sapiens
  misc_feature (1094)..(1102): n is a, c, g, or t
ataaacattattaaattttattaacaaaacattttgtacattttaatacatgtggaattttacatctaggtaaaataacaacacattcaaaatttaccatttatacaaactgttacagaataacaaccagtgggttaaataagtaaaataaaccacactgattttttaaattatctacaaaagatttgactttaaaattcccctgaacatataaaaataaattaattttacttttcaattaaatctaccaattagaaatattacaaatcaaaatatcaatgttatcttatgaatttgtcacaatacaaaacagattcacaaaactttatttacagaaatgaggtaagaactgtgcaatgtttaaccaagaaacatattgcagaattaacatgttcttccagctaagtacacagtggaggtctaattacagctgggtcttttccactaataattcacacaccaaagaagagtttgatgatgacatcctcagtgggggaatcactctgcggtactgtcacatcaaaagcgtggctccccaaagtggaagggctgtcatacaggtttcacctgtttcaggaactctagtggtgagcttttaatggtcagtaatgggaagtggtttaaataaaacaaatctctattcttaccaaatccactccttttcttgtgactcattagtggataaatacccaggtaatagttttgcctgagctatctacagtggcacagaaagttctgaataaaggcggaagcatgggaaggctgcaggtgacgggatgattcctgctgctcggaggactgactgtcccaccctgctgtctacagcccttgcagcacaatggaggcacttgatcaagggcaaaccccaccagcactttccacagtggcccctttctgaaagaagtatttagctttgaattgatctggttcccccagcagcctcagaactcacttaactcaagatttcttcaaaatatgagtaggtcttaacactaaagaaagcaattctcaaaagaaaattacctttagcagatgcagacattaccatcctaacttcattaccaaaattggccaaatcccattagaaaggaaannnnnnnnnaacaaagattgccaagtcctaggtgatgtgctatatatttgtaatactgaatcaatgcaactccaggagaagaaattagttccttggaatttgacttagagcaagcatactgtaacccaaacaaaagagcatatttcaacttgtacaataaaatcaagtagtttgtaaatggagcaagtatttagttttgctatttgcatctccaatttataaaccaaaactagttgtgtacccaactatattaaattcttggagttgataaaccatattgcatgtaaattatgtccactttaaaaagttattaaattttctttccatgttcgaaaaaactggggtaaggggtaggggcatgggaattccatttcagtgcaacaaagcaacaagaaaactaatcaaagccttacaagaatgtccttgcagcaattaatcctttgttgtgcattgagtttcttgttgcgtttcttcatagctgtagtaaaaggactgcaaaggcagccagatgaagtgctagaacagcaggataggcaatttctagatgtttctcaggtgtcaacttttctcttgagctacaggcccagttttatcactaagtcttgctactttctgacttgcattatctccatggatggtgagaaatgggttggtggtagctgtgtgaagtgggggtgcctgcctgtgccgaat

SEQ ID NO: 137133 - DNA, 755 bp, Homo Sapiens
ttttcctttaaatccctaatgttcacaagtcatcatgtggaactaaaatcacacacaaaggcaaatcatgaggaaacgttaaatatttcaaaatgcccacgaggcgtgccagaaacagtgctgtatctatagcacagaatcgttggaggccaaagctaaagcagtaggggctactgcaacttctagctctttactgctgcttttttgtttgtttgatagagggggattcaggtgagggggttcggtctctcaggaagttaggccataatttctgcaggttcagtgattaacttggatccatcccatgctgtcttgaactgttcaggaatgggaaattctctataatcaccatcctgagggataagtatgttcatttcagatgacttggcgctcacgatctcacagtctaatgcatcttcactgaggtatatgtggcaaccttctgtcttattaatggaaattgttggcactctccccattacctggatttgaatgtcctgggagttgatcacttccacaatgcccaccacattgtcaaacaccaggccgagtttcttacagttgtcaattataatggagtttactttcccttttatctgaatagttgatttttcgcatttgaaaatgtaagccacttgtttcagctcagtctctgaaatcacaaggtcattcctgtcctcttggtactccactctccatttctttccttccaactccaacactggggcatgtttttgagaaggataagatttagg

SEQ ID NO: 137134 - DNA, 979 bp, Homo Sapiens
  misc_feature (65)..(128): n is a, c, g, or t
gcgggcaggcgggcaggccggcaggcgggtgcgcggagggcttgtgccccgcagcaggtgggcgnnnnnnnnnnnnnnnnnnnnnnnnnnnnnnnnnnnnnnnnnnnnnnnnnnnnnnnnnnnnnnnnccgtgcgggcacgccatggacttcaacatgaagaagctggcgtcggacgcgggcatcttcttcacccgggcggtgcagttcacggaggagaaatttggccaggctgagaagactgagcttgatgcccactttgaaaaccttctggcccgggcagacagcaccaagaactggacagagaagatcttgaggcagacagaggtgctgctgcatcccaaccccagtgcccgagtggaggagttcctgtatgagaagctggacaggaaggtcccctctaagggtcaccaacggggagctgcttggctcagtacatggcagacgcggccagtgatgcttgtggccgattaccccctatgggaagacactgatcaaggtggcagaagctgaaaaagcaacttgggagccgcggagagggaattttatccacacgggctccatcagcttcctcacacccttgcgcaacttcctggcagggggactgtgaagaccatctcgaaggagaggcggctcctccaaaaccggcgtcttggaccttggatgcctgcaaagcgaggcttgaacgaaggccaaggcttgcagaagccaaaggcacgcttctggaatgatgaagtggacaaaggccggagcaggagctccgcgtggccccagacagagtctgaccggcaagcagaagtgacccgtctcttgctcggagggaatcagtagcactcacgtgaaccacctgcgctgactccacgagtaccgccaagtctcagaccacctactacgcccagtgctaccgccacatgcttggactgccgacgcagctggccgctccccggtgcccttttccggcccttccgtgggccaccgag

SEQ ID NO: 137135 - DNA, 1293 bp, Homo Sapiens
  misc_feature (101)..(109): n is a, c, g, or t
  misc_feature (265)..(265): n is a, c, g, or t
aacccaagccaggggcccaaattcccattgtttttcggggttgcccttgggaggtccaaagggagcccccccgaagctttggggggtttcccctgggccannnnnnnnnccccccttttttccaggcaaaaacaagggcctttcccccggagggggccagggctggccacagagggcccccacaggcatagtggccgcagcagtggtgggtgaggtgctgctcaggggtggggaggcgggctctgtggtgcccacgaaggtgccngggaaatctgcccagctgcttctgcaagtccagcatgtggcggtagcactgtgcgtagtaggttgtctgagacttgacgaactcgtggaggcagcgcaggtggttcacgtgagtgctactgattccctccagcaagagacgggtcacttctgcttgccggtcaaactctgtctgggccacgcggagctcctgctcggccttgtccacttcatcattccagagcgcggaggcgctggccgagagaatgtaattacgaggtctagtctcctgaaagtcaggcaccgtcgtggctttggcttctgcagccttggccttcttcagcctcgctttgcaggcatccaagtccagacgccggttttggaggagccgcctctccttcgagatggtcttccagtccccctccaggaagttgcgcaagggtgtgaggaagctgatggaggccgtgtggataaaatccctctccgcggctcccagttgcttttcagcttctgccaccttgatcagtgtcttcccatagggggtggtcggccccagctcactggccgcgtctgccatgtactgagccagcagctccccgttggtgacccttgaggggaccttcctgtccagcttctcatacaggaactcctccactcgggcactggggttgggctgcagcagcacctctgtctgcctcaagatcttctctgtccagttcttggtgctgtctgcccgggccagaaggttttcaaagtgggcatcaagctcagtcttctcagcctggccaaatttctcctccgtgaactgcaccgcccgggtgaagaagatgcccgcgtccgacgccagcttcttcatgttgaagtccatggcgtgcccgcacggccgccgcgcacggcccgagcgcagccggcagcccccggcccagccgccgccgccaaccgcaccccgcccacctgctgcggggcaccagccctccgcgcacccgcctgccggcctgcccgcctgcccgcccgccgcagccgccgagccatcccgggaattccggaccg

SEQ ID NO: 137136 - DNA, 477 bp, Homo Sapiens
  misc_feature (27)..(27): n is a, c, g, or t
  misc_feature (32)..(32): n is a, c, g, or t
  misc_feature (50)..(50): n is a, c, g, or t
  misc_feature (107)..(107): n is a, c, g, or t
  misc_feature (136)..(136): n is a, c, g, or t
aacctcccacggggcttccatccaaanctggnggtaacctaatttggggncctggaaattaaattaaatccaaccaattggcccccattttgggtttccccaaaaangatcactggcaacttaaccaattttaaangtggatcccattaatatatttttaaataggaaaaaagtttgtatatcatatatatcataattccatttatcgtaatacactcctctgctgagatatttaacacatcttcatctgtactctcttctatctctggcaagttgccccgaagtaggatgtttacacctgtggagtctagtctgttaatatcataaactgcctggctgtgaaacatccagaagtgtctgttgttgcaggaaggaagacaggaactacatggaacaatcacatgataacctacaatgttcccacattttaaacatgcgatgtccttcagtttacatttgcagattttggtgaaaata

SEQ ID NO: 137137 - DNA, 561 bp, Homo Sapiens
  misc_feature (111)..(111): n is a, c, g, or t
  misc_feature (352)..(352): n is a, c, g, or t
agttattagtattggtatgacccccaatatttcctattcaaaataaggacgttattgtctacaagagtattttaaaccaataatgagataatgtttgaaatagaaacaaanatatttgtgagtatttctggagtatctggctggtccatatcaactggaaatacagataacccaggtgtagatttctttgctcttagagggtgaaaaaagctttttgttgttttattttcagttatattggttttaattatccagcctccagcaaaattaaatacatatggattcaaagctgatagctaccatagtttgccaaaatacaaccagatgtttttcaaaatggtggaaaaattgntttttggactctacaggaatagaaccctttccccccaacactgggaaaaggttgttttctaggcattttcagtgttactgatatcccaggaactgtcagatcaccacccggcacatttttcatttttatctgcacttgtcttacatgcgaaatattttcttaattcatgtctcttttttgtagcatctttttttcccaagtaaatacca

SEQ ID NO: 137138 - DNA, 890 bp, Homo Sapiens
  misc_feature (210)..(210): n is a, c, g, or t
  misc_feature (803)..(803): n is a, c, g, or t
  misc_feature (817)..(817): n is a, c, g, or t
  misc_feature (871)..(871): n is a, c, g, or t
cagggagcagatctctcagccgacctgctctcatgcttcatcacactgctctagcccagagagacctgtgcaagtggatgccgttagcgggcagaccatcgcgctcagaacagccggagttgctgtcttcggtgtgctgccatctgtaagtcctggctctgcacgatcttctccacgatggcatccgcatcgatccgcgtgtcgtccacncaggtcgggtggctctccaccgagtccttcttccgcctgaaagagcgatcggacagatgcaggggccggggtggccgcggcggcttctccgggggccggtgctcccgctcactgccctcagggccctccacggtcatgccaaggcccccagaggcgctgctgctggtggacgtgttgcggcggtgcgtcaggtctgagaggctggaggagcgcgagtgctctgtgctgtagccggagatcttggactgctggctggcatagctggagttgcgggagtggccagagtggaacacctcctcagggctggacaggttctggtcgggttcctctggcagccctgagctgagaatagtgggccgagccttggggggccgggacccagtcagggagttggtgctgctgcccccactgctggtcccaccacccttacacgtcagctgcagggaggaatcctggcctgggatggagatggacttggcagtcgatggtggcgtcttgaagcagggatctccagagagcaggaacataccaatggtgaccttaaaggatggaagttgtcctggcgagtgttcttcagtgtcataatcccctcnagcaaggcagcaanccacccgtggaagcccgatcccgcaaaacttcgggccaaggttcaagttcagcngaaccccaagctttggaat

SEQ ID NO: 137139 - DNA, 1013 bp, Homo Sapiens
  misc_feature (12)..(12): n is a, c, g, or t
tgcatctggatntgatgaaagataccaacctgagataagagctgacttcttcacaacagtccagttcttgaactcctatgggaaaggtctttatctgcacttgtcaattcttgatataaccaatcatactaggatattacattataaaaatataccatatattggacactgatgtcagtacattgcagaaaatgtgtctatatactgtgtaaagtttattaacatttgaatgaaacactcttatttacacagtcaagtctggggtgctcaggacagcaaagtggcatgggatccactgctgtgaatttggaaatgtgcagcggtccttggcatcctggcacagaggcagccctcaccactgggcaaggtgagccagagtttatatagtttgaccggcttgctttgctgtcttcattcttcttcactttcattttcaggatctaagtcagaatctccatttaattctttttcacttgctgtatctctgtcctcgccattttcttcatcttttccttcggcatcctcatcttcctcttcaacgtcctcatctttttcactttcactctcctcctcatcttcatcccaattatcttcagaatccttatctgctatttcatcatcagactcctcttcagaagactcttcttcatacaccaactttgccttctgtccaggggaagttgctccctttgtcttctctgatgctgttacttgtgtaattagaagaataagctttccatgaaggtgtgaaagtttctgaaaagttttgactctgctttccattaactggtagagtgtccccagctggggtaccaggtcaggcaacgtggacaggtatgatgcatgaactgttaacacacattttagccactgaaccattagcacagcactattaggatgtccttgtaacctctttgtaagctcttgtaacaacggaataatagtatgcaggggcatccttaatacagtcttctttataaggtttacattcctagtttgaagtaccctcgtgc

SEQ ID NO: 137140 - DNA, 907 bp, Homo Sapiens
ttaggggcgagagagtatgaagtcgacggcgcgccgaattcggcacgaggcgcggagggccctcgagccgtgttcgtgctgttggaggagcgcaggccggccgactcggctcagctgctcagcctgaactctttgcttccggaatccgggattgttgctgacatagaattagaaaacgtccttgatcctgacagcttctacgagctcaaaagccaacccttaccccttcgctcaaggccacaccagccaccccagctacactctctgcatcgtcttctgcagggggctccaggacccctgccatgtcgtcatcttcttcatcgagggtcttgctgcggcagcagctaatgcgggcccaggcgcaggagcaggagaggcgtgagcgtcgggaacaggccgccgcggctcccttccccagtcctgcacctgcctctcctgccatctctgtggttggcgtctctgctgggggccacacattgagccgtccaccccctgctcaggtgcccagggaggtgctcaaggtgcagacccatctggagaacccaacgcgctaccacctgcagcaggcgcgccggcagcaggtgaaacagtacctgtccaccacactcgggcccaagctggcttcccaggccctcaccccaccgccggggcccgcaagtgcccagccactgcctgcccctgaggctgccccactaccggccccacggcagtgcgcccacagcccatgcgctgctacatcgggtcagctagagaagagattgagatgcatgatgaatatcacctgagtcagtaaatgagaaatgtactatgccgaagccaagatgactccaaacccctggcaggattctgatggaaatcaggggccccacatcttgaaactgcataatgcaataaggatttgacagaa

SEQ ID NO: 137141 - DNA, 1653 bp, Homo Sapiens
  misc_feature (1366)..(1366): n is a, c, g, or t
  misc_feature (1546)..(1554): n is a, c, g, or t
gtggcgagctggggtgaggggggactcttattttgttagggggaccgggccgaggcccgaccggcctggcagggctcgcccggggccgggcgtcatgtctcatgcggccgaaccagctcgggatggcgtagaggccagcgcggagggccctcgagccgtgttcgtgctgttggaggagcgcaggccggccgactcggctcagctgctcagcctgaactctttgcttccggaatccgggattgttgctgacatagaattagaaaacgtccttgatcctgacagcttctacgagctcaaaagccaacccttaccccttcgctcaagcctcccaatatcactgcaggccacaccagccaccccagctacactctctgcatcgtcttctgcagggggctccaggacccctgccatgtcgtcatcttcttcatcgagggtcttgctgcggcagcagctaatgcgggcccaggcgcaggagcaggagaggcgtgagcgtcgggaacaggccgccgcggctcccttccccagtcctgcacctgcctctcctgccatctctgtggttggcgtctctgctgggggccacacattgagccgtccaccccctgctcaggtgcccagggaggtgctcaaggtgcagacccatctggagaacccaacgcgctaccacctgcagcaggcgcgccggcagcaggtgaaacagtacctgtccaccacactcgggcccaagctggcttcccaggccctcaccccaccgccggggcccgcaagtgcccagccactgcctgcccctgaggctgcccacactaccggccccacaggcagtgcgcccaacagccccatggcgctgctcaccatcgggtccagctcagagaaggagattgatgatgtcattgatgagatcatcagcctggagtccagttacaatgatgaaatgctcagctatctgtttggaggcaccacaggactgcagctccccagcacgctgcctgtgtcagggaatctgcttgatgtgtacagtagtcaaggcgtggccacaccagccatcactgtcagcaactcctgcccagctgagctgcccaacatcaaacgggagatctctgagaccgaggcaaaggccttttgaaggaacggcagaagaaagacaatcacaacctaattgagcgtcgcaggcgattcaacattaacgacaggatcaaggaactgggcactctcatccctaagtccagtgacccggagatgcgctggaacaagggcaccatcctgaaggcctctgtggattatatccgcaagctgcacgaaggagcagcagcgctccaaagacctggagagccggcagcgatctcctggagcaaggccaacctgcagcctngcagctccgaattcagggaactagaacttgcaggcccagatccatggcctggcagtgcctcccactccaggggttgctttctttggccacgacttccggttctgacagcctcaaaccagagcagctgggacattgaaggagggagggcaaggccaagcgcaccaactttccagtggagannnnnnnnnaccctgcccccaaaatgctcccccaataaacagaccccctggtgaccggccctcaaaagagcccttttggggacctgccctttttccagggagacaccg

SEQ ID NO: 137142 - DNA, 735 bp, Homo Sapiens
cccgggaaagggcccaaagggggtcttttcccttactcttaattttaatccccctaatttcccccttgggggttgggaaccggtgcggggaatagccctagtcaggtaaggctggctttgaagaaattgctaggggtgttgaacttaaatttgtgacttttattcactattggggctgggtagatgccttgtatatttagaagagatcactgtttaagtttgggagctaacaggagttgccactggggatacaggtctgtggcatgtagtccctgaggaagaagaaatattgtggtctgggcacaaatgggtctctgctgaagggcctagaatttccaacgcacctccctccaggagatgggggcaagtacactgcctctctctccctcctgtgactagcatggtgatcagcctgagccaagtgtagcattgtagcctagggacaaggacacatgacagaggactcagtgtttgggacttgaaagggggtggtcccagggctccagggtcccttccagtacagatggggtgggctgagctgtgcaggaagaatcaaagcgaccaggccaacactggacagcaaccccttccttcctcacctcatcttcacactggattatgaccagaccctgctgcctcctgggaagccccagtgaccagagcaggaccaagcaccctcgtgccgaattcgccacccagcctcgctaccttaaaccgttagagtactggctcggt

SEQ ID NO: 137143 - DNA, 498 bp, Homo Sapiens
gcggccgccttccagagcgaggaccccgcggacccctgtgccctgctccagcgaaggcaggcccaggctgtgacagccgccagggctagcacacaggggcctggaagatacagatggggacggggattcggggaagtatgcctttcctgttgggctcacgcaccactacgtgccctgcagcctcagctctaagccgctggtcgtcctgcacctggtcctggagatgggcttctcgagggttctctgcttcactaactcccgagagaactcccacaggctcttcctgctggtgcaagcttttgggggtgtggacgtggctgagttctcctcgcgctacgggcctggccagaggaggatgatcctgaagcagtttgaacaggggaagatccagctgctcatcagcacggacgccaccgcgcgaggcatcgacgtgcagggtgtggagctggtggtgaactacgacgccccccagtacctgagaacctacgtgcaccgggt

SEQ ID NO: 137144 - DNA, 1469 bp, Homo Sapiens
  misc_feature (929)..(930): n is a, c, g, or t
cagcagtgtgaaggcctgtccagttttcccagccgcgaagctgtcctcccaacccgggtgcacgtaggttttcaggtactggggggcgtcgtagttcaccaccagctccacaccctgcacgtcgatgcttcgcgcggtggcgtccgtgctgatgagcagctggatcttcccctgttcaaactgcttcaggatcatcctcctctggccaggcccgtagcgcgaggagaactcagccacgtccacacccccaaaagcttgcaccagcaggaagagcctgtgggagttctctcgggagttagtgaagcagagaaccctcgagaagcccatctccaggaccaggtgcaggacgaccagcggcttagagctgaggctgcagggcacgtagtggtgcgtgagcccaacaggaaaggcatacttccccgaatccccgtccccatctgtatcttccaggcccctgtgtgctagccctgtggagaaaagccggggctggtggaggcccagctgctgcagcttttcagggttctgggtcagagtagctgagaagagcagcttctgcaggggcatctggggacagcaggtgttggcggctgtcacagcctgggcctgccttcgctggagcagggcacaggggtccgcggggtcctcgctctggaaggcggccgccaccacccgcggcagccaggactgatgcatgctgtcaatcatccggtcagcctcgtcgataatcaggaagcggagctgctggaggctgaatcctggggtctggtcgatgtggtccaccaggcggccgggggtggctaccacgatgtcagccaagcagcggtacccatcagctgttttctggacgaggctctcctgctccttggccagagacttctgtcccgtaaccagggagactctcagaaggtgtggcatctgtgtaagatgtnntgaaaactttgctcacctgctgggccagctcctttggtgggcagcacaaccagggcacgggatgtgggcagaccactctcgaaagcagggcctgcaccacagggatgacgaaggccagtgtcttcccactgcttgttggggcagaaacacagaggtcgctaggccggtagccacctctgcccaccagaaacccaccggctgcgctctccaggagggcaggaatcacagctgcctggactggaaagtaggacgagatgccgtgtgcccgcaagctgcttctgcaggtcaggatggacgtcagggatgtcctcgataggaaccaggtcttcggtgacattccttctgacacagttaggctcagccagccaccttggcaggaaaggctggaccttcggcgccttcctcttcccgaacccccccagcaccaggccggggaccaggggtccggccgcctcctccagggccggtccatctggggccgcctcggcgctggcgctggtgctgcgcctcgtgccgaattcgccacccaggcctcgctt

SEQ ID NO: 137145 - DNA, 674 bp, Homo Sapiens
gacctctgtgtttctgccccaacaggcagtgggaagacactggctttcgtcatccctgtggtgcaggccatgctttcgagagtggtctgccacatccgtgccctggttgtgctgccctccaaggagctggctcgtcaggtgagcacagttttcagcatctacacagatgccacacctctgagagtctccctggttacgggtcataagtctctggtcaaggagcaggagagccttgtccagaaaacgtaggttgtgtcagggtgcgggtttttcagggggtccctgctcagccctgcaggtggcctgaggcaccgtgggagcagaggaggggccaccatctttaaccacctgttcccgtgaagaggaggagctcccaccggcccccttcccatgtggggtggagtcggggctgtggggtgaggcagcgtcttgctatccggaagcccttgagaaagcttccttctctcgagctgctctctggtctgtagagctgatgggtaccgctgcttggctgacatcgtggtagccacccccggccgcctggtggacctcgatcgaccgagaccccgaggattcgagcctcgcatgcagctccgcttcctgattatcgacgaggctgaccggatgattgacagcatgcatcagtcctggctgccgcgggtggtggcggccgc

SEQ ID NO: 137146 - DNA, 736 bp, Homo Sapiens
tttttaaaatttaaaaagccaacctttattccactttgaacaagtttgtgaatgtccaaataaggctccttgaaaatttctccttcaggggtaagtatcttcacataaccttctttttccagaatgaagagacgttgcgagccatccccactatgcagggcaccaacgggctgccgcagcccactcacaacctcctgaatacagaagcagttgtgtttgtgctttctgctgatctcttccactttgtcatattcttccatctggtccaagtagttagatgctggtcctctgacttgttttcttggaaaatctggaaagcacaacccaccatcttttcttgcatagtaaaagcaaaactcatccgcagttgtttgaaggaaacctggaatatggcctcggcaagtgtaaaagaattctttgcaatagtctttgcagagcagaggaagtactaggtctctttccaagacttctctctcaggtgagtggaacaggctttgagaatgtggagagcaaagtgcacatttgatttcctccagtaacttcccacattctgtgttgttggtaacagaaaatatcttattctccaggcgccctagccccgggctgtcactccagagacagagggaggtggcggggacaaaaatatgtacagcgatgcaactttgcaaaaaataaaagacgcggcgatgggtccaatgccttaggggagcccgaggagcgagcctcgttccgaatt

SEQ ID NO: 137147 - DNA, 786 bp, Homo Sapiens
  misc_feature (574)..(625): n is a, c, g, or t
gctcctggctgtctctccgcaggcatcaggtcatccgtagggttattagccccggcacagcagtctctctcctcattcagcaagctccagctgggacatcagccgtctctgtctctccgttttgcaggcgctttcgggtgggttcgccattcaggcaccttctcctccttgctccggctcccttcgtttctgttccccagtcttagcatctccttcagagaagcccagacgcctcggccaggcagcagcagcttaaaggtagagcatcttcagcatcgtctgcccagagcagcagggtctgggcgcgggaggatgggggggaacgccactgcccagcaggggcactagggcgcagctccaggaggagtttgcggggctgtagggcactccagagacagagggaggtgtgcggggacaaaaatatgtacagcgatgcaactttgcaaaaaataaaagacgcggcgatgggtccaatgccttaggggagcccgaggagcgagataaagttgtgcggatgacaccgtttgcagttgtgccagtgtcagttgggttgggggctttctgctgcggctgnnnnnnnnnnnnnnnnnnnnnnnnnnnnnnnnnnnnnnnnnnnnnnnnnnnnagccacagatgttcacttgtccgtgtaacgggagttgtttaggtgggacagtagcaggaacagaaacggcgacggcggcggcggggcaggcggaggcacgggccagcgctgggctctagatgatgctgaggtctcctctgccggcggctgcagcttctcac

SEQ ID NO: 137148 - DNA, 735 bp, Homo Sapiens
  misc_feature (49)..(49): n is a, c, g, or t
  misc_feature (142)..(142): n is a, c, g, or t
tcccggtcactttcatctgtcctcctttccttctcctcttctttgatanctttgcataatggcttggttaaaagaagaatgttaaagctaagaggtgtcaaaagacacagcaaaaataagacagcatttcatttaagtaaancaatcctttcttaatggattcctctaaaataaatgtcttgaagtagattttgcttcctgtgtgcaaaggaaagttgacgaaggcaaggatgaaagagggcctttgaaaagagttaagtatttttttggctttggcacttaaaattttatttcacataaaatctcaaatgttccctagaacattctgaaaacaaaacaaaactatgcgcttggtcagcagataaaatcacctgccatgctggtaattatcaacttacatgtggtggttgggtgctcttaatgcagccctcccataaaaaccaatgggtttaattagatgagacacatctatctgaattggtttggctactgattttggttagcatggtttcaggaaagtgacgaatacctgtatttcatttttaaatctgaaaaacaaagataaacttcttgataagaaatttaaaggtgaataaaaaatatcagtccataacattttaaaaggaaaatatttatcaatccatgggaattatttacttatcttaaaaacgatttcttcccttgctgttttctccattcacttccagaaacccaataatttagttggtataattc

SEQ ID NO: 137149 - DNA, 462 bp, Homo Sapiens
gtgggagctgagtataagaattttttatcatctaatcgtgaatcatatggaaacataataaactctcgtttacctgaaccaaaacctcgcttaaaaaattcacttacatacttttcaacaacagaatgaaaatttatggcgcttatatttttgaattcctttcgacactgaatcaaagaaaattgtaaaaactgagctatttttaatacatctggcatgctctcatgcctctcctgtggtgctgcattggttgaacctttttgtgaagtaactatgcttctaggttcttgaaatagaaaccaagcatgtaggactccgagactttgggcagtctgatattccatatggaggaaccatctgataaggggagagaagaaaaaggtatcctcggtctcccaaaggtttaacaagaacaagtttttctctgtctagtttttgcagtaaaactctcccatggttact

SEQ ID NO: 137150 - DNA, 1217 bp, Homo Sapiens
  misc_feature (18)..(18): n is a, c, g, or t
  misc_feature (83)..(83): n is a, c, g, or t
ttggccaattcctaatantccaactttaaataaaatattaaacaaaaatatttaataaactggaaaccttaaatgaaaatgtnatccatcaaaatcaggtaaaaagcaaacttgtccgcaagttaccaaagcctagatacgcgttagatgcgccttttccggcctgtgcgtctgctctggttcctctcaggcagcaaagctggggaaggaagctcaggcaggagcctccccgacgccacagcggcacaagcagcagctaaagcaccgcactttgctctgctaaccttttacttaaatgaggttttgccaaatccacatctggaaccgcgtcacacccatttgcaaggatgtttgttctttgatgaaactgcatctctactgcacatgagggctttcattgtaggacaagaggagagttcgtttatttcttgtaactgttttacatgttccgattagttaatcggtagcttatgtcatgtgctatgcctgttgtcttctaatctctccttacttaacattacttcaaatttgaattgacccttgtttataatttacttaacgggatttgtgtgtcattgtagagcaactctaattcaagaatagtgacaactttaagcacctaaacgtacgttcagcaatatttgttcatgcttaatttatcataatggcttatgcacagtattcccttcaactccatatacacataaatacaataagtaattacattttatatgtaaacgtcattctttttaaacaacaagaaaaagcaaatgtaatggcatgccccaattttcactccacataaagtctcatatatcacccaactggtttcctctagtgggttagatgttcatctctgcgtttccattgatatttatcctttgaaggcacttgggtttggggttgctggcaggaggtgaagaacccatcagagttaaggtcaagggacaggaggtgcttgcttagagagagaagccacaaggaccacaatgaactgaggtgtctagggaccatggcatgcacaggcattgccggaaatgcagcaaatcttgtttaaatatctctgcattcgtacttgaggtctgagaaatagaccatttcttgagagaagacaaatagacccagccgcccgccagcgtaggtttggtcatagataggtcctgagtctgccatgacctgttttccttcatgcactaagactctgatgtagccagtct

SEQ ID NO: 137151 - DNA, 291 bp, Homo Sapiens
aaatccatcagtaccgatgtggcaccacaagagttggagtacttggaactgttctgtcttcatcatcaaaaaaatgctgttgcatgccacctattcctggagtcaactgaaggccacgtcctacagactgccttcgggtcatctgaattctctgaactggtggtcccaactcctgaggtggggcatgaatggtcagtcttgggggaagtggatgtggtgggcgtctcggtgactgaggtgctcgaggggcctgtctttcagatgctgatgatggctgttgttctctagaaa

SEQ ID NO: 137152 - DNA, 807 bp, Homo Sapiens
aaatgctgagggatgatcaagccatcgatagcgatctaaggagtgcacacagttcaggaaatggataaacaggtgcccaggaaggcaactttaatgaaactggttctaaaacaaaggatacaagagacctaaatgatccaaaaagagtgatggcttctcattttctgtcccctatagagaatataaatatcatttcttctggaatccaacacactggattcattttcaagatgtatcactttattttccagcacgtgacagtcacatgatttctgcagtgagccccaaagcttccacgagctttcctggaacctacggccagaagagtcctgagatttcaaatattaaagctttctccacagccacaagtccctttgatgtttgggttattgaacacaaactcactggataatttgtcttcaacatagtccatttctgttcctaaaagtgttagctgtgctttcttttcgatgaatactctgactccatcttgaataacttcttcatcagaatctccttttgtctttgtatattctagagtataagaaaggccattacagcccctggttcggacaccaacttttacacctacatgctcaggcttatctttaagaagttgttttatcttgtttactgctgaaggtgtcagggtgagggctgcccgggtgggctgcagcttcctcttgctcacagcccggacagttgcccggactaaggaagccgacatcttcgccgtcccggcgccccggtgcctcgggccgaaggtcggccgcctcagcttctctccatggacacggcgggcgcatt

SEQ ID NO: 137153 - DNA, 755 bp, Homo Sapiens
  misc_feature (491)..(491): n is a, c, g, or t
tcggacatggttctcttacatggtcatgtctttaatttctccacttcccaccgttaacaaacgaagaaattctgaaatataatttgtaaccatatgctgatattcactggtaatagtcagatgccttatcaaccttagtccagccaactgcacatttgaattcaagggataggtgacagtgtcttcacatacttggtttaagtaagttttaaccttcctatggttttcagcagccactgagatattattcagtgcatttaaagccttctgcctaacactggggtagggattattgagcaagctttcaataactgaaattccacctacattacgaacaacttcatgagaataagaataatcagcactgttatataaagcattattggctatttcatgaacagaaggatcttcagtcatctcaatcatgcaaatgagtttttcaagatctcgtggatccatattagcttcgtgtttacagcggcaaagaccangggccggagttttttccccagtcctggtttgttttctggactcatcttcaactgggaagctggcctcactttggtgtgcaaacttagtttccgaccagatcatggctccatcccatgaccccattcctgccccagggaccatgtacggatatatgcctcttgactcagatgactttttgctttagccttaggtgcagatttgtcctcacttgtgttttcattaccagcacagaaccaagaccctatatcaactccaccagcagc

SEQ ID NO: 137154 - DNA, 500 bp, Homo Sapiens
tttgtcatttaatcaaattccaacaacccaaccagggccagtcaaatccaccacagtctcgcgctgagctaggaataaagttcacgtaatcacatgagagtggagaaaagtcccccatccgtaagttcaaatcaactcaaagttcacagtgtgacatgatggcgtcatgtaacaaggctaagaatcggttgcatgacaattgccgtcaagtttcgtggaggtgctgtgattggagcgtttttcttggatgttgtatcagttgatgattggccagtcatgatcacacgtgcattttcttgacttttgtgctgccacaatcttttttgctgtgctcattttcgtttcgttcttggtgcttgcagtggttttactttctgttgtttggtttttcttgttcagcgtttttttatgcttctcttccgcttcactcgccttccacgcttgctccagagactttccgggcaagggagaactgggaactttcatcttaaaacaactag

SEQ ID NO: 137155 - DNA, 550 bp, Homo Sapiens
  misc_feature (131)..(191): n is a, c, g, or t
  misc_feature (314)..(333): n is a, c, g, or t
tttctctatcattacaattaaaagtcctacaaaatatgcaaatttatttacagaaaaacagagccggcatcatttaaacatccctgtttttcaaaattccttgtaaacagtttcagaaattcttcaaagannnnnnnnnnnnnnnnnnnnnnnnnnnnnnnnnnnnnnnnnnnnnnnnnnnnnnnnnnnnnaagatgaaagttcccagttctcccttgcccggaaagtctctggagcaagcgtggaaggcgagtgaagcggaaggtgagtgaagcgcgcgcagctcccagagggaagcgagaggcgaggatgannnnnnnnnnnnnnnnnnnnacccgggcgacgcgaccgttcccgaccgacggcgtggcctccaccggcgtcggcagccaggcgcccgcaggtgtggggcgagttcggcctggcccttggggacaacggcatccgactgcactcgcggggagaagggattgatgctctgtctaaactctacaaaagtacagtcctacaacatctgggattttagcagtaatgctaacttctataggtt

SEQ ID NO: 137156 - DNA, 508 bp, Homo Sapiens
  misc_feature (94)..(115): n is a, c, g, or t
  misc_feature (273)..(327): n is a, c, g, or t
atttatttacagcaaaaacagagccggcatcatttaaacatccctgtttttcaaaattccttgtaaacagtttcagaaattcttcaaagattgnnnnnnnnnnnnnnnnnnnnnnaagggtgggggtgtgtgtgcgttgtctagttgttttaagatgaaagttcccagttctcccttgcccggaaagtctctggagcaagcgtggaaggcgagtgaagcggaaggtgagtgaagcgcgcgcagctcccagagggaagcgagaggcgaggatgnnnnnnnnnnnnnnnnnnnnnnnnnnnnnnnnnnnnnnnnnnnnnnnnnnnnnnntggcctccaccggcgtcggcagccaggcgcccgcaggtgtggggcgagttcggcctggcccttggggacaacggcatccgactgcactcgcggggagaagggattgatgctctgtctaaactctacaaaagtacagtcctacaacatctgggattttagcagtaatgctaacttctatagg

SEQ ID NO: 137157 - DNA, 807 bp, Homo Sapiens
  misc_feature (432)..(492): n is a, c, g, or t
  misc_feature (615)..(634): n is a, c, g, or t
  misc_feature (796)..(796): n is a, c, g, or t
ggcaggaggccctagaggaactggaaatttgttcttctaaagggaaactggtaggtctgagaacccccggcctccagatgacctggacatcaatgagaaggaatcaaggcagaatgccaaagcaatcttcccaagggtgcaaataaattataataaatatgttatactttaaaatatatgtgttcttaaataattcagtgttttttctgattctgagttttttaagcaatgtctttaactgctctaaagtcatttaccaaagataaatatcgtgctttcattaaatagttttccttgtttttttctctatcattacaattaaaagtcctacaaaatatgcaaatttatttacagaaaaacagagccggcatcatttaaacatccctgtttttcaaaattccttgtaaacagtttcagaaattcttcaaagannnnnnnnnnnnnnnnnnnnnnnnnnnnnnnnnnnnnnnnnnnnnnnnnnnnnnnnnnnnnaagatgaaagttcccagttctcccttgcccggaaagtctctggagcaagcgtggaaggcgagtgaagcggaaggtgagtgaagcgcgcgcagctcccagagggaagcgagaggcgaggatgannnnnnnnnnnnnnnnnnnnacccgggcgacgcgaccgttcccgaccgacggcgtggcctccaccggcgtcggcagccaggcgcccgcaggtgtggggcgagttcggcctggcccttggggacaacggcatccgactgcactcgcggggagaagggattgatgctctgtctaaactctacanaagtacagtcc

SEQ ID NO: 137158 - DNA, 672 bp, Homo Sapiens
catctccttcagcggcttgccaccagggaatagggtcccagcgtgaaccgatgtcgactgtcacctgcgcagaaggtactaccacgtgtgcgttgaggttactgggtctttaaaggtaagagggaaggcgcagggagggaatagatcgcgcggtagggggtttgaaccaaggtggagattcacaaagcagacttagggcggcgacgtgatccggtgacctgtgcgggcggcagcctcctgccctcctccccttcgtgcgccggtctggagcgaagaggttcttttgacagccgtgagcttccccgccagggacttactggggctgcatcacccttggtacgtggctttgggctgtggaaacgctgcctctgtggaagtctctcctcgcgggggtggacgggtcgctgcgcgcccagcgttcttctgcggtttctcacagcccgccagccgccgccgcctcggggacccttgcggggaggcctcaggtcagcgccgcccttgcgatggcgggagagcagagcggccccagggcctctgagctccggccccggcacgtcccgccctctcctccgcttgcgggagccggggcgcctcggagggaaaccttccggacacaggccgggagaacgaggggccgtggcgccctcgcgcagcttcctggtttcggccatg

SEQ ID NO: 137159 - DNA, 2130 bp, Homo Sapiens
tttccattttattccaaaagcatttaattgaatttctcaatgtttttcaaaaacaaaaagatccaaattagaggtaaaaaggaacatggaaaattccactcaagtggtgtcacgatctcagggtcatgctccaggcatggcagaacccaagcaggcgcaatacctgccctgggcccagctaaaccttctgactaccacacgctgtagaccacggccagtgctccctgctccctgacccccaaacaccccagagatgggggcctgagcaggtaaaggccagccgtgaccctgccccagcctaggcctgtctgctggccttcagtgccatcccacccctgggcaaggcaggcttagcagctaagggaggctgggggtcacgaggccatgcagcatgaggctgagacgccgagctgctttgccaagtgagttgtgtggctcagcctgcaggaactgaaaaagcttttggcgcacctgggccataacggagcccatgtggtcccgagtgatggggtcactgtggtccaggtgcatcacggcctcttccaggtagctgagcttgaggtcagttcgagtgccaaggtcagatgccagctgctggatgagggaaaggagcacaggctgggagagcgggcagggtggctgcccaaaaacctgggctgggtccacagtttcacacacatacagcaccaggttcaggtcagcagctgtcagcgcctgctggaaggcctgattgaggtggccctgctgcagcagctgcaggatatgggcttgctgggcctggcagtcaaggtgggcagaggggacaggtgtgccagcagctgagcgcatggcctgcatgatgctggaggtgacggcggcctgctgctccttgagcgccacactcacctcacctttaacgatgcgctgtacctgtgctaaaatggactcctgcaggctgcccacagccacatgcagctggtgctgcacctcagcacgaacactgccggccacggtggctgccatctgctcagtggcactctgcagtgtgctgaccaggccccgcagctgggctagcacaggctccctggcctcctgttcccgtgccttccggctcttcatgtggctttctagctgctgcaagtattcctgtgtccccagccggaagctatcattgatttgctggaacatggcctggcagctcttctcaaaggccggcagcaccacactctggaaggcttcccggtaggcagcctgcatcggcccttgtaatgtgtctgcagctgctcgggcgatggcatcagtcaagttcttggacttgagcagcttggagatgttctctttcatgctgccctccacagctgtgagcttggtagccactgagttgctcagttggcctgccataggctccagactccttgagacacatggagggactgtcttcttgatctcatcccgtatgctgcgctctagccgcccagctacagctgacgacagtgcttgggacaactgttgtgtcagctgctcctgcagctgccctccccgctgctgcccctcagccagtgctcgctccagccgccgctgttcctgctcgtgccgagtctcaagggcacgttctacgtggcctgtgactgtgctctgcaggccttcgagttgggtacacagacgctgcagcagctcttcctggctgtgccgcagctctgccagctctctctgctgttgccaaattagtgctggccagtcctcagggggctctgccacctggtgctctgtgagccgggatcccatggctgcatccccatcatccttcttgcttttcctcttgagcttgggtgaggttcgaggggatcccttggtcttccagtccttggcaggcagccgtggagcaggaactttggtgccaaagcctcctgaagcagaggcaaggctggccacctcatcatcatggtcactttgctcagcactggcatcctggctgtcacgttgctgcagcaggtgatatggtggtcggtggaaggccaggctcttgtgcttttcctgaaggccattcctggggctttctgccagggtgctgcaggtctcacgagtaatgtcaggtgctgtgggccaaacctgactgtcaggagtcgaggcctcctgggtcaaggctgcctc

SEQ ID NO: 137160 - DNA, 665 bp, Homo Sapiens
ctggggtcacgaggccatgcagcatgaggctgagacgccgagctgctttgccaaagtgaattgtgttggctcagcctgcaggaactgttaaagcttttggcgcacctgggccataacggagcccatgtggtcccgatgtgatggggtcaactgtggtccaggtgcatcacggcctcttccaggtagctggggatgggggggaaaaggacaggctacaggtgggtgcctagcagacgggagcgccccctggtggcaccgaggcccagagggaaccctctgggtgaaggcagaaaggactggtggagaaaattagggagaggattcaggcagaagtgggcttcagcttcaaactgctccctcccactgccccactccccagctcatctccccatccctggctgtccccacttacctgagcttgaggtcagttcgagtgccaaggtcagatgccagctgctggatgagggaaaggagcacaggctgggagagcgggcagggtggctgcccaaaaacctgggatgggggggaaaggacaggctacaggtgggtgccagcagacgggagcgcccctggtggcaccgaggcccagagggaaccctctgggtgaaggcagaaagcggacgcgtgggtcgacgatatcccgggaatatccggagcggtaacag

SEQ ID NO: 137161 - DNA, 645 bp, Homo Sapiens
ttttgaccgcagaaagtctttattcctgagttaaaatcaggttctagaactacagcccgtcccccagggcagccaatgctagtagggcagatggaaacctctggtggaggcagccacagagttcacggctcgggcctgtgacccacgatctcatcctagccctttcgacaggtacgggtgatccactcatgctcgtcatcatctgcgtttcttagaaagcggttcctatagtccttgactaccctcgtgactgggttatagaagccgtctccacaatcgtaatagcccttggggatttttctaggtgggtccatattggtgagttgagccatacctgcaggcttcaagccattgaggatctctgtgtaaaacctccgatcatagccgtcgcagtaatgccagtttttctcatcatagtgcagcccatctgagaacgtatatgtgccctttatggccaatcctgttttcccaaatggcgtcgtattggcttccgctggggaagtacagggttccctcgccgtgaaacatgccatccttcatttccccaacatatattgtttcggtagggaggatgtaccttgctttgccctccatcctcccatctacatattccccgatatatttgctccctgtgtactccatggc

SEQ ID NO: 137162 - DNA, 1633 bp, Homo Sapiens
  misc_feature (44)..(72): n is a, c, g, or t
acgcaatacggctaggtacgaggctgggtgtttaattcggcacnnnnnnnnnnnnnnnnnnnnnnnnnnnnnagatgacagtgcagaggaggggggtgcagccaggctgaatggccggggcagttgggctcaggatggagacgaaagctggatgcagcgggaggtctggatgtctgtcttccgctacctcagccgcagagaactttgtagaatgtatgcgagtgtgcacgacgtggtataaatggtgctgcgacaagacgactttggacaaaaattgacttgagtaggtgtaaggccattgtgccccaggccctcagtggcatcatcaagaggcagccagtcagccttgacctcagttggaccaacatgtcttaaaagcaactgacatggctcgtcaataggctgccaggactgaaagacctcctcttagcaggctgctcttgttctgcagtttctgccttcagcacttccagcatgcccccttctcaggacccttgatgttcggtgggcagtaggaatcaaggaccctcaaattcgggacttgcttactccaccggctgataaaccaggtcaggacaatcgcagcaagctccggaacatgaccgacttccggctggcaggccttgacatcacagatgccacgcttcgcctcataattcgccacatgcccctcctgtctcgactcgacctcagtcactgcagccaccttacagatcagtcctccaatctactcactgctgtcgggtcttccactcgctactctctcacagagctcaatatggcaggttgcaataaattgacagaccagaccctgatctacctacggcgcattgccaacgtcaccttgatcgaccttcgaggatgcaagcagatcactcgaaaagcctgcgagcacttcatctcagacttgtccatcaacagcctctactgcctgtctgacgagaagctgatacagaagatcagctaagacacacccagcccagattcaacaggaaaccgatcttcccctgactccccaccgaggagagcctctcctcgaccctgcacgggctctgaggccagcgtcacactccctctctgctctcctgtcccttgagcccttcctctacaggtggggcagagagggtggtggacaccaggcttatctgcctgctcctctccctcctaaggaaaagggagtagcagattgatctgaggggaaagcacaggctgtgctgtcgaggcgcctgctcgcttactcgcctgccaggaggccgggctctcagtttggggtgtttgtgcaaccttcatctgcactgggccctgtgcccctcctccccatccatggtccccagcagtgcctggttctgagcaaactcccagggaagaaaacggccctgtctccatggccaggttcttgtggtgtccagtgcgcgtctctcctccatcacactctcccggcttgcgcaggaggggccagcagccccaggagtcccagacccgtgccgatcacactggtgctgttgagatctcccaaacctcacgtccttaactgtgctctccctcctttcctctcccttgagcttggttttgcccagcactccgtgcttgttcacataattaggtttcccacacccacccaagaacagggttt

SEQ ID NO: 137163 - DNA, 686 bp, Homo Sapiens
ggcattaatgtgaacaggtccccaaggaaagtaacttagtatgcctgtactaccgagtcaagtagtagttgtgaaggcagctcaaaggtcattgtgtgtcacgttaaggctctttgaatacttagagtttatttctatgtagacaagtagttctggggtaatttgagatattcatcaaatgctcaatatattgtaaatcaaagcctttatataaagcaaatggacaagtttagaactagattataataccccaactccccactggtttttataaaagatgattcttatatctcatgcccttgtggaaaatttcattatcagaagctggcaataaagggaaaaacatataactgaaatacattacagaagttatgcccagtcacgccataccagatatagagagtccatattcagagtaacagtgcaacaaaaacactttgagtactattcattaattgtatattttaaatctaatttggctacgtatggattatatatagtttacgttacaaataaagccaagtttcaatatgtttgttgatataatattccctcaattatatctggtaatgatatttaaaacagcagggttttaatttcatttactgtctttatccacatatccatatccacatccccggccgtaatggccgaattcccgggcatatgtccggtaccgtcgactg

SEQ ID NO: 137164 - DNA, 1670 bp, Homo Sapiens
  misc_feature (201)..(201): n is a, c, g, or t
  misc_feature (1418)..(1451): n is a, c, g, or t
  misc_feature (1541)..(1541): n is a, c, g, or t
  misc_feature (1552)..(1552): n is a, c, g, or t
  misc_feature (1634)..(1634): n is a, c, g, or t
agttcttcctctccccggaccgcgtcaatagagtcggggtgtggtcggcgtagtgactggtgttatcgagctgtggcatccgggtatgtctcactcgaggagtgttatgggcggtgcgcgctgcgtaggaccgtgcgggaactggagtcaggggcagccgagtcacgggttaggtcccggtcctatttccaagtttagacnaggctggcgagtcgagagctcgcgcatggcggagattcaaaccgggtacctcgcgggttctttatctttcctcgccaacgagtggagcggtgggggttctgtgcttgggcgggggcgttacgggttgctagtgggtagagcaggcgacaaattccggtcgggggtgcggaattgaagggggtttttataggggtatataattcgcgcgtggtgaataggtgctttctttcgcgccagatgttaagcggcatgggtttttccccaaacgccaaggtccgaagtcaaccgctgtggccaagggaatcgccagatcccgtttttgggcattaccagggtttcaagagcgcaaaggttttttccccttggggttgttttccaggaaggcggcaggcccaacgtggggctgggtttttattggccgggggtcgaccgccaggcatttggatgaccttggggagcccgggtgggggggttcccagcaagcatggcttgggaggacagaatggtccccaggtcctgccagaatgaggggtctgggcgccggtacagtgggcgttccaatgccagatctggtctgggcgggggaaaccaccagcagcttccgggcatcaaggagtccaggaggataaatgctttccccttgagggctttgtaagtcatcaaggctgccagggaagaaccattcattcatttcctgaatttctccttgccaggccctatttcatcggtccattcatgcaacaaatgttaccacagctatggagaaatcaacagggtgatatgggaatccggcatccgcagttgagggaatgggttgtcaagccagactgatgggtcaggagccccctctactgtttaccagcagtgggagcctgggcaagtgattcaatctcaagccccactggcatctctgtaaaatagtaggtgtgaggattcaatgagccaatatatccaagattacttgcgtgccacaatttaataaatgttagctattcctgttgaagcataaccttggagaaaggttactttacaggggggtgaggagtggggaagtgagagctgagcttcattcttgatggatgaggagttagtcatgtgaggcgcttaggttaaaacttacattcactataactcagtaaagcagtcccgcccacttctccgacccatgcagaaataggccttagagagtcacatgtctcagttcagaaatctatcgnnnnnnnnnnnnnnnnnnnnnnnnnnnnnnnnnngttctctgctattccaccctggtgtccaagcaacatggtagggcagaaggaagaggatcttacaaagagtaagggaaagggagagggacnttaggctgctnctcagagccaccaaaggacaaaataagacaggtgtgagcccagtggaggaggcacggggcagagaccagccactgttgctgnacgctggtgcacgtagcactgtgcctgtgccgaagc

SEQ ID NO: 137165 - DNA, 531 bp, Homo Sapiens
  misc_feature (15)..(15): n is a, c, g, or t
agatgaagtgatacnaatgcttggactttggctttcaaaaccaacctggatgtgagacctttctcaaactcccattttgtacaccccaattgactggagtggtgctttcccaccctcatccacagatcacagagacacagctaggacagaagaattctcctctaacagcagatcaccttcatttgagaacggcttggtctcaggtccctgggctgctgttcctgccttgagcttttttgtcggttgcaagccacgggggttgctatgcaaagtcccaacgcatggaaccagagttaatcattcacaggcctttttgcctgaaataagatgcttttcatttcccttggcttatgtgaataatgaaaaaagaaaacaaacaaaggagataactgcacaatgttaaaagataatcccttagcataactattgtctagaaggctgagcaccgtagtcaggcaaaaatccagtctgcattcagtgactacactgacatttatttataagagattatgccgtgaccctgtgccgaag

SEQ ID NO: 137166 - DNA, 1118 bp, Homo Sapiens
  misc_feature (20)..(20): n is a, c, g, or t
ggaggaggagaggtcggaantgtctccaggagcccttagagaccgagtcccggcggcgacggcggggcaagcgcaccggcgaggcggattcattccacttaaaacctgaaaacattggaccacacaaagtcttactgatttcaggtaaaaacaataattgaagatgtccagcaaaacaagcaagcaccaacaatatagccccaggcaaggagaactgtgcagcagttaagattagaagcctccattgaaagaataaaggtttcgaaggcatcagcggacctcatgtcctactgtgaggaacatgccaggagtgaccctttgctgataggaataccaacttcagaaaaccctttcaaggataaaaaaacttgcatcatcttatagtggaatagagaaacagctcctccgcctcttcccaacaacgcaaatttatgagcagctcctttgaagaagatttaccttcagcttatttggtaaccactgctaataactaaaatgttctcagcttggaataatggactctgaagtctctattttccaagttgtcctttctcttaaaataccctttactgatttaatacagaataacaatcttattttccacttggtaactatggctttatgttgggttactgtttaaggaaagttgatctggggcctttttaaaaacataattaatatactttagaaatacaagggattccgatatgtcaggaccttaaatggcctaagcacctgtcaaattaaaattccaaaattcattgaaatcctaaagccttgatattatattctttataaggcgtgtgccagcctgtatagtatataagagagaggggtgtttgtgtgtatatatatatgcctttgtgtatacacttatcaaagctattttcttatgaaaacgtccctctctccataccatcagtttctcagttccagaagttatacctttattttgagctgtgtataggtagaataaaaaattcctttcatatcgttattgtccaaaaagtaaagagtatcctaaagattgtattcattgtaatcaagtaatgcaatcatctttcctttcttgaaatctgctggccctcttaggcttcaatactctgtaccatactaaa

SEQ ID NO: 137167 - DNA, 431 bp, Homo Sapiens
tttttgtggctatactgaaactattgttttaaaattttatttataaataaaagatatatacatatgtgctttaatatgattaacaggttccattttgtacaaaatgttaaacctagagtcctctgcgtcctggatgaggcgtccaaagggtggaatagtacagcattaggacctttgttctcctcttggcttctggaagagaaactcttgcatgccctcgactttcaccgcaaaaataagtgagaaaaaagataaatcccatttatgcaatgatatgtagctatgagttaatcacggtatttcattccatgaaatccattaagctgctggcatttgcatggctctaagtttattttaagaggctcattcaaacatggccaggaatatattggcctcttgagagtttgcatggcaaggagttatacagcagg

SEQ ID NO: 137168 - DNA, 463 bp, Homo Sapiens
  misc_feature (385)..(385): n is a, c, g, or t
  misc_feature (390)..(390): n is a, c, g, or t
gtggtttcagatgtgttcattttattatgcttttaaaacttaggtacatgttacatatattcattttaaatgccttgatacaaataaaaaaggaaagcacatatatacaaataagaatgccactatcatgggataactttgaacctgcttaaagttttctcaattaacgtattcacaagcttcagtactgtaactattagctggcaaatgtcttacaacacactatatacatgtcatgatgctagggttagaaatcatcggtcctgttagagtacttagaccagaacaatagtaatgcctttttcatgttttaaaatattaatatacccaggggtggattcccctttcaacttggttatatagtcctggtactttggcagtatgncgcangccagggctacctaaaggtttcccctccaagcctcctggtcctcctaaggaattttaaaagccaggtcactgg

SEQ ID NO: 137169 - DNA, 280 bp, Homo Sapiens
gtgaagctaaatatttaacattgttgatttcagtaagctgtgtggtgaggctaccagtggaagagacatcccttgacttttgtggcctgggggaggggtagtgctccacagcttttccttccccaccccccagccttagatgcctcgctcttttcaatctcttaatctaaatgctttttaaagagattatttgtttagatgtaggcattttaattttttaaaaattcctctaccagaactaagcactttgttaatttggggggaaagaatagatatgggg

SEQ ID NO: 137170 - DNA, 838 bp, Homo Sapiens
  misc_feature (157)..(157): n is a, c, g, or t
  misc_feature (263)..(263): n is a, c, g, or t
aatttatttttgattctttgttttctttttcgtccaactaaaacaactgtaatgtacttgatacatttatatcaagttctaaagtatttagacaaatccaaatactttgtttttagttttttcctcctttccatcctgttaaccacagtgaaacgcntgcagtattttgatttggtcagtgctacggaggaagaccatgaaagctgaattggtctgtgccacccagagtaaacctcttctcttcttctggaaagatggcgtgnatgtttttcagggattctaataaatatcccgcagtcatctcctgagcagctttcctctgtttcacttcgggaactccttcccccactttcttcactccagtttcttcacttgcagcgttttctgctaagaaagacttatcatcttgtatctgtttatgcctctcttctttggggcccctggatgtttttgtggatttttacagagtatttatatctgcacagcgtgtattttgttatacattcttacaagcattgatattggggggtacatttataatagtgagaatatctggcagaatgtgtgaatgccatatctgtagatgacgatgaatgtgaagggttaatgtagaaatgtttgtttattctgttacagctcaaaatggaggctgagaatctctaccaccattcccttctctatttgagaatctctaccaccattcccttctctatttgggaaacaatactctcttattttgctatttttaccttcccattaactgggcttcactccaacagtgccagatacctatggagaagggaagtaaaaccaccttaggtcaggaataataaaccaa

SEQ ID NO: 137171 - DNA, 563 bp, Homo Sapiens
ggttactggacttctgtaccgctacaagatagtagagaagaaggtgaaagatagcatagcagtagaggtctatagtgtccagaatatccttgagaaaacatgtgagttcacccaagaggatgaacaacttgtgcaggaaaagatggaagctctgaaagccacccttccctgctctggcctgggcatctcagaggaagagcgagtgcagattgtcagtgccataggttatcctcgtggtcactggttcaagtgccgcaatggccatatctatgtgattggcgattgtgggggagccatggagaggggcacgtgtcctgactgtaaggaagtgattggtggcacaaatcatactctggaaagaagcaaccagcttgcttctgaaatggatggagcccagcatgctgcctggtctgacacggccaacaacctgatgaactttgaggagatccaggggatgatgtaggaagatggtacaccactgccttttgccctcgccactgaatgactggggccagctccctaatgaaggaactgaagtttgttttttattatcatccttttta

SEQ ID NO: 137172 - DNA, 1081 bp, Homo Sapiens
  misc_feature (722)..(735): n is a, c, g, or t
tgggggatggtcccttagtgtgcaagtccactttttattgggacactgaattttccataaccctgacttgcacataatagtgttaattagttattttctaaatggtacagacataaaattcataagatactaaactgggagtcaggacacctgagtcttaccctcagctctctgatgcgactttaagcaaagtcgcttgctctcttctggacctcagtttccgttgatttgtaaataacagataatgatttctaagatcactcagacattgtcaaaagttctatgaacagcttactgaagtctattgagcttgcgtcactgttcacgtgccaatgagtggggataagttgtaagcagaaaaatatcattacttcacagtcttgttcgttcactatcaacacttgaacaccaacagccttgaatgggaaatcgagtccactattgttttctctagttaaacagacgaatcataatcgaacagagtccagtgagtccctctgtcgcaacaagttcaggatcactcaagcaggtaaccgcacacaacgcacaatgatgaagagcataaacacaagccataagtatatttttatgtcgctttttcttaggttattgatgcatttccagaatctcttcatttctttgcaataactgaaaaccccagaagaaagacaccatttacattaagaatgtgatcaatgttacaagcttctgcaccatgtcannnnnnnnnnnnnncaacctcaaaacttgccagagcaagaattttgtctccagagccaaggtctgtagagactttctcaaactggctgagtatagcacctgcatttgctgacaagaaggcctcatcatctgcagtcagcttctctccaagtttcctaagagctgttagtatctccactttctgttgagtgtacaggtctctttccagctttcctaccatcagatctctatccatctctgctaaccttgtccgaagctgacctggttgtttctttgcaaacaatctgatgacctctggggttataaaggcctggctgatagctgcctgaatagccagctgcattccacttagttcatctac

SEQ ID NO: 137173 - DNA, 1038 bp, Homo Sapiens
tttcattaatttttagatgtaatttattatttgaagagaaaagaaaatctctgcatttcccaaaagcgcttacatcatattcttgtgctgggctttaacttgggttcatcctttgcttccattcttgcagttacgcatgtattcacaggtcctggatctttaacaggaagctaatcttgctggggacatcaatatttttgctggggtgtgagtctagcaggtagttcatgtaacttgggggccgtccaaggtctgtagagactttctcaaactggctgagtatagcacctgcatttgctgacaagaaggcctcatcatctgcagtcagcttctctccaagtttcctaagagctgttagtatctccactttctgttgagtgtacaggtctctttccagctttcctaccatcagatctctatccatctctgctaaccttgtccgaagctgacctggttgtttctttgcaaacaatctgatgacctctggggttttaaaggcctggctgatagctgcctgaatagccagctgcattccacttagttcatctaccaaagtcatatttccagacataattttctttagtgaatcattaaattcacttagttgctccagagtttcctttttggtttcttcatattcatctgtatcaagttcctctctgcattcctccagatcttgtaattgttgcatgagtctatccaactgttcttctaaattctgctttaatttgcttgtctctgtctttcctctggaagccattttaatctctgtctcttagtactctgatctctgcacagtgccgaccggtctcaaattgcacaaacctccagttcttgacgttccgagtgtcataaacttgaggaaaatgaaattattcatcaggactacaaaaggctcaaagttcaaaccacctcggggtggagatgctgacaaaaactgggacaacctccttaggcccccgggattccccctgtgccgcctgaccgcccgccagtcccagagtttagggccaggggccccgcctacctgagggcccc

SEQ ID NO: 137174 - DNA, 373 bp, Homo Sapiens
caaatttttaagccataggatatcataatgaattggcctaggaaatgaaaaacacacagcaaccaaatcaatttaaagaaattttacctctgctaaccttgtccgaagctgacctggttgtttctttgcaaacaatctgatgacctctggggttttaaaggcctggctgatagctgcctgaatagcctagaaacacaagaaggcaaaaactaaccaaaatagtccaacaaatcagatattgcaataactgattgacggatccttaatttttatcaaggtttactggttcctgtcatggaagcaattacacaactaaatgaagatctggaaggatatgttgtgtatgcataaacagacactcatctagaagtta

SEQ ID NO: 137175 - DNA, 372 bp, Homo Sapiens
  misc_feature (29)..(29): n is a, c, g, or t
  misc_feature (54)..(54): n is a, c, g, or t
  misc_feature (66)..(66): n is a, c, g, or t
  misc_feature (68)..(68): n is a, c, g, or t
  misc_feature (141)..(141): n is a, c, g, or t
  misc_feature (350)..(350): n is a, c, g, or t
  misc_feature (359)..(359): n is a, c, g, or t
attttggaaagaggagacagggtgctctnaccaggtacaccccccacggcaatnacacgggtgcancncttccacggccccgcgctagtccagagcggccccttggtggccactcagtaatcaggcacacacacggctccnacgtgctcagacgcaccccagtttcacccacacacataaagggcaggacaggagactttggggtccaaggcagggaggcttctctgctgtagttgcccaagagcatggggaccaagctagccccctctaacacatgatacttcaccaggcaccgtcacccacgaacacctccagcagccacgctgaagaggctgagtccagatcacacntgagccccngacggccccactg

SEQ ID NO: 137176 - DNA, 595 bp, Homo Sapiens
  misc_feature (524)..(524): n is a, c, g, or t
aaacagcaatcccctgttgctggatcttaaggttttcttccactttttgaagaaattttcaaacagaacttgaagcaaattcttttgcatatctcagactatatgcctttaggatacattcccaagagggcatttcttgccaaagggaagcacacttttaaggttgttgatatcttcaattgttcatttcccgcagttggatacagagggggcagcagctgaaacctttttcaagactctagtctgcacattcgtggtaagtcctgaccccagggcccacgctgcggggggaggagggattgcacctggacttaaatggtctgagcgacgcatgttagcatgaatgagctggctcattagttcatgttgcctccgccaccagcagcagataggacatacctcaaatgtgttgtggcagtatattacagtaaattatgacaattagatattgtacctttgtgggtgcaaagtcctactgtgatcaatgtaaacatggaaaaacaatgtaatttttatgatcctcnatgtgggatttctccatgtttttactataagaggaactgcaggccgggcgcggggctcacgcctgtaatcc

SEQ ID NO: 137177 - DNA, 328 bp, Homo Sapiens
ctgtttagggatttaacaaaatggttgagataacagtcacgttctgtttgatgaagagtatcacttcattccatttttgtgtttttgttgcatctccaagtcagaataaatgccttttggagcagatatatttcatttagcatttagtatcatcttcatcaatactcgtatgaacgaaaaaataaaaagccctctcttattcccactctacaacgcatgtcaaaggtgatctgtttagtttttccttagtatcgaacatatcacagctactcaatgaagtttcttctcaactaaagaaacacagtctcttagagaatttgttcctgtg

SEQ ID NO: 137178 - DNA, 187 bp, Homo Sapiens
ttcctgatgccttttattgtataccttttgtagaaatggaagcgctctgtgaaaagtagaaactgtttctctccttgaaggaagaagtgtctggccctggagacaccagacttctgcgtgtactcgcagatgtgggtaaaattcaattcctccttcttgaagtaatttcgaagacgcacgaagtcaa

SEQ ID NO: 137179 - DNA, 1074 bp, Homo Sapiens
  misc_feature (627)..(674): n is a, c, g, or t
  misc_feature (885)..(986): n is a, c, g, or t
cgaaaaggtttcaaaagccccatatatgcccttgtggttcctgcaggtaccttctctgtccttgcctccctttgtttggcattttctcatcatctaacttgggtccctgcactagaggaggtaggaatgggttggcggagtggggggtggtgagctgtaccccaatattttggagctggaagttcctgggtatgatgcagggagaggtaccacccttcctaagccaacagtctcactccctcctctcattgctccccattccagctcccacctcccaggattggtgtccagagagtgggctgtgggtgagtctactgcatgcctgcagcatgtgagtggatccatgggagtggatccaccagcacatgtggggtgttagcatgagatgatccacctgggcctgtgctataaggtatgtgggcacaggcctgtgcagtcttaggctatctgtgctttcatttttcttcacacggtggcaggtctacactgcccagccccaggggtgggccttcctcacctcttccctcttgattttcagtctcagctttccagtcccctcccccaaaccagcaatagcagaagcagctgtatacacatcttgatctacagacaccctatacagccacnnnnnnnnnnnnnnnnnnnnnnnnnnnnnnnnnnnnnnnnnnnnnnnntaatcccaaacagagccacatgtgctcagacatacacagtcctgataggaactgccccttcgcctttctacagagacacacaactccgccccaccccaacctttaggtatactgagacacacagagattgccccctccccaccacagaaatttctatgaagaaactctttcaggtataaaaggatcttcaacataatttcagctgctgttnnnnnnnnnnnnnnnnnnnnnnnnnnnnnnnnnnnnnnnnnnnnnnnnnnnnnnnnnnnnnnnnnnnnnnnnnnnnnnnnnnnnnnnnnnnnnnnnnnnnnncggtccaaggctgtcagcccattgcactgctgagccgccttctgaactgtaagcagaccctcgtgccgattaaccgccgggctaccat

SEQ ID NO: 137180 - DNA, 615 bp, Homo Sapiens
  misc_feature (51)..(67): n is a, c, g, or t
  misc_feature (325)..(355): n is a, c, g, or t
  misc_feature (357)..(385): n is a, c, g, or t
tttgtgtttcattttctgtttattacttgaaatcacggtgctcgtgtaggnnnnnnnnnnnnnnnnncaattttatgttttcatacatgaaactcacgccaggtgccgggacccccacagcccgaccccccgagggcgggtaatgctttcttgggcagcccttaccgggcagagggtggcgagccggttcctgcctggaggttccaccctcaaccagtggaggcacagacgttatttaaaaatcgttaaaaaacaaaacagaacacacatttaaataggtatccaagacagttcttcaaaaaacaaacccgccccttttactccnnnnnnnnnnnnnnnnnnnnnnnnnnnnnnngnnnnnnnnnnnnnnnnnnnnnnnnnnnnntccttgagctctaccctctgggacccctccctgcccaccctcccacaaaaaaatttacagcgctacagttataacacgtgatgttcacatctgaaaccattaactttcaacacataaagggggggagttgaggacctggggttcacctacgagaacaacggtgggggacaggcagagccaggacaagaccgacaggtggggtgaggaagggtccagacatctcctcgtgc

SEQ ID NO: 137181 - DNA, 826 bp, Homo Sapiens
  misc_feature (296)..(332): n is a, c, g, or t
  misc_feature (373)..(373): n is a, c, g, or t
acatttttccttttatggttggggtttttttgccaaaaatgaaaccaaaccaaaacccaaaatccttgagctctaccctctgggacccctccctgcccaccctcccacaaaaaaatttacagcgctacagttataacacgtgatgttcacatctgaaaccattaactttcaacacataaagggggggagttgaggacctggggttcacctacgagaacaacggtgggggacaggcagagccaggacaagaccgacaggtggggtgaggaagggtccagacatctccattatcattnnnnnnnnnnnnnnnnnnnnnnnnnnnnnnnnnnnnnctaccccattgaaatggccccagtagggggatttgtccctncccctctggagacagacaccccttaggggcaggggcactgagaggcagggggtccaaattagaccagcagcggaccccgccacgggggttaatgctacacggagttgtcgccccctgcccaggggattcacagctcagcaccccctcccatcctcgctgcaggaggggcccccagacagtcccaaatccacatccctcaggttgggccgggaaggagggctcggaggggggaactccccagcacccagccattctctcccctttttcaagagttccccaaccactattggctcagtcagaaaattaatagtctataaataccccaaactcaggcaggaggtcagaaaacacgggagttgaggacctggggttcacctacgagaacaacggtgggggacaggcagagccaggacaagaccgacaggtggggtgaggaagggtccagacatctcc

SEQ ID NO: 137182 - DNA, 1034 bp, Homo Sapiens
  misc_feature (46)..(104): n is a, c, g, or t
  misc_feature (457)..(498): n is a, c, g, or t
aaaaagttctgaccgtggtttcctggactcttcatgggctttgctnnnnnnnnnnnnnnnnnnnnnnnnnnnnnnnnnnnnnnnnnnnnnnnnnnnnnnnnnnntgtctgtctcctttcacctctgcgccaggtcggtcctccctgccaaccttccccagctccaatatgtagcagtctctctggatggcggagagtgaaggagacggagaaacgcgccccatcccttccgccgctcctttcccccccgaccctattcaggttttaagtcaaaaatgtcgatatgtcattatgcactttacagatgaggtggaggggccgcagtgcgcagaacccaccccaccccccagtgcagacttcggggtctccacgcccaggccagcagcgcccactgggctacagcaagccaacaggtcacagaagccaacgaggggactgtttctcttccactcctatcnnnnnnnnnnnnnnnnnnnnnnnnnnnnnnnnnnnnnnnnnnaacaaggagagcaaagctgttttagcagaggctggggctgaggtccccatggggtttgggtgcaggcgcatggcaccctttcctgtcgggaagggacggacggggaaaacttaaccccgaagcaaggcctggacaatccaaaacacagaaagcaccaggcccgagacggaaggatataatagacaacgctacagactccaccacgtcaggcgcggcgctaagcaacgaacggaccatgagcagacgtaacgaggagcagctaaagcaccagaaactgcgcgcgagataggagcgacaagcagagcagcggacaaccaagagaccaggacagcaaaaaagggccgaacaggcaacggcgcgtaccgcagtccaggcaagctcaggaggacacaccacaaagacagaggcccccaccccctcgccagcgcgcacacagcgtaggcatccattgtgggacgtgaggggaaagaccgaggaagcacaacacacagcaaacagaaaggcatggacaaggaaatagcaccgacctacgcagc

SEQ ID NO: 137183 - DNA, 1099 bp, Homo Sapiens
  misc_feature (56)..(56): n is a, c, g, or t
  misc_feature (85)..(85): n is a, c, g, or t
  misc_feature (247)..(247): n is a, c, g, or t
tccaaccccacagggattaaggggatagtccccggctctgctactaatttgctatngtgacttagccccaagtcacttaatctcnctgggcctgtttccttatttgtagcaagagaggaatgggggagatgttcactgaaccccattccagctgcaaaagcctgtggttttaatccaatcctgctaggctatgatcatttaaacagcctgatgtctccaacttctgggtttgggagctaggtagccncaggctgtcacaagagatgaatttcctttacagacaggacgcctcctaacaggccatgttctatgggtcttgccagccccaagggcccaagaaaaaagcagcagcttataggatcatttcccaagggcagaatttgtgacagcacaggggcccagggccccctggccccatcaccagcagttggtccaaattcaaacatttttcttgttgcccagctgtgggccccagtgaggcctggtgagcaatgggtatctcaggccacaccaaccattcccatgtccaccaatatggagcaggagcttgcaaagcccagattcaggcagggactgaaagttcaacttccggccttgccatggctgaccctactctttgcatgggcggcttgtgcactcccctcacaatgtgaagcacatatggaaattccagccgtcctggtgctcctctgtgtagacttcctccctttcctcctccagggcagccagtcctctccacaggtgggccaccccaagtcctggcaaccatctcagtctttcctttcctgattccccaatggtagcgggaccacttttactctgccagctgtaaggatctatctgaaacagctggtgggacatgtgtaaagctgatagagtcccattctctggccagcaaatactcccaatagtctttcctaagagtggctagggcccagctgcagggagctgtctggcacagtggcagtgaagtctggcctaggggaccaaggattccatccactccctggagtagcagcccaagaacctgcctccacaaggtactggtttctcaacagaaagcatccattctctcagagatcccgggaattccggaccg

SEQ ID NO: 137184 - DNA, 606 bp, Homo Sapiens
  misc_feature (282)..(282): n is a, c, g, or t
  misc_feature (436)..(436): n is a, c, g, or t
tttttgaaaattaactttgtatttgcaatcaaaggcagcaaggtggcacagtgtacctttaagaggtatctgaatacagaaatttgattgccccttctgtgtccaacctaacttttatcatccgttttagaaattaaggtacatgaggaaacgaaaattcagagacttttatggtgcacaggacaaaactctgatggccaaactcacctttctgatggctaaactctgaaacaaaattcagagactccccaaatagcctctttttagagagcccactatacntttagcacattttttagcgtgcctggagcagtcctgatctcaaaagcatcaacaagttacacattaattataagcatatggcctcttatgggacatgctaccagagaaaccgcccatgtaagtgctgttgtataagtgtacttctatccctgtntgagattatgctcctcatggtcatccctaactatctgcctgcaggtgttcctcaagagagagtactctggtatatgtgaacaattcaatgagatgaagttgggctatgatactgttgaaaagagtacataacaaaccagcatacttctttatagccagctccaagacaag

SEQ ID NO: 137185 - DNA, 1102 bp, Homo Sapiens
  misc_feature (944)..(944): n is a, c, g, or t
tggcgtcctctttgcttgcgggcgagcgattggtgcgtgctttgggccccggcggggagctggagccagagcggctaccccgaaagctgcgggccgagcttgaggccgcgctggggaagaagcacaagggcggtgatagctccagtggcccccaacgcttggtttctttccgtctcatccgggatctgcaccagcatctgagagaaagggattccaaactatacctccatgagctcctagaaggcagtgaaatctatctcccagaggttgtgaagcctccacggaacccagaactagttgcccggctggagaagattaagatacagctggccaatgaggaatataaacggatcacccgcaacgtcacttgtcaggatacaagacatggtgggactctcagcgacctgggaaagcaagtgagatcattgaaggctctggtcatcaccatcttcaatttcattgtcacggtggttgctgccttcgtctgcacttaccttggaagccaatatatcttcacagaaatggcctcgcgggtgctagctgcattgatcgtcgcctctgtggtgggtctggccgagctgtatgtcatggtgcgggcaatggaaggcgagctgggagaactgtaactggtgcttcatcatcaagtctagagaagactttgggggcttcaggctccaattggcagtcaccgactcagtcaacccatcagactttttgtattcagctccagttagtcagaagaccagcccaggccagctgctgtttctgtggggagccctaatcttctgtgaatttccaaagggagcattggaggagattgagataacacatctttaaaacagaaagaactggtcttggtctatcagtacctcttcctgaatctggtacccatctgccttctccagttcattctaaacactgctgggactagggttttccatcangagcaaatggaatccagccttccagaagtagacatactgccttgacttgtcatatgtcaactaatcaccacttctcatacattttatgcagactgtattgagtcagagcctcagaaacaaaagatcccttcccatttggctgaaagactgatgaaatc

SEQ ID NO: 137186 - DNA, 824 bp, Homo Sapiens
  misc_feature (287)..(296): n is a, c, g, or t
  misc_feature (553)..(553): n is a, c, g, or t
  misc_feature (557)..(557): n is a, c, g, or t
  misc_feature (747)..(755): n is a, c, g, or t
ccttttgttacttttcatttgcctctaattttgcttgctcatatttctggccaatgtacagcctcatatttttcagagtaatacagatacttgttctcattccgtatatgagcacaagtaaggtttcagagcaacacacatgagaaagagagtaacccggaattgtacttgtcaagcaaaatctatactcctattggagtggatgctgatgaacatcgaacatatctacttcattagagcagaggctatttttctgcattcttgtccctataacagggatgcttaannnnnnnnnnaacttagagttttaaattgccaaacaagggaacagccttgaataggataaattttcagagggctgcctaaaatattttatttctagcatcctgattctcggacttttcattataattctgagcaggaaatttataagaaattgaaagagcagaagaattacagccctgtcacatgtgcccagcactccgccccatgccttgctaaatgtagactaaagaacttgttgaatgctaaggctgaaatcccaccctgcgangatnttgtagtccaggattacaaccagaagggaaaagtatgacagattttctacttaactagaatggacacatgatccacaattttctcttcaagggaagctgttgtcaaattatggatattactggttagttgtcattaagtaagatccaggtcaaattccatttgacaaatcccagggactatccaggaaannnnnnnnnaactgggatattgtgtttgagtatgtgagtcttctgataaaactcagaatttccttttaagcagttgta

SEQ ID NO: 137187 - DNA, 352 bp, Homo Sapiens
  misc_feature (84)..(186): n is a, c, g, or t
tgggccaagcagtcctcccacttcagcctgttggagtagctgggactacaggcacatgccaccatgctcggctaatgttttaannnnnnnnnnnnnnnnnnnnnnnnnnnnnnnnnnnnnnnnnnnnnnnnnnnnnnnnnnnnnnnnnnnnnnnnnnnnnnnnnnnnnnnnnnnnnnnnnnnnnnnataataggcatgggccactgtgcccagttggaagtgcttatttgaagaatttcccatgctgttggttttgtagaaatgtgttgctttttgtaaagagcaaatgattggttccttccctggagtgggggaatgaggaggaatagaattaattcaatatttcagttag

SEQ ID NO: 137188 - DNA, 1275 bp, Homo Sapiens
  misc_feature (63)..(63): n is a, c, g, or t
  misc_feature (129)..(142): n is a, c, g, or t
tcttgggctagctgggccctggcctccaaaatcccagtagaaaacagggacccggagaaaccnccatcaaatacaaagccccagaccacctgtactgccccccggagatatttattttctaccaaaccnnnnnnnnnnnnnngatccagccccaaatgcagtataaactttgtaaggaataagcaacacagcccttgggcagaagagagagcaggtggtagaaattgatgacactcgatgccggcctgggagcgcagagaacatcctccaaaacagctctatttagaacaagtaagtgggaggaggccaggggatgaggggactggggagagttgaaagatttagcttcagtaatgcctctggtaagatcccatgggggcctgtggctgccccatctgtgctgtggtctggctaaccaggtgggagagagcagggccactctggatcagggtatccagagccttctgtacacttggattgtcaaagttgatacctgtggaagacacaggcctctggctagtcatgttgctagcaggtgccaggcgactggaaggctggccaaaaagcccttgggaaggagccccaggtctggggcccatgttctgagcagatcctccctgtcccaaaatgcttggaggctgattgccagaagcctgtgatctttgttgaggctggctgtttgctgctgtggaaaaattctggtttggggtgtttccggcagcaaccgagggggatgcagagctgctattggccgtcactgtgccactattgaagaggctgaggattttggcctgaagctcttgctgggaggtggggggtgcagatggaagtgggtgtagcagaggggagcacttggccgctctggagcggttgggagcttggctgtgtcttcagcgaggcacccgaggtcgccccgagtggttggcgggaaatcgggccaggcagagagtcggtgctgctcctcatcagccgctccttccgctctcgcaggtagttgatgatcttgtcagtctcttcagcagtgaggtacctgttgtctgccagcaggttgatgaggctctggatggctggagggtggccctccagcgcactcgcctcgctcaagggcctcctctctactcttctcctagcaggatggcttcatcggccatcttggctgcctgtctggcaatctcctcacgttcctcgagcgcgtgggtcgacgatatcccgggaataccggaccggtaccagcctgctttttttaacaacgtgttcataggtacagaagcgtgg

SEQ ID NO: 137189 - DNA, 436 bp, Homo Sapiens
  misc_feature (24)..(24): n is a, c, g, or t
  misc_feature (127)..(169): n is a, c, g, or t
aattccttggagcgaaataatggnaaaatggggggtaaaggaagaatggagcactcagtcatttgtgggtcgggagccacaatcaccacacacacaccacagtcagcagaaatgccctttcctgaannnnnnnnnnnnnnnnnnnnnnnnnnnnnnnnnnnnnnnnnnnattttctgagacacatactctgaattcttctggaagagaagaactggcttgagagggcacaggaagcatcccaggaatggaaactagtatttcccagactcaaaagacaggaccagtcattgctgcagaaacaagcagggtgactactggtctcttgggtccagatcaccattttctttggctgattggcttcctgctcattcctgttcccaattttatcctaggactttatctccaatgaggccctttttcaactgccatgaccta

SEQ ID NO: 137190 - DNA, 274 bp, Homo Sapiens
  misc_feature (18)..(18): n is a, c, g, or t
  misc_feature (242)..(242): n is a, c, g, or t
  misc_feature (264)..(264): n is a, c, g, or t
tcagcagcagcgatgagngttggactgcaaaggaacttgaggaatcttttgggggcgatggaagtgttctgcatgttgatggtgacagtggcttcatggcatatacatctgtcaaaataaccattgagttgtaattctaaacagatacagtttactgtaacttgataaagctgaatttaaaaagctgccagagtattctgaaatcatgccttcttttctccctctggaccaagcacccgccngaagcaagccaactttaacaanattatctcat

SEQ ID NO: 137191 - DNA, 156 bp, Homo Sapiens
tctctttctagaagtcatttatttacatattatatgtccgatatataatgtgtagataaatgtatactgcagtgaaagtgaccactctactgaactgtacagcacattataggacaaattattggaagttttcatctcatactggtatcttttaat

SEQ ID NO: 137192 - DNA, 1033 bp, Homo Sapiens
  misc_feature (299)..(299): n is a, c, g, or t
attcagatccaccactctggattttcttccaaaaacaaaagccttgccaagaagttgccaagttggcctatatagatcttctaagtccaactgccatctctctggttcaagatatcgaataaggtcttccaaggtactaaaggcagttatagcattattaagcaggtccagtggcaaagctgaagggggtagcactgaaggactcacagcttctgtgaattgtggcatgacaatgttgtagtggatgcagaacccctggttcagaaggaaaatattccatcagatacaaatcttatccntaatttgatttcctttagaaatctgttttccctggtacagtaccagaaccacaccagcgccctaatatagttccatcactgggttcctcaacttctacaaaatcatacttgcatatgtcatcttctgggtcttcaagcccaaatctttcatcaaacgtaagttgtatccatacattttcctctactgctactaatctccataccaagaccgtatttcttggataagtatgaggaaaccttgggctgtgaatacttccattagtagacacagtaataattctctcatgctgaggatcttgtactccttctaaatgttctttctcctcttttctatgccagtccagatgcttggatatagttcctaccgttctgttccttgttgctggaaaactggaatttactactcaggttggattccgcatgagtcccctgtctctggccggccagggcagatgtcagcaggagaagcccgaagaggctcatttggctgactggggtgagagctcactcacggcgggcactttggaagcagcgactcccgagtctctttcaccaccgccaggggaaggctgcactggggtggaagcgccgagcctgctctggcagcagagaatcgcagggtagtttccacataatcccatccaaaactttttcctagagccctcttctgtgtctccagttttgaaaaggatcaaagcaaaacctggacctgagccagtctcccaaggtctaaa

SEQ ID NO: 137193 - DNA, 983 bp, Homo Sapiens
  misc_feature (187)..(187): n is a, c, g, or t
  misc_feature (224)..(239): n is a, c, g, or t
ttgaaaaagtaatcagaaaccataaacatcaatagcattcttccacagtacatttatattaagactgtcttctgttttcaggattaagggttggaaatttcccattaaaatgcaaattctcacatccttacttgtatttttcctatgttaactgtaagttaatacaagtaaacacggctatattatnagaaagatcaactactcggctccatagtcctgactcnnnnnnnnnnnnnnnngtacagaccctgtcagtgcaacaaaagaaagtttcggatttttttccttgtttttgcaaatggcagctggaattgcaggagtattttgtagaaaagccagaagagcattagtagatgtatggaaatatacggtagggcacacgctgacagtacttttcccaagccacgccgtatttcttcttacagtggtactcgtcacgagcttctcggtggacaagcaacatggtgaaataaattatgtagaaataaggcagaatgtggttaaaaccacatgggagggaccacgccaaggccatgatgagatcacccaagtaattggggtggcgaacaaagccccaccatccagaaactagaagattttttcccgttgaagtatgaatggtttttaaatgtgcaagctttggatcactgggatttttccggaatgcatttttctgagaatttgcacctcggaagattacataaccacaaagtttcagaacaataattagagaagccattggccaagacacttcatttggatgactgactaaataaaaggcttggaagctgtaaataaagggaacccacaccagtctccaaagccagcatgaatccaatccatcgtggatgatgtccatggtcgtcaacacgcttcctcattccagagagcatccaccacatagagaagctggaaactattaactaaaatcatggcccgaacgcgtggtcgacgatatcccgggattccggaccggtaccagc

SEQ ID NO: 137194 - DNA, 1288 bp, Homo Sapiens
  misc_feature (489)..(498): n is a, c, g, or t
ccaaatagtacaatagatttatcaataaaacacctttcatattaaatgcagaccatattattaagtatgagggcaattttaagttcagaaaccaaacacgtaaagggtactgtaaagaaatgcttccataaccactgtgtctacttaactaacaaaatataattcttctctgaagtccccagatgtaggcaactactagttaaaagcagatagcatttagaaacaaaaaaaaccaactccattttcaaggaacttaaagagattatatttcaacaaattaagtcctcatttgtatgcaaaattattcttccaatcctctcattactgacagatgatgagtcaatgacctttaaacaaggactctgcgctaggaccctaaactgtatgttaaagggttagtaggttcagtacattctttgtggttttatataattgctttgcaattgattaaattgctttcttttaaaggaatatattaaaattcctttnnnnnnnnnngcaacattttttgaaagaagggatatgcagctataatttcttaaatatgcataaaatgaacatatgtcaaaatcggaaatgctggctattcttgcactcctaacataggaaaatggtttttaaaaaattaaagaaaaaagccaaacatccttaacttacgaaacttaaggagttttcacaattcctaagtcaatattcctgtactaagagccttgactatgaagaggcaggaatataaagaacctcaataaaataaatacagtaaaaacaaaacaaaacttggtatatagaatacttaaatcttttgtttttccttttatgagatcaacattgctgaacatatactctagaaaggaggctaactggaggctttttgttgtaaaacattttagtctagtgaactgaaaaatttcttagacatccacttatgctagtccactgccacagaactagttcgcagcctcagtatctagaaatgattattctttcctctttttcatcagtcagatgagcactggtataatgatggggtgaaaagttactgcagctgtgtccaatttaatttttagtgcagtgaggactgtgaatctgtctgaattccaataagtgatggtggctgttgaccaccaaccgtggacaacaccggtcttgggtttagacggggtggcatggaattagcagggcgaataagaggtggtggaggctgatttaaagttggccggggctggatgaaccgagcctgctgctggagtggaggaggctgccggtgaagagccggggcagcaggcag

SEQ ID NO: 137195 - DNA, 528 bp, Homo Sapiens
  misc_feature (72)..(80): n is a, c, g, or t
  misc_feature (305)..(305): n is a, c, g, or t
atggtcaatgaatacaaaaattatttataaatgcacatatatttacaatgacatccctgggcaatagggacnnnnnnnnnttcacaagaatacaaaaatctttgacctgggtacccagttggtcaagcctgggattcttgccaaagaccttgaatatcaaagcccccagtctcaactatctgcctgaaaccaactgaagaatcccaggcacacttcccagaaggctccaaagttatttttgctccttggaaagcaaagtagaacatcgaagtagtgatgttttctcaggaccattctgaaggctngggcaaagactagggcaatccagcatgttaagcagcaatgtgactcttcctgacaagcagatgcacaccagggcacatccccatggaagcatcaggaagcacatttgccccgtatcttccctctgccggtgctgcacatttttgatgagctgtacccatttctgtcagctgttgccatttcttcatcaggtataagaccaaacaacgcatggcccaccttggt

SEQ ID NO: 137196 - DNA, 419 bp, Homo Sapiens
tttttttcagttctactcagcgtttatttttcatttgaagatagtggaaatcgtagaaatcatggacaatacaagttggtcttgcctggtaaatgtccacatgaatctgttagcctctaagtacaggtacagtatttttttaatagaaagacagggcaatatggcagttaattagcaaccaatactgtcaactacagtggatacaaagttttatcatataaattaattgccattacaaaaaggcaactgctttagctaagaaggtacaaaaactggaaacgtccataaatattacaagaagctaggtgaagaaatacataacagactgtttttcctatataatatttgaatatgcaaaccaagacacctgtggcactttacatgaaagtaggaaaagggacttacacttcagattggta

SEQ ID NO: 137197 - DNA, 421 bp, Homo Sapiens
  misc_feature (204)..(204): n is a, c, g, or t
  misc_feature (395)..(395): n is a, c, g, or t
atttcggcacgtggagaaggaagaggctgctgtggccactgaggctgcctactcagaatgggaggatctggagaacctggacgaccctgagaagctgaaagagctgattgagctgccgccctttgagattgtcacaggagaacggctgcctgccaacttctttaaattccagttccggaatgtggagtacagttcccgggaggncaatgaccttcctctgctatgtggtttgaagcacaggggcaagggggggcaaagttcaggcatctcggggatacctagaggattgagcatgcggcttgcccattgcagaaggaaagcttttctttcaacaccatcctgccagcctttcgacccaagccccttgcggttaccaatgtcacctgggttatgtngtcctccagcccctgttgcagcgtgt

SEQ ID NO: 137198 - DNA, 480 bp, Homo Sapiens
tttaaagttttggtattttaatttatttatgatgcatgtggtttgtgggttggagacagagattgaaaatgataagctaaaaaaaacagagattgagtatttgactatgtactagttttcaattgttgatacatatttcacaaactgggtggcttacaacacaaatgtatcattttctcattctgaaggtcagacgtcctcaaatcaaggtgttggcggggttgcgtttcttctagagactcgagtgaatccacatccttgcctttcccagcttctacaggctgtctgcattccttgatttatggtcccttcctccatcttcaaagcacattactccagcttctggtgcacatctctcttctctctgattttcacattcctgcctgcctgttatctgtacgcttgtgattacccttttatttagtccaacttctataacaacgaaggagctggcgcaggaatcttgaaacagtgtcctct

SEQ ID NO: 137199 - DNA, 938 bp, Homo Sapiens
  misc_feature (862)..(896): n is a, c, g, or t
cattcaagattcgagagattccttggaacagagtcgaggtccccagccccagagcaccttctgattagtcatcacaggatgttccctcccgagttcgagtgtaaatcaaagcatgaaatgatacagtgcaagggaatctacacccggagcttctacagagacaagttggcgatggctgactccttcttcttcaagaggtatatgatgttggccacccacgcttaggttcccatcacactgatgactccgggtttggcgagcacaggagcgcaaaccttttcacattctttctgtgatccaaatttgttttcgtttccaccacaacctccataccagaatcttgcacagcttttggtgtttggatcatagtaccattttaatatgaaatccctgcaagttccttcgtctttcggcaacttgcatatatctgtttcagtgagagccaatggttctgtgctcaccattagattgatggttgaactagaagctgaccttgctggctgtggaggtgggggctgagatttctttgtactgaaacttccgtggtagatggctctgacctgagacctcaggtagcagaccacagccacatggtatgtctgcccagcgagcaggcctccaatgacgcggtccgtgaccgtgaggttctgcttcagaaccagggactgatcatgggctgaggtgacggtgaggtcataaaaataaggaccggggggctcaggcctctcccagtggagtttggcgcttttctctgttatctcaaacacctggacttcacgggacatcttaaccatgggcttagtggtggctgcccggccgtaatggccgaattcccgggcatatgtccggtaccgtcgactgnnnnnnnnnnnnnnnnnnnnnnnnnnnnnnnnnnncggccgcttcctcgctcaaagactcgctgcgctcgtcgttta

SEQ ID NO: 137200 - DNA, 433 bp, Homo Sapiens
gaacatcctataaaattttcttccctgagtatgcaactataaaacttggccttattctgagaatgcttaacatagatttcatccatactgtaacactgattttgttgttgttgtccttaaagcagctcagcttcctgaggtagtgttatgtctctgtggcaacaaggtgaaaatgtctagcttattttgtcaaagtcaacaataatccacagactccagacctcaatatctgtcccaatttgccattttactttagtgctccaaaaatatggcttatagaaaaaacaataggtgttttaaagagatttacctgaatgatatagagaatgtctagatattttctggctatcaggtaaaacctacccttcaagatggtagaatatataatagcatacaaaacctctatttacctaataagtactttaatttacag

SEQ ID NO: 137201 - DNA, 844 bp, Homo Sapiens
gcagctcgtaccccgatatttgtggttctggctacagaaggggaccatcttcagttgtctgaagaatggttttatgcccacatcataccattccttggatgaaacccgtatagttcacaatagagctcagggagcccctaactcttccaaaccacatgggagacagtttccttcatgcccaagcctgagctcagatccagcttgcaactaatccttctatcatctaacatgccctacttggaaagatctaagatctgaatcttatcctttgccatcttctgttaccatatggtgttgaatgcaagtttaattaccatggagattgttttacaaacttttgatgtggtcaagttcagttttagaaaagggagtctgttccagatcagtgccagaactgtgcccaggcccaaaggagacaactaactaaagtagtgagatagattctaagggcaaacatttttccaagtcttgccatatttcaagcaaagaggtgcccaggcctgaggtactcacataaatgctttgttttgctggtgatttaaccagtgcttggaaaaatcttgcttggctatttctgcatcatttcttaaggctgccttcctctctcagtacgttgccctctgtgctatcatcttatcatcaattattagacaaatccccactggcctacagtcttgccttctgcagcacccacttttgtcttcctccgggtagtgatggaatttagttggctggtcccaaaaagggaggggaaagtagccacccccaaaatttaaagtttgcctttaaaagaaaggggaaaagggacccctccttggggaataaaactttaagggggagcccg

SEQ ID NO: 137202 - DNA, 1253 bp, Homo Sapiens
  misc_feature (845)..(919): n is a, c, g, or t
ctcttctccccagaaaggtctgaaggggaacggagaagggcaatgcgaacaccctgcaggaagcctcagtctaaaaccctagtctctgtcaagaggggcaatcccctgacacccgcagaatcctggtcttcataaggccccacacacatctgctttaaggggtttacattccttcttcctctgcctcctcttttgcagtgagttttcattttaacatcgctttctcctccccgactcctcacctgctttggggaattcaaatgttatcttcattaatggagaattgcaccaaccctagagaaaggagtattattttaaattacaggccttatagcctacctactttaaaaagacctcttactttatgacaaggatttgttatcccagagaaaaatcttcccatataatttttaaattttcattataaagtagcaaatggtaagaaataatgtaatttttttctttaactttgccttagaattttgttttcatttttttggctcctagaatctcaatttcctctaaataaataaaaggggaagaaaatatccaggtaaataacatcaaatatcctcttaagtcttacttgtatttaaagactactaaacacctctaggaaacaaacagcaggttgaggtacacagactaaaatgcatttcttacacaaattagtatgtaaacacagagaaaccagtatgataaacatcccagtacccacatttacgtagaataatacagtaacgttacatgaccacaaaatcacaaaaagtgaaggaagctttgagatcttccagttagcagatttcacacctggctggtcacgagattcccctggggattccctnnnnnnnnnnnnnnnnnnnnnnnnnnnnnnnnnnnnnnnnnnnnnnnnnnnnnnnnnnnnnnnnnnnnnnnnnnnttcccatacaattcagtagtctaaccctctcattatgcagaggaggaaactaaagctcaagaggtcaagctgttgtctaagtgtacagagcaagtgacagaaacagggctagaatgcaggtctctcgtccctactctgccactttttctgtcacagcacaccacctcccaagcttcccctagacctgtcacccttacccttcagctaagtagcctttaatagatattctgtcgttaaaactaggtagggcagggacacatttcatattccctctgatacaatcccccggccgtaatggccgaattcccgggcatatgtccggtaccgtcgactg

SEQ ID NO: 137203 - DNA, 950 bp, Homo Sapiens
  misc_feature (836)..(836): n is a, c, g, or t
  misc_feature (839)..(839): n is a, c, g, or t
  misc_feature (842)..(844): n is a, c, g, or t
  misc_feature (847)..(848): n is a, c, g, or t
  misc_feature (850)..(850): n is a, c, g, or t
  misc_feature (853)..(853): n is a, c, g, or t
  misc_feature (860)..(860): n is a, c, g, or t
  misc_feature (863)..(863): n is a, c, g, or t
  misc_feature (885)..(886): n is a, c, g, or t
  misc_feature (890)..(890): n is a, c, g, or t
  misc_feature (893)..(893): n is a, c, g, or t
  misc_feature (896)..(896): n is a, c, g, or t
  misc_feature (899)..(899): n is a, c, g, or t
  misc_feature (903)..(903): n is a, c, g, or t
  misc_feature (929)..(929): n is a, c, g, or t
  misc_feature (932)..(932): n is a, c, g, or t
ggaggtaccggtccggaattctccggatatcgtcgaccagagcatccggctgaggctgttgcggggtccgcggggaagtcttggcggtggagccatggtcggccaactgagcgagggggccattgcggccatcatgcggaagggggatacaaacataaagcccatcctccaagtcatcaacatccgtcccattactacggggaatagtccgccgcgttatcgactgctcatgagtgatggattgaacactctatcctctttcatgttggcgacacagttgaaccctctcgtggaggaagaacaattgtccagcaactgtgtatgccagattcacagatttattgtgaacactctgaaagacggaaggagagtagttatcttgatggaattagaagttttgaagtcaggtgaagcagttggagtgaagattggcaatccagtgccctataatgaaggactcgggcagccgcaagtagctcctccagcgccagcagccaacccagcagcaagcagcaggccccagccgcagaatggaagctcgggaatgggttctactgtttctaaggcttatggtgcttcaaagacatttggaaaagctgcaggtcccagcctgtcacacacttctgggggaacacagtccaaagtggtgcccattgccagcctcactccttaccagtccaagtggaccatttgtgctcgtgttaccaacaaaagtcagatccgtacctggagcaactcccgaggggaagggaagcttttctccctagaactggttgaccgaaagtggtgaaatccgagctacagctttcaatgagcaagtggacaagttctttccnctnatnnnaanntnaanagggtgnatnatttctcgaaaggcaccctgannattngcnacnagncagnttcaaaagctgttaaaattgcctacngangatgacctttcaataacg

SEQ ID NO: 137204 - DNA, 1136 bp, Homo Sapiens
tctgtcaatagatttcatgtattgtgaatcaatatattttcttactgtttttaagtcattttaagttggacttttagtggtcagcatctgaatgttaaagagtggtcccagcacagcattctttaattataacaatctgtatcaagtagaatccacacaaacaccccttcgtacttacataatctgtaaatctgatgtatctttcctattttaacaaaatctttaatttatatcgttataccttactaaagtgttaatgtgcattgcattcacttcattatttactcagagttcttgctgtaggctttgtcttgaatgtgtaggaccattcgtcgtgcatagaagtccctatattcctctggtaactcggccagtgtttttcaaggctctgtccagaatttgtgcagctcttgatgctgctgtaggatctttgtttccataggtatctgttttatcatagcattcagatggaaggtgcttccaaaagatattcactcccactccaaactcttcagaaattacattatggaaccataaagcaggaatgaataatacatcaccagcttcaagggaacattcatatcttctagccttggaaaaaagtggatatttagccaagtctgggttatctatattcagtacttctgatttagtacatcataatgagtccatagttgtaatcctggtgaactaattcgaaaaacactggaaaagaactgttcctctttgaagaattctggaaacttaatatctcctttcaacaaaggaaactgctttctgatatctgcaacatcctttctagggtcttctccaagtgaccgtaagtagtatttctcatcctctgaaacaaagaattctttatgtttctcttcagctgccctctggaccaactggtcaaaaggtaaagtttaatgaagtccatctgtgcaactgcagcaacatgaatctttacttctttcttccctccaacttggcttaggtaatccactgtccatttgcttgtacatggccccaaatcaatcccttccaacacaagaggttttctctgtgggtagaggtgctgcatgaactgctcccgagaaacgccctccagccggggtaccgggaggtgctgcccggccatggttgctcacgcc

SEQ ID NO: 137205 - DNA, 1657 bp, Homo Sapiens
  misc_feature (1013)..(1013): n is a, c, g, or t
  misc_feature (1495)..(1540): n is a, c, g, or t
  misc_feature (1605)..(1613): n is a, c, g, or t
agctgagctgcgtctagcacgagttctgaacctgtctctgctgcacttctggatggctgcggtgactttcgatagagctcgtcccgctcctgctgcaccttgtgaatcgctgctctaacacttcatgctcccactgcaggtctttcagctctttctccctgactttcaaacgggcttttgtgcaaagcaggatctgcttgtccctctcgtagtttgcgagctgtttctgcatctcgctcatctcctcccgagccttctggagagggtctgccaggcgcttgttctgcccagacacctctgccatctccctctccaggtggtcctccttcttccgcatgtcctccatctgctccttgagggagttgatgagggccaggttgttgagggtgatgtcgttgtagtagttcttaatgtcggtgaaggcctcctcgtggcgctgcatcagcgtgtggatctggccattcttcctctcctccacttcgtggagctcagtctttctccgcaagtcgagttcgtccctcagcatcttcatcttcttatcatacttggcctcaatttctcgaacttgcctctcaaaatcattccgcatcctggtgatctcctcggtgtgtttcagccgcaggttcttcaccaccacctcactggccagctcctgctccttgagctccaccttcagtgcccgcatgtccttgcgcagcacactctcctgtatgcggtgctctttctgtgccagcttcatgagtgcagtgccctcagccttcatctctgtcaggttgttctggtgctcatatagcaggtgcttcactttctgcttgtacaccttgatctccacctggtgcctctcctcggcttcttccatctcccggtctttgttccgcagctcagccttcttctcctccagctgcctccgtgtgatctcccagaaggtgtggatcttgtcccgctccagctggaagtagtttcgttcctcccgctcgcggtccagctcctcccggatgcggctgacatggctnacatgctcctccacctggccaggtgcagtgggtcaggtgaggcactgagcaggggcccatgcacggcaacggggcgtgtggccggcgaaaggcaaggaagaaagagggaggactcaacttcacctgctccttgctcatgtcctctggagcgagcccatcgacaatcggggtgcctttggctttgcctttcttccctttctttttcggtgcctttggtggaaataatggggtaagagagactcttacagcttccccttcttggctggctctgatcttgcctcccaggaacatttggcagagaaggttctggaacctctctcccttctgctcacctggagcacatcattgccctgagtgttcccacacctttaccacacacacatcctgttgttgcatttggagaagcacaaaggagaaaccttccttttgagaaggagaacattccttctagacaaagagaggagccgggcgtggtggctcannnnnnnnnnnnnnnnnnnnnnnnnnnnnnnnnnnnnnnnnnnnnngaggtcaggagatcaagaccatcccggcctcacaccgtgaagccccatctctactaaaaataccnnnnnnnnnttagccgggcgtgccgtgggcgctgtagtcccacataactcggg

SEQ ID NO: 137206 - DNA, 655 bp, Homo Sapiens
  misc_feature (512)..(512): n is a, c, g, or t
  misc_feature (554)..(554): n is a, c, g, or t
gattgtcacagtcggagcacagcagcccagtttcatccgtccactcccatcctggccagtccgtacgttctgtcaacagcccaagtgtccctgctctggaaaacagctacgcccaaatcagcccagatcaaagtgccatctcagtgccatctctgcagaacatggaaaccagtcccatgatggatgtcccatcagtttcagatcattcacagcaagtcgtagacagtggatttagtgacctgggcagtatcgagagcacaactgagaactacgaaaacccaagcagctacgattctactatgggaggcagcatctgtggaaacggctcttcacagaacagctgctcctatagcaacctcacctccagcagtctgacacagagcagctgtgctgtcacccagcagatgtccaacatcagcgggagctgcagcatgctgcagcaaaccagcatcagctcccctccgacctgcagcgtcaagtctcctcaaggctgtgtggtggagaggcctccngagcagcagccagcagctggctcagtgcagcatggctgctanactttcaccccacccatgcagctggctgaaatccccgagacgagcaacgccaacattggcttatacgagcgaatgggtcagagtgattttggggctgggca

SEQ ID NO: 137207 - DNA, 1486 bp, Homo Sapiens
  misc_feature (22)..(22): n is a, c, g, or t
ggatgcgaggccgggtgttaantcggcacgaggagtacatagaggcaattcactagacaaataagcttagtgtttacgtgactgaacagtcatcctgctttggtttcaggtgtgggatttggaccatgaggggctcccgtaggaggatggcggtttgtgtttgattctgatttgggatttcagtacatattctccagttcccatagaaggccacttattctttgagaaactggtggttcgatggtgttgcgcgttcgaagtgaagtccgcttgtgcaaagacgaaggacggtgcaattcacagtgtcactttcagctaggcaggaagttgtctccagataccttctggctacttgaaagttactacaatgaattccaccagctgaagtactccaggtttttcaacagggaatgtgttcattatggatcagtaccaaccgaaattgattttcatttccagaacaaacactggcaccaacatttttactttgggaagacttggcagagtgttagtcatgatctgttacttacgtgttcagtctgttttctcacccccttcttagttaccatctcttttttaagaagaaaaacgaaaagccacagtattatcaaggtctctacacttggactggggggaaacatttgagattaagcacataacttttgaattagttctttgtttcaatgttgaatgtggcgccgttatgccgatgattaatcaggctgcactgatggaagttttgactttgtccctggtataatttgcattgaaatgctttatgaaataaaaggttctactagaactgatgttagcacattccactgagcaaaactatcagactgacacttgttaaattgcttactggactgaataaactctgttttgtccagttaaaagggttttctctttgttacaagtgttatttgtaaagtcctgtcacattcatggtcgaaactgggttgaaagaattgaaaattgtccaacagatagatagataggaaaccgcctggagtggaggagggttgtatctaagcctccactatcagtcatgttaattcaaggggccacagtggaggaaaataaatccacaaagtagattatctaattaccatcaaaatgagtcagaagcaaaaaacaccaccctccaacagcctcttaggagtacaccctgttctgctactaaaatactagactcatttccctggtggtgggggggaatgcaggtatagatcagaaatataatccaccttaaaattagtactaatgatcacattatttcacaagaactctgctggatgtacagctcttaacattttattaagccatttgtgtagcccaccacgtttctttgtggtgcttgtcctgtgtggaagattgtaaatcttgggcctgttgcatacttccaagggcttttaaagcaatgtggattaacagtacttgggcctgctgcttttggcttacctttggaattttagctagatgccaa

SEQ ID NO: 137208 - DNA, 557 bp, Homo Sapiens
tgcaatttccactttaccaccagtttaaaagtaaaatgaggaatttaacccatatctggattgaatcatactatgattttccgtggctctctgtttcataaaaacactcctcactgacaacagatgttaaactctggacactgaattctcgctctagaacagaatttaggtcgatggtggcattttcagactgactgtcaagggactggtgacggatctgcgccttgagcaaagttcctctgtccctcttggtgctgttggcttttcgtttaatggggcagaagtgcccccggaccagtttgggctgctctcctcctttctgaccctcacccgactccgggccaggctgctgctcagcctcggggtgaacgtctgggtcctcggaaatcctcagtctctggaactgaatttcgatgtctttagtagggctgccctgcttcacagtctgacggtggtcatcatcttcatcgctcaggatgtcactctctttgatgagattgtcggcaaaatctgccaagccggggtgtgggtatttcccgggagaagtgctcttggag

SEQ ID NO: 137209 - DNA, 597 bp, Homo Sapiens
  misc_feature (198)..(198): n is a, c, g, or t
  misc_feature (293)..(335): n is a, c, g, or t
acctctgggattagggcactgttttccagagtctgtgagttcgtgaggatgtcacttatgctgtgctcctgtggctggttctccctccagggagtctttccccagcctcagctggttcctgcccagcctcaaccccaggcttgccttcagcacctcgctccaggcctggctgtgagagcgcagagctgtacatagaantccccagggggcggctggtatcaaagcactcaggcaggatgatgatgtaatcctctgaggaagcagaggactgactttgaacttcatctttgagnnnnnnnnnnnnnnnnnnnnnnnnnnnnnnnnnnnnnnnnnnnatgacagcttcttcctcagcgatatggataatctcctccttctcatttccaagtggtcccttcaggcaaggcaaatgtcatctgcaaggacttctgtctgcaaggagggttgtggtctggggcagcatccaaggtaagggatcggattactgtctcacacacaaactgggtcccactctaggtcttcttctgcttcctccacagaagcaatgttctcagccttcctctttactgacaccatagaatcaggaagtgctttaaa

SEQ ID NO: 137210 - DNA, 636 bp, Homo Sapiens
  misc_feature (483)..(525): n is a, c, g, or t
actgggaaatacaacttttattcatctaaattcagactttgctatggaaaatagtctctttccatactgaggaaaaaacaggttttgagatcagtcgattcctctctttatttcacctctgaagaacaccccagctgagggggctgtgagtggtacctgggcagtgacggtggaagctccacatacctcctgggattaggaggcactgtttccagagtctgtgaggtcgtgaggatgtcacttatgctgtgctcctgtggctggttctcccctccatgggagtctttccccagcctcagctggttcctgcccagcctcaaccccaggcttgccttcagcacctcgctccaggcctggctgtgatgagcgcagagctgtacatagaatcccccagggggcggctggtatctaagcatctcaggcaggatgatgatgtaatcctctgaggaagcagaggactgactttgaacttcatctttgagnnnnnnnnnnnnnnnnnnnnnnnnnnnnnnnnnnnnnnnnnnnatgacagcttcttcctcagcgatatggataatctcctccttctcatttccaagtggtccttcaggccaaggcaaatgtccctcgtgccgattcaccccggccttcctagca

SEQ ID NO: 137211 - DNA, 709 bp, Homo Sapiens
agaaatccccagagtttttaatagctctctttcctaaatactcaaaaaatccagactagaaaaatggaagtgaactgttagataaacacgtaagtactcaacaaatatttaaaaagaaacaaaccaaaaatgggggagttgggggaaacaggatggccttatgaaacactgtggagctacccagcagcaacatttataaaagcttgtgtagatttgcataatgctcctatgcaattcttccccattaggaagacattcctacaaataattcatcactttagattttgatcatagatcatttataatggttatcatggttgtatctttaaaaaatttcatccattaacagttatgacaaacattaggccattctttgctagtatattattcctcaactattactaatgaaaccaaaacctcagagttgtttgaattagaattaaaatattaagctagaaaagattatttaattcttagagagatacccaaagaatttgatgctgatattatctcccctatcctctcattcacaaccccctggcctgcatttacttccttaattccatctatattcaccacagtgatgtagctaaacaagaacaatattgccctttaataagctgacctctatcaaagatctgtcaggtctgaacacagcatgcccacaggaaaggaaaattctactcagttgtgaaccctcgttccgaat

SEQ ID NO: 137212 - DNA, 883 bp, Homo Sapiens
ccggatggatggccacatacagttaatctgctgctcagtggatggggaaatccggggctacctgcctggcacggctgagatgaggggcaacctcatggacaccagtgcagagcaggacctgatccgagagctgagtcagaagaagcagaatctgttgctggaactccgtaactatgaggaaaatgccaaggctgaattggccagtccactgaaggaggctgatgggcatcggggcataatcccagccaataccaggctccacaccacgctctcagtcagcctggggaatgagacccaaactgctcatacagaattacgcatttccacttctaatgacaccatcatccgagcagtattgatttttgcagaaggaatttttacaggtgaaagccacgtggtacatcccagcattcacaacctctccagttccatctgcatccctattgtgcctcccaaagatgtccctgtggatctgcacttgaaggcattcgtgggttacagaagcagcacccagtttcatgtatttgaatcgacaagacagctccctcgattctccatgtatgcgctgaccagcctggaccctgccagtgagccaatcagttatgttaactttaccattgcagaacgggcacagagggttgttgtatggctcggtcagaactttctgttaccagaagacactcacattcagaatgctccatttcaagtgtgtttcacatctttacggaatggcggccacctgcatataaaaataaacttagtggagagatactataatatgatgaattgattggctgtgaatctcagcatgctctttgatgaactcaaacgatctgcatagatcaggttagatcgacgtgcttcatgctcggaagtatagagc

SEQ ID NO: 137213 - DNA, 487 bp, Homo Sapiens
  misc_feature (198)..(198): n is a, c, g, or t
tttattttgagtttcaccttgttaggtgatggatatctacattcctgtaaaaattcttgagctttgttgtgggacagttagattattggaaacagtccggtcctttcaggagttcttcccattggcaggtctcgggggtggtccggggcgcctcctccaggcttgctcctctctcctgggacagcttttttggagctnatcagggcacccttgaggctgctgattcagagctcatgcttggtgcctccgagaagttagatttagaacctgtgttactcagcgttctggatgctcctatgggctctgagctcatgtcttgctttgctgggccttggggtgagtcctctgttaccggctcatgctgtgaccaggtccgagggcaccagcctcctcaaggttgagcctgccctcgtgggagccacgagacaaggttcccctcaccccctggctgtcaggaaaggttgggaaaatgttgggtctgggttaa

SEQ ID NO: 137214 - DNA, 474 bp, Homo Sapiens
tttcacaggtaaacaaaaataactttttattcatgtaacagaaaaaaataacttttgcgtgatggaacagatttaagtaatgagtcgcttagagaggaaaaattaattctaacacaaagtcagatacctaccattgctttgttttgctttatatttaaagcccttttctccaaaaaattcattccactttcatcttctgaatcggagttggaatcagtcacagaattctctggggggctggggggactctgcttttttgttggttgctcccctggtactccgcgctggaaacttcatcgccaccctgaagaggtccagagtgcctgcactggctgcgggtcctacagccttcccgaactgactgcagcctcgtgtttgcaaaattatcagaagcaaagctgtcacaactgtcatcagaggatgacgaggtttccatggaaatcaacttcacatatctgaatttctttaagttct

SEQ ID NO: 137215 - DNA, 476 bp, Homo Sapiens
acccagggtcagttcaccctgaggaaaagtgatccaggttattgcttcgtttatcgccctcccatgtcttcaagacaaagctcaattgctcaagaacaagtaatgcaaatttgggctggtgccagtattccctgcccaggcacctttgtgattagctcagccattgacaaactatccctgaggctcacctttttccgaaacatggtcgataaatctgacttggacagaatgggaagactggacattgctcttgtgacctccttggctcgtaacagcaattgctctgaggttggtcaaatattcccaagaatgaaggaagcaggttctgacaggtcacagatactacagcagctaatggctgcaccaggaggggaagcagcttctgcctgagcaccctctgtgctctgccttgccttagttttgcttttggttggaagccaagaacagtggctgactgcagaatgtccagactcacc

SEQ ID NO: 137216 - DNA, 272 bp, Homo Sapiens
ccaccaggagtcagcgacttgatgtcaaagctctgcagccctgtcatgaagcctacgaactgcgatatgaacaatgccagattcattaacacagaaacagcaattcttcactggaggtatatgcaggtaccccctttctcagtggttaggaggtccaggactctccagttttgaaggatgactcccacgaggaagtctaattgtcgttggagactggtaatggaagtgtgcatatcttctacggtgttagaaagggttgtgaatagtgtttg

SEQ ID NO: 137217 - DNA, 1481 bp, Homo Sapiens
  misc_feature (19)..(19): n is a, c, g, or t
tgaacccccatgcccaggntaagttaaaattttccatgaattgtattctttgggagaatggggggttagatatcaaaatcccaaaaacaggtgacaggtcacccatttatgtccagaggggagttcatgttaacccctgggggttggggagccccaacctctgtagtctcccacttttacccccagaatcctgtgcatgaggcatgtgtgataagcagccaacagtcgaaaggtggcatccttccatggcaacatgcatattttagtgtaaaaatccctggtaggtaggacagacatacaaaggctgtgacagaacaacagctttgatccaatatagcctgcgttcaaattgtggttcccacactgactggcaggacttaaaatcagagtagcatggcatcacagggttggtgtcaggattcaaggcgtgttcaatgctaaatgcattcatcatccctaccagctgttgcttgctgagcccaggaaccctcagaggtcagagctgcaaggtccttgggggtctccttgaccacccttctccttcctttgtccagatagggaaacagggcccagcagggatggcagtggggctcactgctgaaatgtggctcacctcctttcaggtaggcatggggtacgttggcctccagaaacatggcctccccaggcttcagggtaagcaggttcaggaagtagatggcaaagcagccgatatcacctgggtactgctggtgcagctgtagcaaaagctccccaaagatgtcctccatgttgtttccggcagccgcttgctgggagatccgcttcaccaacaggttgagctgttccaccaccaccttcttctcactcttcatcaggtgggagaaacagctctgcagagaggaggccacagcctgggagtcatggctcatggtctgcttcaggtgtgttgctgcctcatctccaatcaggaactgaaactcaggcaccttctttagaaaggttacaatctcctcaactggccggaagccacacaagccctggaagggggtgagggcaatggccatctctggcttgtggttggcatcggggtagtgctgcggagcctggaggtgcagcttctctgccagctccttgttagggtgtgcctggatggacaggggtgtttcaactgagagcactttgaagaggaagggcaggttgccattaaaggtgtccttgacctttgagcccaagctgtcctggttctcagcaatccactggcttagggtcttctgtgagatgcggttgtcaaggatcttggcatcccctcgggggtgagtccccatccacaactctgcataaggcttgtcctctgcgatctgggccagtggatcactgctggccaacagccgcgccacttcgctgttggaacccatcttcccccaggcatactgctgcaccgcacaggaaagtgggaatactcgcggagcggccatgctcgatcccgggaattccggacc

SEQ ID NO: 137218 - DNA, 1442 bp, Homo Sapiens
  misc_feature (143)..(143): n is a, c, g, or t
  misc_feature (525)..(562): n is a, c, g, or t
  misc_feature (565)..(593): n is a, c, g, or t
gagaagtattgctatccccacacgataccaccagcactgagggactgcagctttgggtctcagagagagccgcccggagaaggaaccaaagtgtgcttggttcacatttcagggcagggaggttctccaagttgcagcagatnttttagagtttcctgctgaaggcacagtctctaagagaggggagggagcaaagacaggaagctggaaccagagacacggataagcaccctcccccttgcctttcctggaagcagaggcagtggcatcctggaggcagaaatgaggcagagtgggggtgacccagggcttccggttcctgctggtcgattgcgtgcgcatctgtgggcttcacaattccccactcctttgaatctgaacctctagcatcttctctggcactgcggtgcccaatatttttgtatgttgtaagtcctctgtgtatgatcatccagggatcaccaagaggtcccctcaccagtgcgtttaaaataaaataatgcgataccatatatgtatgaaatnnnnnnnnnnnnnnnnnnnnnnnnnnnnnnnnnnnnnnatnnnnnnnnnnnnnnnnnnnnnnnnnnnnnacaagatactgaagatttggaacatgttctccagtaagttttcggtaattaagtggagtaaaattgaaggcgattgttaaaatgtccttctttacaccctctgatattgctttaaaatatcaagataggtgtgtctcattttgtaattacaaagcagtattttcattttgaagaaaattaaactaatgttttagagaagaaaaacaggctctcaatgatttaaaaaactctcagagaccagttttttaaaaattgaaggaattgaacccaaacctaatttgttttcaaacatcctgttttcgtatccttgcttactcaactgagaaataagacagaaaacatgcccagcttcatttcattctttttgcaacatctgaatatgcgtgttcaatctcttgatcagctggacacgtatttgtgaactcatctctagcataagcattattcaagtatctccagatgccagtcatttcagaaggaaattcaaaatctctgtacttcttggccacaatcttaataatatggagcttgggtaagaggttgcagtcagccagcgtcagctcggtccccacccagaaacttccttccagaaacagtgacatcctcggtgctgtaggcatctatttcatcaggcagagggctatttaagtaattatccagcttcctcagggccttcagcaggttcttttcatgaatctcatttgcatccttcttcgtgttttttataaacgctgagaatttggcaaacacgtcatttcctgcggaattagattcgggatgttgggtccccagcttgggatacctcgggggagctaatttctcctctaagaactcctcgatcttattcac

SEQ ID NO: 137219 - DNA, 1007 bp, Homo Sapiens
gtaacaaagcaggctgtaccgcccggatatcccgggatatcgtcgatccacgcgtcggtttccatcatttctgtctttaagaactaattcgtacataataagtttcataggtaacacattatttgaagttacagctacagtagtcaggtgtagaaaatcttgagttgcttggtctgcttgtcttcataaatttattctcttatgatacttgaggtaccagttgtatttaattttattcattatccctagatagctattaagatacttagattagacctaacccaccatagtcaatccaagactagactactcaatattaaagggtctggaaaatagaagagtgtgttgggcaggtagtttgtaccattatatgaaggtttgttcctttgttaaatttagcagcctgtactagcttttgaaatccagaagttttaacttccagtggctggtttctgagagagtgccatgattgctagccaggcattccatattgggaatatgtagaggagaacctggatgtacttaagagtggcatataattttcacttctgtctgttgaggcatcaaaaaaacaagtttagaaagctggcaacatgaagaatgcattcaaaatataacaggtgcttctttgttgtacgcagaggaattttttcttttgattttgtttactgaaatttgttatacttcaaaagccataacttgaaaaatactggtggcgtcgatggtgagtgatttttatcccacgtgggccttttgctcagttccatggcaattttgtaaattgaccctagccagagaatagatcagtatttcactgataccacgaggaaaagaacaaacaaaacttaaaagtattcatacaccttgctaacctaaaagacagcagggacaagatacatatgaggacaaggtatacacccagttctgaataacttgaagaacaggcttggcaaagaagtaagtttatccaaatcttgaatttctgccaggcatggtagctcatgcct

SEQ ID NO: 137220 - DNA, 511 bp, Homo Sapiens
ttttttccagcaaaaaaatacggctttattggatctatttcctaactacaaagacagctgacacagacatcaaacgtttccttttcaatgacagtcccctgagaaaggctgcacgtgactcctacagtgccgggtgcagggtacccagccgcaggtgggacgcggccacacgtcttcacggttacgtgcagaccgacgggatggccttcaggttgtttctttccgtgagtgagacacaagagacgcgattgtgccggagcgcacggtacaggccgttccttctgcgggagccctttctccatcagcgacgttctgttcagtgacttcacagccggagcctccacccgcaggtgcaattcaggcaggttccataagggggcattaattcctaaggcacgagttcaggtcaaccgtgtttcaatgaataaaccatgctttttggttatatggaacaatagatcgctgcgagtaatcatacgtaataagcaactaattgtacagagtgcccagc

SEQ ID NO: 137221 - DNA, 368 bp, Homo Sapiens
gatcctgctggcaacttcttccatcttttcacaagcaggacacaggcattgcagatgtctcctgaacgagtctcatgcaatccaaaacagctctggaagtccttttcatagcgtttactgtcagtgaatcgagaactggaggacttagctctgcaaatacagcagccctctatacttcggtacatctttggcttgtgaaaaccaaacatcttttcttctgggctatagtcttcctaaagcagccgttccacgcgcaataatgtccccgaggtgcggatgtgcacgcccggccagtccccctcaagcgctccctcctcctcaactgcctcgtgccgaattcgccacccaggcctcgctacctagccgta

SEQ ID NO: 137222 - DNA, 779 bp, Homo Sapiens
  misc_feature (418)..(427): n is a, c, g, or t
caaagctctgccctgttctctgttctcacactgtcttcttattgctgcaagcaaggcttgaagagatgtgtgtccatgaggacttccccatacggcctttatagatgatcccacagacatatcttctgtcttttccagtaagtgagatctaaaaaggaaaaaactggtgttctgttagaaccagaagccatctctgtatctgagccgtcatctgactggttactgtaacaaggagattgagctggggaggcacttgaggtggtactgtgagcatcagaattatgacgtttaaattccttctgcagtttactgatctggttgctttttatcctgttcccagatagagttttcactttctttggtttcaatgtagtctttagactgggtccagcccttgcatctaccacatgattccagnnnnnnnnnngatcctgctggcaacttcttccatcttttcacaagcaggacacaggcattgcagatgtctcctgaacgagtctcatgcaatccaaaacagctctggaagtccttttcatagcgtttactgtcagtgaatcgagaactggaggacttagctctgcaaatacagcagccctctatacttcggtacatctttggcttgtgaaaaccaaacatcttttcttctgggcaatagtcttccaaaagcagccgttccacgcgcaataatgtccccgaggtgcggagtgcacgccaggccagtccccctcaagcgctccctcgtgccgaattcgaccacccaggcctcgtacctagcctta

SEQ ID NO: 137223 - DNA, 889 bp, Homo Sapiens
  misc_feature (478)..(486): n is a, c, g, or t
tttgttccccttctacataaaaacctcagtcaccactcctgagtggagatgggcagaggctctggcccctgctcctctggcttctcagcagctgctttcttattgctgcagcaaggcttgaagagatgtgtgtcaatgaggacttccccaaaacggcctttatagatgatcccacaacatatcttctgtcttttccagtaagtgagatctaaaaaggaaaaaactggtgttctgttagaaccagaagccatctctgtatctgagccgtcatctgactggttactgtaacaaggagattgagctggggaggcacttgaggtggtactgtgagcatcagaattatgacgtttaaattccttctgcagtttactgatctggttgctttttatcctgttcccagatagagttttcactttctttggtttcaatgtagtctttagactgggtccagcccttgcatctaccacatgattccagnnnnnnnnngatcctgctggcaacttcttccatcttttcacaagcaggacacaggcattgcagatgtctcctgaacgagtctcatgcaatccaaaacagctctggaagtccttttcatagcgtttactgtcagtgaatcgagaactggaggacttagctctgcaaatacagcagccctctatacttcggtacatctttggcttgtgaaaaccaaacatcttttcttctgggcaatagtcttccaaaagcagccgttccacgcgcaataatgtccccgaggtgcggagtgcacgccaggccagtccccctcaagcgctccctcctcctcaactgccttgtctagaaagatagtctcctgcagttctgcagttgctaccgctggccgggaaggtgtagattccgctttcccccc

SEQ ID NO: 137224 - DNA, 868 bp, Homo Sapiens
  misc_feature (16)..(16): n is a, c, g, or t
accacgcactccaggnaacttgcctctgaaatttccagtttgacaacagagaaagtaagaatatttcctaatttagcctaatatatatacacattttttaatcatccaaaattacaggcaaatcacttaaggtccccagcactttacgatgaaaggtcagagagaaccccacaaaaaaggtgttaaaaggacaggatcactaactgtgagaggttaatttatcaggataactctccggtaggtaactaggcgggcatgctgattttcatactggagtcttcaagagttaacagaatctaccatcctttcctccgggtcaggctagggccgcagggggccactttacagcctcactgcagcatcctcactgggtataagcattggcccagagggacaatcataaatgtcctcaaagtgttgcagagaattaagaatccggctttgggggaagaaattaatatgcattttttttagaactacttcctgtacattggacaagaagggtaaagttgtctaagtgaactggcttatatacatcgctgattaaacataagggctttgggaagtatctcagggtacttgggaaaaactgcagagatgttttgcttttgaaactctctcgctggatggggacaccccacccatgtcaactttccatctgcagaaatgaaacaaatatatgtaaaaagtgcggggggacaggcaggctgttctgaatttctttgatccataggcaatcaagttcaaaggaaatgtttctttacaggaaagaaaaaaacggaaagctctgtgagttttgctagggggtgttaggttctagggcaaccacggactcttcaggaaggaaagccacacagctacactacca

SEQ ID NO: 137225 - DNA, 1233 bp, Homo Sapiens
  misc_feature (734)..(734): n is a, c, g, or t
  misc_feature (750)..(750): n is a, c, g, or t
gcagggaaagtgaatccagccccctggcccccagtacaaccccctttaattcaaaggagccaggatttgccactggaaggtaaaaatgcttcttcccaccaagcagtgccctgctctttttatttccccaagtgtctccagtcttgaatggcaggacttaccccacgggtagtccagtactttccttctgctgacagtcttctgtccaggactgcctttcctccggggtagctcaggggatctggggttgccttctctccacacggggaggcacaggcttctccccaggctgtgtgcagggatggcaggaggcacacaggagtccagggtatgtcaaattctccacggggaaatgggaactatttatcaacaaactagctccctactcccacccccagttttcagtataataaactgattccaggaaatggtcattaaaaatttagacaaaactacaaaaaatggagaacccccttttggaaagtctgattgctacaggatagtctttgaacttaaagactaagagaaacatttctcaggacaagactggtcatccctcactacccagagcaccaagaggctgccagaaagggtcatgatgtgcttgcagggccaagggcagcggcagggacgcctctgcttcctgagtctcctccagcgctgtcgtttcgattccctgcctgatttttcatgtgcactctgacagatgagtcctgttttaagaaatacctaanttggtgccagatgcantctgaacacatcacacaatggggatgcgtttcttgggtttgttattcatgtattggggcctggcgagaacctggatatccagcatatggcacaaaaacatcttaggtgaaactcagacattgttatatttaataaaaatacatgaagattttttctgttttatgtacactccgaatgtctgaacattctggacactactgtatagttatgtacaagtgcaaggtcagtgttgtcttgactattttaatttatatacaggctctcttgtgacgcgcaacactgccagatgacaaccaattccttcttggaaacaggctccgagcccagcgcctcttactccctgccattccctttttctgccctgaggccggagaaagctgtttgctgttcggttgcaaaggagaagcaggtggattcagcggcttccccaccgctggagcagaatgaaacttcacttgctccttccttcctttttaaaaataa

SEQ ID NO: 137226 - DNA, 615 bp, Homo Sapiens
aagttgcataagggttactatcttttgattgtcgtgacagagaagattcttttactaattttatttttccttgagtgcctggtgtaggttttcccgcagaactaatgaagtaggtatcttcagtttttcgaggaccaggtctcaaaaactcaggcttagttgtccgtctatcatagaagtcccctggggtttttccacttactgacctggccagaccacagctaactggtttgtcttttcccaaaaagtcagaagagacagacaaacttttcattacttcatctaaaagattctcttgacttgaggactttatctgtactgaggtaagcttattgctttcttccaaaaactgttgtagagtaacaacttcacttccaggggaaccagttttgatcttgtgatgtcgactctccagtgtttcagatattttgtgctggagcactgggcttgatctggtctgtcttttcaagtactggattggactgctaccactgctggaccaagcctcatggtcatgaagcaggctaaattctccactgctgtggctttgtggcctgctttggttattaactgcacctgctttgacttcatgtagtgaagcattattattgctat

SEQ ID NO: 137227 - DNA, 795 bp, Homo Sapiens
ttatcagagcttttaacaaatagtgctcccagctgttgctttcagcaaaggagatctccaattaaagagagtaatcatgttctctctactttcgagactatattccttgttaaattgacttctaggtttcatttcccaaggaatctaacaataataacagaagctaaggatgaacttgaattttaagtctatttcaacaaaaggattatattcatttactaatttgtccagtaaacaggaatgcttaagatgtatacttagatttaataatgtgactgaagactgtgtctctgtctctttatttttagcttagctttgtgtgaaaaaataattaatactgatcttctaatttaatactctctttgtgtaacattgtatgtttcttcttgtaatgatcacaagcaaacatctcttatacatagtgttttcaatctatttgttagccaagttataaaactgtagcctagtcaaatctatggcaaagcaatttgatgatattttgtaaaacaatataatttatttcttcctccccctttctcctttcagctaaatttcaacagtgccacttctgcattctctgttctcaaggcacctggatggtgaccctgggccgtcctctcctcctcttcatgcatgtttctgagtgcatgaagttgtgaaggtcctacatgtaatgcatatgtgatgcatcatcttatcatatattccttcctatacattgtttacacttcaactacggggatgttccacacaaacttaaattactgttggcaaaacaataggggaggattagac

SEQ ID NO: 137228 - DNA, 512 bp, Homo Sapiens
tttgtctaatctccccctattgttttgccaacagtaatttaagtttgtgtggaacatccccgtagttgaagtgtaaacaatgtataggaaggaatatatgataagatgatgcatcacatatgcattacatgtaggaccttcacaacttcatgcactcagaaacatgcatgaagaggaggagaggacggcccagggtcaccatccaggtgccttgagaacagagaatgcagaagtggcactgttgaaatttagttgatgggtactgttggtgaccccgagcgatgaaaatgaacattctgccactttccatcccggcggtgccacacacgagtctcttctgactgcattgtctttggcattccactgccatccatgtactgtgtgagcctaatatatgctatgcaggcgggatcatcccctaccagatgtacatgagggtttagaataatagtgtggattggtttattgcttttggacaaagcgttttcaaaggtaaatcggtgaaaattcat

SEQ ID NO: 137229 - DNA, 983 bp, Homo Sapiens
  misc_feature (107)..(107): n is a, c, g, or t
  misc_feature (123)..(151): n is a, c, g, or t
gagttttctggaatgggctggaacagagcctgccttctccattgggggggtgagtgtctttctgggttcctcataggggacaggggagcgtacaacccccctgcctnaatggaagcttctctnnnnnnnnnnnnnnnnnnnnnnnnnnnnngtggagagtctgcggaggctccacagtttcctgacatgtagctttgtcctgcttcccaaacagagctgtcaaggataagtgttggggttcagggtctaaggtctggttgggctgaggtatacgctgttgctggttttcactgggtttcactggaattggtttgatgagatttggattgtcatagatggcagaggaactggttatcttttttggctcagaacaggttttacactttgtgtattcgtctttggccttgatgagcattcgtaaaatgtctacttctttgccctctcctgaattgaggatcactggggaaattcctgctccagttccctgatgggctttcaactgttcatactgagttaggtttttcataagctctgcaattctcttggcattcttccttatcataaaaccaaattccatagatggacaatctggcatttctgtagagaaggaaagggtcctggagttggaaatccaagtctttagtaataggttctgtcctattttccatgctcagcctattcataatggtgaatccatgctttggagaatgcagaccttgtatacacaaataaggttccttccacatcagttttctcccactcgttggcccgatggccgaaggtgtacagagccacctggctggccaccgtccacgatgcggttgatataggggtcgtggcgctgcagggccgctaggctgatgtcgcgcccctttcccaccaggccgcctgccgccacggctgccatcttccctccccgacgcgtgggtcgacatatcccgggattccgaccgtcagcctgcttttttaacgtatagcaagcc

SEQ ID NO: 137230 - DNA, 183 bp, Homo Sapiens
ctgaattttaaaatattcttatagacaaacattaattggaatggggggtaaggaggtaggaatggcttacttgcggaaatgcaggctcattgttgtgtctagtaggtgctaggtgcattcacacatctcttaagctttaaacaacctattgagccggtttccatttccttgatctattagatt

SEQ ID NO: 137231 - DNA, 468 bp, Homo Sapiens
tggggtcttgacccactgttgcccctccagagatatgtcagtttacatttacacaatttatacttctctcaatctatagcatttgagagaacctgtcccaccctctccatactctttgccagtctgagaggacagaaataattttattgatgttttatgcatttctcttattagtgagaatacgcaccatctcatggttagtggccattgatctccatgttgctaaatcatgtgttcccttgcttatctttatctgccttgatgttgaccatcctttgcttctcaccacagctttctcttggttctgcagtaacgtgctcttgttttctctggacctacctcctcatccactgttagacctctcagtgtctgactgccttagactgggttattgcccttgtttctatcttcactttgtgccatcagaacatttggatggcagtgatggacaaattcatgtcgccagcc

SEQ ID NO: 137232 - DNA, 642 bp, Homo Sapiens
  misc_feature (521)..(521): n is a, c, g, or t
tttatgcttccaaaaatttaataaataatgattctttaaaactgtataaactataaattaccatgcagtccttataatttaaaataatttacaggttgaggtagggaggggcccaggagagtgtagaaggggcagggggagggagcgtgtcggcaggtcaggctcttctcacagccttcctgctgagcacacacacacaggccgtatctatccggataaaccgccaggcagcctgcttgccatccatggtcagcgccttgacaaaggtgtgagtcgtggtacaatatgagttccagtgctttgagtcaatgccccggcacccgctgtcaacgggatttgggtcccggcacttggtctcaaaaaagtactgtttgaatacactgttgttaatgttcacctctcccaacaccatcacctccttgcccttgatgtctgtggcggtggtcttatccccaacccacacgctgacactgtcacacaccgagaattcgcccctgtggaagatgggatgggatgatganccgcttgctcctgtgagtcctgttgaagggggcagcaccacccgacctcgaagtccagatcctgagtgtcttgagctttacggggaggctgggtgctaaacagcacacgggggtgaacgga

SEQ ID NO: 137233 - DNA, 558 bp, Homo Sapiens
cggcaactgcttcggatggcgcctggccacttatggcatcactgttgctgaactgactggggaccaccagctgtgcaaagaagagatcagtgccactcagatcatcgtctgcacccccgagaagtgggacatcatcacccgcaatggtggtgagcagcacctacacccagctggtgcggctcatcattctggatgagattcatcttctccacgatgacagaggtcctgtcttagaagctttagtggccagggccatcccgaaacattgagatgacccaagaggatgtccgactcattggtctcagtgccaccctacccaactatgaagatgtagccacctttctacgtgttgaccctgccaaggcttctcttttactttgacaacagcttccgtccagtgcctctggaacagacatatgtgggtatcacagagaaaaaagctatcaagcgtttccagatcatgaatgaaatcgtctatgaaaaaatcatggaacatgctgggaaaaaatcaggtgctggtgtttgtccactcccggaagagactggaaagacagccag

SEQ ID NO: 137234 - DNA, 760 bp, Homo Sapiens
tcttatttaggtttctaggaagcatttaactacataaaacttatagggaaaaatggccatatttgaaaactgctacaaggatcaatgtagagcacaggattgtaatgagcagagtcacagaacatactagagaggtatgtacagtcagtcccactggaacttgtagaatcacattcttatatactgatttatacttcatcttgttccattggcagatatcctcattctccaaagcacaaggggctgccacttctgagtgagcccagcatttcaaaatcgggaactcttggtcacaaaacatcaacaaatctgggttattgaccacaatcgaggcttctccatcttcactgtgcggccgatgatagcggcagtgcacaggcaaaaaggcttgaaaacagtcaatgcactgtgaatctcgtctggcataaatgagaacttcagactccttggacaaatagttaggggcctctatatcaaaattttctgaaaccatcactgcctctgttatgtttctctctcgtaatgaagccaactcatacggatccacataaagtcctgcaggaatgtcctgtttaattaagagacggcaggtgtgcaagtcctcaatgctttccccaaacttcactttgattaaaaggtctctgtggaaaccatctttcaaaacttcttgcctcaaaataatttcagaacacatggcccttatgccggcgtcagagcgcgcggcggtgaaggccgcggcgggcccgcgcatgagcccggt

SEQ ID NO: 137235 - DNA, 526 bp, Homo Sapiens
aaaggcttgaaaacagtcaatgcactgtgaatctcgtctggcataaatgagaacttcagactccttggacaaatagttaggggcctctatatcaaaattttctgaaaccatcactgcctataacatttaccagttgttcttgcttacaatgtctgcaataaattcgttccttattccactagggatccttcaattatcagaaggcaaccatagccgccgccatgaagtcttctcctctgttatgtttctctctcgtaatgaagccaactcatacggatccacataaagtcctgcaggaatgtcctgtttaattaagagacggcaggtgtgcaagtcctcaatgctttccccaaacttcactttgattaaaaggtctctgtggaaaccatctttcaaaacttcttgcctcaaaataatttcagaacacatggcccttatgccggcgtcagagcgcgcggcggtgaaggccgcggcgggcccgcgcgtgagcccggtcgccgccccgaggagcagccaggcggccgca

SEQ ID NO: 137236 - DNA, 687 bp, Homo Sapiens
tgcggcccgcctggctgctcctcggggcggcgaccgggctcacgcgcgggcccgccgcggccttcaccgccgcgcgctctgacgccggcataagggccatgtgttctgaaattattttgaggcaagaagttttgaaagatggtttccacagagaccttttaatcaaagtgaagtttggggaaagcattgaggacttgcacacctgccgtctcttaattaaacaggacattcctgcaggactttatgtggatccgtatgagttggcttcattacgagagagaaacataacagaggcagtgatggtttcagaaaattttgatatagaggcccctaactatttgtccaaggagtctgaagttctcatttatgccagacgagattcacagtgcattgactgttttcaagcctttttgcctgtgcactgccgctatcatcggccgcacagtgaagatggagaagcctcgattgtggtcaataacccagatttgttgatgttttgtgaccaaggtgagggctgcaagtgttttctaagggttgaaacatcagaataaaggtatggtggcaagtcctccttctgctaggctggctggcaaggccctatgtcttgacctaggtggtagttacaagggtatttatttgccttataataattcactaaactatgtatttgagtagatttttatgtgt

SEQ ID NO: 137237 - DNA, 489 bp, Homo Sapiens
ttttcaaggttttttttcctttattaactcagggagttcctgagcattttccatattaaaggaattatactagatgattaaaggatgcaaacaggaatacaacacagtccctgacttttctccctctacaaaatcaagtagaagtggattaatatgtaactcttcctctgaaataaggagtctatttcatggttgttctgtagtgacaatgcctcggggatcccacctttatcacctttgcacccaactgtccatcactcctgtgcaggggatgctggtgtttagatcttaggaattcctttcagcatgtttgaagagctagagctgagaaatgcgccctccagtggtagtggaatgaggggtgtctagtaaccctttttaccaccaaacaaagccctgtcacgttggccaaaggaaaatttcactttcgacttaacaaaataagacctcagatttgatagcttgcagtaagtcccgcttggcgacgat

SEQ ID NO: 137238 - DNA, 552 bp, Homo Sapiens
tctttttaagtgacaaaacttgtacatgtgtatcgctcaatatttctagtcgacagcactgctttcgagaatgtaaaccgtgcactcccaggaaaatgcagacacagcacgcctctttgggaccgcggtttatactttcgaagtgctcggagcccttcctccagaccgttctcccacaccccgctccagggtctctcccggagttacaggcctcgctgtaggccccgggaacccaacgcggtgtcagagaagtggggtcccctacgagggaccaggagctccgggcgggcagcagctgcggaagagccgcgcgaggcttcccagaacccggccggggcgggaagacgcaggagtggggaggcggaaccgggaccccgcagagcccgggtccctgcgccccacaagccttggcttccctgctagggccgggcaaggccgggtgcagggcgcggctccagggaggaagctccggggcgagcccaagacgcctcccgggcggtcggggcccagcggcggcgttcgcagtggagccgggcaccgggcagcggccgc

SEQ ID NO: 137239 - DNA, 502 bp, Homo Sapiens
tttgtagctttttgcaggcatacatttttcctgtggctcgcacttgacaggcgcaaacctctccaaatccgccttttcctagaactctgtaatgtctaaatgtgttctttgttacgggttgcctttccagccatttccattgtaaaaactgagaaaaatatgagctttcttggtattcttcaaatggttcccctcttaggtagttatgggcaactctagtacattcctcaaagacttttttggaagggttctcctccttcagtcccaatctacattctgtcacaacatctggaggtatttctggtaaaggggctgccaacttatcattgaagaatctatctaagattgacagtccacagtcacttcggtcctcatcatcggcaacttcatattctgccactgcatccaagaattcaatgtgcctctttagagtgggtttggtatcacagaactgcctgaagagaagtctttctatcggttgcgtgtgcaaagacaggtataa

SEQ ID NO: 137240 - DNA, 486 bp, Homo Sapiens
  misc_feature (158)..(174): n is a, c, g, or t
agaaatggaaatttatttaatgtataagatgacttactgaaaaaaagtagaggggtagggaatgacattttattataacagcatttgtataaaatcattttgatcatctttaagtatgcacaaacagctatcgaaaggcatgtaaacatgaaccaagnnnnnnnnnnnnnnnnnctaaaagcagtaaaaacatttatacaggacattatgaaagtctaatgccatcattaggacccaactgctgcaggttaccagtgtggaattgcatatcaccagatgctgttccacaaatggacaggcaagcaggatgatagcattctcttgattactataatagtcacaataatacttataattaaagaaagcttcctttagctggattaccctgcataaataggcaacacagttaatcaaatgtaaacatatgttttctaacaccagtatagaaaatacaaaactaattacaatcagaacaatttctacctt

SEQ ID NO: 137241 - DNA, 280 bp, Homo Sapiens
  misc_feature (45)..(45): n is a, c, g, or t
  misc_feature (79)..(79): n is a, c, g, or t
  misc_feature (89)..(89): n is a, c, g, or t
  misc_feature (106)..(106): n is a, c, g, or t
aaaaaatgtgtatatatattagctaattagaaatattctacttcnctgttgtcaaactgaaattcagagcaagttcctnagtgcgtggntctgggtcttagttctngttgattcactcaagagttcagtgctcatacgtatctgctcattttgacaaagtgcctcatgcaaccgggccctctttctgcggcagagtccttagtggaggggtttactggaacattagtagttaccacagaatacggaagagcaggtgactgtgctgtgcagctctctaaat

SEQ ID NO: 137242 - DNA, 369 bp, Homo Sapiens
ttttgggtagtggtggcaaactttaatgcctaattggctacatggagaattgtcacggtgcttcgatgtccattgtatcactttgacccttccacctgatggctgcacttcagttctctgctttctggggctctgttgcattggcggtgatgaggttctccacctgggcttcctcatctcctggggcccggggcttctgattgaaactgcacttgcacctgcgacttaggataaggaggatcccaaccgagaagaggaccacagcgaacaccagtcccccaatcctcagggtctggtaatcataatgaaaagggtccatttccttctccttttcagctgcactggccaggaccatgggggccagcaggc

SEQ ID NO: 137243 - DNA, 748 bp, Homo Sapiens
cctgccccttgccaccaccattcaacacacacatacaacaccatcacgggagtggcagaccgcagctgcagtgggagcaagtgttatttgcatcatcaggtggaggaatggtgttagaggggatagggtgggggacacacaagttcttggcttctcctggggaaagggctgttgctgaagtggccggttttcttaagcatcgacatttgcatccaaaggttcaagcagccgcctcaggttccagaggcttccacctgatggctgcacttcagttctctgctttctggggctctgttgcattggcggtgatgaggttctccacctgggcttcctcatctcctggggcccggggcttctgattgaaactgcacttgcacctgcgacttaggataaggaggatcccaaccgagaagaggaccacagcgaacaccagtcccccaatcctcagggtctggtaatcataatgaaaagggtccatttccttctccttttcagctgcactggccaggaccatgggggccagcaggctgcagaggaagaccagcaccaactccatggcgtcttcctccggccttgagcaagcagccgccactgcacttcacctctcggccaccaggggtcagaacgactgcatccacagccacgtcaaggcccaaacctgcacagccggtcccctccgagactcccaggaggacccgccgagtcccgcctcgtgccgaattcaacacccagcctcgtacctagccga

SEQ ID NO: 137244 - DNA, 1037 bp, Homo Sapiens
  misc_feature (394)..(428): n is a, c, g, or t
tggcagtgctcttgtgccccggatttcccggggcctacgtcttccacgggcccacccctgtttaagtcctgaaaggcctcagctgtatcgtgggaaggaacacagttttttaaaggagaaaaggttcctgaaattgttgccaaagcgcccaacctttcccggttccaagacgatgaggacctcgcccgtggtttttacctaacgcatcctaattcagggagggctgtctcgggcaacaagcacctccttaggagcagaaagttgatggaggccaccgggggccagggaggaggcagatgccacgtggctcagcccctgcctgggaaagcgagtccacagttcactaccacacataccatccacaacaagtagccacaaagaccacagttagcannnnnnnnnnnnnnnnnnnnnnnnnnnnnnnnnnntcacgggaggtgggcaggaccgcaggctgcagtggggaggcaagtgttagttgcatcatcaggtggaggaatggtgttagaggggatagggtgggggacacacaagttcttggcttctcctggggaaagggctgttgctgaagtggccggttttcttaagcatcgacatttgcatccaaaggttcaagcagccgcctcaggttccagaggcttccacctgatggctgcacttcagttctctgctttctggggctctgttgcattggcggtgatgaggttctccacctgggcttcctcatctcctggggcccggggcttctgattgaaactgcacttgcacctgcgacttaggataaggaggatcccaaccgagaagaggaccacagcgaacaccagtcccccaatcctcagggtctggtaatcataatgaaaagggtccatttccttctccttttcagctgcactggccaggaccatgggggccagcaggctgcagaggaagaccagcaccaactccatggcgtctgcacagccggtcccctccgagactcccaggaggacccgccgagtcccgcctcgtgccgattcacaccagctcgtactgcctat

SEQ ID NO: 137245 - DNA, 618 bp, Homo Sapiens
  misc_feature (44)..(109): n is a, c, g, or t
ggtaattacagaagtttattaaaatttcacttgcttttacattnnnnnnnnnnnnnnnnnnnnnnnnnnnnnnnnnnnnnnnnnnnnnnnnnnnnnnnnnnnnnnnnnnctgcctcatccagtaaacagtcactgaaattttaattaagagtgccatacccatgaggctggaaaagtatgtcctctcaagggctaaaaactgagaaccaagagacaatcatttctgtaactccagctcctctttctcccacaaaatgttactgcagccagctgagagctgcagggtatgtcaggtcagacacaacctggtgctatgagatgtgggggaggcatgctgcagaacactgcataaagtcaaattcgtcttcattattacaacacccatgataagaatttctttaaaaaaagtattccatacttgagttatgagagattttagttttgggtttctatagaccagaactctctagaacccagtctctatttgttggatctatactttcagttacaattcgatgcagcataactttcacttaaggaagaatttgtatacatgtcatttaacatcaaaatttcattctgtggaaattagggttcccaccctcctccccaaactac

SEQ ID NO: 137246 - DNA, 1109 bp, Homo Sapiens
ttttaaaaagacaaaattgtatctgtcagtccctgaaggcagtttgtttttatactctctcacatttgtatttgttttttaaatggcagtattttagaagatttggagaaaagtccacataataatgttttcttaaaagcttttaaagtttttgctgtacttcaatttacttcttccatcagaaaactaagaaccaagtgttgctcagtctgttccggctgacctaaatttgtgttttcagcacttggctcagccaattcactgagtgaaggaattgctttatgaggcaaagcatgtgaaagttctaaagtatggttagattgtaggtcgtgctctatatggaaacatcaaaccattactacagagaaatgataaggcattggatccactattgaaattattatttttggatcaacaagttggtactttctgacttctgtatcttaacataagggaattttaggtaatgctaagtccgttgtctcattttttgtggataagttttgggaatttttagttaattgaaaataaataatgccttttaaatagaagtaaaaggtttataagtgtgcaaattcgtagatttatcaattacctcagcaggtatcctgccatgtaattattagtgattagtgttaataagataatagattcaggtcttccaactatgcccttggattgtggcctactgtatgttattaaatggtctcttactatccaaaatgggagtagatgctgtggccccgtctcccttggcttttacgtcccatatccacccccattcatgtacaacatgtgaaatataaaaatctcatttcttgtcaaaatcagcactgcttatttgcatactcagcatcggatcagtgagtagttctataaaaaatccacgcacccaactcccttagttaaacagattcttattcataccatgaattcttaatttcttgtaccatctatgttaatgatctgctgaaggtgactcaagattttcaaggtgtacatacagtctgatcactgtcccggacctggatattcaattcttttccctcacaagttaatctccctccttgattaagcaataacacatgttttgagtctgttggctaata

SEQ ID NO: 137247 - DNA, 469 bp, Homo Sapiens
  misc_feature (49)..(49): n is a, c, g, or t
  misc_feature (60)..(60): n is a, c, g, or t
  misc_feature (254)..(254): n is a, c, g, or t
  misc_feature (269)..(269): n is a, c, g, or t
ccccataaaacccggttttgtacctcaaccgcaagtaaaacttgccaanggttttaactnttccttggttgtggtgatacccttataatgtgggttttgaatttcctacattctcccgtgaactggattcaaatcctgtgaaggaatcaattcttttcatgcccctgtactatcccatcgttattttaaaaatctcacaggacatgttttggaagaggggtagggcgactccacctgcatacactggcataccngagtttgggcacccnaaaggagctattttcccaaagaagacggtttcctgttatgaatgaagctgtgcttgtattggacatgattgcattgcagcattgcctatgagtgcaagatcagattacattctctcccacccgagatttcctcttgcagtccttatgcaggcctccatttaaacctgcaagagtgagctcagtgaatttctaatcatatt

SEQ ID NO: 137248 - DNA, 302 bp, Homo Sapiens
  misc_feature (115)..(115): n is a, c, g, or t
tatccctgccatgatcagattttaagaaggaaggtattccagcttaccatcctggattgcctaggccccatatataaataaaaataacgtcccccaatgtagtttccaaaactgncttttggctagtttgagatgatttttctaccctgatggggaagaaacgtccaaccttgttagttacacatgattccaggtccaaaactgtcccaccagccttacagatatcctatgggccagctaatagtcagtgcacccttggctgcccatcttgagtgctggccttattcacaaacagaaaaaaa

SEQ ID NO: 137249 - DNA, 723 bp, Homo Sapiens
cactgcagacatttattgggggtcatcttccctaaggcaccaacaaagggggaacgggccacagcagggctgcagccacggtctccaaatattgcccagcctgtccagctgcagaggaactgggctgagtgtccgctggtgttcccacaccgcctgctggactcgttccatcacctgataaaacacgggctctgaggctggtgtgaggatgtgggtctcagaagggtctcttgagaggtcaaagagcaaaggtggatcgtggtggactactttttccccaaagcacgggcagacctttcttccatagcaggcaccggctccctctggctggaacacaggcgtcacaaagtggactttccacattgttcctctgtcccgttgatgccacctggctgcgtgcagaaacctctcacaataatgcatcaggaactcgtggtctgagtgttgggctgtccccaggagcaagggcagaaggtcttggccgtcaatcactctgtcctggggcacctcgctgcccgccagccggaccacggtggggaacacgtccatcagactcgtgggctcgccaatcactcggccggccgggagcaccccgggccagcggaagatcccgggcacgcggatcccaccttcccatcctcccatgcccttcccacctttataaattccattccagccaccatactgggtgtttccaagttgattctctagggaaccgccgtg

SEQ ID NO: 137250 - DNA, 383 bp, Homo Sapiens
  misc_feature (228)..(228): n is a, c, g, or t
  misc_feature (319)..(319): n is a, c, g, or t
  misc_feature (324)..(324): n is a, c, g, or t
  misc_feature (359)..(359): n is a, c, g, or t
acgcgaggagggttgaggggtctggaaggttctggtctcttaccttataaagtttttcgagaaaccctttttccctccacaatggaactagacctaacaaaacaagctccgaggcagtttaggagaaaggaggacgcatttgcaagtgaggaagcagcacaaccctgggttttagataatttctaacagagaggccccagcaattcagcaggcagcgtcctgagtctnttggaaagcctgggtccctctttcggaaatttctccaccctttgcgaacagagggtctttaggacacaagattcttaaaaggttgaaggtnagccncgccatgagaggggtatcttgtgggccatattccngaagttgctggtcttccccccaat

SEQ ID NO: 137251 - DNA, 569 bp, Homo Sapiens
  misc_feature (47)..(47): n is a, c, g, or t
  misc_feature (208)..(208): n is a, c, g, or t
  misc_feature (213)..(213): n is a, c, g, or t
  misc_feature (220)..(220): n is a, c, g, or t
  misc_feature (227)..(227): n is a, c, g, or t
gattcggaacgagcgagtgtctgcttctttctagatgagtgaaaggnatttgccagcccatacagaggtgctccttgaagggcccatggtatgtctccatacagtatctcctcgtctccacacagtatctcctcatgtctccatacagtatctcctctcgtggttttatcaaaggacttttctccccataagcttactgtttacaaantgtcnctaaaanaggggtnggcaagaattatacaaagcatctacatgaccagtgatttctaagggccacacagctggtttggtttattatgtgaaaaagcatatcacacggagtatacaggaaatacctcaagtatttgttgaaggagcatcatcaatttctccttgaacatacagcctccacaaaggaccatccctcatactagcatacttgaggaaaagctaacagcttatctacccacacctttgcattgctatggactgaaggtttaaagtgtagaatcgttttggctactcagcaggaatgtcatctgggccattctgtaggagaaaaagcctctaccaaaagtttgcacttgacc

SEQ ID NO: 137252 - DNA, 443 bp, Homo Sapiens
  misc_feature (393)..(393): n is a, c, g, or t
  misc_feature (402)..(402): n is a, c, g, or t
  misc_feature (411)..(411): n is a, c, g, or t
  misc_feature (420)..(420): n is a, c, g, or t
  misc_feature (433)..(433): n is a, c, g, or t
taacaatcaggcatttttaattagataatccactcatgtatttccccctcactgcagttgtctgcatttttagcctcttttctcttcgttagttgtcagaatatgccttcgtcaaggctcagaggtaacaagacagaaaattcatctgggattttcctgctgtggctggcacattcttctgattaacagacacttgtatgatgctttaggctagttagtgcattttttagcaaacatttatcttaaacatcacagatccactggggggtgcaaggggctactgttagtcctcttgttagatgcagtcactcctcctgggtcacctagtgagcagggacagagccaggagtcaagtgcagtgccaaggtgcatggaccctcttgagaagttcantggggctgnttttgaccntccgattcntggttgtggcaantgccatgttt

SEQ ID NO: 137253 - DNA, 1012 bp, Homo Sapiens
  misc_feature (764)..(871): n is a, c, g, or t
gtttttaaaattcccatgaaaatctattttataatcatttcaaggttagaaaaaagaaatcctaaactggcattgagggacaggcccaaatctcacaaagtaacttaaattctaggaatatataaattacattcatatgttcatttaacacgtatcaagtgctatgtaaggtaactgtaatggattctgaaggccaatctcatttaaaacagtacagtaaatcccattctaattctacaattaaagccacttattccagggtaatgtgcgtttcaagcaaaggctgacatcttgtacaacaagtgtcaccttaaagcttcatcaaagattcacagcaggccctgaactgtaaaagttcagaaccaacaatgccacaggtagttattcatcctaatttctcgcagggagtgaagggtctacttgagtgatcctaaggtcacctaagcctagaacagtgttccctgaaaactccagcaagtttcctcaccaaaatctcttcagtgtaatgtgtttgggacttgctaggctagaaaaatgggttccactgatgtataaacatacattcgacaccttcaagaggtgtacagacatagtgtttcccagactcacttgacctttccagggaacacctggaataatcactggctcttgggacagtcatttcctagggaacacaattagaggaataccaagttaaagcagattttctaaagtagtggttcacatattgtagtaagcatcagaaacacagatgccacaccccnnnnnnnnnnnnnnnnnnnnnnnnnnnnnnnnnnnnnnnnnnnnnnnnnnnnnnnnnnnnnnnnnnnnnnnnnnnnnnnnnnnnnnnnnnnnnnnnnnnnnnnnnnnntggcacctgttgagaggatggcctgcatagatctcagctgcaggaagccctcctatggcctcaggaaaggctgcacatggcatttcggacgcgtgggcggacgcgtgggtcgacgatatcccgggaattccggaccggtcc

SEQ ID NO: 137254 - DNA, 1012 bp, Homo Sapiens
  misc_feature (900)..(934): n is a, c, g, or t
  misc_feature (938)..(969): n is a, c, g, or t
cgttgcctctggtgttccccagctgccgcacctggggtgaccaagcacaggacatgagaattagcaggttgcggcgcacacctccactgaaggaataaaccacccccattctctgccgcaggacctaagaatcacggccatgcccgcgatttcttagtgccatctgttccaaagagggctctaatgctttccagaagcatctttgcgtgccactccagagtttgcaggtcccagcagtctggtttccattcaacatatagcatcatctcttaaaatctccatggcaataataggaaccagttgtaataaactggatcagctcattggaaaaagggtcttgactggtgatctacatgaaaatcccatgcttctttccttgaaagcatcatcattttgagtttggttatagtaaatccagctttgtttattatttcaattagtgttctccagcctttgatattgcatctggtttaattagggctagcggttttttctttcctactgcccagctggcgagctgtatattgatccccatagtcaattaataccagttgtcgagaaaagacattcactttgttgcctataaataaatcttccaagtgcaggttatcatatttggtccgctttaaaaaggtgcgatgattctttacatcatgcatttcaacagatccatcccctgggtaaaataaaagctcataacgtcgaagaagtgaagcatttggatcataccactctgcaatgaaaacgaatctttcactatgattcattgtctcaggatctcagcactagaaaataggtatcgttgagacaggaagacaccaccaccaccaccatcatacggttactcccccggccgtaatggccgaattcccgggcatatgtccggtcaccgtcgactgnnnnnnnnnnnnnnnnnnnnnnnnnnnnnnnnnnnccgnnnnnnnnnnnnnnnnnnnnnnnnnnnnnnnnatcttcgctaataaggtgagccccatagtgattattcaagtct

SEQ ID NO: 137255 - DNA, 434 bp, Homo Sapiens
aaatatttaagagtttatttgagcagtgatccatgaattgggcagctccaagccagaagtggctagggagctccccagagagaacatgaggaggaggctttttaggacaaatagataaaagcaaagataatatttcattggttacagttatacagttacacagttatacagttgccttatttggtctatcccatgaggaagtcctagttactaattacgtttttgttggctgcttctgattggttgagcttaagttctgtgtttctttaacataggcatttacaagaaataccacaaataaagtttcagacatgcttgcaaatcaagcaaggttaaggtcacttaggaggcccaactggctctgtctgctcaaggattcttctggggagctccctagccacttctggcttggagctgcccaattcacctcgtgc

SEQ ID NO: 137256 - DNA, 501 bp, Homo Sapiens
tttttttaaatatttaagagtttatttgagcagtgatccatgaattgggcagcttcaagccagaagtggctagggagctccccagagagaacatgaggaggaggctttttaggacaaatagataaaagcaaagataatatttcattggttacagttatacagttacacagttatacagttgccttatttggtctatcccatgaggaagtcctagttactaattacgtttttgttggctgcttctgattggttgagcttaagttctgtgtttctttaacataggcatttacaagaaataccacaaataaagtttcagacatgcttgcaaatcaagcaaggttaaggtcacttaggaggcccaactggctctgtctgctcaaggattcttctggcctccgtctccattttacatgaactgttgcataaataaacacagagtacctgaaacaacggaggtgatcattctgcctaccgagtgttggccacgccaagcttggagtg

SEQ ID NO: 137257 - DNA, 383 bp, Homo Sapiens
  misc_feature (340)..(340): n is a, c, g, or t
attgcccactaattccaattcttatttgatctaattgtttatagattcttgtgaacttttaccttgacaattatgttattttcaaagataatcatcttttcctattgaatccttgctcttctgactgcctgttcctatctcatggtattggccaaaccctgtgatgccgtgttgaataggagtactttctcaccacacttgtcttccttccgcctctatgggaatccttccaaaaaaacggcaccattaagtgttatactcgctgtagctcctccttatgaagttctcttctcattgtagtctgttaagtgtttatgattaaagagtgttatattttggntaaatgctttccgcagtatctttggagatgatcatgttttttc

SEQ ID NO: 137258 - DNA, 1165 bp, Homo Sapiens
aaggtagcgaggcctgggtggcgatttcggcacgagggacgggtcggtggcgctggcggttgctgtcagctgattcccggggttggtggcagcggcggtagcagcaatggactttctcctggggaacccgttcagctctccagtgggacagcgcatcgagaaagccacagatggctccctgcagagcgaggactgggccctcaacatggagatctgcgacatcatcaacgagacggaggaaggtcccaaagatgccctccgagcagtaaagaagagaatcgtggggaataagaacttccacgaggtgatgctggctctcacagtcttagaaacctgtgtcaagaactgcgggcaccgcttccacgtgctggtggccagccaggacttcgtggagagtgtgctggtgaggaccatcctgcccaagaacaacccacccaccatcgtgcatgacaaagtgctcaacctcatccagtcctgggctgacgcgttccgcagctcgcccgatctgacaggtgtggtcaccatctatgaggacctgcggaggaaaggcctggagttccccatgactgacctggacatgctgtcacccatccacacaccccagaggaccgtgttcaactcagagacacaatcaggacaggattctgtgggcactgactccagccagcaagaggactctggccagcatgctgcccctctgcccgccccgcccatactctccggtgacacgcccatagcaccaaccccggaacagattgggaagctgcgcagtgagctggagatggtgagtgggaacgtgagggtgatgtcggagatgctgacggagctggtgcccacccagggccgagccccgcagacctggagctgctgcaggagctcaaccgcacgggccgagccatgcaacacggggtccgggaagctcatccctcagatcgcccatggagcacctgacagaggaactgctcatcggtcaatgaccatctcaacaatggggttcctgccgccaggaacgggttgaacgggttccgaccgggccaggaccaccaaggccccccaaatgaaggccgaaccgggcaacttgactggatcgaaatgggggccctgaccccagcagcccccggggaacctttttcatcccaattgggcagggaattaaacctggggg

SEQ ID NO: 137259 - DNA, 1118 bp, Homo Sapiens
ggggggcccctcaaaagaggttcgccaggtcccaacgttttcccccctttgtggggaacccccaggtttccattccctccccaagtggggagaagagagagtttccccgggggtctgctgggtccaggcgcccacattcgatcaagttcaagctgcccgtctcggccctccattgggggcccttaggggttcgggcctgttggaaaccgttcaaaaccgttcagggcgcaggaacacattgtggagattgtcattgaccgatgagcagctccttttgtcaggttgctcattggcgatttgagggatgagctccaggaccccgctgtgccatggctcggcacgtgcggttgagctcttgcagcagctccaggtttgcgggctgggcctgggtgggcaccagctccgtcagcatctccgacatcaccctcacgttcccactcaccatctccagctcactgcgcagcttcccaatctgttccggggttggtgctatgggcgtgtcaccggagagtatgggcggggcgggcagaggggcagcatgctggccagagtcctcttgctggctggagtcagtgcccacagaatcctgtcctgattgtgtctctgagttgaacacggtcctctggggtgtgtggatgggtgacagcatgtccaggtcagtcatggggaactccaggcctttcctccgcaggtcctcatagatggtgaccacacctgtcagatcgggcgagctgcggaacgcgtcagcccaggactggatgaggttgagcactttgtcatgcacgatggtgggtgggttgttcttgggcaggatggtcctcaccagcacactctccacgaagtcctggctggccaccagcacgtggaagcggtgcccgcagttcttgacacaggtttctaagactgtgagagccagcatcacctcgtggaagttcttattccccacgattctcttctttactgctcggagggcatctttgggaccttcctccgtctcgttgatgatgtcgcagatctccatgttgagggcccagtcctcgctctgcagggagccatctgtggctttctcgatgcgctgtcccactggagagctgaacgggttccccaggagaaagacc

SEQ ID NO: 137260 - DNA, 425 bp, Homo Sapiens
aattttttgtggaaacttgaaaaaagatgttaaaatattaacaatgattaacttaatgggaaaaactgcaaatccctcaaaatatttccaaatgattaataattacataatttaaaaattggtggccaagtgtattgtaaactgaaattacacagttttattatgatcatgcctttttactagaaataatgtaccctccatttcaatgtcttatgaaccatacccttgtttccatgcatcagaaattttgcatgtagtttttgtgactcttagaccctaatttattagtaattgctattgtaatgtatacatttcttatcctagaaaaatatatgaaagtactattaagtgctggtatttacataagatatgtatgctcaaatattgataattccaattggaatttagatgtgataaaatgctag

SEQ ID NO: 137261 - DNA, 1057 bp, Homo Sapiens
  misc_feature (66)..(66): n is a, c, g, or t
tttgttgcaatgtattctgatatagcccatgttaaccccaaatccatcgtaggtagaagttcctcnttccccaattcatctatgattattaatgaatctttggttgcaggacctgaggatagaagcagtttcaacatttcagccatgaacgtggagactcctttcaattgactgtcacccagccctactcgggctaagatgcagtcccacattggacacttttgctgactccacatggcacaaaacacccaatttgggccatgagtactttcaccccagtttgtcgaatatatgttgatttacctcccatattggggccagtaatgatgtggaacatctgtttatctttttcaaagtatacgtcattaggaatacatgcaatttcatcttgaacttcaacacaagcatgcctggatgcttttaatataattcttccttgtcctttctccaaaatggctggtcgtacatatggaacaggtgctccatttgacacgtgagcaaagctgacaacagcatctagctgagctaacacatcattgagtgtctgcattggttctacatagcctgaagaaatattgacaatttctttaacaatggcatcctgggcttcttcatattctgttttatttttggtatactcttcatttaaagaagtcaatttgctgttggtaaatttaacaccattcttctggatatctacagtactaaagtttttattgttacgaaggactttttcttccttacaggttacacgaaagtaatatccaaactgtgcactggaatccagtttaatctgtttgccagggtccaagccaagatctctggctgcacttattaatgttgactgcatcttcttttccaagtcattcattatttctcttaattcactgagattaggatcaaatgaaggttttacaaggaattcatggttttccacctgatccatatctaaagttgtttctatcatttcccgaaacttggagaagtcagaacgaagatcagtaagaggagtcacaaaaactgccaacaataatttctggtgttttccttcatgtcc

SEQ ID NO: 137262 - DNA, 963 bp, Homo Sapiens
cggcggccgtggcgggggtggggcgcggtggcggtggcgcggagccacggcaggagcggagccgggcccggggctgggccggcgtcgaacgcagcgaaggccggaggatggaaccaggtgaggagctggaagaggagggctctccaggtggccgtgaggatggcttcaccgccgagcacctggctgcagaggccatggcagctgacatggacccctggctagtgtttgatgcccgcacaacgcctgccactgagctggatgcctggctggccaagtacccaccatcccaagttacccgctatggggaccccggttcacccaactcagagcctgtgggctggattgcagtgtatgggcagggctacagccccaactccggggacgtgcagggcctgcaggcagcctgggaagctctgcagaccagtgggcggcccatcacaccgggtaccctgcgccagctcgccatcacccaccacgtgctctcgggcaagtggcttatgcatctggcaccgggcttcaagctggaccacgcctgggctggcattgcccgggccgtggttgaaggccggcttcaggtggccaaggtgagcccacgtgccaaggagggtgggcgccaggtcatctgtgtttacacggacgacttcacggaccgcttgggtgtactggaggcggattcagccatccgtgcagcgggcattaagtgcctgctcacctacaagcctgatgtctacacctacctgggcatctaccgggccaatcgctggcacctcttgccccactctctatgagagccgtttccagcttgggggtagtgcccgtggctcccgagtgcttgaccgtgccaacaacgtggaactgcagctagaggggccaaattggggagactgcccactcccccctccatggctgggggttgggatccctcctggtcttccctcccttgtccccatggaagggccacac

SEQ ID NO: 137263 - DNA, 323 bp, Homo Sapiens
  misc_feature (158)..(201): n is a, c, g, or t
  misc_feature (209)..(209): n is a, c, g, or t
  misc_feature (217)..(265): n is a, c, g, or t
gataaaaccttcataccattttattatttaacgtgtttcatattattttaacgtgtgacatgaaacaatttcaggaaattgtattaggtattgcgctcgtgtcttcttaggcgtcctcatcccttttcacctcggagctcagcgtccttcctcagcannnnnnnnnnnnnnnnnnnnnnnnnnnnnnnnnnnnnnnnnnnnaagaaaanaaagaaannnnnnnnnnnnnnnnnnnnnnnnnnnnnnnnnnnnnnnnnnnnnnnnngaagaatgactaagtcttttgaagaccaagccctgggcaaacaatagcaaagaccctt

SEQ ID NO: 137264 - DNA, 391 bp, Homo Sapiens
atttttgtaaatcaagttttattggaacacagccacacttgtttatgaattgtctacaactgtttttacgctacagtgggaaaaagctgagttagtttacaaccagagaccattactgctgcaaaaccctagtatttagtctcccagacctttacagagaaagtttgctggctcctatactagactgtagactccttaaaagtgagaacctgatcttgttctgctttgtaaggtagaagggcagtttagtatagtggatatactacgtagactccagaggcagattgacatgggttggtatcttaggttcttgccactcccttgcaaatgactgtgggtaagacataaccactctgtgcctcatgttccccacctagaaaatggggatata

SEQ ID NO: 137265 - DNA, 1432 bp, Homo Sapiens
tgccgcccagccctccatctcagcgggatgtgcagggtgagacaggaatgccagggacgttctgcccctaggtcagcctcttcatccgcctgttgtgcttgtcgatggtcaaggttgccctgtccacaagctgctgcaacgccatccagggcttcgtcttgtctctccagctcactctcggcctccagggccagccccttcatcctcctcaggatctgggttagttcctgggtatctgcctcagaaagggctggcaggcttgtctgcaggtgcagtgctgtgccctcctggtctcctgcgggtggctcacggtgcagggtacggcccatcagcccagatgctgcatgccagactgagcagctcttctctgcgggggaagaggttcttgcgcttctgagcaccaatgcatcttctaacagctccatcttcttgctgaactgcacttctaaaatggggataacctctggcatcttggcagatatcaaacgataggccatgtctggctttccaataaaccgctggcggatgctaatttcgtaaggtgagtggcccttgatgtcgtccacgtcttctttttcaaacctgtgcatgagcaaagaactgggagtcatgtatttcccaacccagacacaaggacggtgagcctccctggtttaacgtgagactctgttctgttgggaaataacagcaggaatttttatcagtatcccttctttcccaaagggttcacaactggtcatggagacatcttccctgggctttgtttccggtggtgtcttccaaagcttggagctaaagggccaccaagcaggagattccagttctgtcagcaatctgtccgccacctccaggtctgactccatcttgtccaggcctctcatgacgctgtccagctgctggccctggtggtgcaggaccctcgccgtgtcctccaggcgtttctgggatccagccatgagtcccgtcagctcctcgccccgggtccttgggacagatgcgtctgccacggctccaggctgagacagcagcagctccctccagaaatgctcgatgatgctgaagaccacatttcgacttggccgcagggagctgaaccagtgcttggcatggcccttctccaggatggtgatggagctgaagataaaatgtgaagcctccttcttgatctcaactatgctggagagggggaagctgaccagaatctctccagtgctgtcagtcatgaacctgagcgacagcgatgttaaggacagctgtccagtaacccatcgcctcttgggctccaggtagtaggtgcacggccaggtgtggatgcagacatccctgctcatctgttcctgggtctgtgtgcgccaaggtccaggcctcttctgcctctgagggacgccagacgagtcccagagccggccgcggcgcctcggccgctcggcgc

SEQ ID NO: 137266 - DNA, 1571 bp, Homo Sapiens
tacggctaggtacgaggctgggtgttgaattcggcacgagggtctgtgcgttccattgaggccaaggggtcctggccgggttggggagccctcccataaccctgtcttgggctccaacccctcaacctctatctcatagatgtgaatctgggggccaggctggaggcagggatggggacagggtgggtggcttagactcttgatttttactgtaggttcatttctgaaagtagcttgtcgggcttgggtgaggaagggggcacaggagccgtgacccctgaggaggcacagcgccttctgccacctctgggcacggcctcaaggtagtgaggctaggaggttttttctgaccaatagctgagttcttgggagaggagcagctgtgcctgtgtgattccttagtgtcgagtgggctctgggctggggtcggccctgggcaggcttctcctgcaccttttgtctgctgggctgagggacacgagggcaaccctgtgacaatggcaggtagtgtgcatccgtgaatagcccagtgcgggggttgctcatggagcatcctgaggccgtgcagcagggagccccatgcccctgggtcgtgagcttgcctgcgtatggggtggtgtcatggagcctcatgcccctgggtcgtgagctcgcctgagtatggggtggtgtcatggagccgcatacccctgggttgtgagctcgcctgcatatgcagggtctgtcatggaacatcccaagtctgtgcagcagggagccccatgcccctgggacatgaacccacctgcgtggaatgctgtttgtgaggtgtctacagggtttatagtagtcttgtggacacagaaatgcacaggggacacttacggacacagaaatgcacaggggaggccgagcataacccaggggtgaggggcaggcagcagttgtagttactgccgcgcgggcactgctatgtgcagggacagccagcacccagcccatcaccactcccctgggctggcttggcaggtatggcaccctgggagcccggcatatacccagggcacccctacggctgccgccagtctcatgcccaggtgggtgctctgggctggagcgagggccaggttttgggccgaggcttccccaggcaatcctgtgagctcccttctagcctctgacccagtctggtctggcttgcatggatgtagggcttggggtgggaagttcaggtcctggctttgcctttgcctgatgtggatgagcagctcacatgctcaaggccacctgagactgtcactgctctcccctggctactgggaggagtcactgagagcttcgttacccctgctgccttggccaagggcacacccctatacctcccttatctgctctttcccctccctgccggctttctgggcaagtaacaagtcccctggccctcttcccccctgggctggatcactcctcccctccaggcaaggtggaagaacctggcgttctgtggaaaacccttcaagaatccttggtcacttggccctggcccccaaaaggatccttttcaggggggcacacaccccctcctggccctt

SEQ ID NO: 137267 - DNA, 1019 bp, Homo Sapiens
gagagagtatgaagtcgaggcgcgccgaattcggcacgaggtttccacaagcgtttcccggagcacagggcagcggagatccgggagaccctcacgcagggcttagagttctgtcggcggcagcagagggccgatggctcctgggaaggctcctggggagtttgcttcacctacggcacctggtttggcctggaggccttcgcctgtatggggcagacctaccgagatgggactgcctgtgcagaggtctcccgggcctgtgacttcctgctgtcccggcagatggcagacggaggctggggggaggactttgagtcctgcgaggagcggcgttatgtgcagagtgcccagtcccagatccataacacatgctgggccatgatggggctgatggccgttcggcatcctgacatcgaggcccaggagagaggagtccggtgtctacttgagaaacagctccccaatggcgactggccgcaggaaaacattgctggggtcttcaacaagtcctgtgccatctcctacacgagctacaggaacatcttccccatctgggccctcggccgcttctcccagctgtaccctgagagagcccttgctggccacccctgagaacatgcctacctgctgggtgccgtctgtgcgttccagtgaggccaaggggtcctggccgggttggggagccctcccataaccctgtcttgggctccaacccctcaacctctatctcatagatgtgaatctgggggccaggctggaggcagggatggggacagggttggtgggcttagactcttgatttttactgtaggttcatttctgaaagtagcttgtcgggcttgggtgaggaagggggcacaggagccgtgacccctgaggaggcacagcgcctcttctgccaccctctgggccacggccctcaaggctacgtgagcgcctagcgagcgcttcttttcctgacccaactagcctgcagaagcacactcccctggcggctacccgaggcctcgcacactttc

SEQ ID NO: 137268 - DNA, 1348 bp, Homo Sapiens
gtgaagagtttaaggcaagagactaacctcagtgggaaccacggtcattagctacattttggagacggcgtaataaggcagaatgattttctgggcaaattctttttgcaggtgattcacttccatcttccaaaagaattcctctctttttagtaggagtttctcctgtgcgtatcatactattaatttctctcagtctctttgaaggactgttgctgaagtaatagaaaatcttttctcgaggagaaagcattgtttcatttttatgtggggaaatgtagacaggatgattttgagacaactgtattcggcgaggggagcctgttcttacaaatggatagggagagagtggaggagcatccatatttgcctgtgagtacttcatggcaaatgtcttaatctgtttgatgtagatgttgttgtagaactgaatgaggtctcccctctcctcttcttccatgtcactgttggcacctgtgaggcgagtaggtgtgggaggagcactgctgggctgtggaactggcaaggtgctgcttgacctcataactggactggagtctctactggttctatctttgtttagttctgttggagaattctgatggcttctgctatcactgctgccagaatttcttctttttcttttcccttttatcaaaacacttctatacacctggctccgggcctgcggctgagtcctataacaacgcataatgttctggaaggacttatcttcttttgtgacctttgccatcacataaatggcacacattaataactggtccagatgtctgtccatcataagttcaggacactgaattatggagaattcaaagcaggtccagatttttttcctcaattcatctgaaatatctagtttggcacagagatcccgaaggcggacagctgctaaatggtatacctttctaaagaaaagcgataaagagctggtcttcctgggtctattactactgctggttacagactggccttgcttctgctgttggccacctggggaaatctgttgaatggccacttgaccagggacttgcaaagttgttcctgtcacctgttgagagctcagacttccagccagggcctgagcactgaggggctggatggagcctgtcacagcttgtgcctgccccccaacattgacttggacagggaagaatgttatccctccattttcattggcaataccttgcacaggaatggttaccgtttgcccattgttggctgtgacagtggcggttgccatggtgaccaaagtctgtccaggaactggtgtgacagaaaccagctccccagattcattctgcacagggacagcattgactaggggctg

SEQ ID NO: 137269 - DNA, 809 bp, Homo Sapiens
  misc_feature (21)..(21): n is a, c, g, or t
  misc_feature (37)..(38): n is a, c, g, or t
tcatctttccagggttgtaanccagtagtgatcaggnnccgtgggtgtggtttacacatatccccataaaggaatcagagccagggtcacgcgggaaccatcctctgtgggaatttggttttgcctcgtcataccagaagagactgcccacctgtagtcctcgtaagtgaaagaatccttcaagggtagtttgttggcatgaggatgggtctggatgactttatagaagtaggcgtactgtcgagctgtgtttttatactggctgaagacatcatgtatagcttgtgtggactgaagataccgaacttcatcttcttcaaagtagagaggagtgtcatattcactggggagggtttgaatatagggctgccagaaggagttagggctggctcgctcacacagcaaatgaaaggccagtgcgatgtttcccatggcttgaaggattcggtcttgagaatataagggccccaacactgaatttttagcagattcaacagtcattagcaattttcgtggaacccataaaaacaattcttctgccttgatatctcttgttgctctcaaaccaaagccctcttctttgaagttaaccatttcaaaaccctcgacagaagccccattttcagaggcccatttcattagatcaggaaagtaatcttctctttttccatcaaaagtaacggacagacctttttgctttttccgtattttctcaaccagagtccggatctgcacatactcttcccactcttttcctgggccaggcgccggactgctgcatttctgcagcagctcactggtcaggttca

SEQ ID NO: 137270 - DNA, 1012 bp, Homo Sapiens
agcccgtgggaagggcaccggtgggccaaagtgccttctcgctgggctcccccgctccgttgttccggccccgctggggcaacccttcggacgagggattgacggcccgcgcccccagcccagccgtggcgcccccgggagtcaggacagtgcccagtgtcacaacggaaccccatgcgcgcagcacagcggtgccagactgggatctcctgcctcaggctgcagcttccccgggacccacaccacagggagagcttgtctaccacacgcggtggtggaggaactttgggagctggcccctgagagctgggggggctctccagggcacaatctgtggacagccagcaggcacagctccgtgaccttgggctgggagaagggcaagccagtggcctccatgtcgaaaaatttgagggtctgcatgggccccgggggcagggcctgcgagcccatggttgggtacgtagcctgctgctgagccgtagcaggcaggcaggcaggcagtagtgactcggctgcacactctcccgcggctctcgctggcagcagtggcgggaagtgaaacttggcgtgggcccgcctacaggcccacgtgagccaggcccgccctgctcgtcagcctgcctggtctgtccctctcaccaccatccgttcccccccacacccactcccctgctcccgggggaccccagaggccttccaagatccacagctgtggcctgctggtggcacaatgcaccggggccatcataccagtgacaggcagctggaaggaccagggcagtggtgccagaccagctcccggtcttacacactgctgggagcccctgctgcggccctttcatgcccacctgtgggtcccagtttcccaggctttcctggtttaggcctgggccaagagccacctccttcctgccacacaatggcctcgtgccgaattcgccacccagcctcgctaccttagaccgttatagtactgccgtcgtttacaactgttgttgtacactgactc

SEQ ID NO: 137271 - DNA, 875 bp, Homo Sapiens
tgttgaagccttcgggggtcagcaccagaggctccttgttctcggtgcccagcaccaggcaagacacagcatcctcgtcagcccaggttcttcttcaaggtgctcatggtggtgattgactgtctgccgcttgatggagttggacttgtgtttggtttacaaatgcctccaatttcacttagctccagctgcagaaacctgagtgactggatggacaaaggctcctctgccgtctccctgcaaggaaagggggccagcatggcagccgaatggaagaatggggccctggggctcagatgggatgaaggagtgaggggggtatgaaggggaaggcagcctctcaccggatgctctccagcatctccttcagggttaaggggtcgattcggtcctctttggcctggttccaaaggtcttgttccagaggatttggaggcaattggggtaggctgaacttgaagtagggtctgagattcttatacacatagacacaagggcctgaagcaagtgccagagctggggtccggggctcatgttgctccatgaggaaggtggcagcagcagctggcagagcaggtagcgggctttcggtcatcaccagtggtcctttgagcaccttcaggcggggctgctgcccaccagggccaaggtcccctaccaccagcttgtattccccatccccatgtaaatctgccagcgctaggcaggcagaaaaggtgtggatattggccattgggtcgtagtgcgcatccaaccacttcgaattggcctcattgctctcagctccgcaggcgtcggaatccgatgagacgcagcggccatcttcgcagccctcgtgccgaattctcaacccagcctcgctacctagcgtatac

SEQ ID NO: 137272 - DNA, 1177 bp, Homo Sapiens
  misc_feature (1118)..(1118): n is a, c, g, or t
  misc_feature (1129)..(1129): n is a, c, g, or t
tggaccggtccggaattcccgggatggccgctgcgtcctcatcggattccgacgcctgcggagctgagagcaatgaggccaattcgaagtggttggatgcgcactacgacccaatggccaatatccacaccttttctgcctgcctagctggtggtaggggaccttggccctggtgggcagcagccccgcctgaaggtgctcaaaggaccactggtgatgaccgaaagcccgctacctgctctgccagctgctgctgccaccttcctcatggagcaacatgagccccggaccccagctctggcacttgcttcaggcccttgtgtctatgtgtataagaatctcagaccctacttcaagttcagcctgccccaattgcctccaaatcctctggaacaagacctttggaaccaggccaaagaggaccgaatcgaccccttaaccctgaaggagatgctggagagcatccgggagacggcagaggagcctttgtccatccagtcactcaggtttctgcagctggagctaagtgaaatggaggcatttgtaaaccaacacaagtccaactccatcaagcggcagacagtcatcaccaccatgaccaccttgaagaagaacctggctgacgaggatgctgtgtcttgcctggtgctgggcaccgagaacaaggagctcctggtgcttgaccccgaggccttcaccattttagccaagatgagccttcccagcgtccccgtcttcctagaggtttctggccagtttgatgttgagttccggcttgccgcggcctgccgcaatggaaacatctatattctgagaagagactccaagcaccccaagtactgcatcgagctgagcgcccagcctgtgggacttatccgggtacacaaggtcctagtggtgggcagcacccaagacagcctgcatggcttcacccacaaggggaagaagctgtggacagtgcagatgcccgcagccatcctgaccatgaacctcctggagcagcattcccggggcctgcaggccgtcatggctgggctggccaatggagaggtccgcatttatcgtgacaagccctgctcatgtcatcacacccggatgcagtgacagccttgcttggncgtacggcggnagacacacctctcatgacaccgagtggtgctgatacagatctgacgac

SEQ ID NO: 137273 - DNA, 798 bp, Homo Sapiens
ctcgggtggagacatgacaggctgtcacgataatgcgactctcatgcccagccagcatgacgctgcaggcccggggatgctgtccaggagttcatgtcaggatgctgcggcatctgcactgtccacagctcttccccttgtgggtgaagccatgcaggctgtcttgggtgctgcccaccactaggaccttgtgtacccggataagtcccacaggctgggcgctcagctcgatgcagtacttggggtgcttggagtctcttctcagaatatagatgtttccattgcggcaggccgcggcaagccggaactcaacatcaaactggccagaaacctctaggaagacggggacgctgggaaggctcatcttggctaaaatggtgaaggcctcggggtcaagcaccaggagctccttgttctcggtgcccagcaccaggcaagacacagcatcctcgtcagccaggttcttcttcaaggtggtcatggtggtgatgactgtctgccgcttgatggagttggacttgtgttggtttacaaatgcctccatttcacttagctccagctgcagaaacctgagtgactggatggacaaaggctcctctgccgtctcccggatgctctccagcatctccttcagggttaaggggtcgattcggtcctctttggcctggttccaaaggtcttgttccagaggatttggaggcaattggggcaggctgaacttgaagtagggtctgagacctcgtgccgaattcggcgcgccgtcgacttcatactctccccccccttatcccagagcct

SEQ ID NO: 137274 - DNA, 967 bp, Homo Sapiens
gacgacgcctgcgaagatggccgctgcgtcctcatcggattccgacgcctgcggagctgagagcaatgaggccaattcgaagtggttggatgcgcactacgacccaatggccaatatccacaccttttctgcctgcctagcgctggcagatttacatggggatggggaatacaagctggtggtaggggaccttggccctggtgggcagcagccccgcctgaaggtgctcaaaggaccactggtgatgaccgaaagcccgctacctgctctgccagctgctgctgccagccttcctcatggagcaacatgagccccggaccccagctctggcacttgcttcaggcccttgtgtctatgtgtataagaatctcagaccctacttcaagttcagcctgccccaattgcctccaaatcctctggaacaagacctttggaaccaggccaaagaggaccgaatcgaccccttaaccctgaaggagatgctggagagcatccgggagacggcagaggagcctttgtccatccagtcactcaggtttctgcagctggagctaagtgaaatggaggcatttgtaaaccaacacaagtccaactccatcaagcggcagacagtcatcaccaccatgaccaccttgaagaagaacctggctgacgaggatgctgtgtcttgcctggtgctgggcaccgagaacaaggagctcctggtgcttgaccccgaggccttcaccattttagccaagatgagccttcccagcgtccccgtcttcctagagggttctggccagtttgatgttgagttccggcttgccgcgggctggccgcaatggaaacatctatattctgagaagagactccaagcaccccaagtactgcattcgagctgagcggcccagcctgtgggacttatccggtacaccaaggtactagtggtgggcagcacccagaaagctggatgggttcacccaga

SEQ ID NO: 137275 - DNA, 1021 bp, Homo Sapiens
  misc_feature (119)..(119): n is a, c, g, or t
tttttttccccccttgttgggtgaaagcccatgcagggcctttctcggggtgctgccccacccagtaggtcccctggtgtacacgggataagtcccccacagggctgggcgctcagctngatgcagtacttggggtgctgggaagctattctcagaatatagatgtttccattgcggcagcccgcggcaagccggaactctacatcaaagctgtccagaaacctctaggaagcacggggacgctgggaaggctcatcttggctaaaaatggtgaagtcctcggggtcaagcaccaggagctccttgttctcggtgcccagcaccaggcaagacacagcatcctctgtcagccaggttcttccttcaaggtggtcatggtggtgatgactgtctgccgcttgatggagttggactctgtgttggtttaccaatgcctccatttcacttagctccagctgcagacacctgagtgactggatggacaaaggctcctctgccgtctcccggatgctctccagcatctcgttcagggttaaggggtcgattcggtcctctttggcctggtgtcctaaaggtcttgttccagaggatttggagcgcaatttggggcaggctgaacttgaagtagggtgtgagattcttatacacatagacacaagggcctgaagcaagtgccagagctggggtccggggctcatgttgctccatgaggaaggctggcagcagcagctggcagagcaggtagcgggctttcggtcatcagccagtggtcctttgagcaccttcaggcggggctgcatgcccaccagggccaaggtcccttaccaccagcttgtattccccatccccatgtaaatctgccagcgctaggcaggcagaaaaggtgtggatattggccattgggtcgtagtgtgcatccaacctcttcgaattggcctcattgctctcagctccgcaggcgtcggaatccgatgaggacgcagcggccatcttcgcaggtgatcccgggaattccggaccc

SEQ ID NO: 137276 - DNA, 868 bp, Homo Sapiens
ccttcaaaaggcccagtgcccccattttggataataaacttccaaatcgagtatcaggcagtggtctgaccacatgattgcacttaggtgagatggcctttggtatatagggtaacaacaggttttttctttagctcataagagggcaggcatgattggctgcaggaatctttgttaggataggaattctcaaaacgaggtgtgatcacatccttaggatttaaaatgtctttcgagcagtttgtgcaggttttctggggaggaggtggcaggcaggcaggtgaagaaggtctggtgatgcatcgtgtggagcagaagagctgagtagatcctgtcttatgatatgcagtttggcccttataaagcatttttttacaaccagaacaaaaaaccttaatagcaacagctggaactgaaggaagcaacacacttgggccagatgatgcaaaagaaagctgaaagcctgggttcaactgctgggcaatagggtctctcattaactgaagacacaccaccaattttcaatttactttcttgagtttttggctgttggacacatccatactcttgagcattgtctggttcttctttaattttgtccagaagctcctgctgtggtaccactgctttgccacattcaccatccaaaggttctttcattctaattttttacctcaaagagtgtctcaggctcaaacgaatagatttcttcttggtaatggatagttggacaccttctgtcgcctccctgctaccggaggagcactggaataggaaccaagtcctctgcatctagacagggattattttctcttctggaattccgcctgatccatcccaacgcaacaaccggccaaccacgcctccc

SEQ ID NO: 137277 - DNA, 484 bp, Homo Sapiens
ctcgctgccagcagcattgtgccatcacttcctgcagctatgacagcatctgcccatcgaacagtctcttcatcatattctctcctctttactagacgaacctcaattccctcattccgtaaactatctataatatgttctacatttttggtgtgaatatgatgtcgttcaagaagtccactgtaactagagcctttcaatgcaagcagctgcttcaggtcctcctccgagaagagtccgcgtaacggtaccgctgctgctcgaactcgtaccgggtggttttggccaccaccaccacccgggaggggcggaagccgccgtccgcgcggctgccacagcccgccagctcgcgcggctgcccctgccccaggtgccgccggccgccaccgtcaccgcccagccggggccgcgcggcggggcctcccgcacccggtccccgcagcgccgccgcccggccgcccgccacgcgacaacagctgcccag

SEQ ID NO: 137278 - DNA, 579 bp, Homo Sapiens
  misc_feature (344)..(344): n is a, c, g, or t
cagggcttctgggccttgcggaagccgtcctcggccgcccggctctcgcggaagccgcccagcacaggccggtggaaagccccccgctgccaggcgcgcacccgctcactgtcctgcccttgcagcttctcccgcacctccaggtgcagcgcgctcagccgctcagccgccgtgaaaaaggcatgccaggccttctccagtgtgccatactgggggcccttctccacggtccccttccactttggggcccagtcagccaactgcttgggcataagccttctcgatgcgggcgcgctcctggaagcagctgaccaggtccccgcacagccggtgcccgtcctccnacccgctgtaccgtgcgcctgtagttgccagcctcccagaaactgccccctaaggcctcccctccagcgtcctcttctggagccatggtgtccccgcagcacggaatggtggcggatttgggctggggcctagagatcacttcaaggacccgggtgtccaactctcaatgctgccaccgtgactctgccgcgtcctcctgggcccctcgcgggtggggtccgccacgctccgccc

SEQ ID NO: 137279 - DNA, 229 bp, Homo Sapiens
  misc_feature (208)..(208): n is a, c, g, or t
cacttgattggaaagcttgttgttggtgattcgcagagcagccaagatccctgccacagcaacgggggctgtgcctcttgtcagggtccccaagtacctccaggtggccaaattcagtaatcagttctcagccttcttctttcttgacctctcagcagcatttggtactgttgcccatttttttcctttgggaagctatttctgcacntggtacaggccagaactcaag

SEQ ID NO: 137280 - DNA, 1262 bp, Homo Sapiens
gggggggtcttaagcccattacaggaagcccctttttccgttttcccttccttttgcccttggttttgttcccaggccccagttcaatccagggaccccctggggcagcctccccggagatgggattcggtttggggttaaggggcatcggggtcctgttgacagccaggggttgcaggaaggatgccctgtggctgtgagccgttcaagctggcttccggacgaaggaaggcagcgaaccagacagcggggcaggggccgagaggcttgcaggcaaggcgtaggccccgcggccgggatcttgccgaagagcaggacaggctccgagtcctggaaggggtagtggccggccagcatggtgaagagcgccacgcccaggctccagacatcggctgccttgcccgagtatgaggcccgtgagctgagtatctcaggtcccacgtaggctgggcacgcgtgcttgtcccacagggaatcatctggcccagtcagcacgcaggagtcctccaggttctccagcaccagcttcttcctctcacggtcagcgaagacaaagcgacacagcttgagatcacgcaggaccagaccgtgctggtgacagtgcgccagggcggtggccatctggcggaagagcacggcagcctcaggctcagggatacggtggcggcttcgcaccaggctgtgcatgtccccatgggtccgagtgaaaaaggcgtagaggagctgggtaccagccaggacctcagtgggccgagccacatgcttgtgcgggggcagccgcgcgtagggctccagcacggccagggcttcctggacggggtacaccttgcaggtatactcagtgcctgtagggcagtgcagggcctggtaggcccgcccgccctcctcgggctccaggaggacatagggcccaagacgggaggcagtggccacagcagttgcacgatctggagcagtaggtgggctcaggggcaacaggcaggggggcagtctgggctggggcccacttcgagctcgtttctggacgggacgctcggtatctaagttgtcatccaactccaaccgcttcttcctggacagggaacccgcaggagcagccagaggggtggctcgcatctcgccccgtcgttccgcgtgggcccgggcgccgccggggctcagagcctccagggcaccagcaggtgggccggcccgctgcgctgctgccgagctcgggcggacgcgtgggtcgacgatatcccgggaattccggaccggtccag

SEQ ID NO: 137281 - DNA, 1104 bp, Homo Sapiens
tccccaggaagggagggcaaggggaccccagacacaggggccccgggcccacaaaggcccctccaggccaaagggtagggcccccgcggcggtatctttccgaagaagcaggaccgggcttccgagtccctgaaagggggtagtggccggccagcatggtgaagaagcgccacggccagggttccagacattcggctgccttgccccgagtaagaggcccgtgagctgagtatcttcagtccccacgtaggctgggcacgcgtgctgtccccacagggaatcatctggcccagtcaggcacgcaggagtcctccaggttctcccagcaccagcttttccctctcacggtcagcgaagacaaagcgacacagcttgagatcacgcaggaccagaccgtgctggtgacagtgcgccagggcggtggccatctggcggaagagcacggcagcctcaggctcagggatacggtggcgggtttcgccaccaggctgtgcatgtccccatgggtccggagtgaaaaaggcgtagaggagctgggtaccagccaggacctcagtgggccgagccacatgcttgtgcgggggcagccgcgcgtagggctccagcacggccagggctttctggacggggtacaccttgcaggtatactcagtgcctgtagggcagtgcagggcccggtaggcccgcccgccctcctcgggctccaggaggacatagggcccaagacgggaggcagtggccacagcagttgcacgatctggagcagtaggtgggctcaggggcaacaggcaggggggcagtctgggctggggcccacttcgagctcgtttctggacgggacgctcggtatctaagttgtcatccaactccaaccgcttcttcctggacagggaacccgcaggagcagccagaggggtggctcgcatctcgccccgtcgttccgcgtgggcccgggcgccgccggggctcagagcctccagggcaccagcaggtgggccggcccgctgcgctgctgccgagctcgggatcccagcccagctccagccctgcccgggtcccggacgcgtggtcgacgatatcccgggaattccggaccggtccagc

SEQ ID NO: 137282 - DNA, 938 bp, Homo Sapiens
  misc_feature (142)..(142): n is a, c, g, or t
tgagcgggggtttttcccaggtcccccccgtaggccagggccagggcttgctggtccccacagggaattcatttggccccagtcagcagggcggaggtcctccaggtttttccagcaccagtttctccttctcacggtcagngaagacaaagcgacacagcttgagatcacgcaggaccagaccgtgctggtgacagtgcgccagggcggtggccatctggcggaagagcacggcagcctcaggctcagggatacggtggcggcttcgcaccaggctgtgcatgtccccatgggtccgagtgaaaaaggcgtagaggagctgggtaccagccaggacctcagtgggccgagccacatgcttgtgcgggggcagccgcgcgtagggctccagcacggccagggcttcctggacggggtacaccttgcaggtatactcagtgcctgtagggcagtgcagggcctggtaggcccgcccgccctcctcgggctccaggaggacatagggcccaagacgggaggcagtggccacagcagttgcacgatctggagcagtaggtgggctcaggggcaacaggcaggggggcagtctgggctggggcccacttcgagctcgtttctggacgggacgctcggtatctaagttgtcatccaactccaaccgcttcttcctggacagggaacccgcaggagcagccagaggggtggctcgcatctcgccccgtcgttccgcgtgggcccgggcgccgccggggctcagagcctccagggcaccagcaggtgggccggcccgctgcgctgctgccgagctcgggatcccagcccagctccagccctgcccgggtcctagcagcggacgcgcgcggagccgcctccacttccgctgcgagtctcgtgcgcgccggacgcgtgggtcgacgatatcccgggaattccggacc

SEQ ID NO: 137283 - DNA, 1187 bp, Homo Sapiens
gccccagggcccgtctccggcccaggcgtgacttgccagggaggggaaagcttcatggagcagagccaatcaagctagtgcctctggctcctctgctagtttcgttctcttcgtgctgagatagctggcggttaagggcgatggcctcagctgcgaagagcgtcaggtccattgtgctgctgttccccctgcacccatgggtgctgcagaacttgggcggcgctaagtctctgctttgcgtctcgcaccaggagcttggagatgaggtctttggcttcactggagatgtgtgcccagtccttgtcaggaaactcatacttgccttcctggatgctttcaaacagcttgttctggcacaccctgcagacctcgccccggtcccagccacagtcggccccgcagtgacccacgaagggtgggtagccactcagcatgatgtagaggaccacgcccaggctccacaggtcacagcgcttgtcgtagaatgtggcctggtccgtgaagacctccactacctcaggggccatgtattctgcagagccacatggggtggtcagctctggtgtggttatgggggtacaggagttgttcagtttcatcccactgcccaagtcaaagtcacagattttcactggagacaccttttctggagattcacacaatatattttctggtttcagatcacgatgagcaatgcctttggtatgcaggaagtcaagggcagcagcaacgtcccgcaccactcggctggcttctcgctcattgaagtgcttttgcttctggatgtgggctaagatggaacctccttgcaatttctcaaagaccaagtaaaaccttgtgtcatcttcaaagaactcaatcagctccaaaatgttcttgtttccctgacactgatacagcgtctccacctctcgaaacaccctactccgactgtgccctgcttgtttctcgatgattttgacggcatactctttgccattctgtaggctcacggcaccttgaactttggcataggctccctctccaagcaattcagaggtcagcttgtacatatcttcaaactttcctggcaaggagtcagtggcccggcccctccgcttcttcttcctcctcctgtcaccatctgcgatgggaaggggttcgctactgcccatctcttcaataaacacaggctcttggttgttggt

SEQ ID NO: 137284 - DNA, 302 bp, Homo Sapiens
  misc_feature (90)..(106): n is a, c, g, or t
ccttaagaagtcttcacattcctcttttacttaaggaattactgggcttcgtttctggagccttgtgagaagcattacactgtccccccnnnnnnnnnnnnnnnnnaaaattaattttcctgtaggaagcaagatcccatctgtcccttctttaggcaatgaagcttttttcacctttgcataaaagaacagctgagccccctttttaaattttcttttgtcttaccgtcccttgaggctagaagaggattctcaaggcacagagttgtgggccgacaagaatccaggttgaggaaacggtc

SEQ ID NO: 137285 - DNA, 1057 bp, Homo Sapiens
ttttaaatacttggtccgggaaagattttccccgaaatgttcgagccaagtccaaatttcccttacggggaggacccatgatgcgggatcacggggtgttgttccggagtcccccaggcccttcatagccttgaagagcctttcagcaaaatattccggggtgctccggatacacttcactacggccagcattagcttctcaaagtccccagacagctcccctcggatgctggcttcaatcggcttccctgtggtcttcagatactcatcgaacaccaaccgaagatgctgcttgctgcgatttcccaagatgtaaatgaactgggcttcatctgttccccatttcagttcccctgcctcgtataggtcctggacatcctgttgtaccaggtcctcgctcactacgtcatcctcctccctggttccctggagcaggaccacaagcatcttctggaagtggccagaggtgtcgccgatgatgtcagcctccaggtcccgctcgtaggcatctttgtatgctgccaccagctggtgcatctgctcattggtccgggaagccaagatctcaatgaggcacttctcatcagtgccaatgcccgagatggcatctttaatttctttggcatcacaataggcaggtggcctcatcaggcccacaatcaaccgttcaaacttgcccgtcaattcatactttaaatcagcaatgaggtccttgccgtagagggacttgtagctctggcagacctcctgcctctgcctgttgctccgtgaggtgattatgtccagtatggcctccttgtcactgccaaagcccttcatggcagtgtacagagcctcggcatcctggttggggtcaaagcctgggaagtcatggatggagccccggtacttggcaccctgtgctggtttggccatggtctccggttcgcagcagaatccacgcgcagcggaggcctcgggtcgcagacggacgcacgggcgcagggactcgaggacgcagcgctcgctggatcggagcccgttagcccagcagcaaccatcccgggaattccggacc

SEQ ID NO: 137286 - DNA, 702 bp, Homo Sapiens
  misc_feature (674)..(674): n is a, c, g, or t
  misc_feature (681)..(681): n is a, c, g, or t
ctgtatatatatttaagagttattatttacccagtagatcaagccaagaccaagttaggtttatgtgtttttggtttagccaaagaaaatgttcagggactaaagcagtccatcaatagaacagactgccttttaaaccagggaacaacttgtctttgtaggtattttaggtatatgaatgaccatatgtatctgctttgggtcatccatggtcccttccaacttaaaacttctctattcatgaacatagcataactgagctatggatttcatataaataatatcttgttgcatactttaggtttgaaatgttttctttttcagttgcatagatatatgtagcaccatccccgctatgaactctgatgtagaaaatacaagattctaaagtcatctgtgaggctaaatagacttaggcacttccacataatgctgcaaaaagcaacagccgtaaaggtactacctgctcaacatgtcattccaaacaaatacactatgattagcagctgaatttaacagtatctttccgctttgaaaaacactttatatacctttacaaagaagccatagtatctcagggtagaaaaacccaataggtagaaaacatggccttctcttagaaatgaactatgtaattttgagtacttatctcaaaatcatcacagaaacatatnctagtgncttgggaaaaagagatcaagg

SEQ ID NO: 137287 - DNA, 757 bp, Homo Sapiens
taatactaatagtaatactaacagtaacactaatagttaatactattgacaaccccataggcactgatttcagacatcccatgcataccacttacgcataagtagtaaatcagcaatacatataccatacagcaatacagtattaacaacccagaggcactgatctcagacatcccaaacaggctgataatgcaaatgattctttcagaaaccattgtatttaccttttgaagaaaatacctagatagtggaactgaacacaaagaattattaactagctgaaattacagccagggtttgagacagaaagtgtacattcagaattcattctcttaaccacaaaattatgctgccagagaaaatcagcaatgttaaacaagtagaagaatgttacatgataaaaatgcattttcagtaggctgtttacagtaattccaattccaaggtaaggttttgcctttttaagttggacggctgtgagtctaccacttggttattatgtgtggtgagacttcagaatatgaaaaaatgcttaagcttatgctttcatttgccactattaaagaaagaacagtagagtaattccataatagtactagtttacaattactttttttgtgaattagtcataggaaacttcagaattctgttattttcagggctgaggttgaattcatttgcgctttaatatcaactgctggtctttccccggccgtaatggccgaattcccgggcatatgtccggtaccgtcgactg

SEQ ID NO: 137288 - DNA, 278 bp, Homo Sapiens
  misc_feature (32)..(32): n is a, c, g, or t
ggaattgacccggaacccagagattgaaatgnaggtattctgttcagagaaacagaaggagattagaaagacaaatagtgacaggggaaagagagaggaagagactgagggaaaggggtacagtgagagaaactgagaagcaaggacaggttcaggatctaaagtccagaaaaagaaacttacagcaaagcccctaacccaggagctggagtggcagaatttgaaccagaatctgatcagcagggcgagggcaccagcataagtcacatttgtttgac

SEQ ID NO: 137289 - DNA, 1049 bp, Homo Sapiens
ttcgcatatccagtgtaaatttatttttttacagcatccaataaatcccagtaaaggagctaaatgaagatcttaacatgaaaagtggtgtcagagctctttaggcaatgctgaaatgcacttgattttatgcccgtgggtggtcggcagcaagttttatttgcaaagcagcattagcaaacagaagcaattgcaccgtaaatgagtaacctctaaagtatcagtaattatatttaatgaaatgtccctcaaagtccctttgttatttgcaagtgacacattgtaaggaacttgcccatcccgctaagctgacttctcagccgcttcagtctcctgctcggacagcttctcttctgacagaactgacatccagggcgatacggagcgcgtgatgctctgcttggccaggttgtagtggtttatgactgtgtaaaatttctcccgggcactggagtcttgctccgcgtagtagctctccaagccttctgggatgcactgggtgttcttgaggacgaacccatcggggcaggcgcggtcatacttgtacaccttgtagacaaccaagaagacgacgcaggtgaggaaggccagggcgaagaggaccaacacggagaccttaaacctctcggtgacaccctccgtgatgctgacggtgaactcagcaatttgggggggacgtgcttttcctttcttgcggtcaggttcatacttggtcttagttttcacgaccaccttatccgggggcgggaactgcagctgattgacatcgaggggcgtcatcaggggaatggtgtcgaagccatcctccagcagcggctgcttggtgcccttctctgcgaaattgttccccaacttcaccatcgttccgggagctccgaggctgcagcccacgcccggctccggcaggtcagctcagcgctccgagctccgcgtctcctgctcctgggggtcctgaggacgttcaagggtttggggggatgggtccaggaggcgctgggtggtggcggagaccagagcagggtgctccttagtgctgggttggggagggg

SEQ ID NO: 137290 - DNA, 579 bp, Homo Sapiens
  misc_feature (117)..(117): n is a, c, g, or t
tgtaatcacccagttccaacagcgtttgcttacctgtctccgctttctcctctctctggtccaggggaaggtttgcttccctccacaggcaggacaggacaggaggagcctctactncaatggaaaacagccgcagagcagaggtcaagagcagcagcctcggaccagagcagcgcccactggaccccagcgccaaggtcaggcctcttctcctcccagaaggtttcagggcaaagtccacagtggtcatgtggtcacctgaggcagggcaggaggctggacctcaaagcaggtgacccgggagcacctgcgcgctgccggaagtcaagtcacattccagtcctgcatttcctggcacccaactggagcccgtttttcagctttattccggggtttcacttccaggatctcactttggcacagaatgtttttcttggctccttccttggagctgtatggaatctttgttgcacttgaaaaaccaacagcccagaagagaaaagaatattccggtcagatgaattaattcctcccactgtcagctagaagccatccctggctgagccctgccctcgtgcc

SEQ ID NO: 137291 - DNA, 598 bp, Homo Sapiens
  misc_feature (579)..(579): n is a, c, g, or t
aggtcaggtgtcttgaaggctagaaaaattcgtcccaagtgccatgtgagatcaactatatccatgaagggaaacctctgccagtggtcagcagaacaaagctcccatttttcaggctaaaactgggtcatgctcatgcttaaaccagtagtggggcagaaaaaaagtgagaatccttgatggcctcaggctactgatgattccctccagggaagggaatagtacagaggtctgtcttttgaaacacattggggttactttggcacaaggcaggactcttccagcacaaagacagatggcttctaacaggcactgccttgacgaaattccagcaagagtcttagaaaattcaagcatagctccagaaggcttcccatatagctggcactcggaagaacctccccagggtgagtgtttgagtgtataaagttctacttctggctgtcggctacacataaaggctatgcttggagcttctctctgatgtcagttattatgttgaacaaggaaacggaattatctcccatcctaaggcctttctccagtgtgaattttccagtggcggatgagggaagcccntcctcctgaaggcctttcc

SEQ ID NO: 137292 - DNA, 1311 bp, Homo Sapiens
  misc_feature (34)..(34): n is a, c, g, or t
  misc_feature (55)..(55): n is a, c, g, or t
gtttttacagaatttttctgtaaggcaaacaatncacagggcggccaaatgtgtnccagataggtgtagtgcagctcatcgggggcacggctgattcaatagggactatcattttcaatgttcttggctcttcaggcagggatgatcttcacagtcagagaatctatcactgtttcatcaaacacatggtccacaaacctcatcttcagtgcatactggtcacccaaattatagaggtactcatagcttgggaggttgtagccaacgatgtaatgggtcttccaccccgccaaagagagggaagcgaggccggatttccatctctacagagtcatccaaaataaggaggtggctggtagaaacattgccaatctcatcccggtaataaacatcctggccagcagcaggaaggatggtcttaaaagaacggatggaggatattccactatctggctgtctctggtaatcatagcgtgagaaaggccccttaagcacagctcctgtgtgctttaagtccacattttcttccacagcaatattaccccagtgagagacttcaatgactcgggtcatgctggtgatggtcaggaaagggctgttgttctcataatgtactttaaaagtatcctgactataggcaggcacatctctgaaaggcccataatccagtaggtcctcagagcgcgtggggttccccagcttggtgtagctctccacatttcgagaggcaagcttcacacgcatggtttgtgtcttcgttggatagggagagtagaaataatggttcccctcaaacaccacaaactgtttctctgactgggtgatctgggttggatatggatgaagcacatgggtgtagactgtttccacaatgactgaaatcttggccccaggatcaagagcaactgggagcttgactgtgaagaatctcccacttttacccttaattttggtttcacgtacttccaaattgttctcttcctcatcttctccctttacctgcacgcccaggtgcgccagccgggcctcgagctcaggctccaaagccagcaggaaagaggtagctcgggacgtggagccgccgcccaggtgcgccaggaccacctcggccgtcaccttagccaggtggctgcttaggtccactgtgcgcttcacgtcctcattgatcagcggcggtgcctcggaggaggcgctgcccggcgccggggcccaagtcccaagcaacaggagcagaaacaagccggcggctggcgcctccatgaccgggaagagcctcgtgccgaattcacacccagcctcgtactagcctaa

SEQ ID NO: 137293 - DNA, 1198 bp, Homo Sapiens
  misc_feature (432)..(444): n is a, c, g, or t
tcctggtctccgtggatagcatttattgggcgccattctcagtgtgaagacagataggcaggaagagctgagggaggctgtggcagccacgacctttggagtccgggggctgcccggggtgggggtgtggtcgtgagggcatggtcacccacacatattgcatattctgtggcagtgtgcccaggcataaggcattggggaagcagagaggctgcctgcagtgaaagggagtgagggggaagcaacactggccttccaggtccctaggaaagacccagcagagactgaacagtctgccacgctgtgccccacggccattccgcacccttccccaccttctctccgcagctttggttgtggctccctcgggactgacaggacaggacccttcgagggtagggtcacacacaggacagaggcagccagcactgnnnnnnnnnnnnnaacataaacacagagggcaccttcaggtcccatgtgcagccagttcctccacactgagacgggactcacaagcagggtagacttcttccccccagggttccccagagactagaggacacagctgggttggggcctgaggctggccaccctacgggtgctgccctccaatttccctgaatgccagggctggccttggtcggcagtgttaaggagctggcaggggaacagcatgggaaggcagtgttccgggaggagaggcccctcatccaccccttgatgttgtcccagtcattataccggctccagctgtggggccccaaaagtgagcctcaagcatcaccttcgtcagctgcgttccatctggggcttctgggttgcaaggtgtggtgggcagagggcacctctggtccaaactcccccacctgggaagggtgtttcttgctgcagcctcagcttatcactagctacttgggacacaggcaccaacaatgacaatggtgtcaggtgtgatgtcccataggatatgcctgccagctttcttggccactctgcccaattcccaaattcctagagccccagatcctggcctttctgccatgagacccagccctgcttacctcggtcccaagaactgcactgtttgtaagcatgcgccccagtgacaaaggcccctgtgcagcctcaggggccccctcgtgccgaattcgccacccagcctcgctaccttagaaccgttagagtatgcctcttatac

SEQ ID NO: 137294 - DNA, 834 bp, Homo Sapiens
caggctgtaccggtccggaattcccgggatatcgtcgacccacgcgtccgcttcaaagctctggacaggagacacctgctccaggcccctgtgatcccagttctgttctcttgccctctggacctaagcgttcccactcgcagaaagagtaaggtggactgacttttcaatttgtgcacatgcctcttgttcaatggcctggtcaacatcaacaacccctccctctgatcatttccagttgattgtcatatccaggaaaaaatggaacagtgcactcttctccctgttgacccatgtccacctattggttccccaaaatccacattctccctgggcccagatgactttgtctccctgggcccagattctttgtctctcttcaaccttcatctcaaattgtctctaagcactaccttccccagagcttgccaggttgggttttgagattagggtcaggtcatgggtatgtggagaatggtttggaggttgaggacaaccacaggtgtctcattgctgccatttctcctgaggacataatcacttggtcaccttggaccctgtcacttcctaaaattactcgttctgtcgatgccatagaggtcagttttcctctttcttggcttctacccacaaagattcaccaatcatttattccgttcatttagcaaatatgcagcctccgcaaagatgagctctccttgcagacaagccatggtctgaaaccattctttgaggcatatttattgagtgcctactatgtgttaggtactgtgccaggcactggataagccagtggtaaggggaaacacagctctaacctcacctcattctcca

SEQ ID NO: 137295 - DNA, 689 bp, Homo Sapiens
  misc_feature (299)..(389): n is a, c, g, or t
  misc_feature (624)..(641): n is a, c, g, or t
agaacgtaaatgcactgtttttatttttattttatataatttaaattgactttcccactgtctttaagttgaaactgttaagctgaataaaaacttaagctgcaaattgataacttcgctacataacaaggaaaatataaatgtttacaaacagcttaaagatttgcatgtgcagtgtgcatttataacaaacttctaattgcacaaaacccatgccagctcagagtttaggtgtacacatttacccagttgagcgttcttagaataactactgcacaagttgacaataggtcgttctnnnnnnnnnnnnnnnnnnnnnnnnnnnnnnnnnnnnnnnnnnnnnnnnnnnnnnnnnnnnnnnnnnnnnnnnnnnnnnnnnnnnnnnnnnnactcatgaaaagattctatggactgaaaaagccccaggctgaaaggactggactgccttgattgacatggggaagggggttagtagactatgtggattgcggcagcagaggctgcagcctaacgtgtggttttaatgaccagcacgcaaggcaaaagcattttgcacagtgtttgttttcctgtcttgcacttacaaataaggtctatgggagtagcatggaaaacgtttgctgnnnnnnnnnnnnnnnnnnaattgcttttgtttaaaatttgatcgccttaactactgtaaacatagc

SEQ ID NO: 137296 - DNA, 1176 bp, Homo Sapiens
  misc_feature (1057)..(1057): n is a, c, g, or t
  misc_feature (1098)..(1098): n is a, c, g, or t
atttacctctgtgctgttttaattacctaacgtctgtgtaactgctgatttgagtagtgattagcatttagataatgtaacaggattttagagagcactttgaaagataacattttattatgatggtgctaggtaaaaaattgtaaagactgggatggttgtgtggaaaacttttcttgagagaacctattgaaaggaatttgttgtcaccttcttaactagaatagttgttgaaggtaccgcttaagccatttttttcttaacatcggtggctcagttaaggaatgagaagatagagggtcctccactttcagctcatgcttttttatgtaggactagcttacctgattttaatgaaaatcacattttgatacaaacaccagatttgaaagttcaatgtgtttgatctcaggagtccaaaataagttgttgcttctagtgtcctgcattttattgactggggtttgatctcagcttctgaaaatgtttaaaaattggaaggaaatactactcatatcttcattgtcactttgtcttacctcaattgagtaacagaatatagctcctgaaggaaacactgatttgctttctgtttcccatatctcacctctaggatatgatggaagaagtgcttgaaagagaattttagcagatggtacttttcttagtgacctctggaataaaagaactgacttttgatagttttaaaattaatctttgcatgaaggttggtttcgctttttttcctttaaagttttttttaaatgtattagtccaggggattttgccttatgctgaggtcaaactaaggataagcaagcttttgtccttcattttaactgttatgtcatactgttatgttgacatatttctttataagagaatagaggcaaaagtatagaactgaggatcatttgtatttttgagttggaaattatgaaacttcaccatattatgatcatacatattttgaagaacagactgagcaaaagctcacctgttttttgtgttaggtgctttggctgaacttgattccagccccttttcccttggtgtngtgtatgtctcttcatttcctctcaaatcttcaactcttgnccccatgtctcctttggcagcaggatgctgggatctgtgtagtccctcatactgtgttactgataaacccaaaattca

SEQ ID NO: 137297 - DNA, 508 bp, Homo Sapiens
tgactctagaggatgcctttgcgggcttttcccctctctcccactccactcctggctcagtcttagagatttctatgccctcatggattctacccctgccttcctggcctcttgattcttggcttgcctctcctccaattccaaacttagtgaaatgggcttaagcattttaaactgtatgtatacattagcgcattcatgcctttctaaacgcatttcaaatgtcaaccaggaaggcacaccactgtattagttttatactgccgctgtaaaatttaccacaaacttagtgacttaacacaaatttattgcaattctgtaggctggaagtctgactatgggtctcactggactagaatcaaggctggcaggctgccttccttcctggaggttctaggggagactctgtctcctgctccttcaggctgctggcagaatccacatcctttcggtggcagggccaaggtccccactttcttgctgactgtaaactaaggccacttccagc

SEQ ID NO: 137298 - DNA, 314 bp, Homo Sapiens
  misc_feature (279)..(279): n is a, c, g, or t
gaacagtgtataggaagaagccagcaggagctctgactaaggttgacataatagtccacctcccattactttgatatctgatcaaatgtatagacttggctttgttttttgtgctattaggaaattctgatgagcattactattcactgatgcagaaagacgttcttttgcataaaagactttttttaacactttggacttctctgaaatatttagaagtgctaatttctggcccacccccaacaggaattctatagtaaggaggaggagaaggggggntcttccctctcctcgaatgacggtatgggcacatg

SEQ ID NO: 137299 - DNA, 702 bp, Homo Sapiens
  misc_feature (42)..(42): n is a, c, g, or t
  misc_feature (89)..(89): n is a, c, g, or t
  misc_feature (91)..(91): n is a, c, g, or t
gctctggaaaacagccccggccttgggatgtgagtgtgatgntgctgttccagggttcttggctaacgtggtggcccttgaccacattntncaagtcggggaattcctgggcaaagatcccttccagctggtagttatagacccaggggtaggtgtaggtcagctgcttgcccatcttcgagaactgagcgaagggaaaagacacacagagcagggtctgcccgtaggtacaggcgctatgaggccagctgtatgcagcagaggaggccggtggagggaagttaggtacactgtggaccagccagaagcccccatcgtggtcaaggagcaggaaggcgagctggctggtgttgctccggtacagcggctgcaggcttcggcccacggccccctccgggctgttgatgagtgccctgccgtcccgccagcctccggagctctcgtccagatacttgtactgcagccctctctgcgccgcctccccggaccctctaagagctggcagcttgtagaccacgaaccagtctacaggctgcccggagtccccgtagcaggtcagggccccggcggggacgcacagcagcgctgccagcagcagcgggatcatagctgctatggggctgagatccaggaatctgtgtcgggactgcggggcgctgggttacatcagaggccaggactgtcacctggcgcctttcactt

SEQ ID NO: 137300 - DNA, 1019 bp, Homo Sapiens
  misc_feature (243)..(243): n is a, c, g, or t
  misc_feature (288)..(288): n is a, c, g, or t
ctccactccttggctagccaacataacccccaacacccccttattcacagagttgctggtggaaggcgtcggtttttccactctgccttcccccacgggaggcgtctcaccccgctgagataccgcaacaggccgaactagtccctcatcttcatccggatctctggcaccaggggtttcctgagctgaccaagccagagattgcgggcagcaagacaaaggtgagatgaaaccatctccaanatttgctgaacttggcaaagctctggaaaacagccccggccctgnggatgtgagtgtgatgctgctgttccagggttcttggctaacgtggtggcccttgaccacattctccaagtcggggaattcctgggcaaagatcccttccagctggtagttatagacccaggggtaggtgtaggtcagctgcttgcccatcttcgagaactgagcgaagggaaaagacacacagagcagggtctgcccgtaggtacaggcgctatgaggccagctgtatgcagcagaggaggccggtggagggaagttaggtacactgtggaccagccagaagcccccatcgtggtcaaggagcaggacacccttcgtgtgcccacgcatggaagagtcctgagccttgctgggttgaggcggttggtcattgtagagcaggaaggcgagctggctggtgttgctccggtacagcggctgcaggcttcggcccacggccccctccgggctgttgatgagtgccctgccgtcccgccagcctccggagctctcgtccagatacttgtactgcagccctctctgcgccgcctccccggaccctctaagagctggcagcttgtagaccacgaaccagtctacaggctgcccggagtccccgtagcaggtcagggccccggcggggacgcacagcagcgctgccagcagcagcgggatcatagctgctatggggctgagatccaggaatctgtgtcgggactgcggggcgctgggtcccatcagaggccaggact

SEQ ID NO: 137301 - DNA, 629 bp, Homo Sapiens
  misc_feature (180)..(180): n is a, c, g, or t
aggtatgttgccctgggatggatgcaggcccctcccatcctcccatcctcagcagcaccaaccagccccacgctgggtggctgcttgtactttctccatacgtgagcaccccagcccataggatgatcagctgctgccgtcctatggaactcaggtgtggctctgtggcttcctttggcncacaacagtaatggaagtggggtgacacacattacttgtggcctgctgtggcctttcccctgcctcagtgagcatggagaaatatgtccaggtaggctgtcgtcagcacaggtctgacaggccccagccacggtggcccacaggtgcaagcaagaaataagcagtgccaactgtagccgctgcgctgttggagatctttgttactgcagcacaatctggctcatgctgactgatcctgcagggtaacagctttatttgccttgctcctttattgctggatctttgggcttttccagttctgaggctacgcgaatcgcccgcgaagagggtcctgggatccgtagccacagaccgtgggacgggcctccctctgagggcgagagtccaggcgcccaccctcttgccggagtcgggaacgcctgctcctaggagcgccgcgccctcgtgcc

SEQ ID NO: 137302 - DNA, 827 bp, Homo Sapiens
  misc_feature (79)..(79): n is a, c, g, or t
cccgaagttaggggggctgccccaggccctggggctcgggcctgttaggccgcctgaggattctccgcagaccccggcntcaggttgtcccggatagtgctccaaagggaaggcacatgtcattcgcccagttggcccacgaagcgggtccagtagcccacggggagccatcaaaaggtccctgggtctgagcgtggtacccagcagaaagtccaccctgtggggtcgggcgctggggcatgtgcccagctaggggacccctttctgcaggtttaccgccacaagtgccactagctgtgctcttctgctccatggtcgttcgcacacacacggtgtccccacagcagggccgctcaatccagggatccacaaggggggtgtatgccaccccaggagacgccttgtccatctgctgccatggatgtgcgttggcataattggcggctgcccagatgggaatgcgagggcccttcttacggccccggccacgaggcatgctgggagcacaggggagaagagaggagagccagcactggtgggtggtgggggtgtggacagatgtggcttgcacgacacaacaggacagggatggctgaacagggcgtggcagacccgcactggtccaggcaagtgctgaggatcagggagctgacagctgcagcctcaggagagctgagaagagctgagagactgtcagtcgcaggccatcatccgaggcaatctgaggctacgcgaatcgcccgcgaagagggtcctgggatccgtagccacagaccgtgggacgggcctccctctgagggcgagagtccaggcgccaccctcttccc

SEQ ID NO: 137303 - DNA, 948 bp, Homo Sapiens
  misc_feature (429)..(437): n is a, c, g, or t
cagtcgacggtaccggacatatgcccgggaattcggccattacggccgggattttaagtagatggtgaattatattaacccattttttgagtaggcttataccataactttacacctagtaatttgcagtaatacaactccttacaataagttaatgttagacagttatttgtttcttctgcatcttgctactgaaaacaaaaacaatgaaaatattcatatttctattatgtgtaaagtggtgttagtgtaaacagttaactccaaatagattttttaatgtattaatgattaccttaaaattatctgctttccctactcttaatttttcttattgttaaagtttttatatgttgtaagattgatgtatctgtaaatattgcagtttttatgattttgttttattataacatggaaatatggcagggnnnnnnnnngaatcattattatactgatgtcttggattctttttctttcccatgttcttgtgtaactagactttttagccagtgatatctgaattcatggtagagttgttatttcactccagttgttcctcccttaagcacgagtctttgaccttttgaacaagagaatgccatgttcacataagcaaatcgttgcaagtgataataacgaagtgtttcttcttctgtgaggaattaatggactttgaaattgctgaataaggagtagcttgttacatcctagccatttgatgtaatacaaatgttcttatttggcttccttttctttgagccttcagagttttaaaggaccctctttgaccctcaggacttattagctcccagttagctgcctggaaaactcatagaaccattccctagatcccatttgtccgagaggctttggtgcttagttaaggtgcattttcttactctaggtttatagagtgatgtaattcaactgaagaaaacacacacatgc

SEQ ID NO: 137304 - DNA, 893 bp, Homo Sapiens
  misc_feature (31)..(32): n is a, c, g, or t
  misc_feature (128)..(128): n is a, c, g, or t
  misc_feature (505)..(505): n is a, c, g, or t
ggagttcgactcctttttcaaaatttggaanntatgccttcccagccttgccagcaatttttaaaagggaccctgctgtctttcaggagtgtcggggagtcatcgtcagggactacaaagggaattcnaaggccttgatcaaaaaagtgttctgtttacaaacaagggtgttgtcaggctttgcaagctgccgagcaaggaaggtaaagagacatcctacttgtgagggggtaaagtctgaattctccaccataactttcaacaaaatatccacaattcgctgttgatattccacagcttgcttgtcatttttaaaatcttcaaaagtcagtgccaatacattgagaaattctcttgtgtcaaaatgtagcaaagtccgaatgtaaggatagatttcttcctcaggagaagcctctgctgaatgcaggcgaattagaaattcaaaaacctggtttttaaccaagggaaccagatcttcagggatgtcaccaaggggataggcacngacctgctagacaacagctaatatatacaaggagcttattgcccataacaacttgttcatctgttagtgtttttcctgcattcagaggaggagcaatgactctgaaaagtttctccattggactaataaattcattcatgcctctgttgtagacatagatcatagcatcatataaacgattttcccaacacatgagaactacctgctgaatatctaggctggtgatatccatatgtacaatgagcgcttccacattttccattaattttttatcttggaaatgaacaatcaagtctttcattacttggggtgtgattcccaccaatttatcacttaaaatatatggctcaaggcactccaaaaatactcctttggccactgaattctc

SEQ ID NO: 137305 - DNA, 787 bp, Homo Sapiens
  misc_feature (36)..(36): n is a, c, g, or t
  misc_feature (120)..(120): n is a, c, g, or t
  misc_feature (209)..(210): n is a, c, g, or t
  misc_feature (215)..(215): n is a, c, g, or t
  misc_feature (256)..(256): n is a, c, g, or t
gcagggcagggcactggctttaatctcaccttcacntacatgaaccccgctcagcgcccccatgtacacccccatcgcggacacctatggggtaccctccataccgcagacccacagccnccagcactgggaacaagcagtctacacacagctcactcgaccttgaggaggcctcccacgaagggcgaagatggccgagatgatcctannaatanccgaagaaagagaggaccaaccagaattccctttggacatntgtgtttttctgtttatatatggtgttttgttttttcttcttcttcttcttccttaaagacatttaagctaaaggcaactcgtacccaaatttccaagacacaaacatgacctatccaagcgcattacccacttgtggccaatcagtggccaggccaaccttggctaaatggagcagcgaaatcaacgagaaactggactttttaaaccctcttcagagcaagcgtggaggatgatggagaatcgtgtgatcagtgtgctaaatctctctgcctgtttggactttgtaattatttttttagcagtaattaaagaaaaaagtcctctgtgaggaatattctctattttaaatatttttagtatgtactgtgtatgattcattaccattttgaggggatttatacatatttttagataaaattaaatgctcttatttttccaacagctaaactactcttagttgaacagtgtgccctagcttttcttgcaaccagagtatttttgtacagatttgctttctcttacaaacaag

SEQ ID NO: 137306 - DNA, 750 bp, Homo Sapiens
ctgggaagtaactggttctcatctttttttgcagcttaagatctgccttagtatttgaagagatataaactagatcaatttctttcacaggatcaactaaacagtgtaccacaatgaattctgaacttgactattatgaaaagtttgaagaagtccatgggattctaatgtataaagattttgtcaaatattgggataatgtggaagcgttccaggcaagaccagatgatcttgtcattgccacctaccctaaatctggtacaacctgggttagtgaaattgtgtatatgatctataaagagggtgatgtggaaaagtgcaaagaagatgtaatttttaatcgaatacctttcctggaatgcagaaaagaaaacctcatgaatggagtaaaacaattagatgagatgaattctcctagaattgtgaagactcatttgccacctgaacttcttcctgcctcattttgggaaaaggattgtaagataatctatctttgccggaatgcaaaggatgtggctgtttccttttattatttctttctaatggtggctggtcatccaaatcctggatcctttccagagtttgctggagaaattcatgcaaaggacaggttccttatggttcctggtataaacatgtacaatcttggtgggaaaagggaacagagtccacgtgtactattcttttctacgaagacctgaaaagaggatatcaggaaaagaggctgatcaacactcgatacattccctg

SEQ ID NO: 137307 - DNA, 1584 bp, Homo Sapiens
  misc_feature (1491)..(1499): n is a, c, g, or t
ttcaaagttgacttaaagattgccaggattaaacattcccacacttttaatggtatggtcccaagatgcactgcagatttcttcagcatctgaccacagaactgaggaaactgcctccatgtggccagagagggtcactatgggagtccttgttagtcccaactgttcggtcttctgtttctttcttggtcgatttgtggactcctccatttcatcttcttcatctgtagggactgtagaccagatctttagcatcttatcccaggagccactgcaaaatttagttcgtgagccatcaacagctatagaatctacacttccagcatgacctctacagcagtgtagggctttcactttgtttctctctacattccactcccataagagaatagtctgatccatagaagcactcaataataagcaggacaaactatcttttttcacccaggccacatcttttacaacatccgtatgtcccacaattgtcattattgactttccttccaaggaccagatccgagaagtcttatcataagaaccagtcaagatccattcctctgcccctttaattgaactgatccagtcatcatggaacatgcattgctctggctggggtgcagtatacttctccacgtattctatttccacaacttcttctgatgagatgttctccatttccatgtgtttgtccaagggcattcgcagaaactggcccttaataaggaaatcaaactccacatgtttgtggaactcatttttgtcctttagtagtttattgatgatgttactaaggtcggcaatttcagaggcagcagggattgagaagggaacatcatctacggcatatttcttgttatcagtgtagaagcgtgtttggagctgagccatggcgaggagtacacacgacttgcccacggaaacgtacgggttagcaagaccccacaacacgaagctcctgccttttaagacctacaaagaggcagctcaaaaattagactgcacaggtaagcgaggaactgcagtctaagcctggactctgccttctgccctccggtctcctctgcagaaagcacgaggttgcccttctacagacgcccagaccacaaacatcgactacctactcctagatttaggagtcatcgattagaaaaggatagtcgtaaaggtagcatgtccctttaatcattgttagaattcttcccatacgtgtgggcccgtaatcgattaggaaaaagatcccactcaaatccgctttattaataaaaaattttttttcaagaggctgtcctgagcctggatagttcaaacacagctcctagttactacaagtctcagaaagcatcgcttctcaaacgctgtgaccaccgggaattgtagtctttttttgccacgctgccctcagagtatcttatttgcattaaatcctctagactccagccagatatcaaatttcctctgccttcagctttgcttgactaacgccttgccagnnnnnnnnnctcatacatattcccaaccagaggctcactcggcagaggtttttcctaatctcctcgtgccgattacgcccgcgctcaccctatt

SEQ ID NO: 137308 - DNA, 633 bp, Homo Sapiens
gcggccgctgctccagcgtcccccagccgcgggcccccgactcgctgcagccggcagcccaccgccgccttcttggcgcgaccccaacccagccccacaggagactctctgaagaccagcaggaaagcagtgagcccttacaggtcgccttcgtcagacgtcagaatgattccttgcagagccgcgctgacctttgcccgatgtctgatccggagaaaaatcgtgaccctggacagtctagaagacaccaaattatgccgctgcttatccaccatggacctcattgccctgggcgttggaagcacccttggggccggggtttatgtcctcgctggggaggtggccaaggcagactcgggccccagcatcgtggtgtccttcctcattgctgccctggcttcagtgatggctggcctctgctatgccgaatttggggcccgtgttcccaagacggggtctgcatatttgtacacctacgtgactgtcggagagctgtgggccttcatcactggctggaatctcattttatcgtatgtgataggtacatcaagtgttgcaagagcctggagtggcacctttgatgaacttcttagcaaacagattggtcagtttttgaggacatacttcagaatg

SEQ ID NO: 137309 - DNA, 407 bp, Homo Sapiens
gggcagatggagggccttttattcgcgagggtcgggggtgggggtcctaggtggggacagacaataaataccgaggaatgtcggggtctcagtgcatccaaaacgtggattggggttgttgggggtcctgtagcctgtcagcgagtcggaggacgaggtcaataaatatccaaaccgccgaagcgggcggagccggctggggctccgagagcagcgcaagtgaggaggggggcgcgggatccccgaaaaagcgggtttggcaaaagcaaatttcccgagtaagcaggcagagatcgcgccagacgctccccagagcagggcgtcatgcacaagaaagctttgcactttgcgaaccaacgataggtgggggtgcgtggaggatggaacacggacggctcggcttgcct

SEQ ID NO: 137310 - DNA, 919 bp, Homo Sapiens
  misc_feature (61)..(84): n is a, c, g, or t
  misc_feature (470)..(479): n is a, c, g, or t
  misc_feature (891)..(891): n is a, c, g, or t
tttttttaccccaaaataagctttattgcaagaaaagtgtcatatttgatacacagacctnnnnnnnnnnnnnnnnnnnnnnnncataagtttttcctcacaaactcttgattacaaatttacactgttccttttttctttttagttattaaaaaaacaataaaacctcaaaatactgggtataactggttactaatctttggtcagcacaggtttgagaggaacaaccaggagcctgcatgtgctttggccatttcacatatgaggtttggtcactggtccaggaaacaggttcttgggttgagaagaataatggatacgtgctcttaatagcacatcctggtacaatatctttttaaatgactaaagcaaactaaacatcaattcattgtacaaacatctttcatacacaataggctatgataaaatgaggcatatggtgtataactacagtattaatgaaaattctnnnnnnnnnntgggtttaaaacaccaccaacaacatatattccttggctgcattgcatgatttgtttgcacatatggcaatcctgaaataacttgaacataataaatgcaccattatttaagacagcacgaaacaccacagaatgccaggtgttccctttcaagggaacggcggttcttcagctgcctacagtaccatgaggacgcagcgcacccctgggtaagaatgaggtggtgtgggtagcacatatggttccctgaggttattagaagggaaatccagtcgggttggccctgcattcttatggtctcacaagcaatcaagggtattttgcttcagtggttggcctcaaactctggtgccttggggggcttgggaatatgaaagttgacccaaagaaactgttttggctgcatctccgntttaaggaactaaagcaattcatgcctt

SEQ ID NO: 137311 - DNA, 646 bp, Homo Sapiens
  misc_feature (576)..(576): n is a, c, g, or t
  misc_feature (581)..(581): n is a, c, g, or t
caatttgtttgtgcttctaatatttattgctttataaataaaccagaccaggacttgcaacctataaaagcctctcgtttgtttttggggtaggcgtggggtggggcaggtgtttgctttgacaccctgagcattgtcaaagttcagtaccacaaggttcatccagatgaattaatatgacagttagctgggagttataatgctaacttttgatttcatattttgagacagaatcatgaatatatttcatacctgaaaagcagattaaggtttagttccatataagtaagaaatgaaattgaataagatagttctctagaattagttgctgcagatgacactgaagattattttaacatatgttccagttgtttttgtaaccttgcagaaaatacacatatattgataatgagaaagtcaaagattattttaaatgaattggcttaacttttcaattctttgaactcttcaattttcttcctgggggctatgaaagaaacatgaaggttagctgacagttgggccagccacatcccattgcaaataccctctaaacatatcaagaccattgtgtgngtgcnaaacaaatgtgaggaagcaggagccaaacacttctgcctgatcagtgactaacttgcgagacaga

SEQ ID NO: 137312 - DNA, 985 bp, Homo Sapiens
  misc_feature (304)..(318): n is a, c, g, or t
taaagcgcgtcccgccatgttttgaagaagttgtttggccaatttgtgcctatgagaagtgggggccgaatagagacccttgaagggtcccgcaatgcttattttgtgccgagggaaatgggggaaaaaatctccggagatttgaaaaaggtggtaacagtggggtttaggtcccgaaaatggggttgaaaccattggtaggttttatgaaaaaaattgcaatttttcgttccaaattgggggattaggaaaactcccttttatttgcaacccaggggaggtaagttttaagaattttaggggnnnnnnnnnnnnnnngccaaaggtaaggtctaaaactagaattaaggtccattttccaatctcatggtctcatcccccaagataataaaatcgctccatgagttttttggttggtttaattttgtattttaataaaagcaaatgcaatgtaacaaaagcgtgttgaagcatatcatggtttaacttactgctcccaccacaaaatattttgtcttttacttatcgtttcagaaatcagtaccattaaagccttaaacagaaaactaattccaatctgaaaaaggtacaaaaaggcacataaaatcccagtgcttctgtactgtaaaattcaagtgtaactgagctcagtgtttttccaaacagtatggatcactgatattccctctgagcccaaattggtttgcagcctatgccaaagcctccagcaagcactgtgctagtagactacaaagttaaagcctagcttctgaatgctttttgggaatatcagttgaaattgtttgtacttgtccaaaaaccaagttcaccctgaagttcagtcatcacctccaccatacatgtcagcaagtttcttgaaccgtggcccccagtcgatcatgtaatcatagtactgctcaccaccactacttgaggaattaagggagctcaaggacccatcagtggagccactgccttcatagtc

SEQ ID NO: 137313 - DNA, 466 bp, Homo Sapiens
cccacatcctgtgctacacaggcatgggcccggggtctggttagtctcctgagccatatttttctgctgggaatggagacctgagttcaagtctctagtctgccactaagtcagtgaccttgggcaagtccttactttccagatttcagttccctctttgccaaatggagtagaattgacttttaaaggctccttttcagggccctgcagggtcccaaatgcgaaagccgggttcgcgcgcgaagccggcacgatgaggccgggccgaggcctccgggaaggctgagccgggcgccctggtgccgccgccgcgggccgggagcgggtcggagcagcaggcggaggtggcgccgccgccgccgcggggtcttcctttgttcctgcagcagcgtcgagcgtggccgggacacgccggagctcgggaagtgggaggagggaagcgagggggggccgaggaagaggtgga

SEQ ID NO: 137314 - DNA, 940 bp, Homo Sapiens
gtgtgctgggcagcccagtcaataagctgcgaagggtttgtgcgagacccctttggttgcgttgaatgttgtacgtaagtaaccgtggtgcgatgttgtaccctttctaccggatgtctgaatgtgaccaggcttttaagatgacccaatgttagccaggcttagatatggcccccgtaatacttggtctcaccggtaaagaaggtctgatcctctttatgaggcaatttcgtgcctgcctccatagtatatgttgtgaaattaaagagggtgaagttttaacctatgttatgaagtagactgccagtcctttgtctggtgtaccatgtttagaggagatacaggcacataaacactagccaaagattataccttgattacattgcccaaaaggcagatatgctgcaaacatgcagagatgttcattgtattttgtttggcacatgggaactacattttgttcctagttatctgtgtgtttcactttgctgtgcagattttcatccaatttttttcaggggagggcatatacatttgtagggctgtatctatccgattctgcctgtaacaaacacccaaacatcctaaaatatcaattataagacagacaagtgtaatgtaaaactctggagaacatcaaagaaaaatggccatgcatctgctctttaatgttttcctacgatatattaaaataaaaacaaagtttcagtctcttcacaagaagtaatttatattctctgaattttttcagccacaacaactggattctcttttctgatttttgctgcagcttctgctttgtaatcatacggacagttgtgcttgtcagagtaacggtgaagtccacaaaacaaatttccacatcggcagtcaaaccctgtaagaccaaccccggccgtaatggccgaattcccgggcatatgtccggtaccgtcgactg

SEQ ID NO: 137315 - DNA, 1157 bp, Homo Sapiens
  misc_feature (838)..(882): n is a, c, g, or t
ttgtcgttggtttgggcaattcaggagctttttcttcactctgagaagtactgggctgagaaactgatggactgggctgagtgacaactggctctgacacctctgttttcggggtagttattttgtcctctcttgaaatgcgtcattgtctgtcattttgctgagttacaggcaaggcagccacaggcacatgtgcgtgtgagtttgtcagatgtggctgccagcagcaccttcacagttgtttaagctagtgtctgctgctcgtgtacagatgcagaatctgaggtaggactgttggaaccactagctgtccccattgggctcattctgccactatgtttgctgcctctgaagatgttctttgtagcaaactgaacacattccatttgtcctaggatttccataaaagccacatcctgtgctacacagcatgggccccggggtctggttagtctcctgagccatatttttctgctgggaatggagacctgagttcaagtctctagtctgccactaagtcagtgaccttgggcaagtccttactttccagatttcagttccctctttgccaaatggagtagaattgacttttaaaggctccttttcagggccctgcagggtcccaaatgcgaaagccgggttcgcgcgcgaagccggcacgatgaggccgggccgaggcctccgggaaggctgagccgggcgccctggtgccgccgccgcgggccgggagcgggtcggagcagcaggcggaggtggcgccgccgccagccgcggggtcttcctttgttcctgcagcagcgtcgagcgtggccgggacacgccggagctcgggaagtgnnnnnnnnnnnnnnnnnnnnnnnnnnnnnnnnnnnnnnnnnnnnnccggcggccgcagcggctaacgctgctcgaggcgctcgcctgtcgtcgcctcacgcctccacaggccgcaggttgggcggacgaggagggcgagcggaccgcgcgccgcgaggcctggggccgtaagggcccgctgatggcgctcttcgccgctcctgccaccgccggggaagctgcgcggctcccgggagcgagcgagcccgcgtaggagatgcacacagctccgcgtccccctcgtgccgaattaaacacccaggcctcgtacctaggctatg

SEQ ID NO: 137316 - DNA, 1868 bp, Homo Sapiens
  misc_feature (314)..(314): n is a, c, g, or t
tttctccaaggaaaccccttttggttggggcttgaatggtttttatccttaaaaacccacttttcggatggtttaccttttccccaggagtgttctaaattggaccagctttagaatggcccaatttaacccagggttattatatgggcgcccaaatacttggtttcacgggaaagaaaggtctgatcctttttatgagcatttctccctgcttccaaagaatatgtgtgaaaataaaggagggtgagttttaactatggtagaagtagactgccagtccttttctggtgtaccattttaaaaaaatacaggcnacataacactagcccaaagattatagcttgataccattcccaaaaaggcagatatgctgcaaacatgcagagatttcatttattttgtttggcacatgggaactacatttgttccctattatctgtgtgtttcactttgctgtgcagattttcatccaatttttttcaggggagggcatatacatttgtagggctgtatctatccaattctgcctgtaacaaacacccaaacatcctaaaatatcaattataagacagacaagtgtaatgtaaaactctggagaacatcaaagaaaaatggccatgcatctgctctttaatgttttcctacgatatattaaaataaaaacaaagtttcagtctcttcacaagaagtaatttatattctctgaattttttcagccacaacaactggattctcttttctgatttttgctgcagcttctgctttgtaatcatacggacagttgtgcttgtcagagtaacggtgaagtccacaaaacaaatttccacatcggcagtcaaaccctgtaagaccaactttctttctgcacatgaaacatctgtttttctttggtttgggcaattcaggagctttttcttcactctgagaagtactgggctgagaaactgatggactgggctgagtgacaactggctctgacacctctgttttcggggtagttattttgtcctctcttgaaatgctcatttctgtcatttgctgagttacaggcaaggcagccacaggcacatttcttgatttttcagatgtgctgccagcagcaccttcacagttgtttaagctagtgtctgctctctgtacagatgcagaatctgaggtaggactgttggaaccactagctgtccccattgggctcattctgccactattttgctgcctctgaagatgttctttgtagcaaactgaacacattccatttgtcctaggatttccataaaagccacatcctgtgctacacagcatgggccccggggtctggttagtctcctgagccatatttttctgcctgcagggtcccaaatgcgaaagccgggttcgcgcgcgaagccggcacgatgaggccgggccgaggcctccgggaaggctgagccgggcgccctggtgccgccgccgcgggccgggagcgggtcggagcagcaggcggaggtggcgccgccgccgccgcggggtcttcctttgttcctgcagcagcgtcgagcgtggccgggacacgccggagctcgggaagtgggaggagggaagcgagggggggccgaggaggaggaaaaagaggaccggcggccgcagcggctaacgctgctcgaggcgctcgcctgtcgtcgcctcacgcctccacaggccgcaggttgggcggacgaagagggcgagcggaccgcgcgccgcgaggcctggggccgtaagggcccgctgatggcgctcttcgccgctcctgccaccgccggggaagctgcgcggctcccgggagcgagcgagcccgcgtaggagatgcacacagctccgcgtccccctcgtgccgaattcgccaccca

SEQ ID NO: 137317 - DNA, 260 bp, Homo Sapiens
ttagataaatcagataggtctttcttgcttacttcattaacaactcaattaattataaccacatcacatgaagattagatgtaattaggacctgtccaatgtctttacatcccagtccttctgtactcctaaccttaagcaaattggtcgacctctgtaggtctaagtattctgtgtgtaacatgaaagctttgaattaggccacgtttccggctaattttttaaaaagtgtttgtgatcctgtgaattccataacccac

SEQ ID NO: 137318 - DNA, 590 bp, Homo Sapiens
  misc_feature (164)..(164): n is a, c, g, or t
aggccttttgggttaaataaataaaatttttaaccaacctttccttgggaattagtaaaggtttttaaattgaaaaagaggcctaaagcataagtttcttttgcaccatagaaggcccaccggtttccaaaatttcaagggttaggggctttgaaaccattccntggtaaattatctcccagctgggctaggctagttagggcatattggggcaccttggtatcaaaggggattattttttgcatttagcaaatgagcggtaattacttttttgaggtattttaattcagattgctcaaaagtcttgttattcaaagggagccttatgtcataccacaaatattgatacctcctagtggaaatggtggctgtgggctccctagtagagttaatggatgaaggctgagatacttagatactgcggacatcagggttatggagcaaagtgttatgaacaatagctacagagagctccaagtctcccaaagcaactcataactataacacagataaagttccaaagtcatttcatcacctatgtgaaaatgcaatactgaatgttttggctctctgatgcattttgttgttcg

SEQ ID NO: 137319 - DNA, 341 bp, Homo Sapiens
  misc_feature (17)..(17): n is a, c, g, or t
  misc_feature (33)..(33): n is a, c, g, or t
  misc_feature (105)..(114): n is a, c, g, or t
  misc_feature (171)..(171): n is a, c, g, or t
  misc_feature (277)..(287): n is a, c, g, or t
ctttagtgcctcccttnggttcctcacctctcngacaacaaacaggaatgtttaacaggtcttttcctgtgatgtttttccttcttttcacctaacttcccttgnnnnnnnnnntcaaaatatttatttagcacttttttcaaagggcaattcctgattaatataggcagnaaaaactcaaagatttatcttcttccatttccaaaaaggtaagaagatgtaaatatttatattgggccctctccctcctcatacatttttacccaaagcttaaagnnnnnnnnnnngtcaactcaaaacacagttgaaggtatatactacatcaactttttcttttgttt

SEQ ID NO: 137320 - DNA, 831 bp, Homo Sapiens
tttgaggtcactgggttttatttgagtccagaggggaaggcgttgactcccacccaggcccgagtgccctgaggctggaggagggaggcaggatggcagcacagagcaagggcttcctgccctcctggctgcctgcagacgggagtggagaccgtcagagcaagccccagcttctttcagaggagggtagagtccaggactagagctcttctcttgtggctgacaccttctctgagcaggccccctggggtcccccacatagcaatgcctccagagcccctcggccttgttggtgggcttcatagatctggtcttctccaaactcccccaagtagtgcaaacatgtcctggagagcctggtaggccaggggccccctgtgaccatcacgctgatgcttggctctggcccctcgctaagtcctgggcctgtgagacgtttcacttggtccacttctcgaactccgtagtcctgccagttccgggagcagctccggtccaggacatccgtgtagaccaactcgctcagctcccgccgccccccagagtttgaggtatgaagtttggtctctgcctttgccagattttgccacatctggtaagccacagctctgcaggcatcacagcgcaggtgagcgggcatgtgggctgagtacatctcctcatcatccagttgtggggctgtggctgtgagtggcgccctgtccccgaggccccctgggatggcccaggctcccagcagcagcagcagcagtggcagtgacagcctcatggccccaggagccagttcagcaagtgtagtctgtggttgaggtgcagatgtgtgtgtgctcc

SEQ ID NO: 137321 - DNA, 485 bp, Homo Sapiens
  misc_feature (308)..(308): n is a, c, g, or t
  misc_feature (314)..(314): n is a, c, g, or t
  misc_feature (317)..(317): n is a, c, g, or t
  misc_feature (320)..(320): n is a, c, g, or t
  misc_feature (327)..(327): n is a, c, g, or t
  misc_feature (331)..(331): n is a, c, g, or t
  misc_feature (333)..(333): n is a, c, g, or t
  misc_feature (335)..(335): n is a, c, g, or t
  misc_feature (340)..(340): n is a, c, g, or t
  misc_feature (345)..(345): n is a, c, g, or t
  misc_feature (350)..(350): n is a, c, g, or t
  misc_feature (356)..(356): n is a, c, g, or t
  misc_feature (413)..(445): n is a, c, g, or t
  misc_feature (454)..(454): n is a, c, g, or t
aaatatgttttgagggagcatgacatccttgacctcatttgaaattacttccattttcaaaaaccatcatgttttgcagatacattttgagaaaaaccatcatgttttgaggatacatttgtgaaagtgcaggcatgccaatgactactcagttttaggacttttgtggaagaaaaaattaaaagggagaagaaatcaattccactacttttgaagttctgcaacagatgagattttgtttgtaaagttttgtagtatattaaccattggtttatcactctagattcaacatattaaaatgtattcanagcccnccnggnttttaancccngnanggccnacccnatatnagtggnctttaattctcttctccttgtggacagttgttaatgaaaggagtaacggattccccnnnnnnnnnnnnnnnnnnnnnnnnnnnnnnnnnaaccaaatncttaggagatactatagaatccaaatggaga

SEQ ID NO: 137322 - DNA, 315 bp, Homo Sapiens
ccaaatgagctggtctattatgccttgtaaaacagcagcatagggcttttaaaaggtagtcaataaaagttgctgaaattttggcttttttaaatatgtagtaggtgtttttaatgatttttcacataatgtgtaaggtagtgaaatgcaagaagggaaaaatgttttgtgtgaaacacattttctgactggggaacttttattagggtaaattgtttgtacagctgtacgccaacagtttcctctgatagtttgactgatttaggatatctgctgtatgatgcaatgtaaagtcttttttgccttttttcagga

SEQ ID NO: 137323 - DNA, 793 bp, Homo Sapiens
ggctccgggagcccttgtctgctttggtccggggactcgagccgggctccgtcccccttacgcacagccagcgtggtccccgcgtgcaacgcgagcgccggggagtggctcctgctttgcccctcgtgggggccgagccaagaccagtctgcaaactccatcccgccggctggaagaagtctcggagccggcaccaaacccgcagcgtcttcccgcgcggatcccgggacttaaaaagccggggccaccccggcccaggacgggatgcgggtcggtccggtgcgctctgccatgagcggcgcctcgcagccccgcggcccggccctgctcttcccagccacccgaggcgtcccggccaaacgcctgctggaacgccgacgacgcggcggctgtggcggccaagtgcccgcgcctctccgagtgctccagccccccggactacctcagcccccccggctcgccctgcagcccgcagtccccgcctgccgctccgggggccggcggaggctccgggagcgcgccggtgcccagccgcatcgccgactacctgctgctgcccctagccgagcgcgagcatgtgtgcctggcgctgtgcatccacactggacgcgagctgcgctgcacggtgttttccattaaacactaccaggacaaaatcaggccttacatccagctgccatcgcacagcaacattactggccattgtggaagtgatccttggggaaaccaagggctatgtcttttttgagaatgactttggggacatgcactcctatgtgcgaagccggaagca

SEQ ID NO: 137324 - DNA, 590 bp, Homo Sapiens
gcggccgctcacctctcctccgtggagaagacgaacttcctaagcttcaggtcccccagcacgatggctgactggtggcagtgggcgacggcggagacaatctgcttgaagagccgggcggcttcctcttcccgcagcctcttccggcttcgcacataggagtgcatgtccccaaagtccttctcaaagaagacataggccttggtttccccaaggatcacttccacaatgccagtaatgttgctgtgcgatggcagctggatgtaaggcctgattttgtcctggtagtgtttaatgggaaacacctgtagagagaaggggggcccgtttagggggctagaaaagcaaaggcagcctcgcaaacccctgagggagctgaacagaagttctcaacctgtgggcttaggatgtgagtaagttccattcacctactcctttcctctgccaccttaccttacgcagccccagctgcccctgacacctttaaaaccagtaacacctaaagctctagacttgcaaatacccaaagggttacccgctttcacacagatgatttgaaagaactgtctcctgtacatgttcccatcttc

SEQ ID NO: 137325 - DNA, 415 bp, Homo Sapiens
ccaacatgagcaggaaaagggcaggagaaagcctctgacttggcacactacgaggataacaaggatattgcaaaaaacacccctgggttttggtgcaaaaaggttttatgaaaaattgtcccataagaaaaagtagaaactgcgttgagctgagaaagtgacactacattatcacccaatttttggcccaacaggcacaccaccaaaagggcagtgtgtggttttaaacctcaattccagtaaaaaagcttgtactatgtacacattgacataaagatccagtttaatttgcatttttcagtgcagactgagaagccctctcttgaacaggagtaacagtgagaaatgcccagtggtcgtcggcttcccaaagggcatcagaagaaatacaggactgtttccctctctccctaaa

SEQ ID NO: 137326 - DNA, 355 bp, Homo Sapiens
  misc_feature (79)..(79): n is a, c, g, or t
  misc_feature (121)..(121): n is a, c, g, or t
  misc_feature (133)..(133): n is a, c, g, or t
  misc_feature (186)..(186): n is a, c, g, or t
  misc_feature (283)..(283): n is a, c, g, or t
  misc_feature (288)..(288): n is a, c, g, or t
acgcatagtgaactatgaacagtgtttcaaaaaagcaggctggtacggtccggaattcccgggatatcgtcgacccacngcgtcgcacgcgccggaccgggtaccgctgtgcccggcctgnggcgcggcctangtcccggcagacgggactcgacgaggtcaccaagcccaggccgagacggcgcngggtgtcagggacttgggaatccccctcccccagtcccgatcccgctttcctttggggtttcacctcagaggacccgacagcactcttgcagtttcntcatnatcctcaagatggactgcaccttctggcatctcaagtggttcttgtgaagattaaatgaatccatca

SEQ ID NO: 137327 - DNA, 596 bp, Homo Sapiens
ataattctcttaatgggatttttaggtgagcccttgggagaaagataactgctaaaattcccctgtaccccatcctttcttgtcctttccccttcagatggagacttcattatgttaatgaacaagatatgaagaaaatggcactcattgtggccttgttgaattatgttgtgtatgttttaacatctctgatgctgtgttactaaaattacaaggacctgctttttaaaaggccagaacaattgtctgaaattagtaacaatgctgcatctagattggagtgctgcacaaacaaacataagagcaaagcaaaactgtatcacatagggtttttggtcactcacaacctgaattcaccacagctggaatagctgtggaaaacaaaataaaacaacaaaattaataatgaaatggaggggaattctagaattatatgctaaatgcatattttatgatttgctgtattaactgatgataaaactaatgggcagaaaaagaggttgagcaatttcctatggtaatggtacagatactagcattgcacatataggtctgctttctgttcctccagaatttgagtcctgttaatgtagtag

SEQ ID NO: 137328 - DNA, 1299 bp, Homo Sapiens
aagccattgtggccctttccaggcccggttcctgaggccccccccaatttttcccctggctttgccccaggcatctgctgccaggagggtggggcctcctcttcttgggttctttaaagatctgtgctctgcgaccaggaccggaacaacccgaagtccctacccaaagccttctgcactgaagggggcaacagagacacgggagccacacacaatggactggtctatagcagcggagaaaggagaagcagaggaggcggagacctgaccccagaaagcagcactcaaacagatgcagctgcacccacgcgcccgcctgctgccagagccactctccggagcctgcagtcctgaagacgcctcagcaggggcaggcaagaagacaccccgcgaacccccagggccggccgggcgcatcactgggagccggggctatctccctccgtcagcgtcttgaagtccatggagagggcctgctcttccgcctgggaaggccgcttccagtcggcccgggtcaagatgtagagcaccgccccaccgaagcaggccagcagcaggcccagcacgttggccaggacaccctcgggctcaaatgcgctatacttgcccccgaggttgaacagcagtgcctccttcaggcccagcagggcggtgcccacggaaaggaggaagatggtagcaccaaagaagatgtgctgtgggcggtagcggctccgcagggagaatgaagctccggggaacaggaagaagctgaagcccaccagccactgcacaaagtacaggacaaagacaaggatcccgcaaccagctgtgtaggctgtacaggtcagcgtagcccttcttcctgtggtagtcgaacaccgccaccaagccaaccagggcgatgacgagcgcaaagatgtgcagcagcccgtgcaggaccttggtggtgcgtttagcttcgttcctgaagacacggtaaaccagcagggcatttccctgcaggaagatcaggcctatgaccatgcagagggggtgcgcgttgaactgcaggtcgctctcccaggcaatgccgcctcggtacagcccgatccacgcgccggtcatggccaccaaggtcaggcccagcagctgggagaaggccacgtagtaaggcagtgctgtgggggtggctgccgaggccccgtcctccatgctgaggcaaacgcttgcctacccgagcgtcccttcagcctccccgcgccgcgcccggtcgcttgcccgggtcgctcggcacgaggcctcgtgccgattcaacacccagcctcgtacctagccgta

SEQ ID NO: 137329 - DNA, 1097 bp, Homo Sapiens
ctgtccttgtttgttgtagtgtcgttgtcgggtcgatcccgctctctctgggttcttttttcttgtgcgctactctcccatgtgggttttcctttccgtgcccgatcgggcttctctcttgctttttccactcacttctggacctttccctgccatgtttgaacgggtggccttcgtcatgtgtcatccacctatagagagtcccagagccaggttgtcatccgtcacgcctcccgcttcctcctggatgctggcacatcaggcacgtccatagcggcatgcagaaggacggcgccctcgcagtccctcagttggcaggctgcattgcagaatctgctgtggggcaaagagcttcctggcagccacggcttcccctggctttcctggcactgggcagttctctttgttgtccggcccggcaggctggcctgaggccttcttgaagtagcagagccgacacacggagtggtacttgtctgctcccccaatcacctcgacctccttctctgtgccgagcctcttggtataggcggcttcccggaagcactccatgcacaccgccgtcagcttcaccacgctctcggccagcggcaccaggttcaggatggccccaaatggcttcctctggaaggtcccatccagtgcagccacaattacggtcttcccggcgttggccatggcctcgcagaactccacgatgtcagggaaaaactgcccctcgtcgatgcctatgacagccacgcccagggcctcctgggccacgtctcggagcaggcaggcgggcagtgcctccatggtgttccggtcatgtgtgcagaagctgctgctgtagcgagtgtctttggcatacttgatcaccaggcacttgtactgagcaatctggaagcgacggacgcgtctcatcaactctgtgctttttcctgagaacatcggcccgagaatcacctggatctgcccccgggtcttgctgggggagccaggcagcacagtgggcaggttaatgcagctcattgcgcctccgggaagttcacgaacccgagtactctccctcgtgccgagttcaacacccaggcctcgtacctagccgttaaggttga

SEQ ID NO: 137330 - DNA, 1542 bp, Homo Sapiens
  misc_feature (20)..(20): n is a, c, g, or t
ggcccagcgcacaccccttngggcatacatgtctaacgtacgagcctgggtggcgaattcggcacgaggttttttttgaattttcaattagttaatttcataagctacagcagaggcgtggaccctgccctctccacacttgaagagataagcccctgggatccaagtcccagcaaggttggtgccacccatcttggtgaaagatgctgttgttcctgtggaaaccatcaccagaggtaggaagggctttgagcccaaaaggaaacaagagggcgtgaatccaggccatcctcaggggagggtgggagcccatcccaggcagagaggcctaagcctcagtgtgggccaaggctcaaaggtgctggcacaggcttcccagggagaacagaaactcagcagtgaaagccgcagaggggaagaagcaggctgatgtcaacagcgtggggctctgtccctcaccccaaggagagggagtgtgccagatcccaggccaccaagcggggccagctccagcctgggcgatcgtcccagcagctgagagggaagctttaagcagaccagtgggtaggagaggagggagcatgcggcaggtggggcagccacacaaaggagagttcccagaaggccaaggtgtggtcaccctccacgcctcccgacttcctcctggagtggctgggcagcatgcagggcagcgtccagtaggcggcagtggcaggaagggagcgggcggccctcgcaggtccctcagttggcagggctgcattgcagaatctgctgtggggcaaagagcttcctggcagccacggcttcccctggctttcctggcactgggcagttctctttgttgtccggcccggcaggctggcctgaggccttcttgaagtagcagagccgacacacggagtggtacttgtctgctcccccaatcacctcgacctccttctctgtgccgagcctcttggtataggcggcttcccggaagcactccatgcacaccgccgtcagcttcaccacgctctcggccagcggcaccaggttcaggatggccccaaatggcttcctctggaaggtcccatccagtgcagccacaattacggtcttcccggcgttggccatggcctcgcagaactccacgatgtcagggaaaaactgcccctcgtcgatgcctatgacagccacgcccagggcctcctgggccacgtctcggagcaggcaggcgggcagtgcctccatggtgttccggtcatgtgtgcagaagctgctgctgtagcgagtgtctttggcatacttgatcaccaggcacttgtactgagcaatctggaagcgacggacgcgtctcatcaactctgtgctttttcctgagaacatcggcccgagaatcacctggatctgcccccgggtcttgctgggggagccaggcagcacagtgggcaggttaatgcagctcattgcgcctccgggaagttcacgaacccgagtactctccaggccgtcccctcgtgccgaattcaacaccccaggcctcgtactaagcctaagttt

SEQ ID NO: 137331 - DNA, 1152 bp, Homo Sapiens
  misc_feature (402)..(411): n is a, c, g, or t
ttttttgaacattaagacattttataaagtatttcacagggttatcgtcttccaccatggacctctggaaagatctgttgggtgagttttagtccccatgacatgcagaacatccatgaagacttaaaacatggcacaagatggggcgctcgggagagcttgtggacaataccaacaggtagttctcgagagctgctccaggggtcagcagaggatctttctttccttctcaggtcacggtcgccacttcccacccccgaacaagaaggtcccctttcacaaacaggaggtgaccctagcagacagcacagcagttggaggttagacacagcaagctcccaacccggacgcgaaggcacacgggagagtaaacacagcacccacgagcaacagggcagggcnnnnnnnnnngggcagtgggggggtggttgttttcttttttccaccatcaagggcatttctgttttctaaaaagttatgccggaaagtggggcggccagttaacaccatctgggttttcagctcaagttctactgcggctttatgaagacttccatctgattaaagagaacaccgcatggaccacgtagagcagagtggctatgtaggagaacaccacggcagcaatgttttcatggtagtgcctgtaggtgaagccgtcttgcatcgtgatggtggccagggcctccaggactgaggcgctgaggtaaaagagggcagcggtgcagtggtaggctgcgtccaaggtgacccaggaagtctctccaccgtgggctccaattatgtacaggatgatcaaggtggtggtggccacgaagcagaacacagacacgaacatcacccagccctggaccaggggccagggcaccagggaggaggccaccaggatccacaccaggcccccgaagataaactcaaagatgaagagcaagtcgggcaaggtggtgaagaccgagaagccactgggcagggtgctgccccccgtcgccgctgcgggggccatgacggcgtgctggcgtcggccttgggacgggacgagcgccgctcagactccgcgcagacctctcgctggctccgcggagcccaagtggcctgggcgcccccagcgcgcgggcctcggccgattcaccacccaacctcgtacctagccaa

SEQ ID NO: 137332 - DNA, 407 bp, Homo Sapiens
cagaaatgtgctattttttcagtgggcaattttgtaatatattcagactatccagatacagagatgactaaggtcattgatagcgtctctgaacaatcagacggatcaccttatctctacacagctggcaaacaccaggctgcggcttggattaaccaggaaagaaagcttttctcactcgagttgtttttatgtattgatggggacttttccacctcattagactaatactcattcaaaaagagtttggttctgctgtaaatccttgcccgcctgctgaaacatggtgtgcaggtcaacggagaatactagctgctcctttttcaccacctttaccaatttcctatttgatggtttgtaagtagacagtaaggcaaggcagatgattattaccctcagaaaggttg

SEQ ID NO: 137333 - DNA, 738 bp, Homo Sapiens
ttttactctgtgacctctgtattaccctattagcagtgaacaaaatgccgatcatcaaacaaatactcctggatcacctaatgaggaggcctctgggattctataatcttaggtgttgtgtctgagtgatacttccatctgatctcatcaatttcaccatcatcaagtataaatgaagccagcactggaacctgagaaaaatagttcttagccaggatatgtttgtgtttgatcttgtgaataaatgagcgttcatatccctcttcaatacttgttagcttgagatgagcagctgcttcatctttggtaagaagaatgcagttccagggggaccactccagggatttattcccatctgacccatgaccagatcactgagattgtcgcaagcactgaggactgactgggacgcccagatgttctctgtcaggtactgaatgtcttgtagctgcatcaagaaagcaattttagaatcatcttcataatcagcttctgtatagtagagctgttgaagtaaacatttgtacttcaaaaatgattctcgtttttgagcctcattctgaaggttaatgcagttacgacaccggtatatgcggcgtgaggtggatgatacagaaaattctgtagaaggcaaataaagctggcaactgtggcaaaagtaaatcttcttataaaatttcaatgggtcttgagggaccttaaggtattttgcaacttcaggattaaacagaggtgttc

SEQ ID NO: 137334 - DNA, 720 bp, Homo Sapiens
aagcttccgtgttcctgtcagtccttccttcaagaagccggggaactcaggcagactcatctccgcagagcataccagccgtgggggaccgttcgacttgatgatgtgtgcacacttcaggtggtggggacttgagctttaaaaaaacctccacagccgaatcttctcctccgagccactccacgtcacgtccagctgggcctggccagtctgtggttatccatgtgggatgagataacaccacatcctgcagctgtgaagggggatggacaagggacgacggccgacggcagagcatcagcagccgacacatagttcgggtcggggccttgggtggtcctgcatggcccgggactcatctcacggaccctccgttctgcattaagccccaggttctcttctggctttgaaagggcccgagtgctcccagtgtagcttcgtcacatcgtcacgagcccctgtggtcatgggcgacctcacacctccctccctgagttctgctctgacataaggaagtcctcggtggctggtgcagcgcggctgtgctgtgctggggaggcagccgttccttcgggggtccttgggcctgcagtcccctcatactcacccttcacccaacatattttccggtgctgatatgtttccagactccagcgcaacctggggtgctctccagacccgtgcaggggccgcctggggtacacggaaggaagttgagtc

SEQ ID NO: 137335 - DNA, 1452 bp, Homo Sapiens
accgtacgccacaaggactccaaaggaccaggcatcactcttggtggtatagacactgtagttcagggactcaatggccatccagcgcacagggagacgccccatcgtcttcttcacataaacctcctctccccgagaaaggccgaagtctgcaatcttggaggccaggttctctccgaccagcacattccgggcagccaggtccctgtggatgaactgcttctcactcaggtactgcatgccattggccgcatcactggcgaaacgcagcagctgccgggagctaagggtagaggctgtcccatgctctcgagcaaaagctgggtcagtctctaggacccggcttttccgcagaaaatctagcaggttcccgtagggggcatattcaatagcgatatacaagtaacctcggttcttacaggcccccaggaggttgatgatgttggggtgatgccccaatttgcacagaacttccagttctcccgcaaagtcacgatggtcattttcagaggcatactctttcagcattttgatggctgcgttcatcttcagcccgtccttcttgatcatggcccggatgacctggccgaagttcccctccccgatgaggtcctcaaaggtgatgtcctcccactctagcactgggtagctcaggggctcgggctgcagttttggccgccgggtaagtgtcaaggtccctgagctgaactgcaggatggtctcctcgcccgagcctgactggtaggtgaaggtgcgtctccgatgcaggcagcttctgcggatgcacaccagggtttaaagggcggccaggatggtgaggcaggtggcagacacggagcccaccaccgccaggatcagctgctgatccaggccctcttcagctgcccggctctcttggactgggccctcagcctgcagcccgttgcccagggtggactcttctactgtgttgctccagtccccgagcccctgaatgctggcccgcatgcggaagaggtagcgcgtgctggcgttgaggccacggatgatggtgcttgtctcctcaggcctgtccacgtctatccacagtgggtctcctgcacccccagccacctgcacctccacaacgtacttggatattggcccaggcagagcctccgggtgcttccatgtcagctggatctcggagtctgagagggcctgggcgtggaggtgtcggggggctggaggcccactggggggcagaagcacgtgtgcagggggcgaggccgggcccaggagggtgcagtggtagagctgcacatccagctggtagtgggtgccaggcgtgagtcccgtcaggagggcagtgcgggcctggggggatgagacgttctcccgccgctcctgcccccgtgtcccgtcccacaggcgcagcaggaaaccgtcgcccaccagtggcccgggcaccaagggcaaggaccagctcactcg

SEQ ID NO: 137336 - DNA, 757 bp, Homo Sapiens
ccgtcacgccacaggactgggcagctcaggacctgacacttacccggcggcaaaactgcagcccgagcccctgagctacccagtgctagagtgggaggacatcacctttgaggacctcatcggggaggggaacttcggccaggtcatccgggccatgatcaagaaggacgggctgaagatgaacgcagccatcaaaatgctgaaagagtatgcctctgaaaatgaccatcgtgactttgcgggagaactggaagttctgtgcaaattggggcatcaccccaacatcatcaacctcctgggggcctgtaagaaccgaggttacttgtatatcgctattgaatatgccccctacgggaacctgctagattttctgcggaaaagccgggtcctagagactgacccagcttttgctcgagagcatgggacagcctctacccttagctcccggcagctgctgcgtttcgccagtgatgcggccaatggcatgcagtacctgagtgagaagcagttcatccacagggacctggctgcccggaatgtgctggtcggagagaacctagcctccaagattgcagacttcggcctttctcggggagaggaggtttatgtgaagaagacgatggtgagtctcattcaaccctcacccttagggcttgtgcctggccctgccccacaggagcctcaaacaggcccttcctccacactcagcccctcaaacccattctctcctaggggcgtctccccatgcgtggatgca

SEQ ID NO: 137337 - DNA, 1729 bp, Homo Sapiens
  misc_feature (1486)..(1486): n is a, c, g, or t
  misc_feature (1599)..(1599): n is a, c, g, or t
  misc_feature (1700)..(1700): n is a, c, g, or t
tttcgggatctgttttctcatttctagttttctacaagatgatgtgttagctttttcacgcattaagattaaaatttaaaacagaccacacaataaatatttcttttaaaaggagaaatatgccctggggaagctccccacgcagctgagagcctggctggttgcatttcggcttcttaggtgccaagcctactagtgccccggggtcccagccagcggctcgcgtttcctcccccttgcgccgccagtctggttgccatggagacaaaccttgctgcgcagagactgccgagccgcaggcagcggagctggaacccggcgagccagcctctgcaacaggctgggggcggaaggaggagccaggcgaagcggcgcctcagctgagaggaccggcggaccctgcagaggccccctgcccctctggctccgcccccacccgggtcgctagaaatacagccgtagccccgcccaccgcccactgcgctctgacccagacccggctgacccacctacccgcgatcctgcccatggctgacgggctctttcggcgcagaccctggggtctcgagcagattcgcccggaccccgagtccgaaggcctgtttgacaagcctcccccggaagaccctcccgctgcccgcgggcccaggtcggcgtcggccgcgggcaagaaggctggtcggcgcgcgggcgggagtggcgcagggtgggcctgctgccgggcagcccccgaaggccgcatcgctgccccccgcccaagaaggaggcgcctccactggacgagggctgctatctcgaccattttccgcacctctccatcttcatctacgcagccatcgccttctccatcacctcctgcatctttacctatatccatttacagcttgcctgagtggccagcgcgggacggggtgggcgcaggaccgagcggggacgggcacagggaaaacggtgctcggcattttgtgttttagaacagcgctgcacgcccttcatgtagctttcgatgcttgccgcttttcgactttgttgtgactatcattgtcgatcagttggaaagtactgagtaggtgccggcaatggaataggggggttgttgggacatgcacgctaaggaggggttagagctctaaggttaactacagaagtttgaacccgcatcacggagttacaacttgtcttcagtctgccttgcctgatttgaggagttttagggcgtactgggccacacggatctccccgcaaaatatatagcgttctcccgggcggactcacccggaggccgcacactcgcagtttggtggcaatccctttcataaactcatcagagtctcctacaaaggcgctcactcttgtcacgggtcccaccctccacttacccgctatacccatgcccggccgacatgcgaaccatacacactcacatttcacaaaatatcctacttttgtggatcacagaccggttacctgacctgtgatgcccttnttaaacaacatactccctccaaccactagatgttatctcagcccgataggtaacctctgctagaacgccacacatacatcgggtgcggtgcacacattgttgtgtcgcccgtntatacacacctctgatcctcttgtcatgcccacgctctccccacaaacggggcgccccctacacgaaacatcgtgtcgagtcaacgccacgttctgtgcgntcatatcacgcacccccgtcgttcggtcc

SEQ ID NO: 137338 - DNA, 392 bp, Homo Sapiens
catatttcatttgtttgtctcaatgtccctcatgaaagttgacccagacgggtccgcagaacaacttttgctgagaaggcaaaggaaattctcgcccaaattgtggagaaggcagtcgaaccaattaaacctaaagctaaaactgtaatagaaaagaactttcaagctcgcaatgaaaaggctatgcatggatttatctcatcacaggcactagccacacctccactcggtgcagtgcgcctgcgagccgagcagaaaccaatggcccatcgtagtgaatttctcgggtaaagtgacattctccgcttttgaatgctcccttcgcccagccgccaacccctcgccccaatttccattttaaatgaaagtctcccactttctagctgagacag

SEQ ID NO: 137339 - DNA, 832 bp, Homo Sapiens
ggagggaaatgaatcaaagaataaataaaaataggaagttatattataagtaaagataatatatagaaaaattatacataaggaagaaatatattatagtatgattgatagtagaataataattattatatagcataaacaaaaattaactttccacctcccaccctcacacagatctgagctcatgtgtcctgccctctgccacctttcccagagcgcatgtcaggaggtgacctctgctgctgcacccaaagggaccatccttgggagggggcggtcccttcatggggtgctcacatggccagccctcctctgggcctcccctccccaggccccaggcagcgctgcctgggaccccagctgcacactgattcagagaccatcgcatccctgctgaggggaccgtgggctcagccaataattggccctgagtcttttcagccctgttttcatcccagctctgccttgtgctgggaccgtgggtggaccactcctcccttctaggcctcagttttcctctctgcaaaatggggtttgggctggatcatctctgaaggctctgaggacctacagtctattttcactggcccacgagggagcagggttcaggtggtggcatcagagaaagggctgggactccttaagctccaaagatcatctagcccacctcctcccagccttccggagggaaagctgaggccccagagggtaagtggccagtacagtgttcccagctccaacctggggctacattttaaagctaatggggcctctgccctctgttgtgtcccctcgtgccgaattcggcgcgccgtcgacttcatactctctc

SEQ ID NO: 137340 - DNA, 935 bp, Homo Sapiens
ggatagtgcatatagaccgtgctacaaaaagcaggctggtaccggctcggattcccgggatatgtcgaccacgcgtcgccacgcgtcgccacgcgtccgcccacgcgtccgcccacgcgttcgacagctccctatccttccatgtcttggccatgtagattaagtgtaggcgtccggttcattcttacctgtgttaggccatgttattttatagcgaagtcatgttcgatagggatggtatgaaatgctgctggtgggctggtaaatccaaagggataaggcttcagtgctgtgggagcccttggctccaaatgtctgactatcttgagggagaaacaagcaggtttctactagtggtgtcttctgtgtattaacttctttccttgtggtatcttgtatcctgttttaaaaactaaatgaagggaaccacattagggcccatgccagcatcccagtgaagttcgtccagctccagttaggtggattctggagttcggagagggtttaaagtttggctgaaatagcacctcaagtggggtttagttttatttttacctgcgggcatcatgggcgattagggggaagcacaggatggtggtgtggtttaaacctgcagcaagcaggcatgttgaagagttgagtgatcacgctggagatgaagggttggaccatggattgactgggaaaaggcctgggtccattggagtaaagataacctagtcgattgaattggccatgggaagttaggtcacagtcttataaacaaagtaaataggacagagactaagttttaagggagacatcttggcctcctaggctaagtttactaaaccacactgaagctatagtaccttccagatgggcaaaagtgtacactacagttgaggagctgaaccttattaggttggatgtcgatcaggaacctgtttgccctt

SEQ ID NO: 137341 - DNA, 543 bp, Homo Sapiens
tcataaaatacttgggttgggcctcagaactctgaactcagaacttcaggcagccagccaccttcttaaagtccaccaggctggcttctttcgggctctgcttcaattcactcatgttctctagtcccccaaagagcctgagcctccggagaagcgctcagaatgcagtactccttggtttccctcggaggagctggtctggaggaatctccagttggaatcaccacctgcaatctctctggggttttggtcttcaggctgtctccagtgatctggggcagattaagcttggataaggggcttcctggggaggttcccattgttcctggagtggactcaaaactccctagcctggcattgctggttctgggagcacctgtgtcaccactgctcctaacagtcaagtagtactaggtttccgtggtttataccttcacattagcctcatctttggtccccagcatggtcccattgtcttcacttaattagaataacctgaatgcagcaggagttttggacctctacagactgtaccttctccac

SEQ ID NO: 137342 - DNA, 1342 bp, Homo Sapiens
  misc_feature (241)..(241): n is a, c, g, or t
tttttcaaagacagacacagtttatttataaaccaaagaggccaggagcttgcggcgctgagtctccacggccacatcggtgagggagccggccagccgcatggacacccccagaagcagctccgcgtcctccatctgcgacgggatatcccgatagcgtgttgaaagatggaggcccgagttctctgactggatcagctcttcctccttgaggtgcagcatgcccagcgtgagctggaancagcacccgggagccctcgtagaaaaacaggtcccagatgcgcaggagcagcttgatgtccaccacgctggcgaaggccgtgaggaaccagtgcagtgtgatcagggacagctcaatgtcatgctcctggagcagcttgtccaggcgaggcaggtactggacaatgaggtggcgcaggacccgctggtcagtctggacacccagcagggtggtgctgaagtaggaggcggggagcaggtcctcgatgatggcagacatcatccagaaggcgtcctcctcctccaggaacagcaggaggcaggcggccaccatgccggtgccctggcagtagccgatctctgggtagagccaggccagggcccggagcaccctgcgcaggcggggcaccccgatgctacccatgctggcgaagcaggcgttgctgggcatggtgcggagcaggtccttctcgatctgcttggcagcgatggtctcatcgttggagctgttcttcacaatctcgcggtaggacagctcagagttcctcttcttctgcagggccccagagagccgcatccacagctgtggcctcatgccatgtgggatgccggccagcaccagggagcggagcttctcagagcggggtagggagacggcaatcttgtcccaggtgagatcccccacatcgtggttatgggtgaactccaggtgggcctgccaccgcagcctctgtggagcatcctccatcagaggggagttcgccagcagactggagccaggctcatcaccttcttccttgtacacacggaaaccaaactcatcgtagtagaactctggttgctctgctgactcttccttctgcgtgtacttggccaagatctcctggggccatatgctcggagtcagggctgagaaagggccacaggcaggtgtatggcttcctgacattgtgctggtgggctggcaagtcttctgcagctccaatcttagaagtctcctatcctgctatcttagagctggaaggctcctcaggcttcatctggtccagaatcatctgccctgccccacgggccacctcagcgccaatccgggtcgggttagcagcttccatcccgggaattc

SEQ ID NO: 137343 - DNA, 500 bp, Homo Sapiens
tgggggaacggggaggttgtgcaaatctccaaacattggcttctgtggtgtcggtgcccacagggcgcaggggtgtgggctgaggggatgggctgcttgtctcttcaaagtacttggtaccaaagaaaacagcttgtgtggtcttcaaaagggctgcagtggccccggtctttcacccccagccttccagcaagaaagggaattgcttcccacctgggccctgttcaaagcatcaccacctcagctctgacatcaaggcctgagcagttgcacaagaagtcaagtggccacagagtggaccatctcagggagccggagctggccaaggaggcaggccgagacaggaacgcccagctccggtcccaggctcttgctcctagaaattactcagaagcatctttctttaaagggattttgaagccagttagtctctgcccgaagagctggctgaggaggtcactctgggcctcggccgtccggtgggtgtgcggctcggcagg

SEQ ID NO: 137344 - DNA, 1453 bp, Homo Sapiens
ctccaggagggctgctctgcccttccttcctctgttctttggccttatgttccccgccagcacagagctatcccccgtcccacccctctgcagacttatgccgtgcattgcaggcatggaggataaatcagtgacaggaagctgcgtctctcgcgtagacggtgaccagtctgtgtttcaggagagcctcagcagggccagccccaggagtctttcccgattcttgctcactgctcacccacctgctgctgccatgaggcaccttggggccttcctcttccttctgggggtcctgggggccctcactgagatgtgtgaaataccagagatggacagccatctggtagagaagttgggccagcacctcttaccttggatggaccggctttccctggagcacttgaaccccagcatctatgtgggcctacgcctctccagtctgcaggctgggaccaaggaagacctctacctgcacagcctcaagcttggttaccagcagtgcctcctagggtctgccttcagcgaggatgacggtgactgccagggcaagccttccatgggccagctggccctctacctgctcgctctcagagccaactgtgagtttgtcaggggccacaagggggacaggctggtctcacagctcaaatggttcctggaggatgagaagagagccattgggcatgatcacaagggccacccccacactagctactaccagtatggcctgggcattctggccctgtgtctccaccagaagcgggtccatgacagcgtggtggacaaacttctgtatgctgtggaacctttccaccagggccaccattctgtggacacagcagccatggcaggcttggcattcacctgtctgaagcgctcaaacttcaaccctggtcggagacaacggatcaccatggccatcagaacagtgcgagaggagatcttgaaggcccagacccccgagggccactttgggaatgtctacagcaccccattggcattacagttcctcatgacttcccccatgcgtggggcagaactgggaacagcatgtctcaaggtgagggttgctttgctggccagtctgcaggatggagccttccagaatgctctcatgatttcccagctgctgcccgttctgaaccacaagacctacattgatctgatcttcccagactgtctggcaccacgagtcatgttggaaccagctgctgagaccattcctcagacccaagagatcatcagtgtcacgctgcaggtgcttagtctcttgccgccgtacagacagtccatctctgttctggccgggtccaccgtggaagatgtcctgaagaaggcccatgagttaggaggattcaccatatgaaacacaggcctccttgtcaggcccctacttaacctccgtgatggggaaagcggcggagaacgggagttctggcagttctccgagacc

SEQ ID NO: 137345 - DNA, 886 bp, Homo Sapiens
aagaataggtcatgttttaataaaactaccaaaagaacaaaacagattcttcaacccaggaggacatgtgagtcacaataccctttaatccacaggttggctccttggtttctggaactttctgcctcctgtaaacgatgtgcgggtggtaccctccctcaaccagtggatgcttcttcacgggttcaatgaaaaagtctccatgtggtagttggaaaaatccagtcagtcccatggcaggccgctgagggctgcggtcccaactttgggtgccctgctgtagagccgtgccactgagatggcagaggggggcagaggaagccatcatcttaacatgggagaggttcccatatctcttctccatgatgtagctattggaaagaaatccttgattgaccgtcaagttaaaaaacaggtccttctcctcgtgagaaattctgtagtacacccagtcctctgagccatccaaatctctcttcctcctgctgctcgtgatgggatagtgcaagccatatgacaaaaaatgcccactggcatctactcggactggacccaccacgtggtattctggcaggcccttgataaaatgctcttgcctcctgtccgggaagcgaaccgggcctggctgaggctgtctcccatagcaaagcgccccaaagttaaggagctgagccaccacggaaaggtttgcaagccagctcctctgggcacatggcatgattcagatgttgaggagaagaaaagtcaaaaaagttttagccctcagctccagaaataaagcgcgtcgcctgtggcccagcaggaagatgcaggggtgcatggtcgaggcgcgagaaggcagcgactgcaaagctgcccgcgatctccctgtgcttttttaagcccc

SEQ ID NO: 137346 - DNA, 595 bp, Homo Sapiens
gcggccgcggctgtagcctttgttttaatatataatgcaggactggtggaaaacagttggcatagaatattttcacctaaaaaagaaagaaaagacatacaaaactggattaattgcaaaaagagaatacagtaaaataccatataactggacaaagctagaagaacctttagaagatttgtctgaaaacagatttcaagagtgagcttttatacactgctcactaatttgcttgattactaccaactcttcttaaagttaacacgtttaaataaggtatttctggacttcctagccttttagcaagcttagaggaactagccattagctagtgatgtaaaaatattttggggactgatgcccttaaaggttatgcccttgaaagttcttaccttttctctagtgatattaaggaaccgagtgggtagtgttctcagggtgaccagctgccctaaagtgcctgggattgagggtttccctggatgcgggactttccctggatacaaaacttttaagcagagttttgtatatatgtggatttttctgataagtaagcacatcagaggccttaaccactgcccaaaagcgattctcc

SEQ ID NO: 137347 - DNA, 1440 bp, Homo Sapiens
  misc_feature (648)..(679): n is a, c, g, or t
ggctcccttcctaggcatctgttcctgattagggctgaaagttagtaagacacaacctttcctagtgccttttagtcatcaaggcataatttcattttgctaaatacttagtttttgcatttccttcaaatacacgttcccttgagtttcttcagtggcatcccctgctcccctgagcacacacagtgttttctatttatgactgtagtgccaagcagaatttccatgttcttgctagctgcccattctcacccctcagggtctcatacttctccctggaagcctcccaagcagtcaatgtgacagggaccaagtatgtacaaggcaacatattgggttcaagtgcaaactaaggggaaccagggcctgtttttctagtttggaagtttttctttatccctaagaaaagagacagaccaaaaccaagaagatcaacaataactcttctctttgtcatcacggtgatgacatcaaggtactgatattaaccagaagttacaacaagaaaaccatttattgtccctagatggcatgaacccgtttatttcagggacattacttcccctgacttcgcatttacagattggatatgaacaaaatcaacttctcagtctctcacaagactcttagtaagccaggcataacagnnnnnnnnnnnnnnnnnnnnnnnnnnnnnnnncaaaatatttgaccacctcccacttaatcaagtgatagagctgccatctttataactggtagggttggctatgaagatggtgagctcaggtgacttttgagaatagctttcatatacatgctattttctcatgtatttttaggtacacgctgtgttcccagggaataaaaatcactgtgatgatttcaatgaaaacattaccttccctttccccatgattctcaggtcctcaaatgaagctagcaaaagttcacatgagccacgttcttatacaactctttcctccagagcaataggtcaggaccaagaacatagtgtggtataacattttggaaaattaatacagtgtgcctaatataaaacaaaaaattaaacagaatcaagtccattaaagacattgtaagtactgtatggggctccctgagtgctccagaggtggtgggaacaagagtagtttacactggaaacctggtcttcctcatgatcaggtcctgtgtatgccattctggtaagtgcacgctagtgggcctgcaggtcctggaagccccagacacatactgcttctctgtgtcagtgaccttcacttagagtcactaattccctctctcgggctcaaaaggcatagtgctacagttattaatgtaggtaattgtatatggcatctcgggaaagtgaagatgtgagatggtacatgtgcctacatgtgcatgaacgtgtgtgtctatgaaggcatagttgaggttgaagggtttcacgataag

SEQ ID NO: 137348 - DNA, 1882 bp, Homo Sapiens
  misc_feature (310)..(310): n is a, c, g, or t
gccgggcctccaaccatgtcagaggtacctaagctcggcctcccttggtggttgaacaaaccagcgtacaccccgcagggctcctgtgggagccctacccccgggatggtgcctctctgactgaagtcccagaaggggttgaatgaagaacgccaggggactactggggacaaaattcagatgagcagcaagcagccccacaagccaaacctgcacacctgggggcagagttctcaccgcgaacataaagacagagtcccgaggagccggccacctggtttcagtgagggagatgctggggcctttgccnaggagatctgtttcttccagaacagccactggggcctcaccgtttccattccatgacctgggtcaaccgaaacagagctcactccagagatccgcacagcccaaatctcagaggcagctcaagctgggacctggcccagaacagatcaagactaggacagggagcctttccaagttccaggttcccccaaggtaggaaagacttgggcactttgtcctttgatatcctcaaaggtctggacagggtgagccactctggggcttgaggcactgtgcaactgttgtctgtggggctgcaaagcaagcccctgcctctccgactcctcccacctgtggaatgcagtgcgcatcttgctaagaacagcagcttctttggtctcagtttcttggagtcaaggagcaaacgtcagtcacgattgctggggcctgcaatttgcagcgcaggaacaatgggaaaagggagggccctgcaggcccctgatgaaaatccaccttagtggagttgctggctctagcagcagtctgcagagcgggcagcattcccacgggtggcacggcccccatcccaagcatacgatgtcttctggttttggaaactctgcagaattagcctctgacaaaccacaccaaaacccacagcctgcaacaagcccctgctggcctgtagaaagtggcttcggtgagtggcacagggctgagcctggcctcctggctaaggcttcattcctgtatgagcggagaggtgacggcagcaaggaaacccgcacaccacacgtcatgctacctccttcccaccacttgcttctctctagagcaaaaattacatccaagcctggaagtacaatttcacagcccaattttgcccggtcacttggctgaacaccactccagaatgcctacatcgacagccatgtgaccagaggcttgattacgttttgggaaactggcagcactgacaaccatcactaccacaaaaatccacaaaacagcatcagcgaaaatcagactcagacaatggagatgggaaaccacttctgttgccaagtccagatctgcctctaatcacttcttgctaccacttgcaggctgtatcttggaaaggggcacaacaagaaatggctaatgggttggaaggcacaggccaggggctggtggctgaaggggtctgggtattggccccacgccactcctgcctagccaccccagggacatcagggtgctggctctttgctctaagatgagctaagcagggcttacactgataatggtctccaaaggtccctgatgttacaaggaggtccaagggcctcttcaaactgcatcatcccaggcagtggaaaagcaaaatctcacaggggactcatccctatatggttggctacaactggttaaagagcccttttaaatcagttgtcaggatgacttcctacagggagcaggccaaggggatggaagaaaggactcaatcaatgaggtctgcttctgcggaccgtccattgctttgtctcagaatgcaggcaggtctggccctgcaggaaagtccctgcctcgtgccgaattcgccacccaggcc

SEQ ID NO: 137349 - DNA, 1317 bp, Homo Sapiens
cggaacatggtggtccaccttgctcaccagtattgttctgagcccagatcactggggtggaacccacctctacagaggagcccagcagagtctgaatttcgttcgtgaattccaccagatctaacagctccttactttcagggttgaaggcttccaggtcttttggagccaagagaacaagagacttgcagaaacctgccggataaaattctgcctctgcaatggtgacaatttccacgtttggaaaattgcagcgaaatatgcgggaggacattttcaatttcttaaggacatccgaaagcagtagccagtttcgtggcccctgagccacagatacttggatgttataacacggtaagaggggggtctctgaaaattcaaattcaaacacatcgctataggcatcgtcatcatcatcctggtcttctggtcctggggggttggctaaaacatcatagccactttcatcatctggttcacaaacagagctgccatagaagtcccaaagtgccactggcgtcatcatcattgcgaccctggaggtcatttaaataatctgttaagaacttttccataagttcactgtgggtcattttcatgatggttctacctgagtacgtagccaaggtggggtcagcaccataagagagaagtagtcggacaatttccaagtgatcgttctcaacagcatcgtgcagaggcctggttccatcctgggcactacagttgacatcagcgccatattcaaggaggtgtcgcacaatgttgagccagcccctagcacaagcttcatgcagggcgcagtaacctgcgttgtcccgatgatttacatcacaaatcttgttctctaagcagtacaggaccacttcctcatagccaagcctggctgcccgctgcagaagggtctcgccagcgttcttattgacaataagtctccgtgcttccggcggcatagggcgagactgggtggtctcctgaggggaacttgagcatggcagctgtgtggactgggaggctggtagcagttgctgcaagcggtcgaagggctttggctcctgcttggctggtgacagatcatagtccgaactgggctccggccgctttctgaatctccggacagtcaccttgccatcggcattctccacgtagtattcccctgtcagtggcaatccccgcctggactcctgagggatcaagtgtttggttttgcacagtctcttcccggatggcttctcgctgttgtcggtgtatttctgcagcagggtggcagcctggcaatcctcttcttcgtctgcacacagcacatctgtattctgg

SEQ ID NO: 137350 - DNA, 1734 bp, Homo Sapiens
ggggaacttggtggacagggcggagaaaggtgtttttaggaactggggatccaagatgggtgttttttctcccagttgctttagggtcgataatcttgttctttggtgtaacggttggcctgggacagtgggggtggaacacgaagacctctgtaatgctgacagtttggaatttgtagtgggagaagagtctcgatcggcactgggtacagagctggatgacaggaggttttcttcactggccttctgagtatcctctttactgtcaccaagagctgcttttccagatgctggctcctccttgcttttctctttgctctcgtacatcttacgaatcactgaggtaggggtaaaggaaggagaaagcatgcttgtgatggaggcagcaggggcaggggaagaggaattccctcgatgcacgggtgctggtgacttggtcactcgctgttgcctgtttctgaatccatctctggttctgtccacctgtggtttgccaaaaccgaggctggtagaagtttgctgcctgtacagcaaggtcatgtggcaaggccagcccttctaaagctgcctgttgcaactccagctggctcatctgggctgtgatggggctcatgggtttgcgcatgccttggaatggatctccgagtagctgctgtggtcctggtgtgaaaccaattggtgatggtattcttgggcgaaggtagtcagctgaggctgctcgagtttgaaacacctgtgacaagggaggagagggtgctctttggcccagtaaagatgttgtaggctccaagctccccataaggccactcagaagattggaagaagcaggtctctgaactggttgacccagaagttcctgcaggatgttcttagggacaggctggcctggaatctcagcaggggacatcaaatggctttcaaggtttcggctgactttgggctgagaaggcaaagtcccacttgccttcattgtgctcactagcttgttgaacgcagtcatgtctccgtctttcttcagttgtcgattgttggttacggcactcaaggtctcttctaggtgttctgccatgaagggagttgaattcttcacttgctggtcaaccttcaagcccttcagacctgcttctacctcctccactgaaagcacaacccctgaatgtgagctttctttaagtttttctttatttgcagaaaggctggaaagaagaggtttcaaatccactttggctttctgtagcatttctaacatatccactttattttcagcatggtcttccaatggtataggagcaaagtaattccccgagttctgtccaggagagaggatggcttgctccagacctgcaagtctctctagctcttcatgtggtgttgacccaagactgctggatcggcttcctgatctgctcgggttagagaaccacctactgaaccgactggcagagactgacccttctcccaaaacatcttctatcatcgaagccaagcatggcaccttatcaaggttaaagaactcattaaagtcaaagtctcctggggactgctcaggcaagacagcatcccttggcacttcctgatcagccgcaggctcctgtgcaaggatgacctccacttcatcctcttcggccactcctccattgcactctactataccttccttcacagaggctgtccgtcgccttgtctttttctccctcgtgccgaattggcgcgccgtcgacttcatactctccc

SEQ ID NO: 137351 - DNA, 190 bp, Homo Sapiens
gcctactactactatacggctgcgagaagacgacagaagggatgcaagctctccagaaggggtgtgatctctgagcagtggggagtggagtcaccactcgggacatagagggtggacagttcaggcctgtgtctgcctccttgggactgtggagtgggtgccctcagtaaagcgctttgttggaatggta

SEQ ID NO: 137352 - DNA, 175 bp, Homo Sapiens
gcggccgcctactactactatacggtttcgagaagacgacagaaggggtgtgatctctgagcagtggggagtggagtcaccactcgggacatagagggtggacagttcaggcctgtgtctgcctccttgggactgtggagtgggtgccctcagtaaagcgctttgttggaatggg

SEQ ID NO: 137353 - DNA, 349 bp, Homo Sapiens
gggggggccgaagctggcgcagcgcgcgactttttgaaagccaggagggttcgaattgcaacggcagctgccgggcgtatgtgttggtgctagaggcagctgcagggtctcgctgggggccgctcgggaccaattttgaagaggtacttggccacgacttattttcacctccgacctttccttccaggcggtgagactctggactgagagtggctttcacaatggaagggatcagtaatttcaagacaccaagcaaattatcagaaaaaaagaaatctgtattatgttcaactccaactataaatatcccggcctctccgtttatgcagaagcttggctttggtactgg

SEQ ID NO: 137354 - DNA, 717 bp, Homo Sapiens
  misc_feature (449)..(449): n is a, c, g, or t
  misc_feature (634)..(634): n is a, c, g, or t
gaggtgatctagaggatcccgcagtttagggctacccttggaaacaatgattgggctctatgaaccagagctggggtctggggcgggccctgccggcacaggcacccccagcctccttcggggcaagaggggcggacatgcaaccaactaccggatcgtgggccccaggagcccgggacgagagaggctgagggtggtggcggcccctgaggcagaccaggccaggcttcccctcctacctggactcggccagctgcctccagggaccgcccgtccatatttattaatgtcctcagggtcccttctgccatctaggccttaggggtaagcaggtctcagtcctggcaccatgcacatgtctgaggctgagcaagggctgagaggagaggcttgggcctcagtttccctctgtgaagtggggggaggcaggccttcaaggagggataganggtacaaggcttcgtctcatctgctgtctgagcatccaggcccaaaggcactgagggagtcaggagctggggctcggcacatgcagagatgacagggcagggggcagtcttcctccccctcccgacaaagctcggggagccctcctgtgcccctccctccttgttgtccagtgctggggtccccnacccgaggtcaggctgccaatcctctgactggatcaccggggggcttcttgcctcagttcttcctctgagccccaggccttcg

SEQ ID NO: 137355 - DNA, 829 bp, Homo Sapiens
  misc_feature (21)..(21): n is a, c, g, or t
  misc_feature (506)..(519): n is a, c, g, or t
  misc_feature (553)..(761): n is a, c, g, or t
gtgttcatgtgtctaacactntctagctattttcaagacagacttaatcaatactgtgtttgctttccaatttaatctgttacaaatacatatgaagaatctagttggtacaggctcagggaggatagaaagataggtacacagatttgtcctgttaggatcctaccattaggaaggattaggaagagaagccctccatgcccatactctgcaagggagaacaaggtaagagccacaggagggaacaaaatgctatggggactcagtagggataggtcagaacaggctggatcctgcaaagcttattactgagctgggcaacaacgagcatgatcagacaaggctggagaaagtcatacaattttatgatgccagtttagtgaatattaaactcttgatgtaaccatttaaacaatttcaagaggtctctcacaaatagatgtacaaaagttgaattagcacgtccaaagccatgtggttttgaggctaattccttgttacataannnnnnnnnnnnnncccctcgagacaagagtctggctctgtcgcccannnnnnnnnnnnnnnnnnnnnnnnnnnnnnnnnnnnnnnnnnnnnnnnnnnnnnnnnnnnnnnnnnnnnnnnnnnnnnnnnnnnnnnnnnnnnnnnnnnnnnnnnnnnnnnnnnnnnnnnnnnnnnnnnnnnnnnnnnnnnnnnnnnnnnnnnnnnnnnnnnnnnnnnnnnnnnnnnnnnnnnnnnnnnnnnnnnnnnnnnnnnnnnnntggacggggtgggggccgctgtcaccctgctgcaggtaagactaataaacttttaattattattattg

SEQ ID NO: 137356 - DNA, 998 bp, Homo Sapiens
cgtgcgtttatgtgacattggacgcatgatggcttgtgcgtgttgtagtggttaccgcggagttggggatatcagtgacaatagcttcaatttttgctgacagtccacaatatgattgttgctcgggccagtttgacagttatctttcttgcatctaccaccctcgaagtcctgcttccgcaccagtgttgcacaaggagtcccaagtccaagaaaggagttgattaggtagcgtcttgggagaagttctgctctctgtcataagaagtctgaacacagccttagttccttccgctaatgagcctcaggtttgaaaagatcctgatgaggagctgaagaactaaacaggatgacaggtttttatgaaggaggtatgtaatcttatcaccgaggggtgtaatttatccggacattatatgcactctgccaaggactgatttacacatagatcaaaggaagctggctttctgtagtcccctgaagcataaataatgttcgtgaccatgagttttccccacatatagcaggggcagatgctgtggtgtcatcctggggaccgatgatttcagctgaactctcctacactgggttcaggtctccaacaggttcttcatccccgtccccttggttggcagttgatgacttgggtgctttggaattcattttataaacaggacgtaaaaggccattacaacacaagcaattgccacagcagcatgcagcctggttccaatcacagcggctttgtaaaacacaccccaaacacccttcttctctgatagcagccaggttttgagacgaggtactttcttgaagtaggcacaggtgcaaacaaagagcaaaccaaacaccagaatcccatccaaggagtacacgttcgtcatggcggctggccctggacctgggtagggggtccgggttcagatggtaatagcgtcggagatgggggagcgcccgccttgacacttcccgatccgggccgaggtgactggaagaaa

SEQ ID NO: 137357 - DNA, 1027 bp, Homo Sapiens
  misc_feature (716)..(854): n is a, c, g, or t
  misc_feature (907)..(941): n is a, c, g, or t
  misc_feature (944)..(987): n is a, c, g, or t
gctatgccagggttcttttctctggtgtcgctgcgtccatgcgaatttgttgttcatctttctgtgggggctgatctgctcatcatatctctttgtgttttgtgttttctgtttgttttcgttcttagtctcattaccggcttttagtgtaaatgaaccatgcccccccaaccctggcaaccaacccacagggttgtccccattcgaataaggtcaatgaccaatctattcaatgaacagtactcaccaatgaatacatcttcaccttaactcttgacacatgctaccacatggatgaatctcaaaataactatactgagtaaaatatgcctgaccaaaaaagggatacatattgtatgattcaaatttacatagaattctaggacatgcaaactaataacagggcacaagggcacttgggaatgatgggtccgttcctcacttcagttgtggtgatagttttacgcagggtatacatacggccaacacattgtacacttttgatacgtgcagtttattgggtgtcaagtacacctcctaaaataaaatattgatgggcttctacattctggagacaccgggcagtcgtactattatttttcagcttgaaatattagctacactttggtaaaaatacttttgaactttatcttcacagtcgcggcaaggaaaacaaaaggtataaacattcattggttgaaaaacaatgtcataannnnnnnnnnnnnnnnnnnnnnnnnnnnnnnnnnnnnnnnnnnnnnnnnnnnnnnnnnnnnnnnnnnnnnnnnnnnnnnnnnnnnnnnnnnnnnnnnnnnnnnnnnnnnnnnnnnnnnnnnnnnnnnnnnnnnnnnnnnaccccggccgtaatggccgaattcccgggcatatgtccggtaccgtcgactgnnnnnnnnnnnnnnnnnnnnnnnnnnnnnnnnnnncgnnnnnnnnnnnnnnnnnnnnnnnnnnnnnnnnnnnnnnnnnnnnaataacgcgctgagcgccctatagtgagtctatacatttt

SEQ ID NO: 137358 - DNA, 485 bp, Homo Sapiens
  misc_feature (425)..(425): n is a, c, g, or t
catcaagtcacctaacttttacaccagctcccggacatccttcttctcgggcaaccctgagtagcccaacccccggcactccagaatggtcttcagcttcttgaagctcagcgccaccggatccaccagctgggtggcaaagatgccagtttcataccacacaatggcctcaaaaaacctggccaggacgaacaggaccaggaaatagaggagcaagaaaaaaagcttcagccacatcttccctggagtttcctctctttccagagagctcggaatacgggagagagaagggtcgagggcgggggccgcggctcggtggcagcttgggcgagggccccgtgtccacgcgcgggccacccggcgccgtcactggccggccatccccggcggggaaggcaggtgacgggatccgcgcgggcgcgagngcggcgacgagggacgcagagacgcagagcctcgcgccgggcctcccagtcaagagccga

SEQ ID NO: 137359 - DNA, 1050 bp, Homo Sapiens
  misc_feature (131)..(131): n is a, c, g, or t
gaagggaaataccggtttttccccaaaggggggtttgggaaaaggagtttaaggggggctccccctggagccttttattggtgaaactattacggggttttcatcccaaaggaatggttatgatggtgggncataaacccatttcttcagacaaatggaagatgggtcccccttctgtagccagaaacactagctgtcctgcatggtccatttcctttagccccagggcggtcctgtgtgtacaggggaggtctcctgtaagggaatggtttccttggcttggccacttctgtaaaatccaaacccactccgaatctacagggtccacaatggaatcattgaggaatttcaccatcacaaacttcttcagggccatcaggtttttcttgtaggactcattgataccccgctcctgatttatatctgccaagaagatgctgtggttgcgatacacatcctcctttatggggtcatgccagtattcggcttgcacgaggcgttcctgaacaactttggagtacgccccagcattcagtgtttttcggatgaagtcacagatgtgagagctctctcctgggcatcgagggagtccaaaaacaccttgatgttgtcccccaaccgagatcagattgatcatgggaggtgaagggcatctctgagccactgccctcagaaattggcctccctgggagaatcccatagcattgtagccttgctgcaatttaggatccttagcaagtgcctgacacactgttgttacttgggaattgacattcaagaagaagctgttctccacgtcctccatcagggtcttcccaatctctaaagataagacgtaaattccaggtattttcttctccaccatttttttaatagcacccatgcttaagggattgcaacagctgtctcccatcccatgccagatcaccaacggcagcggcgccggcgggtccagatgctgcagcgcccgagaagcgcaggtccatggcaggagagccacagccaagagccacaggcagccgggcgacgccatcttcgctgtgtcacccc

SEQ ID NO: 137360 - DNA, 1169 bp, Homo Sapiens
  misc_feature (852)..(883): n is a, c, g, or t
tttagattctctttgttaaagaataagcacccttccggggatggtaggcagggaggcgtggtggtgagggagttgctggaggaataacaagaagaaaacaagtctgtcactaatgagcttagttttacttaggtttccattcatgaaacccttttaaatacaaggcaacattttcacagctggaaaattacaactaaatcttgatttaccaccaaaagcaatagatgtagttatgtataatctatagataatactacattcaggggacaatggcaaaactaggctcaatgcagaacatagcagcaaaaagcaatacttaaaaacgtttttcatgaatgggttacatgttgttttatatacaattctaagatatgaccctggtattcaataaatgaaacttgaagcgtaagtggtaggaaggtatgttcaatatttttaaagctgaattttagaattggttataaaataatactgctttaaaaataatagcagaaatagtttaattatgtaacagaagtacattagcttaagatagtcttgagataaatatcaattctgtgattttaaaaaatcctcctgttggtagtagtgttttgggcatgcattctttaaagcataaaagcaaaaataaactctataatctagtgtactgtgcattatttaataagcacatatattttatttccatttctaagcaactaacaaaatacattagaatacctaaagttatgttttggaaaaataaactaaggtgacctttttggcctctttttctacaacgtgagaaattaaaactactttgcacttctgcccaaacacaggaaacactgatatatttacttgggaactaannnnnnnnnnnnnnnnnnnnnnnnnnnnnnnngactgattatgaaaatatgcaataagtttactctaggtaatgagtgaaaattcacaaacattagaacagcaaattttcaggcagtgatgaatgtattaatagatctagttttaaatataatacttgtctcagatttaaagataaaaattttgattgagttataaccaaatcactcatgtatgaataaagctaagcctcaatagcttttatataggaaaagaatcgctccttaaaaatcaatttccccggacgcgtgggtcgacgatatcccgggaattccggaccg

SEQ ID NO: 137361 - DNA, 979 bp, Homo Sapiens
tgtttgctgccattttgtatgcgtagaagttcttttgcgtttctgttattgtgtgttgcgatctgttcttgttcttctggggattctcgtaccgctgcttggaaccggacttttgggcaaggtgccttctccaccgggatataataagtagacccaatgggcccaccgcgcaaatccgtggaaggttcaagtttgacacaaaagggcataatgtccaaatgcggtgttggtgaattaatactgtatctgccttgtagccgaatacatgacgacgaacaaactcttcgacacacatataaggtgattgttaaatattaagcatggcttgattccctgactttagctcaaaaaaaatgttaagtgacatcccaactgtcttaaaaatgtttacagaaaccattaaatgaatgtgagtagtagctgaggaatgatgaaaaagtgatggtaatgatattgtgcaagtggatggaaaaagaatatacgtatttgcaaatgcatggaaaatcttattctgtgggccttgtctgaattttaaactgataccaagaataaaaaaatatagtagcacaagtccattgacacctggagggtcaggcctagaaagcttaccttcaaagtgcaaattttaacaatggaatgttttagcagggacttaaggacaatcctctgtctttttcttgttgaaaagacctaagatgttcaggaagtatttattcctggccagaattatttcagtttcttggtaaaacaaaaatatttagccacaattaccacccgctcattcacatacacagaaccattcttaggggtgtttgcggggagaaaaagcccttatctatgtatcacctaatggaactcttatttataatctaagttctttgaatccactactttaaataccaacatgcacccggacgcgtggcggacgcgtggcggacgcgtgggtcgacgatatcccgggaaatccggaccggtacca

SEQ ID NO: 137362 - DNA, 560 bp, Homo Sapiens
  misc_feature (248)..(248): n is a, c, g, or t
tggaatcatagttcacactttattcgacatcatagaattcatagtggagaaaagccctatgaatgtgacaagcatgggaaagccttcagatggagctcagaccttgtgaggcatctggaaattcatatttggagaataaagttttggaatggtagcgagcccgtggaagaattttcaatcagagtctcaggtcctaatgcagcaccccaaagaaaccatacaggaatcataacccctaaggaagacangtaatgatataagatgtcagtatgtacatataggaagagagaaggagagtttgtttttgtcctaactatttggaaaattgtaagcttcctaagagcaattttcatctgattcagtgtatagtacttagtctcaggtcatgtgcagatatgtccttcccaaatgcttaccacaagataaatcagaaatcttgactggaataagcttctagttcctttgctttatcatgagaggttccacaccacaggaaaatcttgtaaatggtggaagctgcataaagcaccatcatcatcacaaaatggtgtccttgtgtg

SEQ ID NO: 137363 - DNA, 885 bp, Homo Sapiens
  misc_feature (231)..(249): n is a, c, g, or t
  misc_feature (281)..(341): n is a, c, g, or t
  misc_feature (395)..(398): n is a, c, g, or t
  misc_feature (401)..(402): n is a, c, g, or t
  misc_feature (404)..(407): n is a, c, g, or t
gggcgggccgataaacatgagaggcgcggtggcgtcgacaccctcgcgggcggtgcccccccgcggggccagtcttttttcggtggggtgtggtccggcaggcgcagacgcccgcgccaccggtcctctttgttgggaacagagagggccccccgagccgcgcctgtccggaaggcgcgccggccgcccccaggacgacggtgtggaagaattttatcagtccccgagggnnnnnnnnnnnnnnnnnnntgcgcacacggcccctcgctcctccttccggnnnnnnnnnnnnnnnnnnnnnnnnnnnnnnnnnnnnnnnnnnnnnnnnnnnnnnnnnnnnntgccccgaccctccctgggctcggtcctgttttccgtgctttttcctccccctnnnnttnntnnnngtaatcagagctcacactttattcgacatcatagaattcatagtggagaaaagccctatgaatgtgacaagcatgggaaagccttcagatggagctcagaccttgtgaggcatctggaaattcatattggagataaagttttggaatgtagcgagcgtggaagaattttcaatcagagctcaggtctaatgcagcaccaaagaaaccatacagaatcataacctgaaattcaggctctgtcaatttcatctctgtaacctttattgtttctgagtcttgagttttctcataagggctcactctccacctgcgcaaggactgcaattcccaggggcctccagggcacccggccgctccagtccagtcgtgcaggcggcgcgctctttctcgctccgctcaagtccaggaaccggttcccgggctcccagcctctcggcagcgcccacgcgcctgggccaaagtccgcgaacggaaaccc

SEQ ID NO: 137364 - DNA, 494 bp, Homo Sapiens
tttattttctattctcttttttttatttaagtgatagtttaattaataaacatgtcaagtttattgctgcacatggttaagcttccttttggctttggttggagagggtggagaaaagcgggaggggcatggcctgtgacctggtcacaaagtaccttccacagtcctttactttaaggtggcatcactaaattattccctgtagcccaccttcaggtccactccacactggctctcttgactattttcttcctttattcatcagtgatgtatgttcaggacctaattaattgtggatatgaggcagggtcaagaggacaaaggaacagggcctttaccttctacatagctcccctgtttcatccaaggaggttaagtattgatttttatcggttttctcaactgtgaatataataaactgaaagcatttcagggagaagctggagaacaccttctctagctgcactccaccttaaggctgaagctggatttgt

SEQ ID NO: 137365 - DNA, 1326 bp, Homo Sapiens
  misc_feature (15)..(15): n is a, c, g, or t
  misc_feature (669)..(690): n is a, c, g, or t
  misc_feature (771)..(797): n is a, c, g, or t
  misc_feature (905)..(1033): n is a, c, g, or t
ggtttgttgttgtantgatcaattagaggcactttacatagggttaagtgatcgaacccttttgtggttttgaacaccaacatactggcttacactgctgaaatattttgggtttcattattttgcactggatccaccctgtaaatactcttaagtatacatttcaaccactgttttttctactctttttgctgctcattaaaatctttcatgtaggtgccagaaccatatgtaaacagctttttaaaaaattgaagctggtattttgtttaaacaaaaagccatagaacttggtcatgttttccattttaaaatgatttactgaaacaaagtaatactaataaaaacccacaggcaccaaacaggctgcttaaaatggtctgttaaagacattttttggttatggaatataactaagaaaagttttgcacatctgtaagggggaaaaacagtatatcaccattgggtagagtggacgggactcatgtaaggactcaatttggggaagagcattcagtggcatgctgttagaggactagtgtccgagaatctcctcacagtatcatgttgcaggaattccccattgctctgcaacttccaaaccagtttgagtcatacaaatgttttctaaacttttattgtattactgcaataaatcttttaacggtnnnnnnnnnnnnnnnnnnnnnncaggagaaagaggacaggacaaaaagcgcaagacgaagaaagcgccaccaaaggagcgacgaaaccaaagggaaagagggnnnnnnnnnnnnnnnnnnnnnnnnnnngcctttgggggcccccccggccccaaaaaatttttaaaacactttctttgggggccgcggccccccaaggaagggagccggggccttctttgttcccaggggaacccnnnnnnnnnnnnnnnnnnnnnnnnnnnnnnnnnnnnnnnnnnnnnnnnnnnnnnnnnnnnnnnnnnnnnnnnnnnnnnnnnnnnnnnnnnnnnnnnnnnnnnnnnnnnnnnnnnnnnnnnnnnnnnnnncccgatataaaatttcccccccgcccgtggcattttttgggggtgggggttgggattccattaaagccttcgcgccgggagggggacacccctcccaaccgggggtggggaaaaccggaaacccgccgccggggcttccaccccaccttggggcccttggcggtaaaaaattctttcgccccggggaggacaccggggggggcaaaaaaatttttgcccattttgtggcccgcgttttaaattcaaaacatgggggagacaatcccccccgggaggtggtgggggggagaaag

SEQ ID NO: 137366 - DNA, 604 bp, Homo Sapiens
  misc_feature (568)..(568): n is a, c, g, or t
  misc_feature (574)..(574): n is a, c, g, or t
gttgattcttggtgtatattttcttttttctatttgttatgtccttgtgctggtattcccttcgtttttcgagaggtacgcacgcttttattggaactcttggcggcatgggggagtctgcgggggccaggccctgtgggatacggggcggcgcgagcggtgcggtggcgcgcaggtggagcgtgggagatgtcaggtgccaggggagtcctggccggattccatcgctccaggtgtttctaccgcctgcgggtggacagacggcggatggagctgcggaaagttccctcctcttcatcgggttccccagtcctctgctgctggttgaacttgcaccggcatcttctgctcagcacgatgaggatgcccaggatgaagaggatcccggcgatgacgaggcctccgatctgcagggactggtagtcgtaagtgaacgggtcgtgttcctttggactttctgccttggccatggtgaggagacccacacagaaaaccaagatgtggccaagagacgccattgtccccaatcgggctgtcccctgctgaaagagggcccccaaacgtcctnactgtnccggggctgagcactttggaccccctgccc

SEQ ID NO: 137367 - DNA, 1125 bp, Homo Sapiens
  misc_feature (66)..(102): n is a, c, g, or t
  misc_feature (1107)..(1107): n is a, c, g, or t
gaaaacccccgagaagttttggatcaggtgtgttaccgagtggaatgggccaaattccaggaacgnnnnnnnnnnnnnnnnnnnnnnnnnnnnnnnnnnnnncgggtggcctatgctcagatcgactggcatgattttgtggtggtggaaacagtggacttccaacccaatgagcaagggaacttccctccccccaccacgccagaggagctgggggcccgaatcctcattcaggagcgctatgaaaagtttggggagagtgaggaagttgagatggaggtcgagtctgatgaggaggatgacaaacaggagaaggcggaggagcctccttcccagctggaccaggacacccaagtacaagatatggatgagggttcagatgatgaagaagaagggcagaaagtgcccccacccccagagacacccatgcctccacctctgcccccaactccagaccaagtcattgtccgcaaggattatgatcccaaagcctccaagcccttgcctccagcccctgctccagatgagtatcttgtgtcccccattactggggagaagatccccgccagcaaaatgcaggaacacatgcgcattggacttcttgaccctcgctggctggagcagcgggatcgctccatccgtgagaagcagagcgatgatgaggtgtacgcaccaggtctggatattgagagcagcttgaagcagttggctgagcggcgtactgacatcttcggtgtagaggaaacagccattggtaagaagatcggtgaggaggagatccagaagccagaggaaaaggtgacctgggatggccactcaggcagcatggcccggacccagcaggctgcccaggccaacatcaccctccaggagcagattgaggccattcacaaggccaaaggcctggtgccagaggatgacactaaagagaagattggccccagcaagcccaatgaaatccctcaacagccaccgccaccatcttcagccaccaacatccccagctcggctccacccatcacttcagtgccccgaccacccacaatgccacctccaagttcgtactacagttgtctccgcagtacccgtcatgccccggcccccaantggcatctgtgggtcccg

SEQ ID NO: 137368 - DNA, 1517 bp, Homo Sapiens
  misc_feature (119)..(119): n is a, c, g, or t
  misc_feature (193)..(193): n is a, c, g, or t
  misc_feature (196)..(196): n is a, c, g, or t
  misc_feature (237)..(237): n is a, c, g, or t
  misc_feature (267)..(267): n is a, c, g, or t
  misc_feature (347)..(347): n is a, c, g, or t
  misc_feature (460)..(460): n is a, c, g, or t
  misc_feature (523)..(523): n is a, c, g, or t
  misc_feature (596)..(596): n is a, c, g, or t
  misc_feature (622)..(622): n is a, c, g, or t
  misc_feature (641)..(641): n is a, c, g, or t
  misc_feature (1001)..(1032): n is a, c, g, or t
agacctggtgcgtacacctcatcatcgctctgcttctcacggatggagcgatcccgctgctccagccagcgagggtcaagaagtccaatgcgcatgtgttcctgcattttgctggcggngatcttctccccagtaatgggggacacaagatactcatctggagcaggggctggaggcaagggcttggaggctntgngatcataatccttgcggacaatgacttggtctggagttggnggcagaggtggaggcatgggtgtctctggnggtgggggcactttctgcccttcttctcatcatctgaaccctcatccatatcttgtacttgggtgtcctggtccagctgngaaggaggctcctccgccttctcctgtatgtcatcctcctcatcagactcgacctccatctcaacttcctcactctccccaaacttttcatagcgctcctgaatgaggattcnggcccccagctcctctggcgtggtggggggagggaaagtaccttgctcattgtgttggaagtnctactgttccaccaccacaaaatcatgccagtcgatctgagcataggccacccggtccctttctctttctctntctcttcccttctttttctcacgttnctggaatttggggcatccncactcggtaacacacctgatcccaaacttctcgggggttttcagcctctttcttgagctttgaaaataaacctttgggtggaatcaagatcttggtgtactgttccactagcttcgtgaagtagttgaagaggctgtgctgtgggcggagaaagtcaaactggtagttgcgctgctctttctgcatcagctgggtcagaaactggcgcccattcctggccacaaactgagccgtcagcttcaccacatccaagtcgaaggctgagatagagggaggatcagcaatgaactcaaactcaggaggaggctctttgggcacgatggtctcttggattacttgggcttggaccttctggggcannnnnnnnnnnnnnnnnnnnnnnnnnnnnnnnatgaccttggggatggcggcggacggctcctgagccttcccttccttgaactcgctgaccttgtggcggtagtaggcatggtaagggtcattggggttcagaaagttgaacttggggttgttgatctcgttctgtcggatcctagcttcaaattcaggcccgtttctggccacaaagctggcagtcttgtcaacaatatttctgacctctggaggagggtaaataatccccacaactggcttagaaggtgcagaatcctcctttgaagatgcttcttcttctgtgggctgtttgggctccgtgggcacgggcggcggcgggggcaccgcctgcacgggtccggccggcatgactgcgacgctcagggctgccagtccgcctcggtgtcggtgagcggtgccgcctcaagacagcctccccgctcggtcagtacgacgagctcgcacctcgtgccgattcgccacccaggcctcgctaccttggac

SEQ ID NO: 137369 - DNA, 997 bp, Homo Sapiens
  misc_feature (118)..(149): n is a, c, g, or t
  misc_feature (534)..(570): n is a, c, g, or t
gcgcgccgaattcggcacgaggcccaatgacccttactttgcctactaccgccacaaggtcagcgagttcaaggaagggaaggctcaggagccgtccgccgccatccccaaggtcatnnnnnnnnnnnnnnnnnnnnnnnnnnnnnnnntgccccagaaggtccaagcccaagtaatccaagagaccatcgtgcccaaagagcctcctcctgagtttgagttcattgctgatcctccctctatctcagccttcgacttggatgtggtgaagctgacggctcagtttgtggccaggaatgggcgccagtttctgacccagctgatgcagaaagagcagcgcaactaccagtttgactttctccgccccacagcacagcctcttctactacttcacgaagctagtggaacagtacaccaagatcttgattccacccaaaggtttattttcaaaggctcaagaaagaggctgaaaacccccgagaagttttggatcaggtgtgttaccgagtggaatgggccaaattccaggaacgnnnnnnnnnnnnnnnnnnnnnnnnnnnnnnnnnnnnncgggtggcctatgctcagatcgactggcatgattttgtggtggtggaaacagtggacttccaacccaatgagcaagggaacttccctccccccaccacgccagaggagctgggggcccgaatcctcattcaggagcgctatgaaaagtttggggagagtgaggaagttgagatggaggtcgagtctgatgaggaggatgacaaacaggagaaggcggaggagcctccttcccagctggaccaggacacccaagtacaagatatggatgagggtcagatgatgaagaagaagggcagaagtgccccaccccagagacaccatgcctcactctgccccaatcagacagtcatgtcgcaggatatgatccaagctcagcctgctcagcctgctcgatgatactggtcccttacggaagatcgcagcaaga

SEQ ID NO: 137370 - DNA, 1081 bp, Homo Sapiens
cagaaccaagaagaaaatttattcataggtttatttctattacatctgctcagctgtagtgttacaacaattttgccttcaaactcagctttcttcagctccagagaatattttagctcctccattgtcatgccactttcctttaattgttgcataaagttctccatggcttcgcagaggttcttactctcctgaaaggcaagaagtgccttctcacactctggtttgggagcttcctggatcaacttgcagactggaagtgcactgctccactccccatcaacgcattgctgctcctgcacgcccactaagtagtacctgtcttcacagtaataactaatggtggatcctaaggtgaagttatttccttcaaaatagccatgaactggattcccaggagggtcacagtccctacttttgcagatgggaaagggaggtgcccaggtgtggtcctctagacactggctccgattgctgcccttgaggatgtagtggtcattgcacataaacgtgattttgtcacttacattcacaggccctgaagaactgaactctccattcaccagcacaggatcaggacagtggcccaagcggcactcagtagtggtgttatcccactccttagaggcattgcaaaaaagggtcttctttcctaccaggtggtagcccttgatacaaacgtaagtccccagaatctgtccttccacctcctttgcgacaaatatgctattgtccactggaggaagctctggacagtgctcatctgaagcagaaacttcgccacgcaaccataagacagcacgcacaccaaaaaaacatctggtgatcaaagtcctctccccaggctggaattcacccagctcagacacctggtttgaaaaaaaatagatcttctaacactgcttaagaccaacctaaccacctcctctctagagaagaggttatattgatttaccctccctggagaaaatgaaaagaaaaaatcttacgacaggaaatcagaacagctgtaaggaagctggtatagggaggaactgcaaaaatacaaagggatggtaaaagagttgccaggtttaaaacc

SEQ ID NO: 137371 - DNA, 818 bp, Homo Sapiens
tacagttgagatcagtgttgtaaaattaaactgatctggttctaattgcctcaaaggccaaaagcccaggcatttgaaatggaaagaagcagagaggaggctgacttagctgattggtatggaaacagttgggcccaagagccagaatttccctttgtagcaacacggctagttttactttgagaagctctgctcagctgctttataacattaagtctggcggaatggatgtcactgtgcacaataaagttttcacaagtataaacaatggtgatgtaagtcaacattgctgtagccaggtgtgaaggttgtatggtgtgtgacgaatgtacatcatgtttgtaggtttggatgctaatcttgaattgtagtttaaaaaatacgtatttttgtaactctttgaaagtttatgaagactgacagctttccttgtaagcactaagagaaaaacaaagaaagagggacatttgacaattttaaagaaacaacaagaaattagaatgaaaatctgtgacaaacagcgtcagtgtggccatgtccacatttcctacatgtctctctctacaagcacctctctaagaagcctgacatcccggtggactctttatagtcatgtacacttgattccagatgagctctggtcttatctggatgctcagataagaggttctatctgagcatccagatgttccctcaggttccaagacatttccccccaggccctgggttcactctggaatacgtaggcttcacgtctctctaaaaaatgacgtgtaaaacttaagaccagaactcaggcatcaaggtccagaacatct

SEQ ID NO: 137372 - DNA, 477 bp, Homo Sapiens
ggtgacaagacgcctttccgaggagtctggagtcagttctgtccctcggtcctcgtcccacagggggtggttcaagcccccctgaaattcgacaagccagagctgtgccccagggacctccaggcctgcctccacgcccacctttatcctctagctctcctcagcccagccagccctctagggagaggcttccctggcccaaaagaaaacccccacacaatcaccccatgggaatgcctggagcccgtaaagccgctgccctctctggaggcctcttgtccgatcctgagttgcagaggaagattatggagatggagctgagtgtgcatggggtcacccaccaggagtgccagacagcactaggagccactgggggagatgtggtttctgccatccggaacctcaaggtagatcagctcttccacctgagtagccggtccagagctgactgctggcgcatcctggagcattaccagt

SEQ ID NO: 137373 - DNA, 825 bp, Homo Sapiens
  misc_feature (36)..(36): n is a, c, g, or t
  misc_feature (47)..(47): n is a, c, g, or t
  misc_feature (448)..(448): n is a, c, g, or t
ggatggccatggttttttctatacccaaggcattcntataacaaganccccaaagcctgaacagtttgatcacaaagtcactttataacatcggggactacaaggccagatttgcttaaactttcccccaaattatgattttttataggatcacatctgaccagaaagggcttcactttaagatcgttgattctccgggagttataattcatcttctttctccaataccacccacattcttaaaggttatttagcttttctccacaaggatacggtagaatggatctttttcccctccagaaataatttccccaggaaagaattgtaaaaccaacttaaaaacacaaaataaccttacgtttttccaccaacaatgatcagacctcccactcctctgactttgagcttcagagccctttgtgtatacttttcacacattcctcatacncattaacacagctttccatcaccatcagccatccttcctcaacttttccttgcccaacatgaaagctagtggattgagagggaaggaagaagggaactgaaaaagtattacctttataaaaatagttttcaacctgttacttgatccttcaaagccaaattgggtagcatcatctgtacagaccccaacactaaattctcaagtgtctttcttttccatagccaggtctcaaaagctcaaatctaaacctactgatggagtagcaaaggcttcctaaaattgagcaatacagacctaggattgcatgggggaatatgacaagtcaagaccagttacattgttgcttaattcatcgataagaggccaagttctccacc

SEQ ID NO: 137374 - DNA, 475 bp, Homo Sapiens
  misc_feature (415)..(415): n is a, c, g, or t
gttcttccagctaaaacctttattttttgactacatctccacaaaatggagctatactgttagccagtatcctaatagtatagtgcagtttgcataatgattaccaagcttgaaactggaaatgtcatatgcactttcgtgtgtatcaggcagatactaaacattttccccttgagtcagcttaaaatttttccttcttttgaaatctcacgcagttgttttctggagaaaaatagagactgttttagtatttgttcttattagcgtatcatcagaactcagcacagtctgccttataagaaaacaaaaaatttttttatttataactcttgagattgttacttcttgctctttctgatttcccatccgtaaagtgggtgtaagcaatacttacctcacagggggtggttgtganggatttatattaaacgtgttaagttctctcagtattattgagttaaagtccaccaataac

SEQ ID NO: 137375 - DNA, 432 bp, Homo Sapiens
  misc_feature (14)..(14): n is a, c, g, or t
  misc_feature (62)..(152): n is a, c, g, or t
ccccgcctagccanatggtagtagtgatagtagcaactgtgaccatcatccactaaaactgnnnnnnnnnnnnnnnnnnnnnnnnnnnnnnnnnnnnnnnnnnnnnnnnnnnnnnnnnnnnnnnnnnnnnnnnnnnnnnnnnnnnnnnnnnnctttgatggtaatgatccttttataaaattaaattagtgctaagagactttcagcaatgttatatattgcctgtccattaaagattgttgccaaatggaatgagttgtccccagtaaggattcactatcaatgcagaagaaatgcacggataatctactttgcataaagaatggggctaggttgcatctgcatggtatcccaaataaataaaatgtgccactacccttgcaccaaaattattttatgatgggtaaagttagacccttgagaggttttttt

SEQ ID NO: 137376 - DNA, 864 bp, Homo Sapiens
gaggagtttcatttagtattttaataataataaaaaagacatacaaaatccaaacatttctttttacaattcagatacatatttttccccaagtgcaaaatactctatgaactgcatcatttgctgtttattgtcgattgtataggagatgcttactaaattggcagcagtggaaggcagatataaatacaatattttgaaatttcttctgcatttaacaaaaagcctcccacatggcgatgattattctgaaacttgagttcagctcacacagaagtataaagttttcagtttgttcaaactgctacaacctgtggtgtctaaaaaagctgatgacaactgggggttctattccttctaatcatatatttccttgtacaaataatggcacaaggatagggtgtgctacttttgagacgggtcaaatgtaaaaatatccttgtgttgttcgctcccacttttattgtgcttaagaaagaaacctggagggttaacattttctgcttatgctcagttatactttgtcttggtaccccttgtttgtggctgtaatattgaggttaagcagcaaatacaaaagttcgagtgctctataacgttttctgacattttgagatatgacctcataatccattccagagtcacctcaaacatgtatatagagaacacttctcatataaaaagtttctctagggccaaagaccaggactgtgttactgaactttcagcaacaaatctgagtctccaccacctcaaactgaccaaatcttgggggctgttaaagcagtcacagctcagtgccagcctttggggatttctaggcctggagcaggcagctcagatccaggatctggtcagttttct

SEQ ID NO: 137377 - DNA, 1126 bp, Homo Sapiens
gggagacagttttgaagttttcaaagactggctctgctgttaagaagttgtacttaaagcggaggagctaagccacctgccaaaatgtgcaaaggacttgcagctttgccccactcatgcctggaaagggccaaggagattaagatcaagttgggaattctcctccagaagccagactcagttggtgaccttgtcattccgtacaatgagaagccagagaaaccagccaagacccagaaaacctcgctggacgaggccctgcagtggcgtgattccctggacaaactcctgcagaacaactatggacttgccagtttcaaaagtttcctgaagtctgaattcagtgaggaaaaccttgagttctggattgcctgtgaggattacaagaagatcaagtcccctgccaagatggctgagaaggcaaagcaaatttatgaagaattcattcaaacggaggctcctaaagaggtgaatattgaccacttcactaaggacatcacaatgaagaacctggtggaaccttccctgagcagctttgacatggcccagaaaagaatccatgccctgatggaaaaggattctctgcctcgctttgtgcgctctgagttttatcaggagttaatcaagtagtaatttagccaggctatgaaatcatcctgtgagttatttcctccataataaccctgcatttcccattaatctacatatcttcccacagcagctttgctcagtgatacccacatgggaaaaatcccaggggatgttgcttactctttttgcccacactgctttggatacttatctactgtccgaaggccttctttccccactcaattcttcctgccctgttattaattaagatatcttcagcttgtagtcagacacaatcagaatcacagaaaaatccttcctaaggcaaagaaatataagacaagactatgatatcaatgaatgtgggttaagtaatagatttccagctaaattggtctaaaaaagaatattaagtgtggacagacctatttcaaaggagcttaattgatctcacttgttttagttctgatccagggagatcacccctctaattatttctgaacttggttaataaaagtttataagatttttaaaa

SEQ ID NO: 137378 - DNA, 848 bp, Homo Sapiens
gggagacagttttgaagttttcaaagactggctctgctgttaagaagttgtacttaaagcggaggagctaagccacctgccaaaatgtgcaaaggacttgcagctttgccccactcatgcctggaaagggccaaggagattaagatcaagttgggaattctcctccagaagccagactcagttggtgaccttgtcattccgtacaatgagaagccagagaaaccagccaagacccagaaaacctcgctggacgaggccctgcagtggcgtgattccctggacaaactcctgcagaacaactatggacttgccagtttcaaaagtttcctgaagtctgaattcagtgaggaaaaccttgagttctggattgcctgtgaggattacaagaagatcaagtcccctgccaagatggctgagaaggcaaagcaaatttatgaagaattcattcaaacggaggctcctaaagaggtgaatattgaccacttcactaaggacatcacaatgaagaacctggtggaaccttccctgagcagctttgacatggcccagaaaagaatccatgccctgatggaaaaggattctctgcctcgctttgtgcgctctgagttttatcaggagttaattcaggtagtaattttagcccaggctattgaaatcatcctgtgggagttattttcctctcataataacccctggcttttccccattaaatctacatatccttccccaccagcaggctttggctcagtggataacccaccatggggaaaacatcccacgggggaaggttgccttaactctttttttgcccccccacttgccttgtgggatacttttatccacacggg

SEQ ID NO: 137379 - DNA, 682 bp, Homo Sapiens
  misc_feature (201)..(211): n is a, c, g, or t
tctggggtagaattttaaagattcaacactggtgtacatatgtccgctgggtgagttgacctgtggcctcgcacagtgattctgggccctttatgcttgctgtctctcagaattgttttcttaccttttaatgtaatgacgagtgtgcttcagtttgtttagcaaaaccactctcttgaatcacgttaacttttgagattnnnnnnnnnnncgccatagcacagctgtctttatgcaagcaagagcacatctactccagcatgatctgtcatctaaagacttgaaaacaaaaaacagttacttatagtcaatgggtaagcagagtctgaatttatactaatcaagacaaacctttgaaaggttacactaagtacagaacttttaaaccttgctttgtatgagttgtactttttgaacataagctgcacttttattttctaatgcagaggatgaataagttaaatacatgctttgaggatagaagcagatgttctgtttggcaccacgttataatctgcttattttacaatatacacgtttccctaagaaatcatggcagagatgtgagggcagaatatacacaacagatgctgaaggagaaggagggtagtgttttgcaaaagaaaaagaaaagaaccaacagaattttaactctattaacttttccaaattttcctatgct

SEQ ID NO: 137380 - DNA, 1065 bp, Homo Sapiens
gctcccgggcttgagcctccttctcaaccttctgtttcgcctcctgactgcccgcaagccctgctgggcttccaacttctggcgttggaggtctgagttctcgcgggccacgcgttcgatattcccccggagctccggccagctcctccaccttggagctcatgaggctgggcatgtggtcgcaagcctttgcggaatggagggccatttccgagccccaggggatggtagaggttgtaccccaggttgtccaggctgcgtgggataatggagtccctccacaggttacgaaggtccatctcaaacttgtccttgtccaggggcaggcagagggcttgcaccttttgcagttgctccttggccagctggcgctcttggtgctgcagctcccgggttttcacgcattcaaccagctgttcctccgccacgcgtttgttcagcagcacgctttccttatccttagtgcaaatggtcttctccttggctatctccacctccagcgtcttcaccttctgattcagcatgaagagcaaggcatcgcagctcttgttcatgtccttgaattgatctctgcattgcttctcactcaagatgatggcagccatgtacctctgattgttcgtgtagatgacccggtcaccctggcactggcggaagctggcattgatgcggtccaggtcgcggcgagcattcagccacatctgcatgatggcatccttggcgcgggtggtgaagttgagctccttggtcaagttggactgggaggccgtgagccctaggagctgactgtataggccctcggctcggcgctcggtggcctgcaggttggactctgtgctcacgtgcacgttgccatagaccatgaagagcacgagccccaggatgatgaggaattggatgagggagacgaagaggaagaagtagcgcaggtaataccagcagccccgagagctgccccccgcccgagcgtaggaccctccgtgctccatggccagacccatttgctcgatcccgccgtccggtgcaccgtcctgctcaccaccagatcccgggaattccggaccg

SEQ ID NO: 137381 - DNA, 1399 bp, Homo Sapiens
  misc_feature (59)..(67): n is a, c, g, or t
  misc_feature (110)..(156): n is a, c, g, or t
  misc_feature (1224)..(1238): n is a, c, g, or t
ctattggttaggaggacctttctgggaagtaggataaaaatttcaatgatggttgcttnnnnnnnnnttgcataggcatggagaaggctacttcaaatgccaaggcagtnnnnnnnnnnnnnnnnnnnnnnnnnnnnnnnnnnnnnnnnnnnnnnntagttggcatatggaaaaaccaaacctgggaaatcataatgttggagtatcttaagggcatgctatcatagatattaacaagcttatttatacaataagacctctgcagagcgtgctcagctcgatgccacattccagaatagccactgttggtttctttttccaaattgtccatgtttacagggcttcacaaatatccctgaagtcttgccaatatgcttggcaatgataaaattcatggcaatatcatcacagttttgagtatcatctatcaaagcatggacagctgccaggttgcctctgaaataattcaagatatttgcttattgaagaatgaggctccaatcagcaccatagagtactggtcaccatttccagaccctggtgcttgcatttcaaaacttccataacttgtagatacctgatgaagtagagacgtgctttctaggaacaaatcctacaatttgatcaggaaattgctgccaaactgagaaagcaaaaacaaggtctggggtgctgatgagtgtgtcatcatctaccatcaacactgcattggtttccagttcaggaaagacctggagtcgatttctcatcctgtttgctgtctgttgtttgaagatcacagggatagggtggggccctagagaattccataattcatctggtgccttctctccaatattgttccataccgctatcactttgtgcagatttggtacagcttgataatgatttaaaagtttcaataagagatctgttgtgttgtacgtctgcattatgagagtaaaggagtccatggtggacttgccctgggattttatttccctacgcaacatgagcatcttgtcttctttaacactgggaagtaaggcagtcaaagcaccagctaccagtaataatacgaggatgaccaccaaagataatcgaagcactcgaatccccattactctcccaggaagtttgcagatgtggcaacacctcgagtgcagtagattgcagtagggccagccgatttatttccctgcagcttagttatcataaaacggaaggggcgtctcgtttgctcannnnnnnnnnnnnnnctaaaccaagtagcgtgcatctatccttctccattagctggattaacaacctggaaaaagtgccgcccgcaaagtgagcgcctggagcaagggacagtccccgagtggccccccggccgtaatggccgaattcccgggcatatgtccggtaccgtcgactg

SEQ ID NO: 137382 - DNA, 826 bp, Homo Sapiens
  misc_feature (133)..(133): n is a, c, g, or t
gggtggtttggttgtgttccaaagtcttaaggattttggaaatggcctgacccctttggttaaagaggccaaccagggacatataggatccccttcccttccccccgggcctgcctccggctgaagccaccanccagcgctcctttggctggatgctggaagagtctcccatgtgtacggactcaggatgtcagggcagcctccttctgtggttgcatgggcttgtgaccgttgcagtatcttttggctttccacgtctctaaaatgtttttcagctattttgcgtacatggctcagtgcactcccctctttgcctttgcagttttccacttgatatgggggtgtaataacaacttcttccatgactacgatgtttttttcttgccatttacagtctttaatggtcttgtgaatggtctggaagagctgctggccctctagagagacaccagcactgattgcataggcctggctcagcttctcctccttctctgtccgtgctttgctggcaagcttactaacattgagtgaagctaggggaggaggggtttctgttcggtcattaattatttccacttctgaaacatactgtaagtttatgagcaagatgtctgcatggttgggctttccactggaagagggacattttaaagccagcattttggattggtagtcaaaggctaccacctcgccctgcagccgctgctcctggcacgtccggcacgacacctggctcccaacgctgaagtactcgcccggaggagccgccatcttgggagtgcagccgcggccggcggcggcggcggcagcagcgggcgaaagcccc

SEQ ID NO: 137383 - DNA, 1324 bp, Homo Sapiens
  misc_feature (198)..(209): n is a, c, g, or t
  misc_feature (234)..(242): n is a, c, g, or t
  misc_feature (1312)..(1312): n is a, c, g, or t
atgcgtggagtgggagggtggccataccgcggggtgatgatgtagatcatgcgtcgggatgttatctggtcgggggagaaaccgcgcgagttgaggcgggccgccaaggctatcgtggttcagggggaagggggggaccgcggcggcggcctcagagaaaggtgttggtttataagagagttcttcggggaaagaacnnnnnnnnnnnncaacagagggagtgttataaaaccnnnnnnnnncgggaaacagtgggtgaaaagtgtgcgttggtggatgggcgcggggccgacccttccgggtcgaatttaactggtcaggctcaaggtgtgtctgactctgggctgtgcgcacgcgtcttggctttttgtcttcagcttgttacttttattttggaagaaaagatgtaaaagtttctttcaatcattcagaaggcaagtgtagccacttataaaaacagaatggcaggaacaaactaggaaaggaaagtcagaagtaaagggcagagtgggaaaataattttcaaaaataaaattaacaaggtgactgttccagaagagggctgtgaaaaggacatggtggaccgaagtctgttagtcaagtaatgattcaacttttaaattattctcttgttcttttttgttgggtgttttgtttgttcaagtctaagatttggaaatgctgaccctttgttaagagccaacaggacatataggatcccttccctcccccggcctgcctccgctgaagccaccaccagcgcctccttggctggatgctggaagagtcctccatgtgtacggactcaggatgacagggcagcctccttctgtggttgctgggcttgtgaacgttgcagtatcttttggctttccacgtctctaaaatgtttttcaactattttgcgtacatggctcagtgcactcccctctttgcctttacagttttccacttgatatgggggtgtaataacaacttcttccatgactacgatgtttttttcttgccatttacagtctttaatggtcttgtgaatggtctggaagagctgctggccctctagagaggacaccagcactgattgcataggcctggctcagcttctcctccttctctgtccgtgctttgctggcaagcttactaacattgagtcgaagctaggggaggaggggtttctgttcggtcattaattatttccacttcttgaaacatactgttaagtttatcgagcaagatgtctgcatcggttgggctttcacactggaagagggacattcgcgcacgcgtggtcgacgatatcccgggaaaatcncggagcgtacca

SEQ ID NO: 137384 - DNA, 466 bp, Homo Sapiens
ctcggctctaccttgtctttacagttttccacttgatatgggggtgtaataacaacttcttccatgactacgatgtttttttcttgccatttacagtctttaatggtcttgtgaatggtctggaagagctgctggccctctagagagacaccagcactgattgcataggcctggctcagcttctcctccttctctgtccgtgctttgctggcaagcttactaacattgagtgaagctaggggaggaggggtttctgttcggtcattaattatttccacttctgaaacatactgtaagtttatgagcaagatgtctgcatggttgggctttccactggaagagggacattttaaagccagcattttggattggtagtcaaaggctaccacctcgtcctgcagccgctgctcctggacgtccggcacgacacctgctcccaaccatgcagacaagtagatcgaggccg

SEQ ID NO: 137385 - DNA, 347 bp, Homo Sapiens
gaaaatatcaactttaaaatctaaacatatgccacaaaattttgggacaaattttgagttgaagacggcagtacaaactcatgtttagctttgtacacacataaataattatagatgtgtacatatgcatggattaatatacatacatatttctcaactctgctacaaacagtgacatcccagtagcaacaagcacatctaatgcccagatcttggtttctaagtatgattctccaacaaaaggaaccagggctctttggagcaggggttgattctagggattctagggttggggcagggaatatccaagatgaacctggagcatcttgtagtgccagaaagtaaga

SEQ ID NO: 137386 - DNA, 910 bp, Homo Sapiens
  misc_feature (178)..(256): n is a, c, g, or t
gggcagcgttgtggtcatccccggccccgcggttcccctttaggggtttcgcttacaggcccgcttttttctttctggggggggttaattgtgagttttcaacaaaaaaggctcgggctgaagccggctgttgtggaaccctccatgtaccagttttttcatcccccaaaggaagggnnnnnnnnnnnnnnnnnnnnnnnnnnnnnnnnnnnnnnnnnnnnnnnnnnnnnnnnnnnnnnnnnnnnnnnnnnnnnnngcccatggtcacttcttctcgagctgctcgagcagtgggttgccttctgactcgggggtcttgacactgtcggtccggacgatgcaggtggggcggtgtcggttcagcatcaggatgagctgctgccgctcctgcttcagctcctcaatctgggtcttcagctctgcgttcatgagttccagccgctcggattcccgctgcagaaactccgtgcgctccttcttcttgttccggcatcgggctgctgcgactttgttcttctcccggcgccttttccttcgctcctcttcctcatctagctcacttttcacgggctggggcctcttgcccagtttcacctccaggaagtgcaagggtgcaatcatggccccgaggttgcggatgtcagcgtatttcagctcctccacagtcagggccgagctggggagcccggtcagggggccaagccctggcagggagcctgcggtcaccgaagggtccgggatctgcccaggcatcatagcaggaggagtggcaggccagccttaacctcccccgccgccttgggcgccctcctcccgcggccgctcgcgctcctctccccgcgggggcgtcccgggttccatgcagtcccccggctccgccaccccacggtgcaggagcgctcgagaaagc

SEQ ID NO: 137387 - DNA, 558 bp, Homo Sapiens
cagagcacagtcaatgagccccagcatatggcaggttgtacacaacctggaagggtggctaaacccagaggaggcccaggccctcactcccagcactttcacatcccgcctgaatccatccatgagttcctctagatctccatgctccaacctcaggccaggttgccttgtgccttttgggcacagtagaaggaaaacagacttaaatggcttcatagttgttcagccagatgagcctcacccaggagaggactcagtttcccaactctgagtccatgttgccggtggacctcacttttcacgggctggggcctcttgcccagtttcacctccaggaagtgcaagggtgcaatcatggccccgaggttgcggatgtcagcgtatttcagctcctccacagtcagggccgagctggggagcccggtcagggggccaagccctggcagggagcctgtggtcaccgaagggtccgggatctgcccaggcatcatagcaggaggagtggcaggccagccttaacctcccccgccgccttgggcgccctcctcccgcggccgc

SEQ ID NO: 137388 - DNA, 1037 bp, Homo Sapiens
  misc_feature (106)..(106): n is a, c, g, or t
ccagatctcttttgccaggcttatgttagggcttttacaccaatgtgaccctctagtctgtacaaggagaggaatgcagagggaaagcgattcacttggagtctcntcgtcagtgacctggtggtgaatatatggtaatgggtaaatcccacttcacctaatgaagaaaaggagaaggatgcacttcattcttagaatctaagcaggaacaggaaagggaaaatctaggagaaaagcttacaaagactgtaaatgccttcaagaaggtgagagaaactaatatttggtttactgtcagcagtctgttcgggcggcattttgccaatatagccctatcctaagggaaagggaattgtggttggacaaccgagttctgagaaaggcagtgattgagcagctgaattccatccatttggtgggtaaggaccccagagtattcaaagtatcaaatggaatgtgactgaagagttatcttgctgatcttacccaggaggactgtcccctaggcaaggggacaccaaaccccaatgaggcatgggataaggttttggtgatgagaatcgggcagaactggagtttaatcctcaatgtcatgggtaaggccctctgaaattctctctacgcctttgagagactcagcatttagtttctgactcctagagtcccttagtagccagtcaacgtaagccaagttagtagctacagccgtcaggcacacaattacaccatgaacagtgaagtaaaaaaatgtcctttctttgctttcttcctctaatctcaatcccagaggcatgaaaacctttatcagtcatcgaatacagtaagaaattaagatgatcattccaacaacaacaagcatcacctcaaaaataacacgagccatcgcccaccaattaatgagtgttatcccatttgtctgtgatgagatgtaactctttgtgactgaagaagaggttgaagtgtgcattgccacaccagtggtacttgatgctgatatgctcacaatttctctcaactatttcaggcttagattattc

SEQ ID NO: 137389 - DNA, 1157 bp, Homo Sapiens
  misc_feature (31)..(31): n is a, c, g, or t
  misc_feature (568)..(568): n is a, c, g, or t
tggaaaggagaccggcccccctcccctaaanacaggggtccgtttttcccaggctggaaatcccgagaaaggttcttcccctttccgctttaacattcttcattcaaaatcctcccgcgtagaagcaactgcaggcaggcggccagggacgggactcctgcggggcagcagctcgcacagcacagagtagtggtcgtacctttgccagccggtcaggatgatgccctgcagtgagtccgtgggcccgctgcccgccaactgccagccactgcacgtggttcctgaggtggtgctcaacagggggcacggcctggctgggccccgtggcacccttgaaggcactggctgcccacagttgcggaaagccgcaccgccggtacttctgcatgaggaggaccttgccgtgcacatccaggtcggccgtgtagtcccagagcaccggctccaccagctgcggcaccccggacgctgcgagctggtcctcaggcaaggtctcggagcatgtcgtcccacaccaggggtgtcacgctggggcgccgggccttccacgccgctggccaccgcccgncatgtgtgacaggcacaactttccccgtgctgttctgctcttgctgtagccaccggcgcgaggcctccccctctccgaggtaatagacctcatcacacccgatgtgcagccgctgggcgcctgggtgtagctccaggacctggtcaatcatggcgcccaccagcgccagggactctgcctcgtgggggttcaggggtgcaggggaaggagcccacctcccgcaggtgggcgaaggccgtgtgcttcagcacaaactccatgtgtccaaatgtctgcaccaagggaatcacctccagctcattgagtccagccagatgcaagatctctttgatttcagaggggctgtaggcgtacttggccctcagcagcctcagagggccctcgtagggaaacatgtcttcatactcaatgaggaggccgtttgcacctagcgcacggaacagaggaaaaatctctgagaggtacgagacctttggtggagctcctttaaggtctaaatgaactaatctcatctgaaatggagtggaacctgacatttcaatatttccctcgtgccgaatcggcacgaggcctctccatttcacccggg

SEQ ID NO: 137390 - DNA, 433 bp, Homo Sapiens
gcggccgcgagggcggggcggccgggcctggctgcgcccccggacctcgcgggaccgcggcggcgcaggtgaggtgcgggtgcggctctggctctgcgcgctaggccgggcggctcctggctggaagcgtttcccccgcgccagtacctgaagagggacggccgggctcccgagcgacgcctcccagcgtggctgtcccgcagcggcgatgcggggctgctgagagaggctcgcacagagcctgtgggtgtaaattgtgtgtaactggtcgtatgtacaaactgaaagtgctgtgttacagagcccttagggtcagcagcctccgaacccctgcacggaaccaggggctggattactgaactgagtctgtctcacatgcaaagctttcctttccttttctcacccaatcctttgtgctttcatagtagatagg

SEQ ID NO: 137391 - DNA, 876 bp, Homo Sapiens
acacaacagaaatttattctctcacagttctggaggccctaagtccaaaatccaggtgtcagcagacccagctctccctgaaggctgaagaggaggacccttccttgcttctctctagcttctggtgatcgtcagctgtcctcggcatcctggggttcgtggcacgtcatgaccatcttggctgctggcaccgcggggcatcctcctgggtcttcacactgccttccctccgtgtgtctcaggctctaaatttccctctcctcataaggatgccaatcactggattagggttcaccatattctagtacaacttcatcttattttgattacatctgcaaagatcctatttccaaataaggtctcattcacaggtcccaggggttaagacttgaacatatctttttggaaagatacacttcaacccaaaagaaagaagctgtgagtttcttttgttctctgtctcctctttctttcccttttgtcatcctggttgttctgtttttgtgagaggctatggaggaaattcaaaatcaatgctgctgccaccatcttgctccaccgagaaccttgtggttgtgttctaggtacccgtttccacagaacactgctcaaaactttaaagaatgaagccaaggcaaaaagtaatgctctagaggtaaaagggagtccttacctctgagaggtacgagacctttggtggagctcctttaaggtctaaatgaactaatctcatctgaaatggcgtggaacctgacatttcaatatttcctgtgaactcctatggcgaagtctccttggggacttcttcctgcgccgccgcggtcccgcgaggtccgggggcgcagccaggcccggccgccccgccctcgcggccgc

SEQ ID NO: 137392 - DNA, 598 bp, Homo Sapiens
atcataacctgcccacaagttctacgcacctgtgactttgggggtcaaattatatactcttcaaattgacttaagtacacaccgcttagatttcatgcgtttcaaatttagactaagagaaagatgctctagaatttaaccaggttttttaaatcagtaatttaagattttctaaccatttgaacaaattttacttacatgtatgcacatgtcatttttcgtgtttctatttttatgttctcaaaggtaggataagggaaggaaggaggaaacagcccatttggggttcaagagctagctctgctaagggcttgtaagctatttctattctgccctttggtctttttcttgtttgtcttgtctttatttttaaatgaaattcttgaagctatgtattgaattttctagtatagaggatgtgacttccacctccaaattccatttaactgattcttttaaaagaaagataggcgtatatacaccacgccaaaataataataaggtacctatgtgagaattgcaaattataccccagggtagcatttaggcagcgtcggcaaaaagtgagttaataaatcagaagctacatattaaaaaa

SEQ ID NO: 137393 - DNA, 636 bp, Homo Sapiens
  misc_feature (167)..(167): n is a, c, g, or t
aaatgaagtgtcattattcaaaatagtccactgactcctcacatctgttatcttattataaagaactatttgtagtaactatcagaatctacattctaaaacagaaattgtattttttctatgccacattaacatcttttaaagttgatgagaatcaagtatggaanagtaaggccatactcttacataataaatttccttttaagtatttttttcaaagaatcacagaattctagtacatgtaggtaaatcataaatctgttctaagacatatgatcaacagatgagaactggtggttaatatgtgacagtgagattagtcatatcactaatatactaacaacagaatctaatcttcatttaaggcactgtagtgaattatctgagctagagttacctagcttaccatactatatctttggaatcatgaaaccttaagacttcagaatgattttgcaggttgtcttccattccagcctaacatccaatgcaggcaaggaaaataaaagatttccagtgacagaaaaatatattatctcaagtattttttaaaaatatatgaattctctctccaaatattaactaattattagattatattttgaaatgaacttgttggcccatctattacatcta

SEQ ID NO: 137394 - DNA, 470 bp, Homo Sapiens
  misc_feature (428)..(428): n is a, c, g, or t
  misc_feature (441)..(441): n is a, c, g, or t
aattgcatagctgcaagatgattcactgctgattaactgttgagcagttttatttaagaggataagaatatttaataaattgcaattcagtagaatattctatatttaattaaaatgtaattatgtaatatgatttgctctttggactgcattctgatattaaacctttaatttaaaaatattaacatattttagctttcctatgtagaagtctattttccactcgtgggggagaaaatggaagaacttgagatcatggtctacattcagatgtttttactgcttgattacatttcttggtttcacatttaagacttcaatttataagaagtaaattatatgtttttcaatttaagaacagatgaatgcagaaacattatgaacattatgttggggaaaacaaagagaccccaaattaaaaaaccaanaccaatcaaaacntaactagttgtgcagctctgggagaacct

SEQ ID NO: 137395 - DNA, 924 bp, Homo Sapiens
  misc_feature (22)..(22): n is a, c, g, or t
  misc_feature (52)..(52): n is a, c, g, or t
  misc_feature (103)..(103): n is a, c, g, or t
  misc_feature (152)..(152): n is a, c, g, or t
gaaccacccaggaccaaaaggnccctgggatgccaaccccaattcacctccngtttccacggtgaccttttatccacccataccaatttggtgggcatttccntccattttctaccattgtagaatccaagagtgtaaataaatgtatatcngatgtcttcaaggaatatatcattcctttttcactagaacccattcaaaatataagtcaagaatcttaatatcaacaaatatatcaagcaaactggaaggcagaataactaccataatttagtataagtacccaaagttttataaatcaaaagccctaatgataaccatttttagaattcaatcatcactgtagaatcagagtctgtaattcttttcttgattagagtggtaggacactgtaatactgttcctccatgtttccatgcatacaatgttatgtgttactctacactgtaaatgcagtattcaaattcactttgagccgtgggcctggaagttagagactagcttttaccttattactttcaatgattttatctgagttaagctgataaatctcttcgcggctgaatccaaattcttcaagtatctcctcagtgtgttctcctatgaaaggatcccttttgaaagaagggatggctggggtgtttaacagcagaggtgcagggcgggggctcacgtcctgctcctcactggtgataaacgagccccgttccttgttgtgatcatgatgaacaacctcctcaaaagtcagaaccggagtcacacaggcatctgtgccgtcaaagatttgacaccactctggcttcgtcttctttgcaaatacatctgcaaacttcttcttcatttctggccaatcatccatgctcatctggattggaaggtcatcagactttagtccagtgcctttgtcaacagctcgtaaaactg

SEQ ID NO: 137396 - DNA, 676 bp, Homo Sapiens
atttatgtgtattatatttttcaagcagctaataagttggtaggacataatatttaattcgttggggacctaattatttataaattgaatggttagatatttcttttggcctaagccaccatgaaaaaatcactgaggcgctaagggaaacatgaactaagaagcccttctgagtctctgttttctcaactgtaagatgaagaaacctgctccaccttcctcttgcgattgttgaacggcagttgagatactgcgcagaatggaccttattgatggcctacccaacatccattctctactccctctactctgatggcacccggattagattgtggaatctaccccttcctcacatgcctttaggaagttgagtccagggaagctccaggagcaggctggttttatgtaaagacaatcccgtcttctttgtcaaagacaggtataagaaaggcttgtaacttaactcagtccaaggagacacaaaacgacttgctggggggtcctgagatctttatttctggatgttgctgtgtgttgggtataagatccagaacttgctaccagccttattacttttaatgattttatctgagttaagctgataaatctctgcgcggctgaatccaaattcttcaagtatctcctcagtgtggtctcctatggaacgatccctttt

SEQ ID NO: 137397 - DNA, 1522 bp, Homo Sapiens
ttcattgttaatgagtgtttattgttaataaaaccatagtacatttacagtaagtgacaacattattgtacagttaaagtatcatacaatattacagcaataaaataatgcctatttctttgtacatccagccaagcagctagtcaaaatattttccagaattgcaagcccctggggggttttcagggtgacctgagtgccaccttctgaaatgcctggggcttttggtgaataaatagtttttaaggtgcggccagacagctgaagaagttgcacccagacagactgtgcctgatgctgccccagtgtctggtccataaatatgacaggtgtcaggggagcccagggcctgcagaattcgagggcaaggccgtgaggggacacagcagaaaggcctcttctcctggcccttaccttccatcaatgccctgtcctttaatctccaagagtcacagtccccagtgggacctgtttgcccagctctcaatcttacattaaaggagccgagagacttgaccaggggactctgcttcatcgcccccacaaaggcaacttagtctaggcctgaggttccagaatccacccatttactttggcccctaaaaccagcagcaaaacaagagctgaggccattcctacacagcaccccatcccctaccccttgcccctccatgccagacttagctcagaaaccatcaagctggggaactgccctctgctgctaactgagcaagctggtagtcctgatgggagggactctggaagcccaggcaccaaagacaatgggggaactccgggtggcagcagtcgtggtggcaggggggggtccacaggccactggatgcccacattaagcctgtcaaacctttgaagaacaagtttggggatttgggcagcctttgcctatgtgacatttaggaagaaaaataccagcttttgaattactgcagacgactgggggcctaggcagtatgcattctatacattcataaggattcctgtacccccaggagccccagttgggatggtctgagtttactgaggccctaggggtgagtagagcttggagggcctgggcggagtgtggatcaggatcaagctgcatgacctgcaggaggggagtagcgacaccacagggggagtgcatggctgcccttgagttgcaaactgagatggggaggagggccaccagttagctacatctcccctttgcccatcagtgattgaacaaacagctctagggcagaggagatgagggtgatcatgccacggtgacaggggggacatcatgggggaggaggaggaaacagccaccgtgaacctggctccaagagggcactacaaccataccccgacatggtgggccctggcacctccacaggccctggcctcaggcagcctccagccacactgcactcacacaccgggaggtgatgtagacagagtgcacgcgctctgccagggtgttatgcaggtcctgccctcgtgccgaattctacatcccatgcctcgtacctagccg

SEQ ID NO: 137398 - DNA, 1469 bp, Homo Sapiens
  misc_feature (544)..(586): n is a, c, g, or t
agagcaaagctgttgcagttagtgacgaacatgctgccccatgacattgcccacctcatggtctagtgccgccaggaggagtcacaccggcccatccagatggtgaagggcggagcgttcgagggcaccctgcacggcccctttgggcatggctatggggaggtggctgtagaaggtatcgattatgctgagtgggtggtggccagggacaagaccatgtacgacgagattttctacaccctgtcaccggtggatggcaagatcacaggcgctaatgccaataaggagatggtgcgctccaagttgcccaacagtgtgctgggcaagatctggaagctggccgacattgacaaggatggcatgctggacgacgacgagtttgcactggccaaccacctcatcaaagtcaagctggaggggcacgagctgcccaacgagctgcctgcccacctcctgcccccgtccaagaggaaagttgccgagtgatggggtggggggacattcagacgggcagtgttagaggaggagatgggagcggtgactnnnnnnnnnnnnnnnnnnnnnnnnnnnnnnnnnnnnnnnnnnntatgcatatcttgacattgctctgtaggtgagagaggaccatgacgcccacgtttgcagctgatacttgtttgggcacacctccaagttctcgggattagaaggacaagagcactcccagcccccagagtctaagcctaagtctctatccctcttcccctctcctcggccactccccagataccagacctgaggcaattcacttgccagcacagatggccaacccacctccagattccccagtgcttccacacccgggctctgagcaaatggaaaagacttttcatttagtagacaattcacttctttttctgtgcttcccctatctgctttggcttcctaataagaaatccattcaagagctaggagatctgagggcaggcgggcagctgcagggaggagaggtgagaaaggaagcgtcttctagagacattggcccaggagctctgttctttcctaatctaagcctctgtcttcttcggcaaaccttgctttgaactctgccagtatttcattttaaagaatcccagagcgggagagagaagagaaaaaaattgataagagtgaggaaattgtcctgtagtctattgaaaaccagtcaaggtggttttagttcatagattttgttagatgttctttccacctggcctatgatgtttagatgttcatacttgactcacatttacccagcccctcctgcgtaccaggagctgtgttaggcactttatatacattattctatgtggccctcacctgatgccccaagggaagtatgcattagccttcccattttgcagttgaggaggcttgagtaagcctcaagaagggtttaaggcgaccttctgaaactcacagaagtcacgtgatggagagaggattcaaag

SEQ ID NO: 137399 - DNA, 511 bp, Homo Sapiens
ctatttttcttttttattctttacttagcttctttattcctgttgctctctggcaatattcttgatttttagaaggttttatgcatatcaaccagtagagaaaggaccccaaaaccaggctggcctatcacattctgtgccatttggtaatgcctgacaaaaacattttaattttcaaattgcttgattaaaatggcaaacagtttgaaaattgtatacctctatatcattcagttaaaaaacaataaagtgacattcttaaaaacatcaaggactttcccctcaagggcacacgagattgttttagttactgagaatctgtatcccttcctttttactttttaagaatctcattgattaaagagaacaaaagaggttggcacaaaggggcccttctcgccctagccatcctgaacaggaaacaaacacaaagttctcttccgttctgtttggtccatgaaatagaacactccagatattacgcttttcattaaaaaaagcatcttgtttg

SEQ ID NO: 137400 - DNA, 314 bp, Homo Sapiens
ttcggcacagggatgaatttcatttattgactgttcaacagagttaacctgaattatgttgtctttgtttttaaaaatctcacattctcaatcatattttgcattatttatgtatttgctttgtagtttgctgagacagatcagtatcaggggagctttgaggatttgccttcccagatttgtcagtatattacaaccaaattcttaatgctaattttagcaccttttatttattgggttttttctggcataaaaagtaaagccttttaattgaatcatgccacctatatgcctatattattaatcctatgtgt

SEQ ID NO: 137401 - DNA, 1697 bp, Homo Sapiens
gtataaatcgtggcactataaagatgagaaggcaggtccatgatacagctgagagcaagcctttggagcatcgcttccagaaattctatctgtcctgtagtaagtagtagcatccagataaaatcagtggttctcctttctcctcttccaaacacattctgagagtttcttgtttaaataactatgtacacacccagcaggcctggtctctcttttacatgagggtccttcacttgagggtcttacaatggttttagagtcggttgccaattgccttttttggagatttacttgcttgggacccaaacttccttctgataaggacagtttctcaagttcagcttcaagttcagcatctgagatcctagggttaggcacgctgttggtaaaatgcctattgcgggggttgtcaggcagatccaaaggttctttggtggtatcctgaaggaggatgtccaattccttctccagttcttcactgtcaaaatctaagccatttgttaccccaccagccagagtctgagaaacttcatcctgggtgtcacagagctcttggatctgatccacgaggctctctgccttctccactgtgacatccttcatggagagtttgagtgctcctaccccagcctggtaggcgttaaaaaccatctgatctgtctgggaggcatagatccggtccaggatgccttgaacagtgtccagcttggcatgcaaggcctcgatgcgcttctctgtccgttgcttggccttgagagacctcagtgccagctgcttctttcctgctcggcatgcccggcgggcttcttctttacacctctctgcttcctgggataaggactccactttgcgtgagagaagctgttcactctgcatcagctggtacaccccaacatctacgtcattgactggagagaccttggcacgtggccctcgggcaaacttcacaatcttctccccgttctgctcgaggactgtgaccctcttctccttctgcagctgcagcaacaccaagtagaaggtcctctcatctgggcaggagttagcacagagggtgctgagctctgacagggccaccacggggtgggaggagaggggcgagttctgatacagacgatacacctcctcagccttttccttcaacagctccacagcgacaaggacctcctcagctggaaccttattatctcccagcatgttagaaagagtccacttgagaggcttcagcaggaagaccccaaccccccaggagatccagctgctgtctacactggccatgaagtctgactcccgctgcagctcccctcgacgcagcaggtcctgcagcaccgtggccagccccagcgggacgctccccttgcgctgaaaggcctcctgcaagtcccgcagacgcaggcgcaccaccccctggcggcggctgtggctcagcaccaacggcgcccagaagcccatcttgctgtcccagtcggtgctgttcacctcgcgactcctcttgaaagcggagaacaggaaggacatgcgctcctcgtcctcctcccactcggggggcagaaggcccgccgggtctcccccggctggggcctcggcctcccgctccggggaccacatcggaaccccagccccggcaaggctgcgaacacaagcctggcccctcgtgccgaattcggcgcgccgtcgacttcatactctccgcccta

SEQ ID NO: 137402 - DNA, 902 bp, Homo Sapiens
gagaactgccgcttgccgccattgacacgcacagatagaacccaaagaaaggcaaagagtcctgcccggcaccggcgccgcgtgggccaaacctgcgcccgtggaggggcgcgcagagggcaccgggcgccgggagcaggcggcgcagcaccagcattgtgttagtgccgggaggccactgtgtcagcaagctgagagggaaactgaagcaagatgtcgggccggagtgggaagaagaaaatgtccaagctgtcccgttcagctagggcaggtgtcatctttccagtggggaggctgatgcgttatctgaagaaagggacgttcaagtaccggatcagcgtgggcgcccctgtctacatggcggcagtcattgagtacctggcagcggaaattctagaattggccggcaatgccgcgagggacaacaagaaggcccggatagccccgagacacatcttgctggcagttgccaatgacgaggagctcaaccagctgctaaaaggagtgaccatcgccagtggaggcgtcctgcccagaattcaccccgaactgctggccaaaaagcgagggaccaaaggcaagtcggaaacgatcctctccccacccccagagaaaagaggcaggaaggccacgtcaggcaagaagggggggaagaaatccaaggctgccaaaccacggacgtccaaaaagtccaaaccaaaggacagcgataaagaaggaacttcaaattccacctctgaagatgggccaggggatggattcaccattctgtcttctaagagccttgttctgggacagaagctgtccttaacccagagtgaccatcagccatattggctccatgagaagtggaagggcattgtccacccaaccacagcccgaaattggacctccaagaagat

SEQ ID NO: 137403 - DNA, 645 bp, Homo Sapiens
  misc_feature (52)..(52): n is a, c, g, or t
  misc_feature (141)..(141): n is a, c, g, or t
cctatcaatgcttaatctgttctttcattcccactgtaaatcacatccaatnacatttggtgaaactgcaacggaccaccatttacaaggtagttgaatgcagaaaccgaaacgattatgccccctccccactctaaaggnaaagacacagagtacatttcacatattcagagagtggctcagtgggctctttcaagcctcatcaatcctgtccccctgctcagaacaacacttccttttctgtaagcaagttccacaggccctcttggcccttctgctccagccctttctggaaccaggaatcattgccaaatattcaacgttcctgcactaggagaacctcaggccctcttccttgggaagaccaaacccccttgagtgctcctcctgcttcagacggaggtgacagtcctcactttggcagagagggcttgcttaaacctcctcttcaggtcctgcatgttgggtgacttgggcctgggaatgagggaggttcttcgcttctcgggtgtactgctaggctgctgtttgtgactgacctctttacagaggacgtggaaggcgctgtagacatcattataattttcactgacagacacttcatagaatgagcagcctagcatgctggctagctgcagtccaagc

SEQ ID NO: 137404 - DNA, 1085 bp, Homo Sapiens
  misc_feature (1005)..(1005): n is a, c, g, or t
catgttgcttgggtcgaaggctatctgttcaacctcagcaaagtaattaactggattccggtttaagaccagtttaccaactgggatgagagggtagtccttgtgaggccaaaccttggtgagatcgaatggattaaatggaaaagtttctgcctgattaaatgtcatgacctggatgtaaaaagtccaggaggggtactttcctgtggcaatggcgttaaaaagatcccggatgccatagtcaggatcttcctgggaaagtctcgccgcatcttcaacagaaaggtttttgatgccctggtcagtcttataatggaatttgcaataaactgcctccccatttgcattaaccagcttgaaagtatgtgatccatatccattcatgtggcgatgtccatctggaatcccccgatcactgaacaagaaagaaacctgatgcagagactcaggacgtaggctccagaagtcccagaccatgtccggatccttcagatgtgtctgaggatttctcttttggctgtggataaaagatggaaacaatatgggatccctgatgaagaaaatgggggtgttatttccaacgagatcccagttaccatcttctgtgtaaaatttcactgcaaaacccacgagggtcccgaactgtgtcagctgaacccggattctcccagcaacagtggagaaccgaactgcgatgggagtcttctttccaatatgctcaaatacctttgccttggagtatttggtaatgtcatgtgtgacctcaaagtaagccaaaggcccctgctcctttagcatgcacaactctctcaggaattctctctcggtcaaaatgagccatttcatcagtgaaaaccacatcctgaacaagaaagggcccacggggccctactgtaataacattaagtttgtctcctactgggttaccagctccagtggtcaggacatcagctttctgcgcggcccgctgctccttccagtgctgcatctggtcgctggcgggancccggctgtcagccatagcgtgcggtttgctgtgcagaacactgcaggaggcctcggctcgtgggtctccaccctcagca

SEQ ID NO: 137405 - DNA, 1736 bp, Homo Sapiens
  misc_feature (1627)..(1627): n is a, c, g, or t
  misc_feature (1691)..(1691): n is a, c, g, or t
  misc_feature (1704)..(1704): n is a, c, g, or t
aaggacgcgaggcctgggtggcgaattcggcacgagggagactcctgcgtcctccgacttttcatggaagagatgtcaggagaaagtgtggtgagctcagcggtgccagcggctgctacccgcaccacttccttcaagggcacgagccccagctccaaatacgtgaagctgaatgtgggtggagccctctactataccaccatgcagacgctgaccaagcaggacaccatgctgaaggccatgttcagcgggcgcatggaagtgctcaccgacagtgaaggctggatcctcattgaccgctgtgggaagcactttggtacgatactcaactaccttcgagacggggcggtgcctttacccgagagccgccgggagatcgaggagctgctagcagaagccaagtactacctagtccaaggcctggtggaagagtgccaggcggccctacaaaacaaagatacttatgagcctttctgcaaggtcccctgtgatcacctcatccaagggaaagaacaaaaacttatagccggacttcaaataagccagccgtgaagttgctctacaacagaagtaacaacaaatactcatataccagcaattctgacgacaatatgttgaaaaacattgaactgtttgataagctgtctctgcgctttaacggaagggtcctgttcataaaggatgttattggggatgaaatctgctgctggtcccttttatggtcagggccggaagattgctgaagtctgttgtacctccatcgtctatgccactgagaagaaacagaccaaggtggagtttcccgaagcccggatttatgaggagaccctgaacattttgctgtatgaggcccaggatggccggggacctgacaatgcgctcctggaggccacaggcggggcggcggggcgctcccaccacctggacgaggacgaggagcgggagcggatcgagcgcgtgcggaggatccacatcaagcgccctgatgaccgggcccacctccaccagtgagcaggcaagagaccgagccgccctcctctcaccgcccccactccctgccgtgctacacccagatcctgtgcaggctgccgggccccttctgcttcccttggagcctggagatacttttgtaacaagccagatgattattttggtattgcttgacaaggcaaattgattgtcttgacccaggcgtatgacccctgtcgttgaacaagctgtgtctaagatctctacttttcatgagaatctgagactctttggagccaggctttctcggttctcagaggaaaagtatgaatgagtgtgacgtgtatgtgagaacttttgtttgcaatatttatttttgtgggtgtcgacttcctatgtgggctttttgggtgacactcccttaagggttcagtttgacaattctgagagttgtcctgcagttggaggccaccagaggtatctgagctccctgcttcctatttcataatcctccagccccagcaggtccactcctggttcctgtgtgtttggcccgggcacaatccccactgctttgctagacgtgctttctgccatgtggctttgggcctaagagcttgttgataattgcagcttgtggcagtgggaaatatggctnaatgagcgtctaaatccgttgagaccagtgcaactttgggtgcaaaggctttgtttagggatcnagccttttgccancttgggctgggtctttgggcctgggtgctcac

SEQ ID NO: 137406 - DNA, 508 bp, Homo Sapiens
agcagcgacggcaagtagcaggagcagcatgattggcaggcaacacagttagcggccccatcggagggtggccagaggtgggacggtgcttgcagggccaccggaggcaccaagcccggcggacacacaccccggctgtcacgctcccggctccgcccccgacctcacctttccctcgcggcccaagcagagccagcttaggggcgggcaccttggggcggcgcaaaggcgtcctgatctctgtatcttggtcactgaaggggctccagagtgcgcggggcgctggggacaggaccgggagtcaggcccagggaagtctcctcggaataagggaggaaaaggcgctcttttgatgttattactcccccagcccctcccccgctcacctgggctgcccaaagggaacagaagacttggaggaggggtagtcctgaatttgctttaacattttattttatttggccgggcgcggtgactcacgcctgtaatcccagcactttggaaggcc

SEQ ID NO: 137407 - DNA, 1212 bp, Homo Sapiens
  misc_feature (1037)..(1037): n is a, c, g, or t
  misc_feature (1159)..(1159): n is a, c, g, or t
  misc_feature (1163)..(1163): n is a, c, g, or t
aacaatccccataattgtgcatgggagaatactgagctggtggtgactggggaaagttatacagtggcatctggacctgatggggaggttgggctccctgctgaggtgggccaagcttaggttgggatcctggctgagatgaaggctgagtaatagcagctgactgggaagagttctgtggaaatggctgaggctgaggagaataagatggtgattcagaacattctgatgactgtctagtccttatggactgatcaccctgttgctgagctgaaccagccacctgttgagcatttacaaggttgcggaccagctgggctgctgccacactgctattcctctgacgggccagcttgacctctgggcactcccttcgtacatgtccagcatctccacatataaaacatctgaggtctctcgggtctctaaagtctcgagtatcgtggaggtctcgggggtcaagaacatctcgggaatctttctcttcttcattcccttccttctcttcttcactgtctttcttctttagtctaaacagtaaacttttccttttagggcagtctttcatgtagtggcctatttttccacacacacggcaacatctatcattgggagccagttctccatctgttaatactctggaatcaaagaagtactcagcttctctgccaatgagtggataaaaaggggtaccaaaaagtttccttccattgataaatgctttcatgatgaaattggtcatttttctggaaactccagcaccaaggttatgattcaagtcaaaagggtcttcaattgcaatgcacttggaagtccactgcttctcaaaagttgtcaacagctttttctgccgaatgctaattacatattccttgaaatcaaactcttcagtatagaaacgaagcagtcccagccaaagctccccttaatgattctgtgttctttccaagtgaaggtaaacgctttttcagttcttctgttttatcaaagaagaaagcattccatccatcaaccattctctgtggaatctgttttcncatcaaagatcttagcaaacactttcatagtatatcccaaatactgcactctaggatcaatagctgcataagtagctagcattcttgtgttatgttgagccaacgtattatataaactgatntcgncttctaacccacttcgcctgtgttcaaattttactataggcactttggc

SEQ ID NO: 137408 - DNA, 480 bp, Homo Sapiens
  misc_feature (345)..(346): n is a, c, g, or t
  misc_feature (456)..(456): n is a, c, g, or t
aagctccaaggccccaatgtgtataagaattcctttggaaggattttgaaggactgtaaatgttgcaaataaaagtaaaaactagtagttaggcaatgtgttttaaactatagtgtcacctactgttcttctggtgcctaactgtattcttcaacatcttcttttcccttttgattagaaatcctggtctacctcaaaggttttgcattgttttctagggacatcagcaaactggtagaccatatgagaaacagaaataaacagtaatattatctttagaaattaagcattatgtacacagtgagaaatgattgacttgatagaccttagacccccttcctcccnnccacaccctttctaggacaacctaatgttatctgtattgtgatggtgccctctctgttaatcaccctcaagtcagtacagtgacccctagggcccattttctttcgattngtgaattccccatttctgtggtgt

SEQ ID NO: 137409 - DNA, 1044 bp, Homo Sapiens
  misc_feature (604)..(921): n is a, c, g, or t
tttaaaatatactggtttctctattccaaattaagcacttacttaagacattaagaggctgagaagccactccatttggtgtcaatatcaatagccctataagaaagaactctgtattggaatagctagaaaagttctcactaaagtgagaactttagtgcatccttcacctgcatagaatcagtttggctaatagctctttgccccagaacaccagtctggagttcaaataggctcctgaaagttcatctcagataagaaaaaaacatctcacagaagcaatgtaaggacacacaggataataaaatggttaaaatctgtttgatgagtcttacttacagcattcctcatttggaggagctgctataggttaaggtggaaacaaaaatggaaaagatcaggggcaataaagttgagttggccaagtatttacgccagtaaccatttcaataattctttaagctaacaactgcaatgacctggtacctctaagctcatcattctacaagcactgaggatatgaagcttaaaaggtgaaaacttgtatacccttagaaaaggggaacagtctgaggcaaaaagttgtaggcctgtaaatagatannnnnnnnnnnnnnnnnnnnnnnnnnnnnnnnnnnnnnnnnnnnnnnnnnnnnnnnnnnnnnnnnnnnnnnnnnnnnnnnnnnnnnnnnnnnnnnnnnnnnnnnnnnnnnnnnnnnnnnnnnnnnnnnnnnnnnnnnnnnnnnnnnnnnnnnnnnnnnnnnnnnnnnnnnnnnnnnnnnnnnnnnnnnnnnnnnnnnnnnnnnnnnnnnnnnnnnnnnnnnnnnnnnnnnnnnnnnnnnnnnnnnnnnnnnnnnnnnnnnnnnnnnnnnnnnnnnnnnnnnnnnnnnnnnnnnnnnnnnnnnnnnnnnnnnnnnnnnnatatgcacacacaactgtgtgtattattctgtatatatttacacgacgcgtgggtcgacgatatcccgggaattccgaccgtaaccaagcctgctttttaaccactgttcataagttaccagg

SEQ ID NO: 137410 - DNA, 669 bp, Homo Sapiens
  misc_feature (15)..(15): n is a, c, g, or t
  misc_feature (339)..(458): n is a, c, g, or t
aaggagcgagcctgngtggcttctcgagacgagggtgaccgcgtgtcccaaccctgggatccctcgcctcgattcagaatccaatttcttggatttcagtgtttttaaggtgggaggtctcgctatgcttcccaggctggactcaaattcctgggctcaagtgattcccccgcctcagcctcttgagtagctgggactacagatatggcatgtcagtctggtggtctagccagaggaagactcctggagctggtgaactgtgcatggatatgcagtcacggtcagcccacctcctactcctcaccctccctgtgcctgtgagggtctgcactcaccctnnnnnnnnnnnnnnnnnnnnnnnnnnnnnnnnnnnnnnnnnnnnnnnnnnnnnnnnnnnnnnnnnnnnnnnnnnnnnnnnnnnnnnnnnnnnnnnnnnnnnnnnnnnnnnnnnnnnnnnnatgagccaccacatctggctgaggcccacattttcattttgtgctgagacttgtaaattaggtagctggtcctggctgtagcagatggtatagattctttttctggctctgtttttgtgacatctcaacttactgggctcttattaaaggtgatttaggtgacttatcaacttttcatgagtacagatgaagaactcttctagggcagggg

SEQ ID NO: 137411 - DNA, 999 bp, Homo Sapiens
gattctcgtggtcaaaaaggggtgtttctttcggatggggggggcccccccggggaattgttttcttggaataaaagccttttatataccaggttctctcgggagtttttttccccccagttaattgtccccgtgcggggatccttcaggggggacttggaagtcaaggattggactttcccatttgcgatagaaatccagatggtggccacatcccatgcggatccaccccttgttctgggtacccagcccgcctggatggccgttttcagcagctccagggcctcattgttctccaggatgttgggtgcgaagccaccttcatcacccacattggtggcatccttcccatacttggccttgatgaccccctgaggtgggtggtagacctcggcgccaatgcgcatggcttccttgaaggagctggctcccacaggcagaatcatgaactcctgcatggccagcttgtttccagcatgggagcccccgttgatcacattgaaggctggcactgggagtatgaggtcagggttcccagcgagatctgcgatgtggcggtacagggggacccccttttcaagctgctccccgccttacacacggccaaggacacgcccaggatggcattggccccaaacttggacttattctcggtcccatctagctcaatcataaatttgtcaactttttcttgatccacaacgcttagtttcttttgcagcagagcagggcccagagtattgttgatgttctccacagccttcaggactcctttccccaggtagcggcctttgtctccgtctcttagttccagagcctcatagatacccgtggaagccccactgggcacagctgctcggaattggcccttggccgtgtgcaggtccacctccaccgtggggttgcccctggagtccaagatttcccgggcaaagattttctgcatggccatggctgggatgtcttcgctggaggtttggatggagctccgagtctccc

SEQ ID NO: 137412 - DNA, 940 bp, Homo Sapiens
ttcacgtgttaccacaaaccgcctcctccttcaccggtttctaaacggggacccttctggactctagctgttgatgctaaataccactgtgaaggatttagcatttcttccgatgccagaaatccatacggcacgcggctcattggcacggtcatcatttctaaggtcactgttactgtcctgagactgttcacagtctgagctgatcatgcttgcgctgcggaagttgagggatattatgtcagaatttagcccttgcaaagttttccattcccaggttttccagctcttccgggtccagtccacagtagttgaagaacctcttccacgtccgcgtccactcggaaatatctgtcacttcaagtctgacttagaccgcttggagggagggtcttcggctgactccacaagctggttccacagggtcggcctcgggggacttcatggaggcgatggctgcgattttgggcttgggaggcaggggaggggcagagctactgcaggggatggccttgaggggcttcacgctggtcaccttgcggatgtccgaagagctgtgggacacgtggaggaaggactcggcgtgactgctccagcagtctcctgcccacgtgggagccgccctcctgcgggctcctgcggccctgcgtggggtagaccttcagggactccgcgaaggagtgacggtgcaggtcagtggcttccgaccggtggggcggccagttgcgggagctgtgcttgtgccccgagcccgagctagagccctcggagctattgatgatgttcttcaggatctccagcttcaggttctccctctgcacgccgctctcggtcttggcgtggttgccgaacactttgagcgtggggctgcccagtgcgcgcttggcagccgggccctcgtgccgaatttaacacccaggcctcgttacctgcgctatag

SEQ ID NO: 137413 - DNA, 298 bp, Homo Sapiens
  misc_feature (258)..(258): n is a, c, g, or t
gctcttttcgtgttgccctcacttgctccttaagaacagggacctctgtcttggtcactgctgtaacccagtagccccagttccaagttcactgcctggtgcacagtaggtggccaataaattgttgaattaaatgtcctctcttccagggagttgttttagaaagaatcacacactgcataaatgtctgacggcaggtgtctcggaatgagctaaaatttaaaaggcaacgcggggcagggacaagcgtccagcgtngagatggaagcaggctcgcgtcccctacccttcctccgac

SEQ ID NO: 137414 - DNA, 698 bp, Homo Sapiens
  misc_feature (406)..(634): n is a, c, g, or t
ttgtccagcatttttaagcagtaatttgttggactatgaaaaatcagttttttagtatgtggcttcttgaaaagatttcctttaaaaactttaaggtacagagacgtggtcctgttggtatcctatctcctttttgccccactcttctgttttcagttctactgaacattgtacttatatgtgagtacttatttatacagcagtcctagaaagagatatctcagtttttttccttacctacactaaaaactagactaaacacaagtcatttctgagaactgggtatacagtcagttacgacaggtgctgaatccagtgaagacctctttggaagtcataatttaagactgatggaatccggggtacctattatcagaaaataggacacgtgaaaaatagaggaatnnnnnnnnnnnnnnnnnnnnnnnnnnnnnnnnnnnnnnnnnnnnnnnnnnnnnnnnnnnnnnnnnnnnnnnnnnnnnnnnnnnnnnnnnnnnnnnnnnnnnnnnnnnnnnnnnnnnnnnnnnnnnnnnnnnnnnnnnnnnnnnnnnnnnnnnnnnnnnnnnnnnnnnnnnnnnnnnnnnnnnnnnnnnnnnnnnnnnnnnnnnnnnnnnnnnnnnnnnnnnnnnnnnnnaggctgcaatgagccatgacttcagcctgcacttcagcctgggtgacagagccagaacctgtct

SEQ ID NO: 137415 - DNA, 459 bp, Homo Sapiens
tttattcttaattctgaattttgacattttcacacaataaaaataatttatatcaatattctgtttctcttttcaattggtagatttaaatgatttcctttgggtaataaaataggtaaagattttaaaatatgattattgaaaaacagtttaaatcagtagattaaaataatgcatttttttgatactttacacacaaaacttttttctctctgcaagtttttatgtatgtgggaaagaatttgtgattttaaatgcagctacaaatagcatttcaccatatgatgttagaggatttgatgtctgtcttgcgttaaagctgttggtcaacagatatgtttttatgtatttaaaagaggctcttgtgtgcctttatgtgtaaaatgcatattacgtagtatacatgatattgtatgtaactgacttcaaatataaaactatgcatagaaacaacaaaaa

SEQ ID NO: 137416 - DNA, 474 bp, Homo Sapiens
  misc_feature (342)..(342): n is a, c, g, or t
attcggtagctacatttgttcctggagaatagggaacagttgactttatgagtagaatgttaactgaagattgattttctttctttcaagctttttaattcagaaatatatcatacacataaactaatatgtggaacgcatatgtaagtgtaagttctggagaaaaataataaaacaaatacgtgtgtatttatcatccagtttaaaaaatagaatattccttatacctttgaaggctcctctgtgtcactacctaattgcatctcctttggtttcccccagaggtaacaaccaagaatttgtgtttatttttccttcctttactttagaattttatgaagnttgattttcaaaggcttggcaattcatttcattttgtcactatttgtcccacaatgacttaaggcatgatttacatgtatatgatattcataatcattttatagacaaatttataaacacaaaaattttttg

SEQ ID NO: 137417 - DNA, 339 bp, Homo Sapiens
  misc_feature (145)..(239): n is a, c, g, or t
  misc_feature (242)..(250): n is a, c, g, or t
gtgatcatagggtaggaagggggatgtagagagatgagccaggagagggaagtgggctctaattatatgggacctaatagaccatgtcaggaattgggactttatctaaggagtaatagaaggctggacatggtggctcacatgnnnnnnnnnnnnnnnnnnnnnnnnnnnnnnnnnnnnnnnnnnnnnnnnnnnnnnnnnnnnnnnnnnnnnnnnnnnnnnnnnnnnnnnnnnnnnnnacnnnnnnnnntttttaattagctgggtgtggtggtacacactggtagtcccagctacttgagaggttgtgctaggaggattgctcgagcccaggttatt

SEQ ID NO: 137418 - DNA, 460 bp, Homo Sapiens
  misc_feature (450)..(450): n is a, c, g, or t
acacttcagatatgaagtgtaaatgaaaggtactatgactccaaaatccagattctttccaagataccatattgacaactagtctagttagaagaatgctactgggataatgaggagatttaaaatcatgtcataagagaagcaattaaaagaaataaagagattattctgaagagaaaagtgacagatttggaattgacctaagaacttgatcgacagtcaaagctaatgctaggtgtgtttgggtagagactgagtcaccactggggatgatggaaagactatacaagcactaatggtaaggagcaaggcatttagaacactggctctcaaccatggctatatttggatatcatctgaaaaattagaaaaaaattgccatgtgttggtaccacttccatctattctgacttaattggtataaggtgcagccaaggcaagaggatattntaaaacttcc

SEQ ID NO: 137419 - DNA, 617 bp, Homo Sapiens
tctgcttttatctttattttatttcattccttctacttactttgggcttactctgttttcaacttcttgagttgaaagattaactcatttattttcactttttctaattttttaaccttaaacatgtatttaaggttatagttttctctctttagctactttacaagatctaatgtggagtaatttcattgtcgttcagctctaaatattttgtaattctcattataattacctccttacccatgcagtatctacaaggaagtttatcagaagtattcttttcttcttcagctaactttttgttgccattacaaaaaaactataacccctccataatctcaattctgtatctccacatcctatttttccagcttattctttctactagggtgatcctgaactactgtgcattgttcaacctcatggaatctccactgactctcatgctcttgatgtcccttcactctcctctttatcgagattacattccatgatttatcattattatcatcactctcccctctctccctttatagtgcttggcaaaactacaaccttgtttaaatccaattttctgcctactccacacctgcacctgtgcaactaataataatata

SEQ ID NO: 137420 - DNA, 799 bp, Homo Sapiens
  misc_feature (572)..(703): n is a, c, g, or t
gggtctggaggcagggaaccgaaagctgattcatgctgacttcccagaactcaatcaaaaggaaaaccccaactttccatgcccaagtaacaaaaggactggatgctattccctttgcaagcctctcctaccttctctgtgtggcagatggaaaactgaaagtatttctcattggttgctttgtgcaaccatttctactactggcgccaggaggctgtgagcgggtgctgggactcggggcaagctggcagcgctctacacctggatgctcacctaaaagtcactgccctccccactccctcgtcctgactgcagtgtgcagagagtgctggcacctaacacccctcaaagcctgtctgtgcagctccacagtgctgtcctatgctgtgagcacacccctcccggagggacagtgacttgattcaacccattgtggtcatttatctactcatttcctctcctttgaatcgagaggtccttgaggtaaggatttctcttgttcattatcctatactcctaaagacttagaaatccacaggagaacccccacacatttagaaacagaaactggnnnnnnnnnnnnnnnnnnnnnnnnnnnnnnnnnnnnnnnnnnnnnnnnnnnnnnnnnnnnnnnnnnnnnnnnnnnnnnnnnnnnnnnnnnnnnnnnnnnnnnnnnnnnnnnnnnnnnnnnnnnnnnnnnnnntaattagctgggcatggtggcacacatttgaagtgtcagctacttgaaaggccaaggtgggaggatcgcttgggtttggggggatcccttgagcca

SEQ ID NO: 137421 - DNA, 466 bp, Homo Sapiens
ctttactttctcatgctattaggccaagctgtgacccttagtttcatctccagattatcagacataaaaggcccacaggaatccagaagctagacagagcataggtattccaatctctcaagaaaatgggcagtaagagatttactaatagtatgtttgctcccctggcatttagaaagtttaaaattctccctcttaattgttctattttgtttgttaatattgtgttcaggtattttctatatcatagtagaatcagccctattatcaattcttaattatctaacaatatttattttgttcattacctgaggtcgaattttaattcgggttgacttttccctgaaatttagcccaacaaacatctcagctcatttaccccctacagctcaaatagtttaagctcatggaaggcaaactaattttaaaataagcaagggactttgaaaggcaagcctttgctgcc

SEQ ID NO: 137422 - DNA, 432 bp, Homo Sapiens
  misc_feature (130)..(302): n is a, c, g, or t
gtctttctttctgggatgatgaatctgatacgttcttcctcttcaccttaaagctgagactcagctaaactggaaaccaccaccaatcccaccatccttcaagattgcagggaaagttgattttctgcannnnnnnnnnnnnnnnnnnnnnnnnnnnnnnnnnnnnnnnnnnnnnnnnnnnnnnnnnnnnnnnnnnnnnnnnnnnnnnnnnnnnnnnnnnnnnnnnnnnnnnnnnnnnnnnnnnnnnnnnnnnnnnnnnnnnnnnnnnnnnnnnnnnnnnnnnnnnnnnnnnnnnnnnnnnngcaaaaattatttgtatagctaaaaccttgtcggagtgaatatgggggcaagatcactgctgagaattttaagcaaccagctgacccttgtataatttgcagtgcgaatttaacgctgtgtaggtgatct

SEQ ID NO: 137423 - DNA, 283 bp, Homo Sapiens
ctgacgttcagccatagtcctgtctactagctgagtctgggatttttataggcacaggatttggtgggggagggccatgggtagtttaggaaaaggcaacatttgagtgggaaaacagggatataagttctcactttggggcacagtttcaggcttttcagcttgagagtggggttttgctcagaacctgcccttttctgcctagaatttctctgccccctgcctctatcattgtatcagcaccactgcactccagcctgggtgacaggtgagactctgtctc

SEQ ID NO: 137424 - DNA, 475 bp, Homo Sapiens
agggaatatccaccttgaatgttggcagttgttctaacgggcaaggtttacccggggaatatccaccttgaatgaaatctctgctcatccaacagaaaaattagtgatatacctgccgtgaatgggtggtgtttctcttatctgctttagtatggctttactggtactgtttgacaagaagacaaatgaaaaattcatagggtgcatgagaagaggtaacaaaacaccattaaatttttgtttgaaacaaactattctagaaaaaatgtgcaccatagattaaaaatcatggatcagtatttcgatatgtaaaatgttcctacaaagcatttaaaaaaataatggcccacagacatgaatgttctccactgaagaagtaaacccaaataagtcatttaacacataaaaaaaactctacttcacaaagtaaacaaaaaattgaaaaccaaagcagtaattaaacactggcagtgct

SEQ ID NO: 137425 - DNA, 638 bp, Homo Sapiens
  misc_feature (95)..(95): n is a, c, g, or t
  misc_feature (131)..(143): n is a, c, g, or t
attattttcttgcatataatgacttctgtttctgaagttttgaaatctcaaggcattgttcctctcgtattttctttgttcttctgagctttgcngggcatggactggtttccacaattcctttcattccnnnnnnnnnnnnngtaagatattgaaagtcaaatttcagaattattcatttctgatgtagcccttcaaattttttaatttttaaagatattgctggaagcttctacaaaagaaaaccagggcaaaagcgagttgaaatagcaatgacccagctggaattcagcaatcattttctgcttttgaagttagatcttgggcttttgctctccagaacttccctggtgcctggggagctgagttagaagttgcaattgtttaagatatatctaaataaattagaagttcaaataactgggtagccctgactgtagtggggatcaaagacagaagaactttgaaggaagcagaaaaggacgtttttaacctctatgcaccgcttcatctcctgggctttcctggtggacttcctgcctcaactctggctgaaactcagtctagacatatctaataaaagacggaaaaagaggaaagaggtgagaaagaaggaatattgaggaaagatcataata

SEQ ID NO: 137426 - DNA, 530 bp, Homo Sapiens
gcaaaggtcattttcatcatgagcacagagacaggtgtttaaccatccatttttagccttcatgggcaggtgaggtacaaatagccaagtatctccaatatacatattctcatttctttctcttctttcctccaaccctgggtgcaaatgaatgcactctgtctcttacacacacatattcatgtgtgaaaatgtatgtatacacaaattaagagtataaaaatcaactggaagaggaagtatcacctttacttgaatcaatatctacaactgtagcttggtatacagcaaaagtagtatattttacaatggacctcagttgaagaactgaaatggactggtaaacatcattttttaaatggtaaaatgtttatgtgaggtaatttcttaagcatctaaaaagaaagaatgtgcctatcctctaattttatattgaaaaatctaacctatgtggggctataagagatgtaacaagccactatcattaagaaccataatttcattttaaggttactgttagttatttattt

SEQ ID NO: 137427 - DNA, 411 bp, Homo Sapiens
  misc_feature (154)..(217): n is a, c, g, or t
  misc_feature (267)..(267): n is a, c, g, or t
  misc_feature (352)..(352): n is a, c, g, or t
  misc_feature (358)..(358): n is a, c, g, or t
  misc_feature (377)..(377): n is a, c, g, or t
  misc_feature (392)..(392): n is a, c, g, or t
tcttgtttcattaaactcagaaaacccatcatataataagatagaaaatggaaaatgggttttccataagcccacccaaatattcagtttttccttgaatttaaggtatacttgttttccatcactaaaagtttttctgaacaatattattctnnnnnnnnnnnnnnnnnnnnnnnnnnnnnnnnnnnnnnnnnnnnnnnnnnnnnnnnnnnnnnnngtaagtgggatcacgagggtcagggagtttgaggaccagcctggggccantatgggtgttaacccccatctcttacttaaaaataccaaaatttggccggggtaccaaaattaggctggggtgttgggtgggcanacggcntgttaggttccccagctantttgggaagggcttnagggccaggagggattcca

SEQ ID NO: 137428 - DNA, 225 bp, Homo Sapiens
tccttaaaaagacatgagatacagaagctggctctcaagtgcatatctaatcatcatacaaggctgaatgtggagtttttagggggaaaggaggacttgatattttaaagaaggaaaaaagcaccactaaccctatgagatgagtatggcaataaagtcagtcagagaaagtttcatggagggtacatttgaattaagtcttataggcggttgtggctcgtgccg

SEQ ID NO: 137429 - DNA, 806 bp, Homo Sapiens
tttattaatacagcatttatattttctgactgaatctcaaaattagttggggcattgggaaagaatttaatttgacttttgagtgtaaaccaaggatgtatttctttgaaaagataaaacaagagggctaatcatcctaaacatgaatgtctgcacagattgaaattcccaagatgcccaggagcccagcctttgcacagcctccagcaccgacattatgtgtgttttcaaccacttcccccttatacaaagggatatgtttgcagagtttctcaatgggtgacccaagcaggaaccaatccacgtctttgatcagagactccagagggttgtacttgacccaggtgtatttgttggagaacatgttgtccagagcctgtttctcatagatgtaccattggagattgttcagaggagggatgttctgatggtccatcttcaggataaagcaggctcttcgggagagcaccctggatgcaatgtagccatgtttatagtcaaaaattgtggtaagaagagcatgaatcctgccatggatgttaaacgaatggcggtatttttttccattatcaattgtcactgtctcctgaacattgcccaccattgttgcttgggctgatgatgttaaaaacctcgtatccatgagattgtatcccaaagatggtcagcaccaccagaaatgccacaagtattttcattttgcctgggagaggaaggtgctggagtaagtaaagctgccctgtgcagcttctatcctttatatgggcttgaagatgtggatatctctttttcaaatgatcactttg

SEQ ID NO: 137430 - DNA, 494 bp, Homo Sapiens
ttgaaataaagactttatttgcttttttccagtttacatttctttctccttcctcaaatcatcccattttttctctaaaaatcacttcagtagtattgaagaaactgtcattactttagaagttatttgctgttatatagtgccatacttggattttctagaatatgaaattaataggaattggaaattacaggaaagtcaatgactgtgtagactccattcaaagcaaaagattattcactaaaagccagtggtgtgctggtaaatgtctaacaatcattgggccaaaagagccattatttgtgatatttaccgatttccctggtgtaaatatttccccccacaacccatttcaaactataacatgaaatcataggaagctgggaaaagatgctaaaaatcagcccatatgaaccagctccagaataccaccacttaatatctacccataaatcaaacaagaaattcggtcatcgtagctataacaaagaaca

SEQ ID NO: 137431 - DNA, 459 bp, Homo Sapiens
  misc_feature (440)..(440): n is a, c, g, or t
tgtacttgttaaggtatatttttggggtaaattactaaaattggggctgctgggacaaagagtaaatgaatatgtatatttattagatattggtaaatccccctccacaaggtggaaccactgtgctttcccatcagcaatgtaggagagtggctgtttctccacaaccttgctaataggatgtgttgttgatcttttgaatttttaccaatctgatacatgggaaatgtatctcagtgtaggttgatttatgcgatgcttatgaataaagttcggtatcgttttattttaaataccatttgcagtcggcaaggttggtgggaatgaagagccccccgaaatcactccccccataaaaatacagctaggaaagtattccgggaatagggataccacactgaattcaatagaactcaagggagaagtagagaacgccctgngctcacgaaactgacagaa

SEQ ID NO: 137432 - DNA, 592 bp, Homo Sapiens
  misc_feature (346)..(346): n is a, c, g, or t
gtcagctgggattttgatagaactgcattgaatttgtagaccaattttgatatactgccatcttaataatattgtcttctgatccataaaaatagaacatctttttatttatttagttctttgatttctgtaaaaatattgtcggtttttttgtagtataaatttcgtacttcttttattacatttatttctaagtattttatttttccctagctttattgaagcataattgacaaacaagaattatatacattcaagttgtacaacatgatttttaaaatgcatatatattgtgaaatgattaccacaatcaagctaattaacatatcctatggacacatagttnaatatttttgtgtgtgggtgaggaatacttaagatctattctcttagtaaatttcaagtataccaatagttgccatcctgttgtaagcccaaatcactttggcttagtgattttggggacctgagattatttttcctttcacactgtacattaggtttccagaacttattcaccctataactgcaagttggtaaacttttaccaacatctccccatttcccctaaccatgactcctagtaacccct

SEQ ID NO: 137433 - DNA, 489 bp, Homo Sapiens
taggtattttgtgtttatttaaaaaacagcatgtttttttcttagtttttgaacatgcatttaataacttcgttaaagttttggtcagttaaatccaaaacccagaaactctaaagatagatagtttctattgtttacctaattgttttttgtagtgtaggtcacaggtttctgactttttctttctttgaatgtccaataattttcggttgaaaactggggtagtttatataataaaatgtagtgactctgatatattcatctgagggatgttttaaattttaattctatcaatagttgaaattatacttccttggactcaaatgtaatcttcatttcctttatagtgtgcaacaacttatatctaaattctgttagtatggcctctactgttgcatttttagcttgggccacctgcggtttccctaattctgtgtaataagctgactcaaacttattttgagagtctttttttatgctctttgatga

SEQ ID NO: 137434 - DNA, 323 bp, Homo Sapiens
gccaaggttgatgtctagaatggcatttcctaggttttcttctaggaattttataagttttaggtctaacagttaagtctttaatccatcttgagttaatttttgtatgtggtgaaaggtaggggttgagtttcaatcttctgcatatggccagcctgttatcccagcactgtttattgaacagggagtcctttctccattgcttgttattgtcaaccttgctgaagatctggccttaggcatggggctttatttctgggttctttatcctgtttcactggtctatgtgtctgtttttatgccagtaccatgctgtttcaggg

SEQ ID NO: 137435 - DNA, 552 bp, Homo Sapiens
  misc_feature (452)..(453): n is a, c, g, or t
cactgaagtcagagtagttgttttcagtaagaaaattctgcctccagagcaaatgttttggtgaatagataaatatgagtactgagtcccaatcattttggctcataggttccccagtatttccataggcaagcttaactttgcaccattcagagacttatattttaggttccccacagggcaccccactggacgtggctcattttccagcctgtagtcttgttcttctgccaccctggggcattattcctcttcccctctccccagggccttcccccttgcttcttggctgggaacctcccatgggtgattcacccttctcagcctaggcaggacagcacctccttgttaagcccttaactaatcccgctctgatggctgtgatctttctctctgtgtcttaatcacttggaataaagaaccattgtggtgaggttgaaagggcattggcnnccagagtctgggatctggttttggccctgcctcagctacttaattcactggtgaccctggactagactctcatgtgtcacagaggcacgaagggagaga

SEQ ID NO: 137436 - DNA, 557 bp, Homo Sapiens
acatcagaaagattccaatagagatacattctgtgaaatacctgatcagtactcatccaaactgtcaaagccatcaaaaacaaggaaagtctgaaaaactatcacagccaacaggagcctaggagacatgatgactaaaatgtactttgacctcctggatggggtcctggaacaaaaataacattaggtaaaaaccaagaggccctgaatgaactatagattttagttaaaataatgtgttaatattggttcattcattgtaacaaatgtatcatactaatgtaagatgttaataatagggaaactgggtacaaattatatgtgaactctgtactatcttctcaatttttctgtgaatccaaaactattctaaaaataaagtctattaataaaagtattaggcaaagtatttcagagaacatttatccaatgaaaatatacaggtggctaattcatattaagcatgaaaaatgctcaaattcatttgttattagggaaatgcaaattaaaaccacaatgagacatcagtctgtgcccagcaggattgctgtaacaat

SEQ ID NO: 137437 - DNA, 466 bp, Homo Sapiens
acaagccaccatgcctagcatttactattgctttattaaacttctaattttgttaatgcattgtttttcttgatttgttcaactgcatatctgtgttctcttgcgtctcattgagcttcttaaagataattattttgatttacttatcaaatgatttgcagatctccatttttttggagtcagttactggaactgtattcattttcttgagagtgtcatgtttgcctgattcttcactaactatatagccttatgttcgtgtttgtgcatttggatgagcagacacttcctccagtcattacagactggttttggtaggtaaagattttcttcttttgggtccctaagctgataagattgcctccaggattgcagttgagtagggttgcagccgagttacgtggctgctgctgggtctgcaatggggaccatgttagtgggcctattactaggggcttgaacaggc

SEQ ID NO: 137438 - DNA, 467 bp, Homo Sapiens
gcaagaagtgagagtctgatttttaacccatgactgatggtttattgcacaaaaatttgttggtgcaaatccagcagattctctgttatttgggactgaaggtcttagctggtcagagacaacaactactgctgttttgagccacacatagatgtttgtagaccctgcttcttatttcctacctgagaccttatgttgagaagcaaagatttatgttttaccaggcaggtgactgagaacctttttcttcaggtagtcgccatttgcttaggagggatattatgaagcttggcaaatttgcttgaatgaatctcatttgtaactttcaggtcaataagcattttatacatttgaagacctgcaacactccctttgtcatatcccataacttttaagtagggccctccctggagaagagttaacccaaggaaatctaatccttttagtctttcataggataaaaaagg

SEQ ID NO: 137439 - DNA, 706 bp, Homo Sapiens
  misc_feature (130)..(253): n is a, c, g, or t
gggaagacagagtcctccctttgctgctcaggctgtagtgaagtggggtgatcacagctcaatgcagccttgacctgccgggatcaagcaatcctcccgcctcaacctctggagtagtgcgagccaggannnnnnnnnnnnnnnnnnnnnnnnnnnnnnnnnnnnnnnnnnnnnnnnnnnnnnnnnnnnnnnnnnnnnnnnnnnnnnnnnnnnnnnnnnnnnnnnnnnnnnnnnnnnnnnnnnnnnnnnnnnnatgagcaccatgtgcagcccactttacagctttttattaataataatgatttgttaaaattttcttctcccaaagtgaaaacgttttagggaaggaataaaagcaggaacagggagtttgtggtggtttacaccagagtagcttaacttttttcacccttcacctcgctcccatgcccaactcctgacctcatctaaaatccttgcacttctttaaaaagatgcctggtgccttcccaggcaggaagcctttgcgcacgtgcattgttaagaggaaaatgagactgaatggagcttggcaacccaatggagctctcagagcatggatgtgatttgaagtttggggaggatattccctcccacccaacctccacttctagggcatcttaaggatttggtttctgtatttacgacactgacataaatagttgagctgattttatttatttattta

SEQ ID NO: 137440 - DNA, 516 bp, Homo Sapiens
  misc_feature (62)..(62): n is a, c, g, or t
tgtagagaccagaaggtgtcactttattgcccaggctgggtcttgaacttctagcctcaagntgattctcccactttgacctcccaaagtgttgggattacaggcaacagccagtgagccaggtcaacaatctattttagaacatttcatcacctcccaaaaaatctcatacctcattagcagccactccccatttcccaccaacccttccagccttacccaaccacaaatctaccctctgtctctcatagatttcgctaaatccggacattttatataaacagaatgatacaataatgtggccttttgtgactggttcctttcacttagaataatattttcaaggttcatctacattgtagcatgtatcaaaacttcatttccattgtgaaaaaatattccataatattaatatgaatacaccaaattgtatccatttatccgttgatagacagttggattgtttctgctttttggctactgtgaataatgatggcatgaacacttatctacaag

SEQ ID NO: 137441 - DNA, 401 bp, Homo Sapiens
cctgaatttgaatgttggtctgtcttgataggttggggaagttctcctggataatatcctgaaatgtgttttccagcttggttccattctccccatcattttcaggtataccaatcaaatgtaggtttggtcttttctcatagtcctatatttcttggaggctatgatctttatagtaagaggacataaaacccattttcttagcaaattttcaatatataatgcagtattattaaccattagctatcaagacttattcaaccctttctctgctgcaatttctgctgttttggcattttggtctgttaccactccatgggcaattgaaccctgtgggtgggcctgtatcaatcctcctgccctcagtatctctgtaggtggaatgacaggcctgtaccact

SEQ ID NO: 137442 - DNA, 140 bp, Homo Sapiens
tgggggaagtggaatggaaatacaattttaggggaaaagcaatgttaaaactcttattgtaggtatttaaaaaaatatgtggtatagcacttagattccattgaacttatttgagccatgtaatatttaaattttttatt

SEQ ID NO: 137443 - DNA, 487 bp, Homo Sapiens
ctacaatttttaactaaacaaaagcactatttttgatagtgaaaaaaattcaaagcccaccatactaaacacgaattcaagttactcctatcccacattctttttgttcctttaaggtactatggggaacttcaaataattgtttttcaatttctcaaaggctctgttttaaaatatgcttctaatatgctacactatcatataaaatgaaaattcacacatgggtatgattcagagagaaagtttctatgatctatgatgccaaaaggcaacttaaattgcattcttagtgatagtgataaaagtcacaatgaaaaccactggtgttaccaaaatgcttgccacgaatgtagaaatactaacctaaagtatatctacggcagggagtgataaaggtgtacagatctggggactatcaccatttatgaataaaataattataattaaagctaactcagtttggaacagtttcctatggtaacgctat

SEQ ID NO: 137444 - DNA, 481 bp, Homo Sapiens
actacatgatttggtacttatggaaatatttcatgtatatgtttataggaaaagaatatactcaacttagtagaacatatcttagttaagatacatggagatatgagataagtaataggttctacattcttcctgcaaaagtcatagagctaagaatgctctgcataaggataactcctattgttagagccatggaatcctcacctcatgctactaacattctaatgtgcaaaaatcacaaataagtaaaccctcaggggcagagcaacagtaatcttgtgaatttcaccttggaagacagaagagctagggaggcatgaaaggaagggacaaaaagtgagatggtatcaggggggaatatggtagcaaagaaaagcagtctaagaaaatggtgaccagaataaaataaacctaagtgctcatgaatccacatagccttgtctacccaacttggtcgacaaggttaaacaggacagcctga

SEQ ID NO: 137445 - DNA, 155 bp, Homo Sapiens
cttattgaaactgaagggatgttgggaaagacagactgggagctttctctaaattttaatacagcatcagtgcttcctataatgtccaggttaggagagaagcaaatggagctttactaaggaagagaaagtgatcaataccagtgagaaaggtg

SEQ ID NO: 137446 - DNA, 624 bp, Homo Sapiens
atcaaaatgctaaatgtcacttttttgaaaatcatccgaacagtatggtacttgctcaaagtcctcagaagttaaggtcagcagatctagctctcgagcaccccagagactggataagagagaaaggaaaaatcaatccatcagaactagctgtaattctttcatagatcctgaccactccttattcttcattttcatttcaccaccacttctgtctaactttatcttttcaaagggctggaaggctgccatagatcacagcccagcaactttggtttttaattttaaatgtcagtcagaaaaagaagaaaggcagtcggcattttgagtgagaatggaagtgcatttgttcaagaatgctgacctggctgtgcagactgccttctggtattagggctctggacattctccttgaattcacttttctatcccatttttatttcaattcagcaaactcttgggctatggatataaagatagaaaagatacaatttattctgaccagattagtgttcttcctctaaggactcagaggagtgtgattaggtcataacctctttttgccacgtactcaagatgatcatttaaaatagatggaagaaaatcaaattcctactgccaaat

SEQ ID NO: 137447 - DNA, 783 bp, Homo Sapiens
  misc_feature (119)..(119): n is a, c, g, or t
ttttaaggttgaagataggcctttcctgatgccaaataagggcaatgatcagcttcccattcctggagccaggacctgccacatcatttgcagtgcaaaatgcaaatgagagccccttnttcaaagagcaagataaaagtgccatcctaggcgctcaaaatacaaaggttcctcctttcttctatggtctgtcaattggtcaaggcattttaatttgctacttaatgtcatgcttgctgggcactggaatactcatgcggtgagtgtaggatcccacgggtatctggaggctcgccctgcaatttagcatgtgcaaggagctccccacctctgccagcccaggatgggcgtgtgatgccctggctggggtgagtgaggttgagccaggtatctctgtgtctcatgggcccaaccgacacgggagagaagacaatccccatggggactgcaacctttgaactgggacacatgaggcctctgggttagggtcggggagaggctcgtccccctgcccagccacccactgcatgtgcccttgtgctgtcagcttggggcaaaacgcgggtgccatgtctgggcctgtgagccctgtcctgacctggcatgcacccatgccctcctggggtgctgggtagcagcagttactgtgtagggtggaacaggcaaggccaggtggggccagggcagcaggctggagctggcagctgagagggacccatgggagccaaggctctgagcccaggcagatgctccatcatcccattgacttacctcgtgccgaat

SEQ ID NO: 137448 - DNA, 359 bp, Homo Sapiens
catggtagcacaatgtagcctcaaccccaccctagcctcccgcttcctgaaacggtagctgcatgaagagggaaggcagagctgcagttttcccggctatacttggaggtactctcatcagatatgaagcctgaacacagcaagacaccaggcctcaaatgtagctctggggcagctgtcagcagagagctgtccaagaagagaggcccacctgtcatctcatcccaccctgcccttaatgatcaggccaagggccctgagaagtcatctcattgcttgagcatcaattaactcatctgcaaattgcgattgctccacttgccctgcctagctcacaagggtgttctctcttaggagaa

SEQ ID NO: 137449 - DNA, 534 bp, Homo Sapiens
cctggtttagagtaaatgtttaatacatacttgttaaacagaactgacactgaacttttgtccttccatttggatcatattacccaagaggccttgagacaaatgatgtcatctttttgagcttcagtttcttcatcttaattaacacttcaaagtatccttctgcgttggcagggctgatgggcgtataggctctctgaatttctaagtcatctactatccctcgtaggatgaggtgctggccgggccgcaggccgagtctggctgttcccgggtagagcaaaccggacacggtaggtgtccttagtgagcctgtccatggcaatgatgcagaaggccacgaaggtctctgggttcagcttggaggggcagctctgtgactctggcccacgcagcaggctcctgtccttgctggcttgggctgcctcccaccttgccagatctcggtgatagaggtcaaacacacagggtgagcagccactgccgcagcactgggaaggcaagggttctgtgggccgtagctgcatccaggct

SEQ ID NO: 137450 - DNA, 1115 bp, Homo Sapiens
  misc_feature (897)..(1018): n is a, c, g, or t
  misc_feature (1095)..(1095): n is a, c, g, or t
tgtttggagggaagctctccggggctgaggtacaaagaagggtacgggaccattccaggaaaacgggccttggttctgggaggaaggttttttaaggtagaagctctcaaagggtctttgaagcaaccgaccaggaagtgaccaaaagtctggtcattctccatggtctgtgatgctctgcagatagggcaccatgggggcccaggcccgtgcccgcagcccagcaagaggagctcaccatactgggtttggtttatagaagaaatctccgaaagggtcctcgccagaaagctgtgtctcctactctcccaggactcaacatacccgggacatcagccccatcttgtagcacttaattaacacttcaaagtattcttctgcgttggcagggctgatgggcgtataggctctctgaatttctaagtcatctactatccctctgagtgtaccgtaggatgaggtgctggccgggccgcaggccaagctggctgttcccgggtagagcaaaccggacacggtaggtgtccttagtgagcctgtccatggcaatgatgcagaaggccacgaaggtctctgggttcagcttggaggggcagctctgtgactctggcccacgcagcaggctcctgtccttgctggcttgggctgcctcccaccttgccagatctcggtgatagaggtcaaacacacagggtgagcagccactgccgcagcactgggaaggcaagggttctgtgggccgtagctgcatccaggcttcctcagtgtcgtcgtcctcttccctctcagccatcatcagtggggcttgggcagcctagaaggaacaactgggtgctcttccagaacaggccaggctctatgagaccacgggcgcaggccctgctccttggccagcannnnnnnnnnnnnnnnnnnnnnnnnnnnnnnnnnnnnnnnnnnnnnnnnnnnnnnnnnnnnnnnnnnnnnnnnnnnnnnnnnnnnnnnnnnnnnnnnnnnnnnnnnnnnnnnnnnnnnnnnnctactcgcctgcgcttcacctcacgtgaggattttccaggttcctcccagtctctgggtagatcccgaggaattccnggaccggtacccagcccttc

SEQ ID NO: 137451 - DNA, 576 bp, Homo Sapiens
  misc_feature (407)..(420): n is a, c, g, or t
cactgttactgtaacataatggcatgtctaggttgagttctgaattgggttttaaaaaaggctgaacatttggtttccacatttccactcagagattatctcttttcttttctgttaactctaaaatggaatcctttaaaatgaagactgtttggaaggatcattaattagtcaaatcttgatgttttactgataatccagagttccacagaataagcaatttggtctaatctcaattgctgtaccatgtctaaagagaatataatccttagaataaaattaattcagaccacacagtgatgtaccagctgagatcagcaccttgatatacatgcagagactgagaaaggagctggaacgtatcactgtttatgggtggaacaccaaagtccagcacagttgtggcnnnnnnnnnnnnnnaaggtgtctgccttcaaaccacctgccgtgcctttagtacctcattgccctgggcactgacccagtggagatttccctattcaccaacaacctacagcaatttgcacttattgacaccatagcaactaattggtcttcacgacctgcaaactttca

SEQ ID NO: 137452 - DNA, 518 bp, Homo Sapiens
caaagtcaaggttgctgctttgaaaagacaaaattggtaaacctctgatgtgattgagaaagaaaagcacaaataatcaaagtcaggaatgaaaattgggaaatcacaacagattccatggcttatttagaagtatattttttaacttccaaacatgggaatttcctagttatatttttgttattgttgttacaaaacatggtccatgtgactgctgtcctttgaattgtgttgagatttgctttatggcccagcatgtgtttaaccttagtgaagatttgtgggcacttgaaaagaatgcatgttctgcagatgccgcatgcagtcatctacataaagccattagattgtaatacgttgttcatatcttctctgctcttaatgaagttttatttgcttctattaatgagacaattgttgagttatctctacttagatatagttctgtgaactttgctttatatatttgaggccacacaaatataaaattgttatatgaattgaaattttatgaagta

SEQ ID NO: 137453 - DNA, 417 bp, Homo Sapiens
gtttccactatccctctgaattattacacgtgcacaagaagataacttcagagaaagttttactgttatgtctggaaagaatttcttcatttttcaacaatgttgttttaagaactgttatttggaaaactttcaggaattgctgtcatcaaacctacaaactaatctcctttttaaatgataggtaatttctgaaatatccttgtatctttggctcagctcagcagattttctacatatgcaccatttgtgtaccactgggcttcatactcaaaagtcatggtaggttcccacgtgtttgcgcattacatgcctctattagaaaactcaactgaaggatttaactaggtgaaacacttgggtaggcattgtgactgaaatgggtggttgcatctacattgatactaaattattgag

SEQ ID NO: 137454 - DNA, 466 bp, Homo Sapiens
actttaggtaagttgtgtatgaaagataaaggaatgcaaaccaaagcatttcaggcctcttgtcaagcccaccagtagccagttctctgtcttgagctaatttaacctatcaacagcatttgacacagatgaagacacacttctcttaaaacacttcccttgacttctgggacaacaccctttcttagctaccttcctattctgttggctgcctcctcaacttcctctgctggttcttcgctagcactccagcgtctcaacagtggggtacccaaggtccaattcttggacagcttctctttttcatctacttgtgctcctattgagatctcacctctcagcctttctcatgactttaaatcccacctatatgctgatgactccaaaactctcatctcaactccaggttgtattgccggctccctttttatgtctattctggtgcctaacaggcatcctcgtgccg

SEQ ID NO: 137455 - DNA, 198 bp, Homo Sapiens
cacacaattttatatagcacaatgattttcaggaacacataagtcatcttatagtggaactgactatttgcagcacagtcagctcttaggagaggaagcagcccagggtaatggcactgcacaactccagggacagtgtttacatggcatcttctgtggtgtgtattctgtggagtgtgcccataggaccatgaatgt

SEQ ID NO: 137456 - DNA, 445 bp, Homo Sapiens
agaagcacaatcagacatctgtgcgtatttagatttccatgaaaaggaatgccatgtgctccttaatgccatgtgaaataacataactcatggttttcggatggcacccaggggcatggagagtgtaatgatgtccgcttcagaagttaggaacacacttgtgtgcaatgttacctagataatagtcacagtgtctggcacagagtaagcaccctataaatatttcttcaactctgaatggaagagtgagttctttcatacacaatctgctatgtaaagtttgtacatcctctgttttgttacaaaaataatatatgttctcactagcttgtggtttaacctctgaatcaatgaagaatgggagccactccctcctcaatttttttccttcctgggctgctaatgtgctgcccctacctggttctacctccatacctcagtgctt

SEQ ID NO: 137457 - DNA, 320 bp, Homo Sapiens
  misc_feature (23)..(23): n is a, c, g, or t
ctcccattctgtgggttgtcctntcactttcttcacggtgtccctcaacaactattttttaaataaaatgttgaatagaattaatcttttatgacaaaggaaacctgtgactggctcataaatatgtgacaaattcatggcagggctggatctagaagggtgactcaagtcacctgttttcagctttgagtttccttcactggttcccagcattgtccaaccagcccaggagcaatgacatcatcccgtgatgagtcaaagaatgcagcatttggcaaattggtccgtgagcaccaaattgaaagacgccccatagttaa

SEQ ID NO: 137458 - DNA, 414 bp, Homo Sapiens
tgcaagtaccaaactctacctaccaccaaaaaatacactctcaatttgaagcatcccaccctctggccaacattgttgttcactccctcctctactctcactgaacagttgttcagcaccaccatgacctccaaaatatttcctccaaaccctccttcctacccttccaccttcccaggttggccttggcctctgcctgactcagattgtgtggctgtcatgttaatcacccgctggtacacattttcaaccccctcccttgccttggccctgtctaaccgtgtctaaacccagctgtcagcctcctcagccgctgcagtcaggcagctagtaagtggccagagtaacacacgactatgctgatggctcatttgttcaattagcgacagagttcaagcaggcccttcaagctgc

SEQ ID NO: 137459 - DNA, 255 bp, Homo Sapiens
gggataaacagtcaatacttttatgggcattgtgctgctgataatgttggagaaagaccacttcacaagaattatggaataaaatatactaaagcttggtaactaacatgagttggagtattttatcagtaaaagtacattcttttttagtaagggaaatttttatactatctgaagtatctgtggaagaagacaagcatcaaaactggcaaccagaaaaaatagctggaagacatagtagatgtagaatatcca

SEQ ID NO: 137460 - DNA, 452 bp, Homo Sapiens
  misc_feature (20)..(20): n is a, c, g, or t
cagccaccatgtgagacttntgaggttcttctccatccactggatattcaactgaatgacttccaaagcctcctggacacaacgaagccggaaggttgcctctgactgattttcaaagaatgcctgaacctgtaagtttcacacagaagaatttcaaaagaagaaaaggacgataaacctcaggtaaccccagcttttaaaataagctttaacttagtgatggctgtgctgctatcttgaaagcagtagaaagaagtactttaatattcaaggtatctacatggagttcccaatcaagtatggtgatatctgaaatgattttaaaaaggaaatctttttactcccacacagatacatttttctaacttaaaatggaaccaaggagatgtttaagtaacaataaataaagtagagtccaaaggcttggtgctatgaattcaccccaagaatgc

SEQ ID NO: 137461 - DNA, 462 bp, Homo Sapiens
  misc_feature (113)..(121): n is a, c, g, or t
  misc_feature (305)..(339): n is a, c, g, or t
  misc_feature (443)..(443): n is a, c, g, or t
ggataatagtggtaacagctagtgtttattatcaagtactaggtaaagttccaagttctttgtatgtattcatttactaaatcaccaaaacaacccgttacttactatcctcnnnnnnnnnaaagaaatggaaactgaggcacagagaagctaggtaacttgctcaaggtcacacacctggtaaacaaggatcagggatttgaacctagacagtctgactccagagtctgtttccttaattacttcatacagtgcttccctggtctaacctggtattatgaggattaaatgcaaaacaaaacatnnnnnnnnnnnnnnnnnnnnnnnnnnnnnnnnnnnccctcttttagcaccagacttaatttatagaaataatacaaattaataatctttttagaagacatatcactgtatgttatttcatcctctcatgaggatcacanaatggtattatattactct

SEQ ID NO: 137462 - DNA, 487 bp, Homo Sapiens
agtgaagtaagatgtcaatcttcctttctggtaagcattttactgtcctgcaagtggttttctagcttcctccctggtttgatttgcattggagcacctcccttctctcccacaaagagagggaagagaaaatgtctcagtgctctaaatgggaaagacctattgaacagcctattacttaagtatttatctacttagcattctccccctttgcacacttaagttcgatttctaatgtagcaggctttctgaagtagctattgccactgtgccttgtttatcatttgtctattctgtgtggctttatatatttgtatgtgcatgatgatacatatcagaagacacttttctcagcctaatccagaaaacagaaaattctttttactaagttgtattttgtgattggtgctgccagcattaatctctgtaggactcgtgttttcttggttgcattaagcaagtttccatgcttaccaatgctttgttg

SEQ ID NO: 137463 - DNA, 517 bp, Homo Sapiens
  misc_feature (43)..(76): n is a, c, g, or t
ctaatttaatcattgcacattgtatgcatgtacaaaaatacannnnnnnnnnnnnnnnnnnnnnnnnnnnnnnnnnagtttacataagggtctctgacagaagaagcattttcccacattgcatagtgacagccaaaatcttaataggtacaataattaaagttatgaaagaattgctattgaatgaagaaaatatttgtctttagtgctttactttagattattttgagaggactatagtgtatagctaagaagcaatcattcaactcagggtaggtgggttaggtttaagaaaatctgatgactccattgagaattgtattaaagctcagccaagagagctgagctgtaacaatatttaatttgccacattgcagtttcatccatctagaagtgtaggaaattcaggttttcaggttcactcaggatatgaattgttaacttcctcttagcagagataatatattactatttaccagataatcttaatactctaacttatatttttacttcagaa

SEQ ID NO: 137464 - DNA, 491 bp, Homo Sapiens
ctctattaatagcttcagtcattagccaccgacaccagacagtctcggagtcatcctgaactctatcttcccctccttccccaagtcaatcactaatcaagtcctgctaatacatttccttactatttctgaaatccatccctctttctcattcctactaacatcctaatttaaaactttattatcttttacctggaccatcgtcttaagacaacaactttaacccgttgcttagcctaggtgtaatccacagaggatcttgtctgtctaaaatgcccctctagccacaaccttcccctgctcagatcttgtcattggctcccatgaactgaagttgaagtttaagctccttaggacagcatacacgcccttctatgacctgttcccagaacatattcactggtttatctcatgccatggcccactttgtattttacacttttgaaatacagaaaatcattacattctcccaataatactaagctagtata

SEQ ID NO: 137465 - DNA, 286 bp, Homo Sapiens
  misc_feature (134)..(156): n is a, c, g, or t
tatacttcaattctttaagcatagttctccttagttttttaacctatttgcaatagttgctttgaagtctttatcttctagctccaacatctggggtcacttggggatattttctatttattgttttgtggggnnnnnnnnnnnnnnnnnnnnnnnaatccccctgagctgtggtgttctatcttgtttctttgtatgtgtacacatttcttttgtaaataacatatatatattttagacagagtctcactctgttgcccatgctagtatgtagtggtgcgatctt

SEQ ID NO: 137466 - DNA, 306 bp, Homo Sapiens
tctgtttttaatttcattgatttctgctcttaattttattagttccttccttgtgcttgatttgggactattttgctcttcgtttcttagttcttaaagtgagaatttagattattaatttcaaacctttcctttttttctactgtatgcattaagtgctatgtatttccctctctgtactgtctttagttgcattccacacattttgttatgctgtattttcatccagtttaatgtactttttaagaaattgaagaagacaccaaaaattgaaagatattacatgtccatggattgaaagaatca

SEQ ID NO: 137467 - DNA, 470 bp, Homo Sapiens
tcggagacgctcgtggtccttgttgcggtcccctcgtggctgtctgtgcagcgcagagctggatgcaaggcaggctggcgggtgtgatctgactggctctgcggcgtgtgattttgagctctccatcacacttagtttctggaggcaacacagacatgtgttagatactagttctcatttctactttctatttaccaaacccagaaaagagacactgaaccagggcaaactgagtctccagcagggccatgagaaagctttgaggggacccgagttacccagagaagctgccgggcacaagctactggaagagcatgatccctgctcagtctctttaatcagaagtgaggcacgcgcagacccccgccaagccagggcgcaggcagaagtcattaaaacagagaggagggcacgaggggaggggactcaaacgactctgcacatcttccctcctgtcccctggaactgcc

SEQ ID NO: 137468 - DNA, 576 bp, Homo Sapiens
  misc_feature (11)..(11): n is a, c, g, or t
  misc_feature (351)..(383): n is a, c, g, or t
gtctttatttntcattggatgtcttgtgaaggtttaagtcacagtcaccattgcaccattgagaaagtgggtcgttaactggctccagttcctaagaggagtggcagctataagaagtagtatgggagcaatggggcaggtaagctgatttgaactttatcattgtgaactccactatgattaaagacattctgggatttgataacaattatacacaagaggacttagccatctagtttttcttttcttaataagctgattgagaattatgaaataaaccttaagaaaaatcagtttctatgaactctgtaaacagagaactaagcccaaactcccaggttctgtatcggnnnnnnnnnnnnnnnnnnnnnnnnnnnnnnnnnttaaaataccaagtggagttgtagcaactcagatgggatatgatttatattaatacatctaatgtgaattggaagatatttaggcaaattatttttattatgacagtataggcttattggagttttggtgttaatatacatctgggagttgagccattctaagtttatatacccatctggtgatattttagaa

SEQ ID NO: 137469 - DNA, 552 bp, Homo Sapiens
  misc_feature (182)..(191): n is a, c, g, or t
aagcaatgaaagcttccaacacaaatttttctatttaatgattgcttattttcctaaaaatttacagcactgatagctcatgcacacaatttaccagctaattacaaataacatgtcaatcaagtaggagatataaaacttaaattgccataaaaataaattccagaaaaagcatgctgaannnnnnnnnnaatgcaactgttcctcacagaatttcaaacaaattcaggctgaatattatcaaattaaaatactacaagctgagagggtgcttttagtgtaaaagccagatttacaaagtaccactttaacaacattcaatttcatttttctaacaaaccaaggatatatcctaagcttctgtataacaactgagaggatgttgccatttaggtaggttaaatgtagttcaactggtttgagtccaccatattacaatgttaacaggccttcttggtattagagaacagtttcaatatcaatgtgataggttaaagtttggattactccaactgctataataaaaacaaaaggtcacacacacatttaatc

SEQ ID NO: 137470 - DNA, 404 bp, Homo Sapiens
tgtctttcccattttcgggaagagtaggcctgggatttgttttaaaaggtaatttattatgaacatactgcatggcttttgctttggcagcgtttttcttttcttgaaataaagaaataaggagaaagacacatacaggccactgtttaagcctagaaaacatcccttatgggagggtttcttaaccttggcactatcaacaattcaggacagaacattcttttgtggggacagtccagtgcattgtagaatgttcagcagcatccttggcctctacccactagaggctggtagctccaagtcttgctgtaacaaccaaaaatgtctccaaacattgccaaaagccccttctggagtaaaatagccccaaattgagaaccactgcttagggaggggaaaaaaag

SEQ ID NO: 137471 - DNA, 565 bp, Homo Sapiens
  misc_feature (33)..(33): n is a, c, g, or t
  misc_feature (378)..(388): n is a, c, g, or t
gtctcccttgttgatcaaggttctcgtgactanatggcattagtttgtgttctcacagataggataggaaaaggaattatacatattgattatgtactatatgtcagaccacttatgtaccttgtttggctctatgattctgaattttttatcaccctatcatcacttctgttcagcccttttcttcccttcccaagttgtttattctgtttgatttttgttctctgctggtagtcagataatctcccaaaaataatagttatcattgattggccacttcctgtgtgtcaagaactgttttatactcttcacatagatggttctcttttgatcctcaaccctgtgagcttatcacttaataaatattgttaagctgcnnnnnnnnnnnggatccaaaaaacagcagattaaacaacaaattactggctttatttttctcaccttaaaaagtctagaggtgagcagtccaatgccactagtgcagctccatagtggcctcagggacccagatgtctcctggttttctgctcttccatacttcgtattggtgttcaccctcgcatct

SEQ ID NO: 137472 - DNA, 381 bp, Homo Sapiens
aaaatttctcttttcctgagtcatcatgttaccaaggcagttgttttgaaaatgctttcttatcttcctaagtgggatcatttcttacaaatgtagacttttccacttagaaaagaaaaaaatctgttttcatttgttttcaaattatttttctttttaatggcagtttgattcccagtttgacagccatttggagctgctgaaggggaaaaagaaagaaaaaacccaacattttttcatgttcctgggtgaaataaatctgtttagtggaatattaaatgcccaaaatgtttcgattaattttggcaaactttagacaaatccaattgtccttgtctttcaaatatatgattgcagttaaggagaggaatttcctaaaaa

SEQ ID NO: 137473 - DNA, 523 bp, Homo Sapiens
ttttttctcattttttaaaggttattggtttaatgagcagacctgtattttataaagggggaaagttggccttttagggggaaagagttaagtacacccctatattatacaaatgctaatgctttgtatttactgggagaatgggaaaaataagcaaagacgacaccagtttttcccccagttttagccgagataccagtttctcctgacttcttgcagacaggtagccataatgatttgtacataatcagagaacattaaaatctttcattctgattaattactagtaagtgtacttaaagtactgagcatgtttcaaataccagaactttttaatttaaaaaatagcctaatcattaacacagaaatcactcagcttactagtattattttacattcacctgttcctgacctcattataaaaccagatgaaatgactgtcataaacaggaaaaaaaggtaaaaattccccaatgaaacataattcagaaaatcttggcttcacctagtgcttgaagcgtaa

SEQ ID NO: 137474 - DNA, 495 bp, Homo Sapiens
catttatttagtaaatgtttaatgaatgcttcctctgtgttggacattcatcagtgcttcccaacaggacactattggcattttgggtggacagttctttggtgtgtgggaatggcccacgtgttgcagaaacctttggcatacttgcccattatattctagtagtagtctcagtcatgcgacatcaaaaaattgtaactcccattccctgtgcatacttccaaatgcttctaattgaaaaccactgctctagatactgttatgggtatttaaaaacatgcgaatgtttgattttagatagtttccacaaagggtttaaagcctcattaaaacttgtcatccttaccacttccatccacctcctccacttcctcatcatcacaatcacagttcatagttacatggcttacatcacatgttccaaataactgttttatttgatcattccagcaatctagtgcggtattattcccattcttactgactagtggaaat

SEQ ID NO: 137475 - DNA, 307 bp, Homo Sapiens; identical to SEQ ID NO: 119652

SEQ ID NO: 137476 - DNA, 440 bp, Homo Sapiens
ataattttttaaatttgagggatgaggttttcatagtactgaatatcaaacaatgaatccgcatgaatgattcacctaatttccctggttttagtcctctatacaggttttatatagcaaaagaaccatttaaagacttgggttacaaatgtattttattttacctctggcatgccttgggctgagaaagcattatatggtggcacaatatttgtaacattctcatagccatctggtggtggttcgaggtatgacattttgaaaatctagcaagaattaaaatatgtcaagttagagagaaaaattccagattattattaagatataattcattttgccccaagtatatacttcagattaagcatcctggaactaggttctataattaaatagataaattacactgacaacaatgagaaagagccttatcattattattg

SEQ ID NO: 137477 - DNA, 496 bp, Homo Sapiens
  misc_feature (26)..(26): n is a, c, g, or t
cgtcttctaataaattttgcaagacncaatcttccatagcctctaccattgccaatggcgatttccttttcacctttccctttgattcaggggcttttgaggtcaaaagcattttcataatactaaaatgtcctttgtctttttcacttttcattctctcttgagtgtagagtggggttttccagaggctgtatgtgtgatgacgtcatcaggctgaataaatggaatgtatgcttgtatatttttgtgttttctaaagttttccaaggagattggttacagtataaataaaagtgtttttggcttattatttctactatgttcctgctggtatctccaggtatacctactataatctctgtaacttcactatcatccaataagttgttatttttaaaatccaaaagtgttccttatgcctatgcggaaacaccaaaaataagtatatatctttgacttgttttaaaataaaattcaaaacttttttcaacaaaaa

SEQ ID NO: 137478 - DNA, 506 bp, Homo Sapiens
  misc_feature (13)..(13): n is a, c, g, or t
aagaagaagaganaaaggtaaatgaaccttgccatagattcccaaactctgtttctgcttcagtgttaacttttttaaaaccatgacttatgtcaatagtgttattatagtgcatacgttttattgtgcagatacattaacgtcccttgtagtctcaactttgaatagacaagaaggatttgtacccaaaagttgggttaccactccaggagacatattgtcatacataagttgtctcaggtcattcattctaagtttggaaaaacttagttcaaccttttttccactctatttcttgggttttctttgcttttcgttggtcaagtttctgccattccttatttttaatactttgtttagctccactgtgataaataacaaatggaagaaaaatatatttaaccaaacaatggaaacagtttcatttggtaaagttggtcttagatattgatgtgctaagaatctaacaagactaacagcccacctctgattaaagagtagtcctc

SEQ ID NO: 137479 - DNA, 212 bp, Homo Sapiens
ctgagccatgtgttcaacccccctttcttcctaatttacattctagttaaggggaagtatatgaatcctgagcacaagctatgtggctaaccagtcaatattcaactaccaaggcttaaaacttttatctctggctggttggagattcacccaaactctataaaataaagtgccatggaagaatatctcatggaaaaatcccaggctttgga

SEQ ID NO: 137480 - DNA, 394 bp, Homo Sapiens
tcaagaccagtctgggcaacatggcgagaccccgcttctacaaaaaattacaaaattagttgagcgtgatggtgtgtgcctgtggtcccagctacatgggaggctgcggtgggaggattgcttgagcctgggaagttgaggaaaagaaggatccattgccctttccatcgtgtgaggactcagaaggtgtcatctgtgaaccagagatgcctcaccagacgccgaatctggtggcgccttgatcatggacttccagtctctagaactgagagaaataagtgtctgttgtttataagctacccagtctacagtgtttttttaagagaattaaatagtttattagctacatacaattatggatgatacacaagcctctacctgcacgacaacacat

SEQ ID NO: 137481 - DNA, 605 bp, Homo Sapiens
tccatactacagctgtgaaccacaggaaagaggcccagcccagttaggactataggccaaggcatgtcactttctgaacatcagttttattagctctaaaatacgactgggctagatcatgggtagctgtctacctttctcagcctccatcctctgcacccatgcatgacaccctgccccgtcagtaacagcatgaggaggcaatgcacaagtgtcgttatacaaatggccccaccaggcagaaaatcaccagacaaggtgatttctcagcttcttttcagctctagttttatacatctccaagttggtaaaggaactttcctccacattcatcatgttcccaaggtttctctttgagatgaatactgaagcttgaactctactaatgggttttcccagtttcactaaatttgaagagttgctctagcacaaattctctaatgtacaaattctctaacgtgttttggtggaacatccaccaaagcccttcccacattcatcacgtcaccagagtttccagctagtagggagagttctaaggggtttataaagcaatgaggtttggctgaaggctctcccacattacccacattcacaggtttttc

SEQ ID NO: 137482 - DNA, 466 bp, Homo Sapiens
  misc_feature (246)..(283): n is a, c, g, or t
tatttcttggcgggagatactttcagaaggagactctcccgagccacaaggaaagcttctagaagaagtgaggcaaatttgcaatccaagagtgaagacatgaccctcaatattttacctgagttcaagcagaatggagatacaagcctgtgaaggcacaagaatctccaaacacctctctgttgtaatatggtaggatgcttaacagaatcaagtacttttcccctctttaactttctagtttannnnnnnnnnnnnnnnnnnnnnnnnnnnnnnnnnnnnntaatagaagtagaaatgcccacatccacacttagcttgtttgggtttgctttcacagtctctcttccttctgactagaagtatgtataataaaacaatactacctagttaaacatttactttctcttttgcctttacaatgtgcaggctcttctgtttaaagtgtgtgtgcacatgagtactg

SEQ ID NO: 137483 - DNA, 443 bp, Homo Sapiens
tggacataacctcaagattttattgtcctcataataaaacaaaagatgatgcttagaactggatcacttggccctttcttttgttatctcctcccagttgaaaatgtttgcatgtcttaacagccagcattttcttagatctgcagatggggtcagcacactcaagcctcagcacaacctcctttgtaattttacccgttttccagaaaattgccttagtctacccaccatagtcactctgcttcttgtcataacgccgctttccctgggcatacagggagtcctggtattgtgccgttttgtggggttggtgcttgccacacttcttacagaaagcccagtgggttttaggaatgttcaccatgttttccggaatgctatcggcatgggaggaaagtggccatattttatttctagggtgaaaatgtttgccattaaactca

SEQ ID NO: 137484 - DNA, 248 bp, Homo Sapiens
aaaagcaatagttggcatttctattttgctttttctttcatggagactaggcattttaagaatgttcatttattgtctcctatctttgatctgtagagatttatagaactacaaaatacaattagcacctgaatgtttgtacttaagtataattgataaagtatgagtatttgcataaagttagttacaaatttatgctacagttaatagatttgtataattcatctgctttggctcgtgccgaattc

SEQ ID NO: 137485 - DNA, 508 bp, Homo Sapiens
agtcaccttgctcccgctgagccagcagttctgagaaaagaggtttctctggagctcttgcgtggtaatgctgctgctttcttcagcagggtggagatttctctgtgtacttctcgcccctggtaggcttccacctgcacgcttgcatgagtatccctagcactgagcaaaggtaatagagaggagaagtcaaggggcacaagccaaatggagaacctggggtcatgatgccctgatctgtgaaaacaaggtctctgtagctcagacagagcaaagtggagttccccttgcagacagctttggattacccaaaaataaagcctgacactcactgagcacctgcttgtgtgctcaaggacctgagctgtgtgactctgtttatgttccacacaccaactctgaggtcagatatcattatcattcccatttgatgcttggagactggggtttgcagagcttagggaacaaggccaatagttggccagtggcaccagggtctgtcccttag

SEQ ID NO: 137486 - DNA, 247 bp, Homo Sapiens
gtaagatttagtttgagctttcacttctcataacctcattcagctgcatgaggattacctgggagcgtctaagcccaccatccctggagattttgatcaaaaagtctgagataggcttcaggaatctgtattttgaaagaactttctgagtggttggataaacatccaggtttgaaaatcactgtcataggaattgaagagcattaaaaattgtgtgtagatgatactgagatgaaatctatgttta

SEQ ID NO: 137487 - DNA, 602 bp, Homo Sapiens
  misc_feature (58)..(99): n is a, c, g, or t
atatcaggtagattggggactgaagttgaaatcttaataacaacccatttattgacgnnnnnnnnnnnnnnnnnnnnnnnnnnnnnnnnnnnnnnnnnncagctttgaaccatccagtgggcacagacagtaaacctatttttatccagaagaccaaggaaaatgacccctgcatgccagaaggtataggacaaagcccagggctttatgttgctttctctctcacctcccagccctgccccaaggctggccctagcctcagagcagacaccaaccatggcaactggggaacataaaactcaagagaaagtgtctaccagaggaactgggaaaagggatcagtattgcctgaaaagtgtggacagaatcccccttttttctctcttttccttaactctgtgctaaaggctgtcccccttgtaaggaactgctgtatagtgaaaaggctaacactcaaagaaacctgtctttctgatcatatgaactggcaagtgggtatgatgaggaaagggggcaggagaatcctggagaagagagagagggaaaggagaatgacctaattctgtgtacgatccaacttaagtcccagacacagccctgag

SEQ ID NO: 137488 - DNA, 632 bp, Homo Sapiens
  misc_feature (524)..(570): n is a, c, g, or t
acaaaaaccaccagttcccccaaaactactgaatttcttttttaaaaaaggtaattaagataccttgtagacaaggacctttgattacacactggtagaaatttcactttaccatttcagccaccatatgcctgctgtctgcccggggcttgggattcaaagacaaatgtttccagttcccttcctcccacaggtgcttgtggcctggtgggaagcaggcaacatgtgcacatagatcaaaggaagcaccaagtagctgttttcacgaagggtgtggtgagcacagaaaggaagccacctgttggcctggagaagttgaggaagggctctcaggggatgttagaactgagtggtaacagtcagaggagaggggtgaagtgccatgcctggcatgcctgccgagaaactgtggccacatgcagttctcattgcaggccagcctccagctaggacacaattctggtgttgcaatgcaggtcagtgtcctgtattagttttctatgctgcataacacattgccacannnnnnnnnnnnnnnnnnnnnnnnnnnnnnnnnnnnnnnnnnnnnnnaaattgtgttcctttctgcaaggccctggggaagaattcactttcgagctcattcaaattgt

SEQ ID NO: 137489 - DNA, 557 bp, Homo Sapiens
  misc_feature (348)..(348): n is a, c, g, or t
gcgatgagtttcctcatgctttgaccatgcaaggaccagtcagcttccaggtgtgactggggcagggcttgtcatcttcttcagagtcactttgcaggggttggcgaactgctcccatgcacgtacagctcccagtctactgatgtttaaggatggtcttggaggttgggcctgctagaataaactgagtccaacacctctacacagttaagtttaactgggctctctgataccaggagcaaggtggcggggtttagggtgttgcaaactttcaatggttatgtgggggattttttcacagagcaagctttggtatcttagttagtcttagtattttgtttagctaantgacgtcctttggtatttattaaagtcaccacagcatggggggcctttatgtttaggttttgcccaagagttagcttatccacttcttgtgctagtagggctgttcctgccaaggccctcaaacatgggggccaacccttagaaaccccatctagttttttagagaggtaggccactggccttagccagtgtcccacagtctgcgttac

SEQ ID NO: 137490 - DNA, 319 bp, Homo Sapiens
atgagccaccatgcccgggccactttatcttattttactgttatttgctacactggataagttcttttgaccttggatctttcaacctaccaagttacttagaaaaactgcaaatagggtggctgtttctgctacactttcatacaggttttacaatgagcaagtatgtactagtggaaggtcgagcagtttatattgagtcatttcatcaatctgaccttatgatttttaattgaatcattaaaatttatctcttggtcttactaaaaataaataatagattgacggcagcttaatcctcaaagttggaatgtatggc

SEQ ID NO: 137491 - DNA, 414 bp, Homo Sapiens
aacttaatgtaaaagtgcatacttggttacacttttaccaaacacataatcaatttattttctatttcagaaggcattattgtgtaagtgggtttaagggtgggtctggtatgattttagtaagcatgtttggacttagtactgtctgtgaagtgtaagtagttattgtactgaaataatctagggccctacagtgctgatgacgtcgtctcatggagtgtgtgggtgtgtgttccatacctgttatgtcggaaggcactctcatggcaggcccatttggctctttgactttgggaactaaccaggcacatctttatcattactgatttctgcagtttcaggaagttgagggtgcttgctgcttggaggccttcctcgacatatcaaaggctggctgggcgtggtggctcacac

SEQ ID NO: 137492 - DNA, 672 bp, Homo Sapiens
gtttttcatctaaagctttttaatccaaataaatacagagtttgcaaagtgatttggattaaccaggtttggttgttctgttaaagtggtgtcagatgtttcaagcagatttaactcctgcaagccctgatttcatgctgacaaggatgtatgtgactgccaatttaagagaacaaagctccacagatggagatgaaagtcagtgtccagacctctggttcagggctcgggctgcattaacacagagccaaatgtagtcagactgcagactgaagtgccccacgccacggctcaggctggcagtcaaggaattcctacatgtcctcagcatgggcagaaatgcaggttgaaattaaaattggagaattactgagggcggaaagtgaggaaagcatgtaagcagtatagcccacttcaaatagcttgtctgtggccagaagaaacaggtggccccaggtgtctttaacatctttataaactcttaaaacatgaccatgcttttaatagaaagtgttggtaaaagcaaccaactgttttcctctaatatcactttgcaaatccctgtggttctgttctcctgaatttaggatagtaccggcatctgtgcccctgagcatattttgaacaatcattgatgtatagctagacatcccatctgaacactgagcaaac

SEQ ID NO: 137493 - DNA, 326 bp, Homo Sapiens
tggacaggaagtagaatttattggtgagtattaagaggggggcagccacattggaaaatgaattaagttttgagatctttgccttcataaatgggattagtggccttataaaagaggttgaaaggaattgccttgccccttcttccatgtgagagcacagcaacaaggcaccatctgtggagcagggtgggccctctccagacactgaatctgctggggccttgatcttgaacttcccagccaagataaataaattttgttcatgaattatccaatctaaggtatatttttatagcagtttgaatggactaagacacccatttaac

SEQ ID NO: 137494 - DNA, 358 bp, Homo Sapiens
aagttccggaataatggtaatattgaacaattggtgagtgccaagcaaatagcattttctcccaacagttaaaagtagtagccttttctaaaaagttacaggttgtcctctcttccttcccctttgtttatctttctcagtgtcctccccaggtgcacccctttctcccagcaccataaccaatcacatttctttaagtttcaagtaaggtctcaagtgcaggggcatattatcatcttagaagggagaaccaacaaatagaatcttttgcccaacttagatctatttgtccttcttatggacctgtgacattcacctgtcaatctgctcttacaagcctctatcagatgcaaggtgc

SEQ ID NO: 137495 - DNA, 508 bp, Homo Sapiens
  misc_feature (11)..(11): n is a, c, g, or t
gatgtcacacnttttattttaggatggcaatattgacatgattttggaaatcatactctttgcaactatttaaacttggaaatgttcagattttgacttcagaaagtgccagggagcgcacagttgctcagaattagttcgcaggtgcacaggcagacgggcgcgaaggcccccgcgttacagaaacagaacgtggaacagtcctgtgtgagggttgcctctgacctcccctggggtccgcacctccctgggctccagcccgaagcctggggacttcccctgtggaggatttgcttatttgggagccaatggcttgacccaagttttctccctgaatcttcccagcaatcccagggaggcaggttctgttgcagatggaataactgaggcttagtgagtttaaaacttgccaggattcaaacccaggcagcctcctgtgcgcgggctcctgactcttcaacacctccacgtggatgggctggttccctcctgatggacttgagcgcct

SEQ ID NO: 137496 - DNA, 379 bp, Homo Sapiens
  misc_feature (16)..(16): n is a, c, g, or t
gacaattagtcatctntcctacattttctctttttttcagagcccagaatccttgcatacattttctcattctaaaatcctacctatttagtttgtagaaatgatttatgtagtaatcatagactgctaaaagctagaactccggcctccttttacagacagttactaaggcttagaaacatccttcagcttttcagaggttgcaacatacaactggtctttttccccagcccagttctctttcactgatagggccgttcatcttttcctattccttaaaccccctttcaagtgttaagatttaacctcttgttctagtattctagtatttgaagaacaaatttatttcctgttacacacttcatatacatttaaaaaa

SEQ ID NO: 137497 - DNA, 341 bp, Homo Sapiens
  misc_feature (314)..(314): n is a, c, g, or t
  misc_feature (328)..(328): n is a, c, g, or t
tcagagcccagaatccttgcatacattttctcattctaaaatcctacctatttagtttgtagaaatgatttatgtagtaatcatagactgctaaaagctagaactccggcctccttttacagacagttactaaggcttagaaacatccttcagcttttcagaggttgcaacatacaactggtctttttccccagcccagttctctttcactgatagggccgttcatcttttcctattccttaaaccccctttcaagtgtttaaggttttaacctcttgttctagtattctagtatttggaaggaacaaatttantttcccgttaacanacttcatattaca

SEQ ID NO: 137498 - DNA, 389 bp, Homo Sapiens
tttctttaaacaacaatttatttgtcctgcttcttcaatattggcagggctcagtgagacggctcatctctgctccatatggtgttgactggggtagttcaacacagactgcaagatgcaagctggcttcccttcattcacatgcccttggctgacctggctgggacagttgggggctggctgggcctctctccatgtctttgttgttcttcaggacctctttccaaatggagtggtctctctcctgcagcatgatcagacttctttaagtgatggcaccaggctccaagacagtgaagtcagccatcttaaagtctaaatctggaactggcactgtgcatttctgccattttcttctttctctttctctcccttccaccctcgtgccg

SEQ ID NO: 137499 - DNA, 406 bp, Homo Sapiens
  misc_feature (256)..(256): n is a, c, g, or t
  misc_feature (327)..(327): n is a, c, g, or t
  misc_feature (352)..(352): n is a, c, g, or t
  misc_feature (372)..(372): n is a, c, g, or t
  misc_feature (378)..(378): n is a, c, g, or t
aacaatgtaaagataggaaacttttcaatccaaattcaaggtctttattactagttccacctcacaagctagtgggatgtatctgtgtcacaagctgaattcctcagtaaagaaagcttgagaagacactaaacaaggatgttactaaaaggacaatgatttgttaaaattataaagcaatcatcttttgggcctgcaaacagtcaacattaggaactctccaccactgcggatctgggctccccatcacagtatntatttctggaattcggggataatttaccattcacctgggccttttttttctggccatgcttttctttgggncccaaacccctggcatggaccaccntattaccatttttaccaggntggggnctttggaaaattccccatttttcacacc

SEQ ID NO: 137500 - DNA, 1014 bp, Homo Sapiens
  misc_feature (345)..(364): n is a, c, g, or t
ggacaggtgacaactacaacacaaaaaaaccattgacaggaaaaatgaacatagttctcctttttaaagtttctacaaaatagaaatgtcacaagacacatcacaacaatgcagtggaccacattttcttatttattaaagaacagaaataaattttgcttaaatttaaaaaaataacattaaaacttagtttatctttccactgagtaaaactgagaaaaagttggcttttagatcatatatttatttaaaaaaataaaatgggaaattgacaaagttaccacattattctgcatgctaacaggatttcccaagcctgtgagagaatcatttcttgagcaattnnnnnnnnnnnnnnnnnnnnggacttcctcaacaatgtaaagataggaaacttttcaatccaaattcaaggtctttattactagttccacctcacaagctagtgggatgtatctgtgtcacaagctgaattcctcagtaaagaaagcttgagaagacactaaacaaggatgttactaaaagacaatgatttgttaaaattataaagcaatcatcttttggcctgcaaacagtcaacattagaactctccaccactgcggatctggctccccatcacagtattattctgaatccaggataattacaatcacatggcatttttttctgcatgctttcttggcccaaaccctgcatgacaacatatacaatttacaagatgggacttgaaattcccattctcacacaggatagttagggcgtgttaccaataataaagaataaaagttatacaacattgattattataaattatatttgttcttatccacccccattctccttaatatgttactttctttcctgcagaaaacatgatgttcctatataccaattacatcattaatgatgattagaatgagctgtagagaccttgattctgaagacatgtatgtgcaggtgagacgcaatctgattgcaaacactgacacagtagcggatcaaatcaaagaaag

SEQ ID NO: 137501 - DNA, 459 bp, Homo Sapiens
  misc_feature (59)..(59): n is a, c, g, or t
  misc_feature (343)..(343): n is a, c, g, or t
attgttctgaagtttgctcttcattattaaatcattcaaaaaagagttcttcccatttngggggatggtggagtgatgaggaagtgttctaagggaggggtccatttgagcataaccatgtgtgagaaaataacaggcacttccttctttatggatcactgcactggaataggctggaaagtgctgggctggctgggtagatttgcatgatgcccaggtgtctaatgcagaactttccaaagtgtgttttgtgggagccccagttcatgagctacttattttgtgggacacgtaactttaggagaggctatgaatggcactccccttcgagaatatcccctgngcatgctctggtattagagaaagcctagagaagagactgtattaattctctagaccttagaccttatcagtctccctggagacaacaggtggagcccccttcctgtgggaggacaa

SEQ ID NO: 137502 - DNA, 523 bp, Homo Sapiens
ttttatttatttaataatcatttattgaaaacctactatgagcaaggcactgtgcaaagccttggggatacagagataatgaagacaccgttctgctctcaaggagctcacattctaaatgggacagacaagttttcaacaattataatacagtacaataaatgtgagaatatacgtattcatggaatactgcgggatcataaaggacagacacctaactcagcttagaagaactttaaagaaagctgagtataaaagaatgaagaggcattagtagagtggatgagcagggtggtgacagtgaagggcattccacgcacagcaaacagcacgtgcaaaggtgcagaggtgtgcgagagcctggtacatctgggaatggtgagtgatccactatggctgaagagcagtgactgtgcaagagttgggagagctaaggctgagaggtaagcaagggccagatcataaagagtcttggatgccatgctgaacaactaggacttgatcctgaagtccctgggaatcc

SEQ ID NO: 137503 - DNA, 737 bp, Homo Sapiens
  misc_feature (131)..(131): n is a, c, g, or t
  misc_feature (144)..(144): n is a, c, g, or t
  misc_feature (190)..(190): n is a, c, g, or t
  misc_feature (192)..(192): n is a, c, g, or t
  misc_feature (242)..(242): n is a, c, g, or t
  misc_feature (391)..(391): n is a, c, g, or t
atgccattttatatttgggcactcttttagttttttaatggtaggtgtgaactgtatcgtccttataatgctacatccctaatgaatgtgcgtcagcatgcctagttttaaaggtgtgtgtgtggtggtgngaaatatcctganaatgttatgagtaatcttaatttttctcatacattgacattactgnangctagtagttatattgattacaatggactctggagcaccagacctaagtntgaattccaggttccccacttactagcagtgtgactttaaacaaagattagaccccaaagttcacgttgcctctgggaaccttggattctcatttttagaagtgaaccgattattgtaactactgcaaggcttgttgtgaataattaanatggagataaacataaatggaaacatgggaccctggtgcatagtaagtgttccaaaagttggttactattttaattatcgttattattatttttcccaaaggaacacaatttacaaatgttcgctttccctggaatctttaccccaactctgactctcaatgatttgctactgttagtccgattgatgaaaaatcaatggggaaaccaagcattgtaatctctgcccatgaggtctatagacggaattcttttcaatagctctaattaatgagttggcaagtctgataaagcaccagagaatggggtgttcatagaaagcattagtgtttttgtttaacatatgtg

SEQ ID NO: 137504 - DNA, 461 bp, Homo Sapiens
catatgcctggcttaatatgtagagtgttacacaggaatttgtagtttctgacttacattcctggtattcttttttactttttcatagctgtctaattctctgtacttcagtttactaattgtttactgtgttgagtgttggaaaaattatgaattatattaaaaatatgatcaattatgatttcaatgggaaaggaagagaaggtaactcacatttattgagcagatacagtgtaggcatttcttgtattgtgtttgatttagtcctcctgacacccttacatattaaataggagtatatcattttacatataaggaagctgaggccctgattatgtttgaacatcaatcatccttctaaattgtatttgcataactagtaattataagcttatatttccctatttctacttatttgaaattcatgttatttttgtgacccacctgagcttccttttgat

SEQ ID NO: 137505 - DNA, 525 bp, Homo Sapiens
  misc_feature (401)..(401): n is a, c, g, or t
  misc_feature (450)..(450): n is a, c, g, or t
  misc_feature (475)..(475): n is a, c, g, or t
  misc_feature (493)..(493): n is a, c, g, or t
  misc_feature (513)..(513): n is a, c, g, or t
ttggcctggttatacagacttttagcaaagttcttgctatgctaaaagtttctgacgaattcgcattttagaagttccctgtattttctgatgacagtgaactttttctcagtttttctgaactatgtcactttattttgggatattaaaacatgataaaagagtaaaatgtttctgactaaaattagttagagatgtatagtcagacagaccgacagacatatagacagtggcagaataatgtttatgcatgtgtatgtaatcaaaccagagttcgagcaattttaaacctaattatctcagagcctaatctaatttctgtttatttcattagctcttaatctttccagatatggttggggtgaatgctatgtaatgggttctttttaaattatccgggngacagtggaaaaataggagcctagagggcctagtcctcaagtttgcccnttgggatggggtaacttgaaagccngtgtaggaaagcccgggncattccaggttcctctcccngggcttcccagt

SEQ ID NO: 137506 - DNA, 491 bp, Homo Sapiens
  misc_feature (70)..(70): n is a, c, g, or t
  misc_feature (281)..(281): n is a, c, g, or t
  misc_feature (299)..(299): n is a, c, g, or t
  misc_feature (348)..(349): n is a, c, g, or t
  misc_feature (371)..(372): n is a, c, g, or t
  misc_feature (377)..(377): n is a, c, g, or t
  misc_feature (398)..(398): n is a, c, g, or t
  misc_feature (458)..(458): n is a, c, g, or t
  misc_feature (478)..(478): n is a, c, g, or t
caaagtgaaagtaagtttattaagagagtaaaggaataaaagaatggctactccatagacagagcagccncaagggctgctggttgcctatttttatggttatttcttgatgatatactaaacaaggggtggattaattaatgcctctccctttttagaccatatagggtaacctcctgacgttgccatggcatttgtaaactgtcatggtgctgatgggagtgtagcagtgaggacgaccagaggatcagtcttggtcaccattttaggttttggctggngctccttttactgccaancctgttttatcagcaaaggggtccattaatgaccctggtattttgtgcnntgacattcaatgacttagattnngcttntatcacgtctgggaatgcagncccagtaactttcagccctcattttacccagctttcttattataagaatggagatgctcnatggttcacataggtctctngacatttcccttc

SEQ ID NO: 137507 - DNA, 507 bp, Homo Sapiens
  misc_feature (380)..(380): n is a, c, g, or t
tggctactccatagacagagcagccccgaggactgctggttgcccatttttatggttatttcttaatgatatgctaaacatcgggtggattattcacgcctcccctttttagaccatatagggtaacttcctgacgttgccatggcatttgtaactgtcatggccctggtgagagtgtagcagcgaggacgaccagaggtcactctcatcgctatcttggttttggtgggttttgggcggcttctttattgcaagctgttttatcggcaaggtttttatgacctgtatcttgtaccgacctcctatctcatcctgtgactaagaatgccttaacttactgggaatgtagcccaaccggtcttagccttagtttagagagntccctattcaagatggaattgctctggttcaaacacacctgacactaccccccaggccgaggacggggtccccaggggcaggcgagcctccacagatccggggccattcatctctgcagcggccgca

SEQ ID NO: 137508 - DNA, 500 bp, Homo Sapiens
cactgacacacctggtgtgattttaaggagcagagagtttaataggcaagaaagatgggagaagtcagaaggaagaagctcctccatacagagacagagggaggggggctccaaagctgaaagaggagaccccacatgccaggataccagccagctatatgaagaggctggaggagatggtgtttgatttgcacagggctcaggggattggtttgaccaggtaagtcattcatgtagccctcgaaaaaaactgaccctcccaccctagtcttttaatatgcaaatgcagggtgccatgatgttctacatacttggggatatgtgggggcagccatgttgccaggaacgtgtggggcaagggcaagaggacaatgatgggaatcgccatgttgggtggatccagtttctaatggctggcgtttgcatactaaaggttgccagctcagctctaagagccggagcttttctgctagacaagaaaccgtttttggaggtgcttt

SEQ ID NO: 137509 - DNA, 641 bp, Homo Sapiens
  misc_feature (98)..(133): n is a, c, g, or t
aatgtaatcacaattctatgatcacatctttaataatcattcctaaggctgtcaaatatccagtcaatgttcagatttctcagattgttttgtagggnnnnnnnnnnnnnnnnnnnnnnnnnnnnnnnnnnnnttgacatatgattcatataaagttgatggtcttctagatctttacagagccataaataaataaataaataataaagttctctgctatagagggcatggctttgtttcagaagcctactggtctacccagcatctctctccctgtgacttactagagacgatgctcagcataattaacctaccatgacctctgtaattccataggacctgccaggtgatatggccaaaataaaggacagcttaaatcaaagtttaaacttgctgcagagcatatttatttattatttatttttgctctagataccactctaaactggtatctgtgagtcagcctataaagcaactgaatatatcgttgtcaagtgaagtaaatgctgcctccaaaatttaagcttctggggtcatgaattttgggcacagttttgcacctcttttttaatgataggttgttcaaggtacaacactgagccttaaaatcttcactgatgtggtaggcccttaaatatttt

SEQ ID NO: 137510 - DNA, 573 bp, Homo Sapiens
  misc_feature (39)..(39): n is a, c, g, or t
atgacattgcttgctgacagttactgtttattaagtatntgtggcttttggagtagtgagcaatagggagaatattcaggtccagctaagggcataaggtagatagcaatgatttctcattcgaaagggatattttgttaagactagggctgatcttttctaatttaaccttggattggtagaagatggggtgtccctggctcattatttttcactgcccagcactgttcgacaattatcctgagtagaagtaggggagggactagaggatctgttttctgtgaatacaataggaaaggcagttttgaattatcccaaatggcccctaaattctgggggaaaataaaataacaacaacagcagttttaaaaataactacaacctaggttctgacatcccaaaaaggaatatttcaactataattctcagcattttagaaattaatttcttgacaaatatcaataggtatcattcagactttgcaaatacagagttttgaaatcagaattttgcatctcatctctcccctaaaagaagtatggcaattgtgcttgctgaccatgaggcttgtgc

SEQ ID NO: 137511 - DNA, 426 bp, Homo Sapiens
ctattccaatatcgttgtttttaatctctgggttttatacaacagaaattatctgggggaaggaagctcttgttacctgaatatgtcctaatttttgtctcttatttttatggttttagaaaatgtctctgaaaagggaggcttgtttctgttgagtgtctggcttagttctcaggcttatgtctgtcagtaatttggccatagttgttggcattcgaggtcacagcctagtgctcacgactgtatatgtagtacacattttatatcttggtagagttgtgtcttttgctcacgtggattaggctatagaatattccacggcagaggcgaataactttttctcctggaagctgcagtagtgggcaaaaaagtgagaccctgtccctaaaaataaagttgtaaagcttggccgggtgcagtggctca

SEQ ID NO: 137512 - DNA, 262 bp, Homo Sapiens
  misc_feature (48)..(48): n is a, c, g, or t
  misc_feature (102)..(102): n is a, c, g, or t
  misc_feature (155)..(155): n is a, c, g, or t
agagttggttaaaccccttaagcccccagggggaaaaagaactttaanccaacctaagagtaacaaacgtcaagtaataacagttggctttgcccttcaagnccttaacaaacctttaactcattttgaaaagtcacttaaggtcaagacctttntcccccttaccttttaagtgatactgtatcattagactcttttgtcacattctgcatttcatgttgaaatcccctgcccctgacctcgtaaatgatattttcaattt

SEQ ID NO: 137513 - DNA, 582 bp, Homo Sapiens
  misc_feature (232)..(339): n is a, c, g, or t
  misc_feature (369)..(495): n is a, c, g, or t
  misc_feature (499)..(530): n is a, c, g, or t
tgatgttacaatttttttatttcagcagttacatatattttaacaaacatataagtctatttggtttatccagagatttgccattttggttgctcttccttctttgcaatcattttccttccccatgaacttcctttaccatttctgttaaaggaggactactagcaatgaattattttagctttccttcttctgacaatgtctttatttcagccaggtatggtggctcatnnnnnnnnnnnnnnnnnnnnnnnnnnnnnnnnnnnnnnnnnnnnnnnnnnnnnnnnnnnnnnnnnnnnnnnnnnnnnnnnnnnnnnnnnnnnnnnnnnnnnnnnnnnnaaaaaattagctgggcgtggtaccacgcannnnnnnnnnnnnnnnnnnnnnnnnnnnnnnnnnnnnnnnnnnnnnnnnnnnnnnnnnnnnnnnnnnnnnnnnnnnnnnnnnnnnnnnnnnnnnnnnnnnnnnnnnnnnnnnnnnnnnnnnnnnnnncatnnnnnnnnnnnnnnnnnnnnnnnnnnnnnnnntgtctttatttcattttctttcctaaagaatatatttgctggataaaggatt

SEQ ID NO: 137514 - DNA, 520 bp, Homo Sapiens
  misc_feature (504)..(504): n is a, c, g, or t
aagctgaccccaggagtccttctttccagcagcaggtcttgagctgcacttctctgtagctacaatccaggcaggaacaagccctaggtacctccggagaggagggcaagagaggaagaatgagttcagctactctagccaccaaactgattatgaattgccctgaaatctgaaaaatttcaattccaatcgtaagtttgttttgtttcattttgttttcttaaattgtatatttgaaagatggcattaactaaagatatatattcaatatagagtggaaaaaatggaatacttgcatagtatcttttacttataggtgatttatgatggggaggtggggtggataggttgggagttcccccaagaagttgggaatgaagtttgtgctctgtgagttgaacctaattaggatccacaagtaatgaaagccgtatttatgttgtaggttaaggagccacactctagggacccagattgccttaggttttccaattcccggggtcntgcccttttaattatt

SEQ ID NO: 137515 - DNA, 491 bp, Homo Sapiens
  misc_feature (15)..(15): n is a, c, g, or t
atgtttctttaaganagcaatatctatttctattcataaaagcaaaagaatatttgtattgattatcagcacattaaataacaagtagtatgattatttatgttatatattcatttaatttaaacaccatcttagttgtacaagtaatattgggtcattattaattctacttgtggacaatgtatttttgaaatacagttttaattgttttcccattttttcataaaattgcctgcatttgttttcaaagttgtgctttatgctaataaatttgaaattgttgaaaccttcaattgactggtctccatagaatacattacttttaactgagaaaataccctctctacatgcactgaagtacctagtaatcgcaaattattttttgctaaatacagcatattctcagataatggaaatatattgtatatttcaaaaaaagctagaggaaaataatttgcatgtcctcaccacaaaaaactgatacacgtgcc

SEQ ID NO: 137516 - DNA, 360 bp, Homo Sapiens
  misc_feature (18)..(18): n is a, c, g, or t
aaataaataaaataaaanagaaatttcccatagttccttcagggttttccctctgaagaagaaagagaatacataatgtcagttacaaatggtatatttaaggttttaccatcctgagatttgacgaatttataattatattaaatttacaggtgtgttttatcattatcttttgaaaaataataaactctaacaataatttccatgcctaattgttttccacactattgcatatagtcatatatgcctaatttttaactagaatattatatattaattagctttttagtgttattatatgtattttaatgaattataaattccttagaaggcctacaataatttttactttatagtaga

SEQ ID NO: 137517 - DNA, 810 bp, Homo Sapiens
ggttagttgataataagcgaaggctttaaaattttttatttgaaagaatttgttaaattctactatgggtcttggaaataacccatagtagaatttaaaactaagagcatactttccaaaatatggtctgaagaaaacctctatcatatggcaaatgaagcaaactgaaaaagcatgaaaatagaaatcacagaataagaatgatttgcacacaccaagagtttgagaaacatgctctaatgatggaggctggcttaataagatttggggttttcaatgcaatagaattcttgtagtattgtgaaggacaaattccacaagagagattagaaggggcacacgtggctagaagatactgttacagaacaaatgagaagtctggaagattaaaacttgaacattaacagtagaaaggaaggaggcatgataagcacagaaaaggtaaagaactactggaactattctactacaacacatacattagctcatatgcaatcagtaaataagggaattatgtcagtacattcagaaatcacattggttcatttccaatttttcctaaaatgttatttagtttttgcatttgcaggtaacaacagttaaatacagctagccctgagtagtgccaccacttctggtcacctttactgtttttaaagggaaagttctaaatttaccaaattatttgtttaaaaattttaacttatctttaagcacactactatctttttattaggtttacattagtgcttaaattacaaagatgcacagatttcaaatggtctgctcctaatcctagttttccctcgt

SEQ ID NO: 137518 - DNA, 571 bp, Homo Sapiens
ttgaagtctagattctatttaagtgatactatttgtctatgaaaaatacaatgagctatggtgaagtgatttgtgtaaatgatctcattcaggaggcactgaagggacagacacttgtcattgccaagtaagtcacatttaaattccctcaagccttgagaaataatgtgagggaaagtgcaaaaatagcacagtcattcctttggactaagtcaactcctaggcctcctgagagcactgtagctgtgtgttcatctctatgcaaagagaaataaaaagaatcaactatatttgtcacagggtactttcctatataccagcgtacacctctatcaatacattttatgctgagactttcggtaaggaaagactgaccatacacactgcctcatgcacagatatagacacatattgaagatactttctttcccctgcaatgcagaaaattgcatgagcacacacaaccacactaaaccaaccagaatgaaactagaggcagctgtatctgattgaaactggtgagaattgagattgacagagttacagggctaggaggttaatgagtccatac

SEQ ID NO: 137519 - DNA, 276 bp, Homo Sapiens
taggagtgataggaatttctttaatttctacagaaatccctctaacagtttagtggagaatgaaatagatggctgtgagaattgagagcatgaacgtgtgcagactggtggagaagcccaagttttggcatgagaaatacagtgaaaaatgcagtagagtaaatggagtgaaggacacttgcgagaatgcggatcggtaggacgtggtaagtaactgtggtgaaaaggtttttgatcactgagaggtaagcagaagtctcctggagagggtttctt

SEQ ID NO: 137520 - DNA, 1154 bp, Homo Sapiens
tttaagatttttttccacttttatttcttcaaggatgaggtaaagacactgtcaggaccgagtatttaaaatgtgtttggaacagagacacacaattgggacagaggaaaaaaggattcatcttgtgagtcatcaaaagtgctttatttgtaaagcccggctcatgactggagtgtattgttagcactaggagataacagggcaaacgtcctcactctgtccaaatggtttatcaacagaaataaatgacagactgtttgttatagacaaaaataaaagcattctgtaaacttctaaaagcatacacagattggcccccaaggaaacagttactcaaataatgtatgtgtaccttatctttacttcagggtctcatggttgtggtcttgggtcaaaccacagtagaacttcacaacacaaaaactgatctgatgccagaattaatggtgcagggaaaaaccaaatcatagtatggattactttaaatacataaaagatgaatctgtacactacgtgacagtggtgttaacactggctgctgaggataccaaatctacataaaatgagtggacagtatacggagggcacgactgctggcttccaaagactctgtgaactagatccacatacacggggcacaactgcaatctggacagccctgaagtaaagttcctggaaaaggcagtacggcagggagatctgttgagttgcaagtaataattaaagggtcgatttttgtttgtttgttttcttttctgaaactgcccacaaaaatcatatcatgttttaaacaaggagtttcaaaggcatggctttagcgcagcatgtaagtggataacctactctaagcaagactaatatttaagctcaatgccttttggaaaatgcaggagagttggtagatacatgatctaggttggaaatttataacttgattaaaaacaatcagcacagtttagggcaatgaactttcataaaccagactggggcgaaatctctttttaaaaaaatcaatcattaggttgataaatgtacatttggaggaaaaaaaatccttttccttttattgtgaaagactgtctaccatgtactttgactaaaacactcacgtaaaaacatggctgcaggatacgtctcaagatatgacaaacgtt

SEQ ID NO: 137521 - DNA, 447 bp, Homo Sapiens
  misc_feature (265)..(265): n is a, c, g, or t
gagtggtctttgttctcaaggaattttgtttgttttgacttctgtgtgggttttctgaaggagaggggctttcctatgttttacctaactcagaattctctcagggcagggaagtgttcctcaaaaacattgagaggcaaaagaactagcactgattcctgggacaaaaaagaacaattgaggcaataataaacacaccaaaatctagaaggaaaagctgggaatgagaattttgttttgggaatcaatgctttaaaaagttctncacatataacagggaacctacacatacccagggtaggatgcatggttggaaaagacctgataagaccacaggctttcaactttgactagtccttacacaaagtgcaagaagaaagagaaagctaaggcaaacttgtaaatgccctgattaaatattagagtgtgccccaacccagaaccaac

SEQ ID NO: 137522 - DNA, 424 bp, Homo Sapiens
  misc_feature (66)..(66): n is a, c, g, or t
  misc_feature (76)..(84): n is a, c, g, or t
  misc_feature (88)..(162): n is a, c, g, or t
tggccatggtttggccacctatgtaacaaacctgcacgttctgcacatgtaccccagaacttaagntataataatnnnnnnnnncacnnnnnnnnnnnnnnnnnnnnnnnnnnnnnnnnnnnnnnnnnnnnnnnnnnnnnnnnnnnnnnnnnnnnnnnnnnntaaagaaaagactcttgtccctattgaggtgttgggaagcaaaatggaaagctggctccatagttccctggaaatgtcaagagtttgagcacttgaggcagctccaggaaggtgggggtacaaatggcaccttctctacctgatgctgggaaatcaggaaagcagagattgcatgcgggatggacaggacttacgtggcctggaagcaaaccaaccaatgtagctccggaaacctctgccgtgtatcttcattaggttgtag

SEQ ID NO: 137523 - DNA, 648 bp, Homo Sapiens
  misc_feature (73)..(73): n is a, c, g, or t
  misc_feature (102)..(150): n is a, c, g, or t
  misc_feature (181)..(209): n is a, c, g, or t
  misc_feature (213)..(213): n is a, c, g, or t
agacttgtctctactaaaataaaaagacttagccacctgtggtggcatgtgcctgtggtcccagctactcagnaggctgaagcagaaggattgcttgagccnnnnnnnnnnnnnnnnnnnnnnnnnnnnnnnnnnnnnnnnnnnnnnnnnagcctggctgacagagcaagaccctgtctcnnnnnnnnnnnnnnnnnnnnnnnnnnnnntcanagagctcatagataagagagtcaacaacaggagaaagccaattcaaaggggcataggacaggtagtcactgaaagaaaaaacaaatgctagactatactagaacaaacaaaaatgctagactacgattactaaattacataaaaactggttaagtgccgccatagggtaataaaactaactgttgggttgtagtctgtttaccagcctcacaacatctgcatctctatgggacaaaggttatttgcacttatattacacaatgattatttgcatcactatctggttttctacaatttactttctgctcttacatctttaccaattatcactatctattatattgcatatcttatatatttactttgtttgctgtcttctccattagaacattttcccacttctgtacactgctatatccccaatgcctagaacac

SEQ ID NO: 137524 - DNA, 681 bp, Homo Sapiens
  misc_feature (596)..(596): n is a, c, g, or t
aatttttgtttcccggatgatcgacactctggacattgggccagccgacacgcgggtggcagtggtgaactatgctagcactgtgaagatcgagttccaactccaggcctacacagataagcagtccctgaagcaggctgtgggtcgaatcacacccttgtcaacaggcaccatgtcaggcctagccatccagacagcaatggacgaagccttcacagtggaggcaggggctcgagagccctcttctaacatccctaaggtggccatcattgttacagatgggaggccccaggaccaggtgaatgaggtggcggctcgggcccaagcatctggtattgagctctatgctgtgggcgtggaccgggcagacatggcgtccctcaagatgatggccagtgagcccctagaggagcatgttttctacgtggagacctatggggtcattgagaaactttcctctagattccaggaaaccttctgtgcgctggacccctgtgtgcttggaacacaccagtgccagcacgtctgcatcagtgatggggaaggcaagcaccactgtgagtgtagccaaggatacaccttgaatgccgacaagnaaacgtgttcagctcttgatagtgtgctcttaacacccacggatgtgagcacatctgtgtgaatgacagaagtggctcttatcat

SEQ ID NO: 137525 - DNA, 393 bp, Homo Sapiens
ccctttttaaagctatcaacagtccctcagctggccaacctaataaatgcaaagccatccccaaactgcaaatgctaagcccatacccaagaactcctgatcatgaaatacaaggatcaaaagaagctttgattcaagatttggaaagaaagctgaaatgcaaggacacccttcttcataatggaaatcaagtgggcaagatgtctattttgtacaaaaggccaattaaactataaaatctaattttaataaggaagttctagctcacagatctaggtccatatatcaacaaggaataagattatctaaaaagaaggaatatttgggccctattccatttctctctgcatgaaatcacctcttggtttacagtagtaaaagaatgaagcaaat

SEQ ID NO: 137526 - DNA, 511 bp, Homo Sapiens
  misc_feature (486)..(486): n is a, c, g, or t
ttctatttctttgtaaaatagctcactagtttctggatatttcaaaatttcatttagttatctatccacattttcttgtgattccctaaacttctttaagaggactattctgaattttgtcatatatttcatagatctttaaatttttctagctctattactaaaactttgtttgtttcttttggtgatgtcatagttctctgggttttcataatccttacatctttacattgatgcctgcatataggaggagacctcccccatttgcctgttccagcttttgctggtggtttttggtggtgttaggcttttactacttaacactggagcttaaccgccattctgcgattgcttcccggattgcggaagacttacagtgagcattggaatgtaaacactgcacaggaactgaattgttgtgctgcccttgtttcccagtctgagaaagacttaagttagtgccactacttaatcaccagcctttgngttgtttccaggtcaagggaaggct

SEQ ID NO: 137527 - DNA, 192 bp, Homo Sapiens
cttcatggtgagtctctattcctctatgaattttgttttattctggcacttcatgatatctgataagagttggaccctctcaccactccctacatttattctctttattgtttttctatccagactctgctgatctgagttgtttggtgaacacaacacatattccacattatggatttagtttccttggag

SEQ ID NO: 137528 - DNA, 222 bp, Homo Sapiens
tatccaaattcatctttacacagctctggagtcctactttcttttagctgtgactattatttaaaacccaaacaagaacagctgtgctaattgccagggtgtcattgtttctaggcctatgcatatatgcctatcatatgcatacattgttttacactattatagttcatgcttttattgttaattctaatttcttaaagccccagaggattcttccctcgt

SEQ ID NO: 137529 - DNA, 497 bp, Homo Sapiens
cagaatgaatttctaaatgaaaatctgttgtcaacagctcagaatccttccatggtgtttcactgcttatagcagaattccccaagtgaggttttctagggttttcctacaaaaggggtttggtcctctatatttccctgcttgggagagctttaacttggcatctcccaaattcatttgaccgtgacttttcgtttttttgaggaccacatcttggggactaggaagcacaatgtggtaaagtaccccaggacccagtggtctggcatccatcacctggcccctcctgctgacccgtccagagtcttatctggtcgctaaccttgtacatttggctgcagtcccatgggactacttgtccccttactttttcagctgttgacacttctgttcatatgaacttgtggtttctgtaccaagaacatccagatcccttttccttctggtcaagtgttacctcctttaagatgtggctgaagcaacacctccttttcctt

SEQ ID NO: 137530 - DNA, 323 bp, Homo Sapiens
  misc_feature (209)..(237): n is a, c, g, or t
atgagccaccatgcctggcccaggttattcttaatctcaccttttagaggtaggtaagtattttgaaatatttttattccagacattttcctatatatgtgtatttatataagtgccaaaataggattactctgtaatactgttctgtagcctgtttcatttggatataaatcaagcacattataaagatatatctgtacagcacagcnnnnnnnnnnnnnnnnnnnnnnnnnnnnnttttcgttggctcttcagatgatctctaaattatttttgtacaaataactttgtgatggcattctcatcatcaatctatatctttg

SEQ ID NO: 137531 - DNA, 280 bp, Homo Sapiens
  misc_feature (30)..(30): n is a, c, g, or t
  misc_feature (65)..(65): n is a, c, g, or t
  misc_feature (93)..(93): n is a, c, g, or t
  misc_feature (135)..(135): n is a, c, g, or t
ccttaagggggcttttgggaagttgaaggnacccccgccctgggatgctggcttgaagagcctgnaacaagagttcaactccctgcccgtgcnaaaagcagcccaagctggttcccagcactcaactcaaccccnaagttccccatggctccatttgctcaaggcgttcctttccaagcaaaggagttgaagagtggcaggctgaagtaaacaaggtacccctgtctcaagtcccacaaaggggtcagggaaatatcctgcttcagtgtaatcacagtac

SEQ ID NO: 137532 - DNA, 444 bp, Homo Sapiens
  misc_feature (434)..(434): n is a, c, g, or t
tccttgtttttatgtaagcagattaattagagaactaacataacgccagtctttgggcttttgatcctatcctgccaggacccagacttggagatgtattaaatggattcttccttttctaaatggaagaatctgcccttctcggcttcatagctcttctcaaagtctctgtcttggaccctcccgttagttactgagaatggtatactaacatctgagaaaggttggattcctcctagggacagaaaatccacatatggaaagtgcaaatcctgtgccgggtaatcacgaaagcagttgcagtagcattggatcatagagccccaggagacctcacaattcagcccccttcctggcaacactaatgaattaagaggtcagtttggtaattccaaagctaagcctttgtaactataaataaatgcacagaatgnccccaatgta

SEQ ID NO: 137533 - DNA, 675 bp, Homo Sapiens
ctgctgtttattttctcttcttgtcatctgctgtttctgtagcagtttctcttgctttgtcaatgtaatatccttttaaatccctgttaactctcactgaggttgttgattagaattttttaaaaagttttctgtgctttcttgccttgacttaactctttttgaggactgcttggtctcctttacagctcctgattgtcatttataacacctagtcattttccattgtctttgcctacttacagtgaaagtctaggctagtttaaattggtaatttgtattctttaatgattgttagcccccgagtgagcctcactttcaaagctttccttccctcacaccaaaggaaaagtaggagatcttagtattagaggcctacttcatgtatatggcctgttgatgaggatgcctgctcttttttgacgtctggggagagttcccaaatctttttgtattttacttcctggagtctctccaagatgattctctatataatcaggcaaacaaatgaggaaatgtcactgcttggccaaattgctttcctttgtgcccttgcttggctggaattctctcttctagccctctcactccttgtggtgtttggtgggtaacctcactatgaaatttcacttccatttctggtagaagattagtttaaaaactttcaagtgctac

SEQ ID NO: 137534 - DNA, 413 bp, Homo Sapiens
  misc_feature (370)..(370): n is a, c, g, or t
  misc_feature (380)..(380): n is a, c, g, or t
ctgctgtatagtttctcttcttgtcatctgctgtttctgtagcagtttctcttgctttgtcaatgtaatatccttttaaatccctgttaactctcactgaggttgttgattagaattttttaaaaagttttctgtgctttcttgccttgacttaactctttttgaggactgcttggtctcctttacagctcctgattgtcatttataacacctagtcattttccattgtctttgcctacttacagtgaaagtctagggctagtttaaattgggtaatttgtattctttaatggattgttagcccccgaggtgagcctcactttcaaaggctttcccttcccctcacaccaaggggaaagaggggagaacntagggtttangaggggcctaccttcaaggaaaagggggccccg

SEQ ID NO: 137535 - DNA, 653 bp, Homo Sapiens
  misc_feature (81)..(89): n is a, c, g, or t
tttttaatttgtaagtcttctatatttgtttttggtttctccttcccacctagaggatagcattatcatgaatttctttcnnnnnnnnngagatggagtctcactctgtcgtccaggctggagtacagtgagactctgagcatgaaaattggacatagtcgttgtctctatatctttctttcccaatatctccattttcactggtgaattgggaaaattaaatgaaaaatagtctaaaaagtcaggtaaataagtagctgccccatgaacaatacccatcacgtagaaagctgcagagttttcattttcactgaacactagacccacaaactcttctgcaaacctctccatctccataggagacaggtgggagagttcgttactgtaggcatggataaccgatgcacctccattaggctggtgctctatatgaatgagttgtttaaattccaaaagtgtccaaccttttgaggttattctgaactcgtggctcctttaatgagacaaatggaaactcactgttctctggaattttggaatcatagttcttggtatccaaattcttcccaacgtaatcttttatgttatcatttatggattcctttggctgcttgatcttcaacatcagttagcaatcctgagcagatgaaaat

SEQ ID NO: 137536 - DNA, 503 bp, Homo Sapiens
attgaactttctgctctttagaatttaaacatttttctttatatctttaactgctgaaactccagctgagggaacagtgggaggggaataaaaagatggttaaagtcattttgtggactgtgagggtgcatgaagaacatgttcttcaaactcagttccacatttaagctgcccagcgagccttgcccttgctattctctctctccctgaagccagaaagaagaagcaggcgactctccaaaggaccccatcttacctgtcacatcacagatgtacctttttagcattctcacaattgaaataggattcagagccctgaaacctggaggaaggaaagaaaactctcttttatttagtttccatcatacaaggatgttataaatatcccccatctttaaaaagatcctaagatccctcttagctgttgccaattactctgctcccttttacaacagagtttcctagcattaacggttaatggctgtttccgtttaccctcgtcc

SEQ ID NO: 137537 - DNA, 550 bp, Homo Sapiens
agtacagtgggggtgatttccaagaactctttgactaactaaaggttataaagattttatgttttctcttaaaagttttatagttttacatttagatatatatgatttattttgaattaatatttctgtaagatctgttttaggtcaggtttccttttttagatatggatgtctaattattccagcacctttgttgaaaacacaatctttctccattgaattgccattgtacctttaccaagaatcaattggttatatttgtgtaagtcgatttctccatgacttcctccttccctggggttcccctttttacttttccagccacagagatgagacattagaataggacgtacttcctgtgactgcttgcatttcgggccaagaggcagaaagacagaggaaaaaagcagcagatgtttgctcctacatcttgagatcagagctcctctgatcagagaggaaggttcctttccctcagagtatatgtgactgttgtccccgctgtccaccaccaccttggaattgccttggattgggaagcaagagaatt

SEQ ID NO: 137538 - DNA, 632 bp, Homo Sapiens
  misc_feature (106)..(383): n is a, c, g, or t
  misc_feature (389)..(397): n is a, c, g, or t
  misc_feature (510)..(510): n is a, c, g, or t
tggtgggtacacatgtttatttttagtccttgaactgtatagatacctcatatacatactcttgtgtatgggatgtattttatttatttatttgtttatctgagannnnnnnnnnnnnnnnnnnnnnnnnnnnnnnnnnnnnnnnnnnnnnnnnnnnnnnnnnnnnnnnnnnnnnnnnnnnnnnnnnnnnnnnnnnnnnnnnnnnnnnnnnnnnnnnnnnnnnnnnnnnnnnnnnnnnnnnnnnnnnnnnnnnnnnnnnnnnnnnnnnnnnnnnnnnnnnnnnnnnnnnnnnnnnnnnnnnnnnnnnnnnnnnnnnnnnnnnnnnnnnnnnnnnnnnnnnnnnnnnnnnnnnnnnnnnnnnnnnnnnnnnnnnnnnnnnnnnnctacannnnnnnnnaacttttaaaaagtatccggtgataagatggaaagaaatatgagggtcagggtcagaagtcctttttgcagtcagaggggctgtgtctctggacagggttccaatgggcatgnggtgttgcaagttctcctgttcatgactctgtccaaggagtcctccaaggcctgttcacccagaggatagcaccgagtatgctcaggagcagaggcacctttcagagtgggagaagcaggaa

SEQ ID NO: 137539 - DNA, 533 bp, Homo Sapiens
tgccacacaacttgtggttctgacaccaaattgatagttttgtttcacatcaaattggacacattgtgcattcattaagatgtgcccagtgcttttcaagggggccaggaaatcaccttttaattcttaatcaaaaatcatagtaagatgtttattttcttaatcttcaaaagccactgatttgactgactcgtccttctaacaaatctttcctgtgcactgttgtgggccagctgtcactctagggctgggcattcaatagtcgtgtggtccctgctgtccctgagtgttgttcgtgttgggagggggtagtcagtgtacgtacacggatacacagacatgatggtttcaggttgcgataagtatcatggagaaaagaagactgggccacggggatggaggagctggctctttagatggtgggtgtggagctggccccagcatggactcctgggaacagcggaggagccccagggcaaccctgttgctctgccttatggtcctggtggggaaagtgggagtacactgggggc

SEQ ID NO: 137540 - DNA, 522 bp, Homo Sapiens
attttaatagctatacaatataaccagcaaataaaatccatgttttcatggatattattgcttagagttagttaagttttaaaatgtgatttaaaggaaaatattaagtactagtacaagagatacccagtatgacagaaatgatagtagaaggcaaaagacaagtttaagaaatgctggtttgtgtcagcagtgggcagaaaattggggactcggggctgccatgagaatgataggtgtttgatcaccacagctataggagttctttgaaagtagatctggacattttgaaatagtcaaggggaggtgtcctcagggatgtcataactgttgacctcaagaccaatgcatcagttagaaaaacattttaaggatgctcagcactgctatgtatcacagggtccctccataggacatacatacttgatctgctagcgtttttgtcatacgttagaatgaatgaatatgtgttggaatgtcttgacacagttaacctgaacacatacagctggaatccccctg

SEQ ID NO: 137541 - DNA, 617 bp, Homo Sapiens
ttaatttgtgttgtggggcagtgtgttccatggacaagatgatggatggaaagtatgccttctggtcagaaaaaatatttgaaaattcccaatttatattaatgtaataaagaatctgagaaatgcagaaaagaaatggatttcccaaacatgctaagctatgggaccatttccttaaataatacagcctcgtaccatccctttggattaacatacctatatttccaaacacattttgggaaatactgatatatagagaaggcttttgttctgaataacaaattttattgatttccaggtgcttttgaaatacagagaacagtggtaaacaaagaatttgcctccagtaggaactggaaaactaacagtcctaacccctgctaatatcgacttagtcataggacagaggatgggctcaagcttacatctgctctttgaaacacgctaaacaaataatagtttaaatgagacattgctgagtaggaaatggctaaattacaggtaccaatttttaaaaagtgacgtctcaatttagaaaataaacaggaaatagtttctctgttttcaagagaatttcattacatagaagcctcttaagcagaagttccctggtatat

SEQ ID NO: 137542 - DNA, 697 bp, Homo Sapiens
  misc_feature (89)..(152): n is a, c, g, or t
cccgtctccactaaaatccaaaattgccggccatgtgccggcacctgtatcccagctactcagagcttaggccggagaattgcttgaannnnnnnnnnnnnnnnnnnnnnnnnnnnnnnnnnnnnnnnnnnnnnnnnnnnnnnnnnnnnnnncaccaacaacaaactcatttcttcaataaaattcaagaatgcacatgcactgaggcttttgtttccaagcaagatgacaggactaatcgcactgaccgccacagccacacacacaaatatctgatggggtaactttataaacacagcatgggacatccagacaatggactattactcagtactaaaaatggagccttttcaagcaagccttgaaaagatgcagaggaaacattattaagagccaacctgaacgttgctacctactgtatagcacgctgtgtgagtccaacattttgaaaagccaaaaacccgggagacagaagaaagatcaggggttgccaggacttagggggagggagggaggaacggcagagcccccggaggatttttccagcagtgaaacttttttgtacgaccctgcaaagatggatccctgtccctttatgttgtccaaaagctgcagaatacccaagtgcaagaatgaaccctaatgggaactatggactttgggtgataatgatgtgtcaggtaagttcctcaattat

SEQ ID NO: 137543 - DNA, 440 bp, Homo Sapiens
  misc_feature (11)..(11): n is a, c, g, or t
  misc_feature (22)..(22): n is a, c, g, or t
  misc_feature (54)..(113): n is a, c, g, or t
  misc_feature (131)..(147): n is a, c, g, or t
  misc_feature (385)..(385): n is a, c, g, or t
ctgtaatcccnagctacttggnagcctgagacaagtagaattccttgaaccccnnnnnnnnnnnnnnnnnnnnnnnnnnnnnnnnnnnnnnnnnnnnnnnnnnnnnnnnnnnngaagccaactccgtctcnnnnnnnnnnnnnnnnnttagtcaggtcggtggcacacacccgtaatccccagctactcaggaggctgtggtacaagcccaggaggcagaggttgcaatgagccaagatcgtgccactttaaaggggacagctgggtccttggaggggaaagagcctccataggcgggtttctcccagccttgggggcgaggcaaaccagaacggacctgggccacagaagtcgttgaggaccctctgtccttatcagaaacgantctgcctggatcagttgggaataagtcgcttgaattatccgcgttactctttttg

SEQ ID NO: 137544 - DNA, 554 bp, Homo Sapiens
  misc_feature (538)..(538): n is a, c, g, or t
aaattattaactttccttttcttaataattcctttaccccactgtgatctccgccttgattttctccgaacccgaaatgcacatttatttgcagagttgtgccacacatccattggatttctttgtttgtgccgaaatgcctcttcgactctagtttctgtcttccgagctccagtactatgaggatttatttgttctgatgttactgataagcctctttttattcttgcttccttaatttcctcacaaagtttattaaattctggatctaattcagctgcaatgatagcatgtgcagtgtccttcagggtacaagccctgtgcctaattattttatctcctgggtccttatctggattatactctaaagcattgctacagatgaggtcaatatctttcaggaaatcctttgcagtcaggtaattatgtttatcaattttagttattactgttgataaagtccattggttccttgattacttcaagataatctgaaacctcttcatatccaccggtttgctgaagatgttaaagcgtntatctgtggccagcct

SEQ ID NO: 137545 - DNA, 318 bp, Homo Sapiens
tgatacacacaggagacagggaaatactggatagaagagggcagttccctggcaaaggcccaccctcaagcctggaaacctgcggccctaaatgaggacaggcattcctgttttcgcccccaaaagttgccttttgacctgccatgctcccctatcctgtacccgtataaaccccaaaccccaggctccacaagcagatgagatgaacagaagagcagaatggcagaatggcctggcggagagaagaggagtgtgtgaacacggagaagagttcggctggggacagttggagaggagattggccactgaatggccaaa

SEQ ID NO: 137546 - DNA, 582 bp, Homo Sapiens
tttccttctggttgatgaaatgccagggtgaaagggatagccaattggactaaagtacaagtgccactccagttatttggcagagtgcccagtaaaggtccaccacaataccaccacacatctgctcggggatgaacaagggctgactgattgataagctcttgaaaattcttaagctcactgcatcccttcaggtctccaaggaatgctaagttttctccctgttgttagagacatgaagtgaacttagtgttgggagatggaagctggatggccctcaggggctgactcgcagggtgccagacttcaggacatagcggagagagcttggcacgacttattactccaggctgtagaatcctgaaaaagagctatcatgcagcccacacctggtcaactggatgactaccttagtgaaaaggggacaatctgggcctctggcctgccatgtgcacaagcataacgattgcttttgtttaatgtgcggaaagaatatttgatccattccaaccaggcatttgcatcttggtatactgccttaattgccaaagtttgttttaagtctttatcttgtatagtatt

SEQ ID NO: 137547 - DNA, 572 bp, Homo Sapiens
  misc_feature (25)..(25): n is a, c, g, or t
  misc_feature (56)..(56): n is a, c, g, or t
  misc_feature (86)..(86): n is a, c, g, or t
  misc_feature (425)..(425): n is a, c, g, or t
aatgcccaactcccagttattcggnaaaagtgccccaagtaaaggtcccacccaanaaatacccacaacaacatccgcctcggggnatggaaacaaagggcctgaactggattggataaagcctccttggaaaaattccttaaaagcctccactgccatccccttccaaggtcctccccaaaggaaatgcctaaagttttcctccccctgttgttaagaagacatgaaagtgaacttaagtgttgggagatggaagctggatggccctcaggggctgactcgcagggtgccagacttcaggacatagcggagagagcttggcacgacttattactcccaggctgtagaatcctgaaaaagagctatcatgcagcccacacctggtcaactggatgactaccttagtgaaaaggggacaattcctngtctggcctgccatgtgcacaagcataacgattgcttttgtttaatgtgcggaaagaatatttgatccattccaaccaggcatttgcatcttggtatactgccttaattgccaaagtttgttttaagtctttaacttctatgattct

SEQ ID NO: 137548 - DNA, 422 bp, Homo Sapiens
aagagggggtagttttactctgtgctttcttggagcactgaatgattgctctccataatgtagtctctgcaggttaagtatcaattcactctcctaagcaatacctcacaggccattccctattccaaaccatgggctcatggaaggggtttgctgcctgatactacaagagaaacttaagctccttgtcatcatcctctatgaaataaacctgctaactcacctaaacattgtacttcattcacagacaaactagtgaaaactgtttttagggagctactgttaaagctgtcggagcatttgatttaagggtctcagtaaagttatgttttttcagggtggggggttacagatagcttatttaagtagacaaacatctcaaaatccacaaattagaaaaattcctttctgggaagaggcag

SEQ ID NO: 137549 - DNA, 477 bp, Homo Sapiens
actatggttttgaaagctttattaaaatgaagccaaaacattaacaccatttatatgtacaagaccattaaacattttttctatctttaataaatgttcttccatttttgtcatttattactttcctaatttgaaaaattgattaatgtgaagaaacattactaaattaaacaaatgtaaagtttaaatttaattattaaatggttgagtttaaagttgacagctagtttaaggtagaagaccttcataatccaattacttttacttggtttcagaactacccctaggcaaattctcctaaaatagaaactacatgcaagaaaaacacaagcgatgttcatcatttaagataaactttaaaagttaaatttttaaaattaattttaataaaaattggtttgttaccagttagctatataacctagagccaatcaatctctgtgtgttttctcttttgttaatgtgggaccttattct

SEQ ID NO: 137550 - DNA, 626 bp, Homo Sapiens
  misc_feature (388)..(388): n is a, c, g, or t
  misc_feature (400)..(400): n is a, c, g, or t
  misc_feature (453)..(453): n is a, c, g, or t
  misc_feature (500)..(500): n is a, c, g, or t
gagccacaacacccagcctctgcagccttttaaacaaagcaggaaaaggaagatatagaggaggatgtggtactgcagctgatgctgaaaaaacccaagcctctcatatgcagccatctctacccagcctagggttttcctgttgcctaggaaacagtcacaaagcatattgggaaaggttagcattaagtatccagggtgcaggctctgtggcttatctagaacaattcttgacccaagcctgactttacccctatatctgagctttgcatttggctagaggcctggggatttccccccattttgcacatggcagacactgttcctgggaagggaaaaaattaatttgacacaagcaatcaatcccaatggaatgtttatgcacaancagccaagcggnaatggatctttaagggaacacttctgctaggtgatgggaatttaatgctgaanatgacatgtgtcaagacccacatgatcaaagagcacatcttcatatncaagcatgagcaacatatgtgcatgcacacacacatatatgcacagttaagcagcagacttgcccacttggggggaaagtggctggtatatactgccacccgtagcacctctgggtttttttacgt

SEQ ID NO: 137551 - DNA, 440 bp, Homo Sapiens
  misc_feature (54)..(54): n is a, c, g, or t
  misc_feature (404)..(404): n is a, c, g, or t
  misc_feature (416)..(416): n is a, c, g, or t
  misc_feature (421)..(421): n is a, c, g, or t
tttcagtttatttacattctcagtctcaatctggacactcaaattaaggcttcnttgtgaaaagcatcttttgtagggttagttgacatgatacatccctttctttctcagacgcatttcatattgttgggtttttagttttgggaattcaacagctattcctaaataattattggaagttgatatctgagcacaatatgatttactatgtagttcacaattgtcctcttatgaaaatgcctacgttattctgttttattcatagggttgcacacatgacgaaaagtgaaatgcatttgcatgacacagcattcatagggtccgggcacttttgtttctgggacccaggtatttttaaccagctttattggatggaatatattggtacctttggggattgcccngggggagggggnatttngtacctaagggccttattt

SEQ ID NO: 137552 - DNA, 509 bp, Homo Sapiens
  misc_feature (499)..(499): n is a, c, g, or t
agtgctgacttgggtcccattctcaggctgtttctgagactcttcaagccgtgtttacaggttcttttttattctggggcccttggtacagagttgagtcaaaagtgctcagttgccagcacagagcctctgtggtctgtaaaatcctcaagcagtgtcaatccctataaatcccgggctgggctgcactcccaccttccctacttcacccttgccaccttgtcacctgcttctcccaggctgttgtgctcttccatgctgattcacaccctgcttcctgtttacccttccccagcacagaaaaggcagacggcactggacagcccacaactctagagtcagcagcatctctgtctggccgtggggtgctggtaaacatttagccacctgctggaggggctgagccctagcgtttgcaattcctgtgatttcaagctcccggctgtgatgttattgaatggagttgggaagagatgcacaatagcacatgtttataacnatattttcct

SEQ ID NO: 137553 - DNA, 202 bp, Homo Sapiens
ctagcataacacagttttcccttacttggttaacaaggaaagttgaaaaactcttaaagaaactctagcctaaagcattgagtctttcagaagggatttccaaactaaactatgaagacaaatttggacaagaagtaaatttttttcttggttatattcctctgaaaagcatattatttaataaaccgttggtcaatataaa

SEQ ID NO: 137554 - DNA, 451 bp, Homo Sapiens
agttcctttccagtgatttcatttagtttatttatcttctttatttcttatgtgtaggttagattaaatataaatcattggtggtggctcctgttgggtattttcagccagaatacatactagctaggtatgccgtataaactctattgccttacatcaggagaaacaacatccggttgacccatcattagtgatgctgtgcttgattatgggtctagggtcttgcttctttttaataaggtctcaggatgacacaataggagcaggactcacatcaatgcgttccactcattgctaccccctcctccacctccatctcctaccagttctcatccccctgaacagaccttccaagcaagaaagacaaaagggaatgaagtgtgggtaaaaggcccagcaataaaactgggaagtatgactcttttggctcctagtctgaaacttcattcta

SEQ ID NO: 137555 - DNA, 458 bp, Homo Sapiens
  misc_feature (123)..(123): n is a, c, g, or t
tttaagtaccaaacttaaaaattaaccttttatttgagtgtcagcttagccatagggtacaatagaagactaggtagactgctaagattttttattctagcccctggctctttgcaaagcacntgctggagccgcctgggagaacttctagccctgaaaggaaagacacaggcctggctggcttcactactggctgattgtagagacccagggccttaaaacaaacataggcagtagccggggagtggttacaacaggccttaagcaaaacccagtgctatgctggcttcaggtgtgactcagtgcagtacttagttgaaggttggacacaggggtgcttgtgtcattccaccccccagtccaagtaattcataacagagacacagagagagactccatttgtgtgggggaaaggatgaacagagaacaacagtctctgcctggtaatccagagaatt

SEQ ID NO: 137556 - DNA, 411 bp, Homo Sapiens
  misc_feature (396)..(396): n is a, c, g, or t
ctttttatttatctctgaattttctttcagtaagtatgacgtcatacttatgatgcatcattttatctgcccaatacactctctcctttgaggtctatcacattcttctggaaaaataaacaaacgaaaaaccttaatgcatggatgcatttatttgtctctttgcccctacaccaaagctgctgaatatttagaagattttaaaaccaggcagactagtatcactttattggtctccaattttgaaagaaatgtatattctgaccaggcatctaatgttttcctattcaagtttctcctattctctatagttcttatttcaaacttttctcatgctcttcaaatatcccaaactattcccaaatattccaacataattgacagttaaccctaacntcctcctttggagag

SEQ ID NO: 137557 - DNA, 525 bp, Homo Sapiens
  misc_feature (34)..(34): n is a, c, g, or t
  misc_feature (47)..(47): n is a, c, g, or t
  misc_feature (69)..(69): n is a, c, g, or t
  misc_feature (82)..(82): n is a, c, g, or t
  misc_feature (101)..(101): n is a, c, g, or t
  misc_feature (176)..(176): n is a, c, g, or t
gacctggtaaggcccacctaatggtccaggtaanaagggaacccatnataaaacaaaggtccggagttntcctattccggtncccatcgggtatatatggnttatatgtcctatacctatacctatccttgagtattaaattgaaagtaaatttttatatcccagtagggaaagantccctgttgttccttcaaaattgtttttgctattcttgatattttgctctttaatatggactttaaatcagcctaactccaaccaaaaccagacagaggtaaagagaccagagctcccttatttccaccgtgtaaggatacaaggataagatagctgttgtaaaccaggaagagaacctttaccaagaaccaatcatgctggcaccctgatcttggacttccaggcctcagaactgtgagaaataaatgtttgttgtttaagccacccagcctctgggattgttatagcagaaggttctttgatagctatgcatcacccttttatcagattgaaagttctctttttttt

SEQ ID NO: 137558 - DNA, 602 bp, Homo Sapiens
  misc_feature (472)..(542): n is a, c, g, or t
ctgggttaagcattttcaatctttattatttgaaattattgtttcaaattttattacataccatggccctagtattttgtttaaaatatctttatttttctgtaaagaacaagtgtgccatatttagcttttgatagaaaaaattaagaaactatcataaagggaatagctaaaagaaaggttagtaaagggagccatcacaaggagagattttggaaaagggtggtgtcttagtccattttgtgtttctgtaacagaatatctgagactgggttatttataataaacagaaatttatttggcttagttgtagaggctagggaaattcaagaccaaggggccagcatctgatgagggccttcttgctgtgtccacccacggcaaaggtgaaggcagaagggaaaaagagtgtgtgaggaaaagagggagccaaacttgcttttataaccaacacactcctgagataatgggnnnnnnnnnnnnnnnnnnnnnnnnnnnnnnnnnnnnnnnnnnnnnnnnnnnnnnnnnnnnnnnnnnnnnnnagtttcaaacacataactttgggggacatattgaaactattgaaggtgataaccattgac

SEQ ID NO: 137559 - DNA, 457 bp, Homo Sapiens
  misc_feature (103)..(103): n is a, c, g, or t
ggtttattaatggcctccaaagatattaggtcctaatccctggaacttctgaatgttacctttatgtggcaaaagtcctctgaagatgtgattaaatcaatgngcccttgcctaagaagagattacctcctggattactctggtggtgttaaatgcaatcacatgcatccttgtaagagggaggcagaaggagatttgacacaaatacatggaggaaaaggccatgggaagacagagcagactgagtggatggtgctggccttgaagattggagtgagattcggccacaagccaaggaattccagcggccacacaaagctggaagaggccaggaagggatgtttccctatagtttctggaggaagcaagctcttgtccacaccttgatttcagcccagtgatactaagtttgtacttctggcctccagaactgtgagaataaatttttgttgtatta

SEQ ID NO: 137560 - DNA, 515 bp, Homo Sapiens
tgggaaagtacaccgctttctgttatcaaacatttctgttactttgcttttcaagctgaaaaggggagataacttctgtttgctttgagcttttgttgatggttttctgctctgcctactaatcagggttgtattatttaccttgtttaaaaaggttcatctgaacattctctctctattttgaattgtaattggatattaattcactgctgcgggatacgttggtaaagatttttgaaattgcagggaaatgtttctttaatccctcaagtttgttaagtgctttcttataatggagatcataatctccgagttgggtaggaagggatgaaacgggttactgggggatatttttcccttgttgggaaaattgctgtattaaaaaatacttcatccagttttttaatcctttccacatgctgtatggtccttaagaaataagtagattcttagcaccgatttcatgtttttaataaggaaggcattgagtaatgttcaggtcactgtgattcaca

SEQ ID NO: 137561 - DNA, 518 bp, Homo Sapiens
aatttttcaatttgatttattttaaaaactatattttagagtagttcttgacatacaaaaaaactgtgaagatagtatacaggtcttgtgtaccccacactcaggttcccgtattattaacatccaacatcagtatcgtacatctgtcataattgataaacccattataaactaaaatctgtattttattcagattcgcttagtttttacctaatgtcttttttttccattccaggggtcccatccaggggtaccatattacatttagttgtcatatctccttagcctcttcttgggttatgacagtttctcaggactttcttgtttttgataacccttaacaattttgaggagtactgggccctcagttaaggtatttctgatgtttatctcatgatttgactagagttatgggtttcaaggatatttatctcatgattagactggagttatgcatttcaaggaagaagaatgcagaggtatagggccacttctaacacatcatattgagggtatgt

SEQ ID NO: 137562 - DNA, 420 bp, Homo Sapiens
  misc_feature (65)..(181): n is a, c, g, or t
gttcaagtgtttctcccgcctcaggtcctgggtagctgggattacaggcacccgcatcatgcctnnnnnnnnnnnnnnnnnnnnnnnnnnnnnnnnnnnnnnnnnnnnnnnnnnnnnnnnnnnnnnnnnnnnnnnnnnnnnnnnnnnnnnnnnnnnnnnnnnnnnnnnnnnnnnnnnnnnnatgagcactacgcctggcctctccattttctagatgagaaaaatgaagcacacaaagggcaagtaacttgcccaaagtacacagataataaaaggcagaaccaggatttgaaactaagcaatctggttctagagtgtgctcttaactacaacacaatactgctttcattacttgtggatctaattagttcaactcacagaggacaaacttcattttccaactttctttggggggaactg

SEQ ID NO: 137563 - DNA, 129 bp, Homo Sapiens
tcgtcttttaaaatattttattgagatatatttcacatactttttaaattatacaattcaatgatttttttggtataatgacagagttatgcaactatcacgacaattttagaacattttcatcatctc

SEQ ID NO: 137564 - DNA, 137 bp, Homo Sapiens
gaatatttgccctatttccaagtcatggcatttgattgggtattaatcttggcaggtatttacaagaaagacacaaataacattttgaagttgcccctaaaaactgaccagtttcagacagtaatactactagactc

SEQ ID NO: 137565 - DNA, 422 bp, Homo Sapiens
  misc_feature (342)..(342): n is a, c, g, or t
  misc_feature (412)..(412): n is a, c, g, or t
agttttaatttacataaaattttattaaaactatattatagtttaatgtgtaattaatgtaaaacattaataactttatgtttcacttaaggtaaattcttaaaaacctttcatagtagttaagtgtacaccactatggatgtgtataaactgtgtccattgtgtggacttgtgatcatcatttttaaaaagacctacatgcataaagatatacagaatgaggttgaaacttactttgggtcaccataaccaccacaaagtttttctcatcaattttatattctttgaggagcaggtatccatcattgaggggattttgccctaataccattaggggggganaaaaaaatccatttagggggccattaatcctttcctccttaccacttcaggtttaaaaccacctttcctnctcgggaaat

SEQ ID NO: 137566 - DNA, 428 bp, Homo Sapiens
tttttttcttttgttttaatttacataaaattttattaaaactatattatagtttaatgtgtaattaatgtaaaacattaataactttatgtttcacttaaggtaaattcttaaaaacctttcatagtagttaagtgtacaccactatggatgtgtataaactgtgtccattgtgtggacttgtgatcatcatttttaaaaagacctacatgcataaagatatacagaatgaggttgaaacttactttggtcaccataaccaccacaaagtttttctcatcaattttatattctttgagagcaggtatcatcattgagggattttgccctaatacattaaggggaaaaaaaaatccatttaagggcataatctttctctttacactttccggttaaaaccaactttcctactcggaaaatatggaata

SEQ ID NO: 137567 - DNA, 1465 bp, Homo Sapiens
  misc_feature (1231)..(1231): n is a, c, g, or t
  misc_feature (1267)..(1275): n is a, c, g, or t
  misc_feature (1352)..(1352): n is a, c, g, or t
gattccctgcttgtctcgccgaccccctcgcgccttctgcagactccgtggctggcgctcggcgcgtgaggaagcacggcggcccgagttcgcggggaaggccgcagtcgcggaggcagcggcgcggtccggggcacgggctgggggagaggccgctccgctgggcgaatgtgacaagcccccacccccaccgccttcctccccagagcgcgaggagcgcgggcgaccccggggccccgccaggccacagaccccgcccagcggccagcacccggcgcaggcccggcagccgagctgcgcggcggcaccatgcaggtcaccctgaagaccctccagcagcagaccttcaagatagacattgaccccgaggagacggtgaaagcactgaaagagaagattgaatctgaaaaggggaaagatgcctttccagtagcaggtcaaaaattaatttatgcaggcaaaatcctcaatgatgatactgctctcaaagaatataaaattgatgagaaaaactttgtggtggttatggtgaccaaacccaaagcagtgtccacaccagcaccagctacaactcagcagtcagctcctgccagcactacagcagttacttcctccaccaccacaactgtggctcaggctccaacccctgtccctgccttggcccccacttccacacctgcatccctcacttccagccatccccgacagcattcttcctgaatctgccacctggctagttgcaacctccaaccaaagacaaaaccctggcagcaaaaagtccagccagcaagaccacctaagtgcggccaccctagcccccaaaccagctcatacctggacccaggttaccactcccgggcgtggaaactcctctttctttctcggggcccactacccccccctctttctttcgaccaaaaaatgggccaaataccgtcaagggtcgcggtaaaaatttttgggtatgcgaacaccggggggcttttccaaatcgctccgtcttaacacggtcaaggacaaaatattttgggcgagaccacgcacccttggaacgcagaattccccccctcgcttacaaattgtgggggacccctcacaccgcctacacccctccccagaactcctctaatcgtctaactctttggcccacaccccccctatatatagacaagcactccagaattttttcacacaccgaaacgccccccttggtgtcacatcaaaatccaanacggggcggaaggtaccctcccgccttttttgaaannnnnnnnnaaaacatccacccttgcgcgacagtatatataagacaaaaaagcccccatccggctcttatccggggcattgaaaanccccccactattataaaagctcgaggacttatagtacacccgcggggcgccaatactccacctaccactgtgtttttcacgtcgcacacgaggcgcgcgctatatctctctat

SEQ ID NO: 137568 - DNA, 518 bp, Homo Sapiens
  misc_feature (209)..(373): n is a, c, g, or t
  misc_feature (403)..(403): n is a, c, g, or t
  misc_feature (431)..(431): n is a, c, g, or t
  misc_feature (438)..(438): n is a, c, g, or t
  misc_feature (446)..(446): n is a, c, g, or t
  misc_feature (462)..(462): n is a, c, g, or t
  misc_feature (478)..(478): n is a, c, g, or t
aaggtagttaaatttatccatcttttctttcaggtgggactccaattattctggttataccactgcttagagacaactagtggaactgaatgtgagtatcacttcaagcaattaagaaaaagagagagttattttggtcggttttacaaagaagtctgaataagaaggactgtttgggtttttgtttcttagaaatttccatagttctnnnnnnnnnnnnnnnnnnnnnnnnnnnnnnnnnnnnnnnnnnnnnnnnnnnnnnnnnnnnnnnnnnnnnnnnnnnnnnnnnnnnnnnnnnnnnnnnnnnnnnnnnnnnnnnnnnnnnnnnnnnnnnnnnnnnnnnnnnnnnnnnnnnnnnnnnnnnnnnnnnnnngcagtccccagccacttgggggagggcttnagggcagggagaacgggcattgaccccngggggcnggcttttnagggccagcagagatncccaccacttgcactncagcctggggttacagagttagactttagtctccaattaa

SEQ ID NO: 137569 - DNA, 442 bp, Homo Sapiens
  misc_feature (150)..(150): n is a, c, g, or t
  misc_feature (419)..(434): n is a, c, g, or t
cgcacctggcctaaaaatttgctagtttttaagtaaactggtcaaatgaattctgggtggctttataccagaataagttagtcatagatcctgagccacacagtatcagaagcctgttcatttgctagaataaatgttttcctacacatncccaagtcctccctacagttggccggagaaattgctgaccctaacagctgctaaccatctagaaccttatgaatcccattttagataatgctaagaaatgaaacactagaaatgtttgaggaatgtaaaactctcacactctgacagtaatgtttaaattggtatattttattaaataatgtcaaattattctccaaagttgaagatgcatatacttttcaaccagattccaatcctatacgcaagcacatatgtacacgtgtgcacgnnnnnnnnnnnnnnnnttttggat

SEQ ID NO: 137570 - DNA, 427 bp, Homo Sapiens
agggaatttagcacaacccgggtatatgtccccttctctctctctgatttaaagcagatcaaggtagacctgatcttgccaaggtagacctagggcaaatcttcgacttcacttggagagacgtcatgctattgttagatcaaaccatggcctttaatgaaaagaatgcggctttagctgcagcctgagaatttggagatacctggtatcttagtcaagtaaatgatagaatgacagctgaagaaagggacaaattccctaccagtgagcaagctgttcccagtatgcaatccccactgggacctagactcagatcacggggactggattcataaacatctgctgacctgtgttctagaaggactaaggagaattaggaaaaagcccatgaattaagcaaagatgtccgcgataacttagggaaaga

SEQ ID NO: 137571 - DNA, 443 bp, Homo Sapiens
ggtttgtagtctttaatcatgttgtggaggacaggatgatctgtgcctcaggaatcagcttagttgataactcaattccatggctgggccaatttgtaagcagtcatggcacatcccatggaaacctataatctaattatggctgctgcatcagtcctcatccttcatgctgtcatccacagctcctcaccacccatcttacttggatgaaggctctctgaggtatgaagggcaaacatctgatccttccactggaggcctagactgctttccttattctcacagcagccacaagtattggggatcacagcttgaaaggctcttcttgggccgtggggcctgaggcagtcagggacaatttcaggcctttaggtgaaatgggagggcatttcattacttcagatctcacctagtcttgggaggtcttggggcatttttaggaa

SEQ ID NO: 137572 - DNA, 411 bp, Homo Sapiens
  misc_feature (347)..(347): n is a, c, g, or t
  misc_feature (392)..(392): n is a, c, g, or t
gccagcctaaacctatgtattttatatctcccaggaaggttcgctgggcggtgttagcctattacacagtgttgagaggcagtatggttgtacagggccactgcttctcagtgctttgtggagcagaggcagccctggaacagagaactacacaacagtaactcttttcatgacaaacaaaagatcacgtagcatattagtgaattcctcttcatttcataaatgcagacactgatgacaaaagttaagtatttaaccaaggggaccattcaaagatgggttcttaattcgctgggtgcccaccttttcttctgggcactttaaactattttaaccttgaggggganccccatctgtggatccagcctttttaccttaaccccatccatttnttcccatatcatcccggtg

SEQ ID NO: 137573 - DNA, 462 bp, Homo Sapiens
  misc_feature (218)..(218): n is a, c, g, or t
tgatctattataatgtaactgttatcaaccctcaataagtggcttccataactatagctatagttcagactacttttgtcagattgtgaatttccaacttcctgctttagacatctccaactagatattacactggcattttaatctgaacaagtccaaaatcacaccatggttacatgtaagtactggcagtattctaacagaactttctgcttccnatcctctgtctcctttctcccccaccctatcttcccttatcactattaaattagtcttaactgaaagcttaaggatgtggaaaaagatatcaacattatgtaagaaactcccttgcaggctccaattgacttttctggccatatgctctgtctaaagtgtttatgaatataccttgcatattatattagtctttagcacctagctcagtatacttcatagaagatgcttaacataggctcgtgc

SEQ ID NO: 137574 - DNA, 708 bp, Homo Sapiens
  misc_feature (223)..(223): n is a, c, g, or t
  misc_feature (523)..(523): n is a, c, g, or t
ctcgagttgccatcttagagacaactgcgggtctttgccatcaattactctttggatggctttgtctcaggttcatatgggcgaagagattttcaaccagatgttaatcaactcaatccttattgcagagctgctggagtctccttaatcagagcacaggcagcagggaatccagggactgtggtaacaaggggagctgatttaaggtcccttgaaatatatngaccctgattcgacaagactggcagtttaaagcaagatcatattccagcatgtaaacgaatgattagaggagtgaattcatctctttaaaggcttactacactgcctggtacatattaagtactgagtaaggagcagttttttagcctataaacagttttgaagattgggatggggccccagttggaaattctttttaccccattaagtgggaatttaggctagatgagcctaccagtgcactgagattcaggatttagctatcagaaaacctcaatctaatgtaaggacagagaatggnccggcttaggaaaatgtctataatgtaaatactgtctactccttcagccttgtttctcactgtattccagaactctaccttgaccacaaggaaaaacaatcagttcttcctaagtgccaccctctctttcactgtaggatctttgcacatacaatccccactgcttggaatctcgtgccgaattc

SEQ ID NO: 137575 - DNA, 584 bp, Homo Sapiens
tgcggctctcgaggtggtttttgaacaggaaaatcataattcatatcattggagaagtatttattttcaaatatcaaattgaagaaaaactcaatcctcccatgaaaatcagttcgcctggcctccaagtcgtgaggaaatgggtatgcaaggctgagatttctacagcaataaaggagacacacactgggccagagaggcctgccttctgcctgctctcctgcactgaccctttggagggggtctctgtgtgctgaagctaactcaagatggaaagtgaaaccacatgtgccgtgacctttaggttttatgagtagacagtgttcatttgattttctacagaaataatataaattattctttaggtttaaaaaagagcactcataatgcaatatgtgaataatcagtgaggttgatttttcttttttcctaccgtttcatagtctttgtctaactgctagtaaccctaccgagttttatatatgagtgggatactcaatctggccttaaaaagatacacaaagatgggctgtgggtccctgggaaaggggagagttgccctttacagaatcactcgagccctt

SEQ ID NO: 137576 - DNA, 487 bp, Homo Sapiens
tttttaaattctccatgctttatttcatattagagtcagatattttataggctcttaacaaatatgaatttccatttctcaaagtagtaaagttaattcataaatttttaacaaaatcaatcatatcacaagtctctctatagtagggtaaacaaaatattccaagagtatataaatccatacatactatgctgttcatttcaaaggactcatagctcccaactggatggacatttccaatgggttccaagccttcttcattcccacatgtatgttccatcagagctatcagatggagagagttcaaacgaagaaccagctctgtagtctgtatctggtgaaaccaaattattcccagaagtatgttttgtacattcactcctgtcagagacacttatatctatccattcatcagttttactgaaggctttttcattttccttgggggaatcaaacatatcctgtggtggcccattttcatgtttct

SEQ ID NO: 137577 - DNA, 430 bp, Homo Sapiens
cttggactattccacataattgtccatcacagtggcttctccataactttccttcctattcttcttagttgcccaatttcaccctcatcccctccactttcagcaaaaagccttcattcaccaaaaacacagagggcaccaaacagaaaatgtttcaacctctctttcttccacttcaaactttcatcttattctcaggaatgttctttccctctactgtatcactattcctggaaatggtgataaatgtatggcttccttttcaacatccataatcctttttgccttaccttacttactacacttacttgcacctcccaaacaatggtgataatgaatgtcctcatcttgctccttacttaacctgcaggccttcagtgtttcctcatttggacaccttcagtgtttcccccattaagaatgggcctgg

SEQ ID NO: 137578 - DNA, 1156 bp, Homo Sapiens
  misc_feature (551)..(565): n is a, c, g, or t
tggtgcataaacatagcggctggggaatgagggaggaagttaatctgagcggcggggaggggaataaggggtgtggggttatccccgccacggtatggcgcggagtgagtagtattataaaatctttgggcaattggtgtaaaagggggggagagttttttatccaaattgggggaaaggggagggatatacgggaattttcgtttttgggaagacgggaggggcggggaaggcaattattataggggggttggaagaggcggaaaaagagggggaagttcgcccccggggcgaaattgtaagtgggcaaggggggggagaatcgggtagagaataaagtgaattcggtccgaagtttgtcctaaagggggttttttcttttggcgcttgtccattaggccctacggaattgagcccaggaagaaaaatgttttttccgcgcaggggagaggagaaacatttgaaggtcgttctaaagtctcgtcggtgggatggaggaggccttgaatacaaaatggtttgtatatttgggcagaaggggccaaaacccnnnnnnnnnnnnnnncccctttaatgttctccaaggaaaacatgtcacttgtgaaagggtgctcttccctcgagaatgccctttgcttctaactttgtgggaggtagacaggggtgttcttttacgatagtaatagtagcacacgtcctgcagaggaaggtcagaagctcggcggaacaggaaccgcagctttcctccggcttcccagctcctggaaggaaacccgagagcaactgcctgcagccacatctgcgagcagggatgctcacagacggacagggtggcccgcagccacccgcgatgccacaacctgggcttccaacaaggcccttcttttccaaaatgtacttgccacaaaacaacacaaaaacctccttttaagcaaggcaggtttaaggtcagcctgtaaggtgtcagggccttggcagggaaggatgagtgaagacctgcaaagcccggcgttcacgctcacgggactcccgctgcttcccaaacccctattttccagtcggaaaagtccgggttaatacacaaaaggagacgccgaaccacacaaggtgaagaggttcgcccgaaaaacacctgcagaaggcgctcatcccggga

SEQ ID NO: 137579 - DNA, 1035 bp, Homo Sapiens
attaaaagcccattgggccagagggggttttccatggggaaaagtcccgctttttttggaaggagccagcttcaactttggcggtgggaaccatcccaaaagggtccatcaaggagaggaagtcccgacccagtggagcttatcctcggaaccctgttaataatctgggatagctttcttatttagggcctcttgtttcacccaacccgtctccaatgaaagaatgaatagattctggcactgtggtccccgttttcttatgggctggctctccaagttccacaccgtccaaaatttcgactgactggccagcagagtaggaatccgtcctcgttcgggatcgcttgttgcctttggtatttgtgtccatcagcctccagttcagcaaggggtcatagacaaaggcttccagcacggccatgacactgtccttgtgctctcgcagcacctccatcactgtgtggcatgtgattctgtagttgccatccaggcctgtaacctccatagcattggtcaacattcttgttagtctaaatggaatcttctctggaaacttctctcgggtcatagcaacctcaaagcagtccccaaagtcaatgtgcaggatcttcccactcagacggtccagcatcaggttggatgggtgtctatctcccaggcctaaaatatacccaaccattgacatgaccgctaaagaacgggtataattggttcttcggtcaaaccacacctcggagctggggcttttcagccacagcagcttggccaggtcgtccccagctgtattattgacggcatgctcaaacacctccaccttctgcatcagagtcaagtggtcatagtccggagccatccgcaacatgatgcgatgctcgatgttgagaaggatcttcttcttctccctgtagtcccggatgagggcgtgcagtgtgtcacagtggggaacccagccaatgaggcccgagttggtcgactaaagggatgacagcgtatctctggatgctgaggtttttccgaagagatgttgggtcattg

SEQ ID NO: 137580 - DNA, 1040 bp, Homo Sapiens
gggattgccttcttcagactctttttgggagcagctgccttcaaaccctcttttggggcagccctcttcagattctttttcagggcagccttcttcagcctctttttcggggctactttccttagcattgttttcagaagcaccttcttcaaattctcccccatcttctgtcttttcaaacttcttctcatctataggttcttcaaacgccattccagttgcagtttcttgagcattcattttagatgtgctggggtgctctgaaaaatgccttgctctagaaggccctgccctttcggaagcagagacagaatctgaacgcctaaggcctctgttggcctcaggagcattgaggaaagcctcccatcctctcagcctttcctccctttctcttgaggtttcctccacctgataatctgtagtcccatcccatgcctgggcagtgatttgacggccactaaaccatcttccatcgagagtctgaatacaataatcagcttcctctggatcccgaaaggacacagaggccacaccatctgggtgcctatcaaagagaaggagtttcctaatttgtccaaacttcgaacactctactcgaaggtcttctctgatctcattcagcaccaacggatcatcctcaaaatccataggatgaaacatattcttgatgatgacaactcgctcatggcgcatccgggatggtccggctcgcctctcaggtctccaatccaactgcttttgttgcatagacagcttcttcttatagtctttgcacttcttcttcttctttgaggcatcatattctcccttcagttgaaactttgccacctcaacatgtaatttgtagcctctaatttcatcttcatccaaaagttttaatgcaagttccacagattctcttttcaaataacagcaaagaccgtctcctttaagatttccttgattatctttgtaaagtttgaccttagattcttctgtctgagcctcgtgccgaattcgccacccaggcctcgctaccttaggaaccgtaatagttactg

SEQ ID NO: 137581 - DNA, 430 bp, Homo Sapiens
  misc_feature (349)..(349): n is a, c, g, or t
taactcttaaaaatggtcacagaatgccttttaaaacattgtatataatcttcactgtttcaccatctagcttgctaagtcaaatatttatgatgataatgaggtactgaaccacgatggctgttgaggaattggtcctaaaaggacagatcacttcagaagagtgaataactgatttgcacagctgaatcaggagacacaaagatgagactgtgtttggttacattttccaaagtttcattgcattctcccttggggaggctgtgagagagggcttgtatccctcttgtgctaagcagactctactcctaactgacttcaatatttcagcagggtacaccggcgtttnccaagtttcagtgacaccgtcctgcctaaccagatgcggtcagcctcttcacgcccacctggcttgcatcccccatccctt

SEQ ID NO: 137582 - DNA, 380 bp, Homo Sapiens
tcagtttgtaggattttattacatcaaccagaggagaagactgaggtccagagaggaaaacagactcacccaagctccccaccaggcctcctgactcattgcccagtgcttcctgcttgtcctgcctgacctcctcacatgacagggacagaggccccagctcacacgtccactgctgattccgcagaggcaaaagttcagaaaaaccaagccaagtccatttctctgggtgtgcaggcgagcaaattttgtggacagagaagcctgtgtgccctgaatcatgcaaaggaaccaattaaccaattttagcagaagttggaacttgcaggaaccgagcgctctgccaatagctcctccttgtcccctgtgtccccctgaag

SEQ ID NO: 137583 - DNA, 382 bp, Homo Sapiens
tttttttcaaggctgagaactccatctacttggtctttggtatagccttttccaccttcaccactaccagatgtgctgtcctttgtgcaattaggcttgctttgatcgccactacctgatggttttcggcaatgagggctatttccagccgtgcttccatttttcataattatttccaatagtgcgcgggccgagggcagtgggtagagcttctcggccttctgcaggaagcgctgggccttctcgcggttgccggcgttcagggcctcccggcgatactcgacacatttctcagcctcatccctgttcccctccatagcttgctccttcttccgtttcctccggcagcgcagctaagaagggcggaagccgccgccgcccc

SEQ ID NO: 137584 - DNA, 690 bp, Homo Sapiens
tttttcaaatatacctctttgaaagataaatttctgctcaaagggacaatattcttgctggatgcgtttctgtaaatgcttcacagtttgaagacaaaggaatgcaacttcccaaaatgtgcccgaggtggaagtacttcctggctagtcggtgtaaacgttgcaaaaccagtctgtgggtctaagagctaatgcgggcatggctgttgggatggaggacctgctgtggcttggtcctgggtatcgaaagagtctggatttttagggctcatactatcctccgtggtcatgctccaataaattcactgctttgtggcgcgacccttaggtattctgcattttcagctgtggagcccttaaagatgccatttggcttggcttccttgggaaagaagtcctgctggtagtcagggttgtccaggctaatttggtggctgcctttctgggcccagtgggcagggctgtcgaatgtgctgttgacacaggtgggctggacagtgttgagatactcggggttgcccactgcagtgctgtgggggtcctggtagtgtgggtctctgctgggcgcggggttcagaggctgattgtgatagacaggattctgcacagagccagcgggccttttgggaacggactggtttatgtattcaggcactgggaggaaggtgtcgtctatgctgtcctcagtca

SEQ ID NO: 137585 - DNA, 295 bp, Homo Sapiens
caatgtaaggtcaaaaggtgcaagttaaatttttcttaaacgaagaatactatatcccttaaaacaatctattcattaataagtgtaaccgctagcttctcccagccagcaaacaagcttctgtgagagttcaaaagtttcagaggcatagtattcctgctcccagatgttacgggtaagcatttcaaacaaaaatacacacagaaaaccactacctgcccaagtatctcgatactatttgaagtaatgaattgatattctttaaagggcagattttttactcctcacaatatct

SEQ ID NO: 137586 - DNA, 454 bp, Homo Sapiens
ttttgcccatgacatacaggggccctgcagttacttttgctattaacttcccttggtcaagtaacaatctgttcaaatggaagataagtattgctgcagtcttattagagctgccaaattacagctggtaattttaacccagataaaatactaaaaggaacccgttaggttatgagaagggtatcaattattagaaagataatttatcctccaaacctggacacttctcaaagtgaaaaattacactagtaataatcacactgggacaacaggcataaatcagggttgccccaggcaaactagagtatatggtaaccctagttatgaggcaaacctggttctccagaatctcccacattgcctgataaccgtgctcaatataaacttgtcaaaggcaaaataagagaagtggtaacaatgacttctgtctctatattatgcgtgcattaattga

SEQ ID NO: 137587 - DNA, 804 bp, Homo Sapiens
  misc_feature (209)..(209): n is a, c, g, or t
  misc_feature (238)..(238): n is a, c, g, or t
  misc_feature (262)..(262): n is a, c, g, or t
gtagctcatccttagcaccccagcttcccgttatcttccgctctatttttttagaatgtgacggaaacaatttcacacagaaccagctatgacatgattcgaatttaccggactccctataggaatttggccttcgagcccaagaattcggcacgaggagtcaggcaggagccctttctccccacagagctttcaggagcagacagtgncctccccttcccctccctggcccaggacntaaagagcaatagtttgccccttntggaacgacccctgaatatataaaacacacacacaccccgcgcactctcactccttttccaggtttcatagacttggtgagggatcacagcttagcatgggtgagagatgatttaaagcacagggagattcttgtcacattggggtctccaaagctagaatgggatttcatgtgcttggaaacttgcagtagaatcagggactgacatcgcaagttcctctcctctcttcattccctcacagcagattggccggcaccaatcttagtcaagagtggctgtgatcacatttgtgatcaattatgtgaggattttatataattgtcttcatttctattaaggctgaaagcataaactctagaggtgactcagtcaggactgacagtaatgtgataattgccttcattttcaacccaggagtgcctctcacagctatatgactacggatccattagtgaggagcgacacacacacctgtaggcatcctgtgcaaacactttgtcattatcaagagagatggcagtattgaccatttagtttagtt

SEQ ID NO: 137588 - DNA, 1053 bp, Homo Sapiens
  misc_feature (977)..(1011): n is a, c, g, or t
gttgaagcggggttagtgattttagccttgaattggaaaatagagtcctcgaggtgtggaaattcctggaagcgtgggcgtttccgaggcatagatctgaacattagtaaagtcagtaaagttaaagattttaatggggtaaaattcgaataaaaagtagacagattggaagtgtatcagcagtagtgtttgaaaatttgctggattagaatgtgagttcatttcgaaatgaggaagcgatatgtcgaaacacacctattattaaggtatgagttatccaagcgaatatattcagtaaaaatagtgaccttgtgtttttaagatagatatatcttatgatagatgtttctgttctcttagttctcaaacagacttctgatgctggcatctggttgtctgttaaaatatttaccaaatatagcattccagactctattttatttaaaaaatcagcccagatacagtatcagatattaacatacacacattgttgcattatatatttgctttaaaaattacataggttgtatgtatttgatttgagactataaaataaaataatggagtatttacaagctcatttttcacaatttctttttacaaaattccaagaaaataagaaatccttcattgattttctttatataaaatgattgctaatttgtttatacagtagaaatggaagggacaaaatttatatttacagctaggaattccctcccactgtttggtaagacaggaagaggttgacaaggtgttttgtagcatcaactaagatgttttcctaatgatatagaagtaagattgcatattatacatcctgttcatccagtttccacaatggatatgccacaagatataactgatgtgtcagcaaatgagtagatcataacaattgtactcagttgcttttcatagagaaaagacccggccgtaatggccgaattcccgggcatatgtccggtaccgtcgactgnnnnnnnnnnnnnnnnnnnnnnnnnnnnnnnnnnncggccgcttcctcgctaactgactcgctgcgctcgttcccgg

SEQ ID NO: 137589 - DNA, 1286 bp, Homo Sapiens
  misc_feature (41)..(75): n is a, c, g, or t
aacgacgagcgcagcgcagtatgtgagcgaggaagcggcgnnnnnnnnnnnnnnnnnnnnnnnnnnnnnnnnnnncagtcgacggtaccggacatatgcccgggaattcggccattacggccgggacttgagaaaaagtaaaaattagaacactgtatgtagtaatgaaatttcagggacccagaacataatgtagtatatgtttttaggtgggagatgctgataacaaaattaataggaagtctgtaggcattaggatactgacatgtacatggaaaattctagggacaggagcatcattttttccttacctgataccacgaaccagtgacaacgtgaatgctgtattttaagtggttgtatgtttattttcttgagtaacaaatgcatgaaaaattaatgcttcacctaggtaagatcattggtctgtgtgaaatcacaaatgttttttccttcttggttgctgcagcctggtggatgttcatggagaagctctgttctctatattatggctgtgtgccgttgcttctccctctgcttttatcttttccacagttgaggctgggtatgttctttcaaagaaatggccatgaatatgtgtaagtatacttttgaaaatgagctttcctaaactattgagagttctttccacctcttgcggaaccaactcttggaggagaggcccatgtatctgcacgagcacttagcttgttcagatctctgcattttataaatgcttcttaccaagaaagcatttttaggtcattgcttgtaccaggtaatttttgccggggatgggtaagggttgggttttctggtgggagtggggtggtgggtattttttgttgatgctttagtgcaggcctgttctgaggcaataacaagttgctgtgaaaacagcatgtgctgctgcctttgtaactgcatggaaacttttcacatgggtttttctccaagttaatacagaaatatgtaaactgagagatgcaaatgtaatatttttaacagttcatgaagttgttattaaaataactaacataaaacttaattactttaatattatataattatagtagtggccttgttttacaaacctttaaattacattttagaaatcaaagttgatagtcttagttatcttttgagtaagaaaagctttcctaaagtcccatacatttggaccatggcagctaattttgtaacttaagcattcatatgaactacctatggacatctattaaagtgattgtccacaaacaaaaacccccccactacacaacccttgt

SEQ ID NO: 137590 - DNA, 394 bp, Homo Sapiens
  misc_feature (311)..(319): n is a, c, g, or t
gatagtacaagaggggcctttttgtaaacctcctttttaatgtcaaagcaccaatttataaaacactgcagatgcatatagagattgtatataacagatctgtccagcttgtgcatgaaatggatttgataaagtttttgctatgttatttactacatttggggattaatacgtgatttatatgtatgtttttctgtaaatctactttttttgtacgagatgttctacaagatatgaagctaagggaggaaaacgccaaagatatctctagttatgttgaacatagccaatatggtttcaatgggtcagtnnnnnnnnngccatttcagtaaggaatgaaataagtacttatttatgaaaatgtttcttaacaataaaaaagtatatattttta

SEQ ID NO: 137591 - DNA, 686 bp, Homo Sapiens
ccacttttcaaattttatttcattatagaatatatttgacaaggatacatacaaacagattcatcttcaataatacatggtgtttactggtgccctgcacttctgcagtaggctggtgatgtcatcaaaaatgtttttgaaagttgcacttcatcagtcactctaaacaaccagtgccatagagctcagataattccattcatttacttgccttgaatgagtaaaaatcttaatatttgctttaaagtctgtttattactcttctatttaaaaatttgagatacattccccaatgtaaacaataaatttcaatctgtcacacaatcgaaatggataaggccttcttgacaaatttctgccacctccgtttaacgcatcagaactcaatcttatctcatactgtaatgggtcgcccatgcacaaaagacaggaaaagcagctgcccttggtacctggtggagcctttcgagacttctctctgcaggtttatggtacgctcgagagagatctttctgacttggtctacttggtcataaaatacaaatatacaatgtccataagcataagacagtaaagcctagtcttacatatttattatgaattgctagaatcctatacaagtacaatatcatctcacccggccgtaatggccgaattcccgggcatatgtccggtaccgtcgactg

SEQ ID NO: 137592 - DNA, 477 bp, Homo Sapiens
tgtttctgtgtgtgtggttttgttttggattggtaggtttcactgtggcgtggttttgctgttgttattttgcttgattctggaaaatgctgaggagatggactgagctatgaagttcaatggttcaccctttaccatgtttgcaggagatgatcgaatacagatgaccctgctgtcgtgtcttcatttgtaaaattctcctacaaatggagacattgaaggattatgtgtatggaaatttttacaaaattcctttctgtacctattctgtagatgcctgtataatcggtctggatgtacagctataaatgtgttgtgagagcaagagagagagaatgggtagagcctgctgtaccttttttcttttaaattcttcgagttggtaaatgagtaagatattggaaaccttaatgaaaagctgctgttcatgatttgtgtgtatagtgagctgactgtagtattttactattgtctgtt

SEQ ID NO: 137593 - DNA, 856 bp, Homo Sapiens
  misc_feature (262)..(278): n is a, c, g, or t
  misc_feature (823)..(823): n is a, c, g, or t
  misc_feature (837)..(837): n is a, c, g, or t
tgagtcggagacctcactggacatagtccacatgttttattgtagaaagaacattggggctgctaacaaagatccgtaaagtttggcttcttgttggactgtcattaacctgacttgcaatttgatggctatcaaggaatctctgtctgctcctttacttctatccataagaaaagccacactcactggttggtgtttgctatttacttacagtgccacttatcatacaattatcagtttacttttacaaaatatgtagacnnnnnnnnnnnnnnnnnactatctagagtctagagctcacagtacagagttttgtgaaatacggtgcctatgagaattttcccatggtacacagaagccacagaggtgccctgaagcacagagccattgttggcatacacggtgctcaccctgggcttctcagacaaaacattctggatgcgaagtacttctgatcctggagggtcctcagggttatagttcagtagcttcataggattaggatggcatcctgccaaaatgtctcctgtggcaggatcgacagtcaggttatccactaaggtgcccaactgtatcaccttcagttgagttaaatcccagttatcatgtttttccattatgtgaatgttcttagctgctacatcagctacatagacatacttctggtctgctgagactgtgatcccattggcactacaaaatcctttggccaccactttaacctcccttgggcttgtaggaaagaacataagtccagcgaagatccaagatcatctcaaaaattgacaggagggagttggtaaaatagtggtctctgggtggnataggactgttctnggtccaggaccacaatgtc

SEQ ID NO: 137594 - DNA, 307 bp, Homo Sapiens
ttttttaaaagtttgttgggaggtaaaattgtgtgactttaccttctggttaatagttttatagttaagaagaaagtccagcgaagtttacttgatctcagttgcactccagaataggggatttagttccactttggttattttcacttctaccctaaattcatagtccctgatacttaagctttacccttggcttaccagttttcattgcagcgagtaaatggggagtagcagagcctttgttaatgtaaattgacaaaaagtatgtccttttctagcaggagcagataaactgataatggtctta

SEQ ID NO: 137595 - DNA, 411 bp, Homo Sapiens
  misc_feature (332)..(332): n is a, c, g, or t
  misc_feature (377)..(377): n is a, c, g, or t
cggacgggcacatcaagctcacagactacggcatgtgcaaggaaggcctgggccctggtgacacaacgagcactttctgcggaaccccgaattacatcgcccccgaaatcctgcggggagaggagtacgggttcagcgtggactggtgggcgctgggagtcctcatgtttgagatgatggccgggcgctccccgttcgacatcatcaccgacaacccggacatgaacacagaggactaccttttccaagtgatcctgggagaagcccatccggatcccccggttcctgtccgtcaaagcctcccatgttttaaaaggatttttaaataaggnaccccaaagagaggcttcggcttgccggccacagattgggttttnttgacatcaagtcccacgggtttttttccgcagg

SEQ ID NO: 137596 - DNA, 1248 bp, Homo Sapiens
ccagcttggagacaacatgtggttcttgacaactctgctcctttgggttccagttgatgggcaagtgggtgagtgatctctaactcagcttctccttctatgccactttcctacttccaaaggatgggtcctattaacctgcagaagagcatatagggaaagcagagaaagaagaaagatttataaattatgtaaaatctcccatattcagagcatgattttcataaaaactatgattgtaagctttctttctaaagttttctgaatgagctctttcctctgagcgaaatgcctgaatgtatatataacagcaggaaagggccagaattgcacaaacactaaagtagtctgctgacactgaagtagtctgctgggtttcccaacatcccctaaaccagtcccctttacaagaaagcagagtgggttttttctcctcagaaagagccaggcaaatactgaaggcttcaaagagaggagtttgaacctccgtttccaatgtacaagctgctgaagccctgcaatgtactctcagagacagtatagctcagaggataaggaaaacagctccgcttggcttgcccaagtctaaaaccctgcttcattgctcccaacagaaaaaacctacatcagtaatttaatcctcaggagccccagattcccaacacccagatgaggatttaataacaatgaacagaggtctctgcagcaggaggacactcttaaaggctggcttttgtaggtttccacttgcctatttttcaaataaatctaaatatgtatttttcccttgtgctatccacaaaagcctcaccagttgctcagagccctcccctttactccacttgatctttttctttttcttcttgtaatctccaagtagacaccacaaaggcagtgatcactttgcagcctccatgggtcagcgtgttccaagaggaaaccgtaaccttgcactgtgaggtgctccatctgcctgggagcagctccacacagtggtttctcaatggcacagccactcagacctcgacccccagctacagaatcacctctgccagtgtcaatgacagtggtgaatacaggtgccagagaggtctctcagggcgaagtgaccccatacagctggaaatccacagaggctggccactactgcaggtctccagcagagtcttcacggaaggagaacctctggccttgaggtgtcatgcgtggaaggataagctggtgtacaatgtgctttactatcgaaat

SEQ ID NO: 137597 - DNA, 1078 bp, Homo Sapiens
ccagttgaagtcagttcatttatttgccttaagagttatataccatgagacacacagttctggtgttgttgaacttttggatgtttgtacgcagtgctcacggggagcaagtggacaggggacggtccagatcgatggccacccactgagccgctgctacgtggccccctgggttccattccggtgcaccccttcctgcagctgttcttctttttgttcctgacatttcagctcttcttctaaatgtctgtcttcttgaaggctggaaattaccttcttctcatgaccagaatccaaagagatttctaaattccactttttctttcttttcagttctttacgtattgtcacccagagaacagtgttcactaaaaacattattcccactgccagatagaaaaggacatgaaaccagacaggagttggtaactggaggccaagcacttgaagctccaactcagggctgcgcttaaggacatttccatcctctgtggcagcctcgcaccagtataacccagagtcttctcttctagcagttagtatttggtattcagaggatgtgttcctgcctcgcatggtcttgctgcccatgtagaaggagaagtaaagctgcaaaccaggcctctgcaagagcaactttgtttcacagctcagggtgaccagattcccctccaggagtggggatgtcacagatgcattcagcactggagctggaaatagctctttcacagtgacagatattcctgctgatgtgtagcgatgctttcccatgcctgagcaatggtaggtgccattgtgacttatgttggttttcagaatggtgaggttagaattccagtggaaaaacttaaaggctttgccatttcgatagtaaagcacattgtacaccagcttatccttccacgcatgacacctcaaggccagaggttctccttccgtgaagactctgctggagacctgcagtagtagccagccccaaaggagcagagttgtcaagaaccacatgttgtctccaagctggtgggagcagtgaaatctgtaacatgcaagatattgaagaggttctgctggtggctcc

SEQ ID NO: 137598 - DNA, 983 bp, Homo Sapiens
cggctggtacggccggaattagggatttcactactcccaccagcttggagacaacatgtggttcttgacaactctgctcctttgggttccagttgatgggcaagtggacaccacaaaggcagtgatcactttgcagcctccatgggtcagcgtgttccaagaggaaaccgtaaccttgcactgtgaggtgctccatctgcctgggagcagctccacacagtggtttctcaatggcacagccactcagacctcgacccccagctacagaatcacctctgccagtgtcaatgacagtggtgaatacaggtgccagagaggtctctcagggcgaagtgaccccatacagctggaaatccacagaggctggctactactgcaggtctccagcagagtcttcatggaaggagaacctctggccttgaggtgtcatgcgtggaaggataagctggtgtacaatgtgctttactatcgaaatggcaaagcctttaagtttttccactggaattctaacctcaccattctgaaaaccaacataagtcacaatggcacctaccattgctcaggcatgggaaagcatcgctacacatcagcaggaatatcacaatacactgtgaaagagctatttccagctccagtgctgaatgcatctgtgacatccccactcctggaggggaatctggtcaccctgagctgtgaaacaaagttgctcttgcagaggcctggtttgtagctttacttctccttctacatgggcagcaagaccctgcgaggcaggaacacatcctctgaataccaaatactaactgctagaaggagaagactctggggttatactggtgcgaaggttgccacagaaggatgggcactgtcctttagcacagccctgagttggagcttcaagtggcttggcctccagttaccacctccggtctggtttcaatgtcctttactatctggcaggtgggcatcaagtcaagtgacac

SEQ ID NO: 137599 - DNA, 726 bp, Homo Sapiens
  misc_feature (374)..(374): n is a, c, g, or t
  misc_feature (495)..(495): n is a, c, g, or t
  misc_feature (512)..(512): n is a, c, g, or t
  misc_feature (582)..(582): n is a, c, g, or t
  misc_feature (623)..(623): n is a, c, g, or t
  misc_feature (667)..(667): n is a, c, g, or t
  misc_feature (698)..(698): n is a, c, g, or t
cgagacgccccgccgccccgctcctgtagctgagagccgagcagctctcagccccagtccgtccgctccgtacctcgcccgcgtctccgccggcgtccaaaccaccgctcgcccgcttcgcccgggtaggtctgggctccgcggccagctcccgcctcacacccaccctcctgctcgccccgcccccggcaccgccagcgaacgcacgttacgcgcggcgcgtaaacgtcacttccggggcctttgactctggacgggaggaagtgcgagtggatccaaagggtcgagcggagtggggtaccgccctgacgcccaagagcaaatggaagagggcggcctccggggtaaaggtggggcgctggggagccccggangaaaccggcgtttcctagtctgtcgctcagtccctgcttccggcttccgacgcgcaacagctggagggcgacgctggctccgcggcgactcctggggctgcggcgcggttggtagcgcganatgggaggtggagcggntacttgcgccgagggacgcttcagaaactctgtttcagtccttcgcggatcctaaggatgttgacaggtntttcgagtttaaaaggtctttaaaggcgatccggtttgatnccaaaagcagcttgaatcttttagggaggcccagggcaggaggntcgtttgagtccaggatttcgaagaccagcntgggccacagagcaagttcaccattttt

SEQ ID NO: 137600 - DNA, 2217 bp, Homo Sapiens
  misc_feature (1345)..(1370): n is a, c, g, or t
cgatagccccgacccattttgcgcgaaattccccttggtgttgaaacacctttttcgcaaccaggtcccggtgcacaagcgggcacccaaacatcagttcacccagcatcggggggcaagaaaatccccccgccccaaattcctggattccaggtttaaaatgcttggggccgcccccccagctgcactgtatgaacggttattcagacataaataggtgtggtattttgctctgtttccacgattcctctctgagtccagtgagttagtcccagtccacatgacgcctgtggagcctgaagtgcccctgattaacagggcatctgagaagaccagtcttagtcatggaccctgaatattgggtgccaggcaatgcaacaagtgcccgcagatcaaacagtgtaacactgctaaacaggctggtattttgggcatgaagcattctttgaaaaatcatatgccaacgcattaagtggggtagggggaagatttcatatcccccagtcttttcagagatgacaggaactgcctgaacctctgggatgatcttaatatgccctgcagactaagtatcatgaagaaagagcagatcagagagctgaagggataaagagcatttgcaacatctctaagctcacttcatctctgcacctattctgctggcctcaataagtggggctccaggggcatatgggaaacactggcctacaccttcattctggcatctggctttaccttcgagtaattcaaaagatattcagctgccacctgatgccaatatacagagcgtcaaaatcaatatggaatatgtgaagagccaaaaactaggcacagaaaaggcaggagaaggcattaggggaaaacgacaagagacagtcctgtggtgaaaaccacactgacggggacttaggagactcggtctcggctttgccactacacagctgacgggccttggcggtaacctttgtgccttttatctttctcctttgtaggaaaagagggttagataagttattactctgtttcaactctaaaagtagaattttagatttgaactggacctgagaaatacaggagagggggtgaggggacagcatctgggttcttgttccccatctctactcaaattcctgaattagtgggattagcaggtttgttcaggggaaaggaaaggagtaaggtataacttctgtcagctttggtgctgacaggctctatagtttttgcacactgaaacatcattcaagaagatcaccgttcccaactgcagagcaatcaaatgagattataatatggaaagggggaagcatgaaggcttggccaaggaaaaggagtttggaggggnnnnnnnnnnnnnnnnnnnnnnnnnntccaaatgaccagggataaggctactacaggtaagagaacccatcaaaagctagggtaggtaactgcatctctgcctccaggactgtgtggttaatgacagtcatttcaatgctttctactggttgcactaatcccttgatttctcatatgtacaaaagtataaaacagtaaagtgcagtgtttcagttacacttttccttgctttaatatttgttgtctttttctgcttttgaaatgagctctcaattacaaaataccaaactacactcaaaagagggtgtagaaaaagccagccattggcacagcatggagaagcccacaagtaaggacagatagcagcagcaggtggcaagaggtgggaggtgactgaagcagtggttacaaatgttcacaggaagctaaaactatccaacaggttgtgccctaatgttagcacaggttagactagttactaccttgctaggtggcctcagtgtgttcagattctacgcagcaatacaatttcttccagttaagagttcttgacttgcaccgatcacagcatggttgaagggtactggaccagtcttgttagtttttcaaaatgctgtcgtagacctgatagatgtattgagagacttcaggagctctacacttcagtgacagcgtgtaattggggtttcctggctggatacgtagttcggccaaaatccaaatgccattagtgagcttcagggattggtacagcatgtcctgcccttccacattcctcttggcaatagtataaacattgttgttttgcaacttgctggaaacagtgtcagcatttaaatgacattccttaatctgaaactgaagttcattttc

SEQ ID NO: 137601 - DNA, 521 bp, Homo Sapiens
  misc_feature (95)..(168): n is a, c, g, or t
  misc_feature (329)..(380): n is a, c, g, or t
  misc_feature (406)..(449): n is a, c, g, or t
  misc_feature (511)..(511): n is a, c, g, or t
ggattgagtgagatatgggtaacataggtgatcgagtaagaattatgcaaaatatgaaaaagattggtctaagaaggtaacaagtccaaaagggnnnnnnnnnnnnnnnnnnnnnnnnnnnnnnnnnnnnnnnnnnnnnnnnnnnnnnnnnnnnnnnnnnnnnnnnnnatccttaaacaaagaaatgcttgaaagaaggataaaaaatgttttggatggtcttacattagcaattaaatgctgtggccagaagtaacactttacttaggccctgagtgattaggatgatcagagcttgcctgggtgacccataggaaatagaacacgannnnnnnnnnnnnnnnnnnnnnnnnnnnnnnnnnnnnnnnnnnnnnnnnnnntttgcatattaatttagtttatggcnnnnnnnnnnnnnnnnnnnnnnnnnnnnnnnnnnnnnnnnnnnngaggtcattagtggggcttgatccaccttgaggtccagggagttttgaggacccagcctggncccaacatgg

SEQ ID NO: 137602 - DNA, 1292 bp, Homo Sapiens
  misc_feature (22)..(22): n is a, c, g, or t
  misc_feature (28)..(28): n is a, c, g, or t
  misc_feature (41)..(41): n is a, c, g, or t
ccatcttgccaaaagccccttnaacggncccctcttggtgnctggaaaaaccctcctcccccaacaacaatcgcctttccctgaacgggaacccgcaaggccagctgccccccttccatgtaaggcacgtgcgtcctcccaggaaagagcccagcccccaggagcagctgctgagcttggagcatggcgctgtcactgtagtcgatggctgagcggtatctgctccgcaggcagaagaaccggaagacatcgggggaaaaggtcttcagaaagtccttaatagtaatgtagttctttaatgatttggacattttttcttcttttcctttggcgtgcaaatgcccagaatgcagaaaataatttccccactgctcgcactgatgaaagacttcgcactgtgcaatttcgttctcatgatgtggaaaagctaaatctatcccacctgaatggatatccagttgactttccaaattaccatactagcgatggcagagcactcgatggtgccagcccgggctttcccgggtccccagggagaggcccagaacacctcctggggtttggccgccttccacagggcgaagtcactggcatgacgcttgtcagagtccgctggctctccgactggaccagggaccacgccgaccaatttgccatacttgtctcctctagacttcagatcgaagtagacattgccttttgccgttgaataagcgttcccacgagcaatgattccttcaatgaaagaaattatctgaggaatattttcggttaccctcaggtacaccgtgggtgggagaaccttcagggctgccatgtcctgcttgaagtcttcctcataaagactggcgagggaagcgggggaaatattcatctcattggctcttttgatgattttatcatctacatctgtaatacccatcaccatgactatgctgcatccaaaaaccttggttaggatccttcgaatgatatcaaatctaacatatgagcaagcatggccaaggtgcgcatgatcatatacagttggtccacagctataccaggaggcggcttcggcgtgcgccacgattaggggttccttcctcccggtgaggctgttgtacacctgcacacccgtctcccggcccgtgggctgcagccaggccacgcccgcgcccgccagctcgccgacccggcccgcaggccagtgccacccagcccgccctcaggcccacgcgcggcctggagcagacggggggcccaggcttgggccgcgcgtagtcctcaacatgtcagcggcccctcgtgcc

SEQ ID NO: 137603 - DNA, 430 bp, Homo Sapiens
  misc_feature (71)..(71): n is a, c, g, or t
  misc_feature (243)..(243): n is a, c, g, or t
  misc_feature (250)..(250): n is a, c, g, or t
  misc_feature (310)..(310): n is a, c, g, or t
  misc_feature (325)..(325): n is a, c, g, or t
  misc_feature (376)..(376): n is a, c, g, or t
  misc_feature (398)..(398): n is a, c, g, or t
ctcctcaagactcagccaggcaggagactggttaggggtaagggccacttctacctccattcctctttttncaaagatgttgcggattcctgcgacatgggaacacgcagctgctggtgaggaagaggtggcttcttaccacttaggtcaatgacagccacttcctccctttttaacaagcaggtacatctcctccccatcccccagcatgtgagtcttaggattcgcacaaattgttttgtntactgtntgctttgcacacaccagagaagaaaacagaagaaagaaggaacacagtgacccaggcccnacctgtgctgagggnctgctggcctctgcgggtgagttcctggtgtgtctccttcccccaacagcntcccgggtctggctgctctaanacgtgtgtgctcacaggcaggtacttgtgggc

SEQ ID NO: 137604 - DNA, 754 bp, Homo Sapiens
ttcagactccttttcaccaggtttattttcatgctataaataaatttccctattagttcccattttcttatgttctacatgagatacagagacccagatattggcgtggtgaataatcaactgttttgtatacctaaataccaatgagataataagcgagacttgtaaagcactgaaactaaggctaacagcagcacaatccactatcaaaggatttaaatgccagaactgtgaaacattctctgtaggtgccgggacagtctggtggctgacaattaacgtccactccagcaccgagggctggacacttgtggtttctgttcacctttcctggcttggagcccagatctgtctcatgagcagagtaactactgaggaggcttctcggatggaaagttggttttaagccagaagtctggagagatgtcatgccaggcagcagcccccacgggcccaggcctttgtggggcagtgtcactgtctggtgtgccaccagtacccatgctgcaaggagtgggcttggctgctgtggttggcttgtctttcagtggttttcagattgtgtgcagttatcatgaggagtttgttgctgggagtgtacaggaaaagggaggaaaaggcatcgcagttgtccagtcattggaggatgaagtacgtcactcagggtgaatgatggttgggacgagagttgcctgtcttcagccaagtgcctgtctcatatgtgggcgggactctgagcagccttgccaccgag

SEQ ID NO: 137605 - DNA, 483 bp, Homo Sapiens
cacttcttcaacaagtatttattgaacgccaactatggaccaggccctgtgctcaatgctgggtacagagtggagactgaaccaggcatggcacctggcctcatgagcttacactcgagtgggaggcacagtcaaccaacaagtaaattacacaaatggatatgcagtggcaaattctccatgaagggaaagaacagaggccttgtgatagaggaactccacaagtaaagtagtcgaggaaggcctcttggacgaggcaacgttgaagccaaggcctgagggtctgcagaactcagccatgcacagggtaggggaagagcattcttggcaaagggaacagcatatgcaaagtgctggaggtgggaacaaggctggaatgtcgaggaaatgaaggaagggcaggtggcagaagctcagggagcaagtctgggactggcaagaaatgaggctggaagtgaggttgggaccaaaagaagaccttta

SEQ ID NO: 137606 - DNA, 493 bp, Homo Sapiens
  misc_feature (21)..(21): n is a, c, g, or t
  misc_feature (29)..(29): n is a, c, g, or t
  misc_feature (36)..(36): n is a, c, g, or t
  misc_feature (41)..(41): n is a, c, g, or t
  misc_feature (75)..(75): n is a, c, g, or t
  misc_feature (97)..(97): n is a, c, g, or t
  misc_feature (248)..(248): n is a, c, g, or t
  misc_feature (434)..(434): n is a, c, g, or t
  misc_feature (440)..(440): n is a, c, g, or t
  misc_feature (449)..(449): n is a, c, g, or t
  misc_feature (459)..(459): n is a, c, g, or t
tgcctgtgaaggcactgtgancctctccnatcccantaagnttcaagtatgtgtcccagtcacatggtcagggtncaagtcctgggcctatctcgcnccctcgacagcaaatccaacgagcagtcaacagagcccttttgaaaagtcacaccatgcctcagtacaatgaggaaacactgggggttgacctcagtcaccaaagctggggtaggaagggctactacagagaactggatggagagttaagnaaggccttggcctctgccccattttaaatgaacctcagacaagacctccaaatatctgtcttcaagttgcttcatctaccaaagagaaagagaaaacttccccttgtctccatggtacaacattaatcctgagaatgaaatggtattttgtgccaggcatggtggttcacacctgtaaatcctaanactttnggacgttgnggctggagtntcacttgggccgagaggttcaagtcctccctggg

SEQ ID NO: 137607 - DNA, 610 bp, Homo Sapiens
aacatacagaattttaaataccacaactgggggcagaatttaaagctgcaacacagctggtgatgagaggcttcctcagtccagtcgctccttagcaccaggcaccgtgggtcctggatggggaactgcaagcagcctctcagctgatggctgcacagtcagatgtctggtggcagagagtccgagcatggagcgattccattttatgactgttgtttttcacattttcatctttctaaggtgtgtctcttttccaatgagaagtcatttttgcaagccaaaagtcgatcaatcgcattcattttaagaaattatacctttttagtacttgctgaagaatgattcagggtaaatcacatactttgtttagagaggcgaggggtttaaccgagtcacccagctggtctcatacatagacagcacttgtgaaggattgaatgcaggttccaggtggagggaagacgtggacaccatctccactgagccatgcagacatttttaaaagctatacaaaaaattgtgagaagacattggccaactctttcaaagtctttctttttccacgtgcttcttattttaagcgaaatatattgtttgtttcttcataaaa

SEQ ID NO: 137608 - DNA, 218 bp, Homo Sapiens
gcacgagaactgttttaaagttcaaatgtatgtgtgggtgaaaattttcagcacacagatcaagaagctcaccattaatataaccttattcatcacactgaattttttggaaacaaaaaattgaaaatgtatgctcttaattagccaggtgtggtggcatgtgcctgtgcctatagtcccagctactcagaaggctgagatgggagggttgcttgtgc

SEQ ID NO: 137609 - DNA, 850 bp, Homo Sapiens
gtgatcctaaaaaccggccaaaacaggtgtctccccggagatccaaatttatctcgttggagcaaactgtgtttctggccttatgacccacttttaactctgaaattatagaaacttaaataatgtgaacctggattaaacctaatcctaaatggaaccactctatcaagtatataccctttttagagttgatactacagttgttagtatgaaggcattggttggaactgataaagatgagtgagcatgcccctgaaccatgttcggaaaacatgctacacactgcatgtttgtgattgacgggactgttggtattggctagaggttcaaagatattttgctttgtgatttttgtaatttttttatcgtcactgcttaacttcacatattgatttccgttaaaataccagccagtaaatgggggtgcatttgaggtctgttctttccaaagtacactgtttcaaactttactatggccctggcctagcatacgtacacattttattttattatgcatgaagtaatatgcacacattttttaaatgcacctggaatatataaccagtgttgtggatttaacagaaatgtacagcaaggagatttacaactgggggagggtgaagtgaagacaatgacttactgtacatgaaaacacatttttcttagggaaggatacaaaagcatgtgagactggttccatggcctcttcagatctctaacttcaccatattaccacagacatacttaaccagcaggaaatgcctttaccctcatgttctttaattcttagctcattcttccttgtgttactaagtttttatggcttttgtgcattatctagatactgtac

SEQ ID NO: 137610 - DNA, 703 bp, Homo Sapiens
ttttttgactttttaaacattagtctttaatgaatagggaaatggcctcaaagcctggcgaatgaagagagaagtacaggagaagttcattagctcttgaagaacttcccctcttgttggaataacagagccctcctgcgggaggtggggacttattttcccaattaagaccgccgaaattctctctagggaggcagggtagtggactggcaagtacacttcagagatggaagatgaaagttcttgcctcttctttattaactagctcgtgaccatttaactttattagctactcagtgtcctcatctctaaaacaccaacagaaatattggtcccactttcccccggggtttacacgaggtcacgatcacacgtgtcgtgtgccacttaaaagcacaaagcagtctgagtttacttatgcctgcttttgttagactatcttgactgacaggattattggtacatttgggcaggctgggttttggaagcaactcactccacgtcttgtcatacctgatcggccctgcgggtccctcactggagggtgggtctctcactgggcggggggaggagaggaccctgaacgtcctgccaaaggtaccggggccgtgacgaactgagggaagattcccctgtgggagtcttgggtttcgtcatgcccgtggaccttgaggcagaggagcggcccggccctgctggaagg

SEQ ID NO: 137611 - DNA, 587 bp, Homo Sapiens
aaggagtcagtaatcagagccatcatccaacaactctaggaaccttctggaacacagacattcacaaaaagagtgcagatttcagtgaaactcctcttccacgtgtcactttttcatgttatatacataaacccacataatggaccataaaagtttcaatagaccttccttgtcaacacaaccaagcaaatgtacaactcaaaggaaacccgggaaaagacacaagaggtgtccaagttcagcttcaggaggtctcttttcctatgctcttccactcccccccttccctcccacacagatgttccctataaatgagcttggctctatgcagctcatatcagaatgggattgtccaaaacagtttgaagagaggaactcacacttcctgaaatgattatctcttgacataaattcaaatttaggaaggaaccgtctaagccttttataaatacccatgatgcccatatgtgactcaagactgattttgtttcctcctgtcctcttggtacctcttttatcttactatagtgatgctatggcttcggttcatgactacagtgagtgacagctgtgatctggccctttcc

SEQ ID NO: 137612 - DNA, 414 bp, Homo Sapiens
  misc_feature (52)..(52): n is a, c, g, or t
  misc_feature (59)..(59): n is a, c, g, or t
  misc_feature (390)..(390): n is a, c, g, or t
aaaatggatgttttttgtaataagtgtaaattttaacattccataggaaaanaatgganaaatcctaagtctcctacatattttttaaaagccctgagcttatttatctatctatttgattaatttttaataaaaggaaagtgtagttagggagaaagggacaatgagaggaatcagtggagaaattccacaccttccgatggcctcgcacatcacgaaagggggtgagaacaaggcagcaggagcaggagggcctccatcttgggatggggattaaaaatctaagctgcttttcttccgaggctcagcgaattagggtagtaaggtgagtgtcccagttcctgtcttgtcctagagaggaggattgagagaagttgctgcttgtctcanggctttcacagagtggatgacgca

SEQ ID NO: 137613 - DNA, 349 bp, Homo Sapiens
  misc_feature (67)..(67): n is a, c, g, or t
gtttgagccaccgcgcccagccttaattttcaaaagacaaataagcaaaaagcttttcccgttcctntcccaaaacagcaatgagataactgccttgtaatgtttgtttgctttttacaaataccaatttaccacttgctgggaatcccagcccagggaaccagcctgtgaatgtgggtggctcatggccctgttttatgatgacaattggtgtcctcttgtctcttccagaagggtctgtctcaaggtacattttggcagacttcagagattcttttttctcaacttcattagcatctttgccaatccaaataaatatctgttcccaagcatctagtaacatgacatc

SEQ ID NO: 137614 - DNA, 441 bp, Homo Sapiens
  misc_feature (74)..(74): n is a, c, g, or t
  misc_feature (192)..(192): n is a, c, g, or t
cccactaggcacattccgcaactatgatgtggatttcactgttgggagtaagagtttgacgagtacacaaaganccctggataaccggcttgttaaggcactggtcccctgggaaggtgatgtcctttgtgtgtgtgcaaaagggggagaaggagaaccgcggctggaagcagtggattgagggggacaagntgtacctggagctgacctgtggtgaccaggtgtgccgtcaagtgttcaaaaagaaatgatggcgacgtgggaggcctgccaagcacaagctccccactgcccacactgagtggtctactggctttgagaaacagctgtggggaccttcccactcttgacagagccccattaaggcatctgggtgggttttaaacagaatgcctatgtagcagtgatagacatattcccctcctttgaaacctagcatta

SEQ ID NO: 137615 - DNA, 469 bp, Homo Sapiens
  misc_feature (54)..(115): n is a, c, g, or t
ctggggcaaggtccagaagcatcctgagcacaggacttgctgacttcataaagnnnnnnnnnnnnnnnnnnnnnnnnnnnnnnnnnnnnnnnnnnnnnnnnnnnnnnnnnnnnnncatagttaacggattatgtcttgttgacataggcctgatggattattgacacaaatctccagcccctctcccctctctggaggtgggagactgaaagtttgaaacttccaatcatgatgtggtctttgtgagcagcccccatcctgagttatccaggtgcccatcaagagtgacctcattagaacaaaaaattctcctatcactgggaaatttaaaggaatttaggagctttgtgtcaggaactgggtcaaagaccaaatactagaacaaaagatgtactccatcactttggaaattacaagggttttaggagctctgaacaaggaactagataggaagatcaaatatatattt

SEQ ID NO: 137616 - DNA, 525 bp, Homo Sapiens
ttttttttataaggtaagagcactttattcttatttgaaccacactgtattgttgattaccgagtgtgaaggtagtatgttcagagtcttgttttatgcctttgtagctgtgttgccagcatttgaaggtaactcctccacataagcggcaggaaaatggccttttttcccattcaaagatccaaaccaccatccttcttcttttttctcgtgtataatcacaatgtcacccttttccaaattcaactcatcatcttgcctggcttgaaaagaatacaaggccttgcaaagtctgctgctgagctgggctgcaccaggggctggagttgaagaacctggattgctctgcccaccagaagatgccttgctcacaatattctctaatctcttcattaaaaaaggccgaggatattttcacatagctatgagtatggctccttttccctccacctggaagatgggattactacaaggatggctgggttgagggtctttgctcaagttctgctaacattgatgacagtt

SEQ ID NO: 137617 - DNA, 985 bp, Homo Sapiens
  misc_feature (170)..(170): n is a, c, g, or t
  misc_feature (191)..(191): n is a, c, g, or t
  misc_feature (277)..(529): n is a, c, g, or t
  misc_feature (575)..(585): n is a, c, g, or t
tgatttcactcattgactcaactcgagtcagacgatccatttcagttcgtgtgttttgttgcagtcagtatcagagcaaacacataacaggcgcgagtgttcactcagtcagcttgtcatcataagccagtccgcagatgacccaatccacatcaggtgttgcccgtccntcttgccaaaatatagtctgnaaaggcagaaaagcacgtccaaaaggcaaagcagcctcagaccagatcagatgtgacacgaagtgggaatatcagactgggaattnnnnnnnnnnnnnnnnnnnnnnnnnnnnnnnnnnnnnnnnnnnnnnnnnnnnnnnnnnnnnnnnnnnnnnnnnnnnnnnnnnnnnnnnnnnnnnnnnnnnnnnnnnnnnnnnnnnnnnnnnnnnnnnnnnnnnnnnnnnnnnnnnnnnnnnnnnnnnnnnnnnnnnnnnnnnnnnnnnnnnnnnnnnnnnnnnnnnnnnnnnnnnnnnnnnnnnnnnnnnnnnnnnnnnnnnnnnnnnnnnnnnnnnnnnnnnagcccccatttcaccagccagggccacagagcaagacaatgtctcnnnnnnnnnnnggaaaattatgatgatcaatatgctaaaggcgctactagaaaacggaggcagcgcaccggagcagatggtaacataagcaaagagatggacgctctgggaaggacaaggcgcgctggagtacaggaaatgcgaggtggaaacgcagtgcgccgccgcccggccggaggctgcgcgtgtctgaggaagggggccgggagcgcgaacacagaaacgcagagggaaccacgagcggagcgagcggagcagagagacaaatacagaaggtgcgagtgggcggcgggtgccggaaggagcagaaagagcgaaggagaagacatgttggaagtaataatggctgagattttccaaaagtattgacagacaccaaaccgcgcgtctaggatgctcagtgactgtcaa

SEQ ID NO: 137618 - DNA, 513 bp, Homo Sapiens
ttttcaactgaagaaatttatttacttttttctaggtacatagatgacataattatagacaagttttgatacataggaaaacccttccgtccacctctctttatgctaaatgaatcatcacaataatttttacaatttttaaaacaatacacagctttcttgggctgaagcaattgcaagaacatattggtactggtatattacagctacttacaatgtttttaagaacagcaatggagaaaaataagttatttaaatattgatttcatatacagaaagtgcaatgttgttagttgttatataacttgctcgacagtttcttttctctatcaattttaaatcaagataacttggactcagactattatatttttttctgaaaataatacagtacacacatggcagcagtgacttggcaagttgaccttttttgctgcagttatgaaagcaaactttactatgtcaggaactgatttccaatagattagtaatttccaatttcacccatacctg

SEQ ID NO: 137619 - DNA, 304 bp, Homo Sapiens
ttttttaaggggcgaaaggaaggaataaagatcatgtgggtagaattagagggaggaagggaaatgtggttggtgttgaaatactccaccggtaaactaagataactgtgtttgaaactttggctatctcataggtgtattctagttaaacaaaagtgcaatactgcaaagggaagatactaaatatgtaatatatcattttcatgatgaagaattactacccacttctcctggatgggcattatagagactattgctaagacattgcataaaggactatcacttcaaagtactattttgggga

SEQ ID NO: 137620 - DNA, 432 bp, Homo Sapiens
  misc_feature (27)..(27): n is a, c, g, or t
  misc_feature (36)..(36): n is a, c, g, or t
  misc_feature (152)..(279): n is a, c, g, or t
  misc_feature (285)..(295): n is a, c, g, or t
aactttgggaaaggccgggggcggggnaaggatccnaactgggggtcggccaagttccgaaagaccaagcctgaaccccaacatgggaagaaaatgccgtctcctactaaacaaataacaaaaatcaagctgggtgtgggtggctccctccnnnnnnnnnnnnnnnnnnnnnnnnnnnnnnnnnnnnnnnnnnnnnnnnnnnnnnnnnnnnnnnnnnnnnnnnnnnnnnnnnnnnnnnnnnnnnnnnnnnnnnnnnnnnnnnnnnnnnnnnnnnnnnnnaagggnnnnnnnnnnnttaattaagtgctgtattctgttatttttgcttcctaccctgagaagaacataatacagctgttgtctttctgcctgcctgcctgccttctcctgtgcagggcctcattctgtctttcgcccagactggagcacagt

SEQ ID NO: 137621 - DNA, 750 bp, Homo Sapiens
tagcccaaaggaacccggggccgattagcaaacttaaaggccagcaggataattccagaggctgtaagctgataaccaagggctgcatacccaacatctcgagtttcccttcttcccattttttcaaccccacgattcattccatgaatgtgcaaaatcaataagtaagactagttgtatgaggatgaaacaaaaggcacctgccatgcctacataaaaccacacagttgtaaaagttccttctggaatgaagaatgccccaataataattgcaattgctgcagcaaatttaaagaaccaaaatccattgtgcactgcagctctaggatcactgctactcttcactttgatcattagtaaagagagaagaagatagaacatagccaaaccaaagcacaaacgatatacagctttatagccaaccaaaatgttacaggggacaacacctttctcattctcacaaaatcccaggaatcttattcagttgttcttccattccctggtatcaacattacacaagctacacatactccaacaagcaagaaaagtgcatagatcaatctagttacagtggagttgtttccactaggacagcatcggcatagcaaacacggggcacttccacacaaacatggtatccagctcgccatggagcacagccccaggacgctccccatctccacaacgtcacaagagcagcggatacagacaagatggagacagcttctttctcgcctttccgagattccc

SEQ ID NO: 137622 - DNA, 251 bp, Homo Sapiens
ctgctggggccattccagctttggctgataatgcgtttattgcgttactttagtacagtcggcctgcctcgccccacctccagcagcccagcctgttcacagctttctgctcactgctcactacccaaggaggtggggtctgtctcccagggtgggcactccaggcacctcctcggccctggtcgttgctctggagctcggcttccccgtcccttctgtcgtcttctcgcagccgtatagtagtagtaggc

SEQ ID NO: 137623 - DNA, 1254 bp, Homo Sapiens
ctgctgggccattccagcttggcgataatgcgttaatgcgtactttagtacagtcggcctgcctcgccccacctccagcagcccagcctgttcacagctttctgctcactgctcactacccaaggaggtggggtctgtctcccagggtgggcactccaggcacctcctcggccctggtcgttgctctggagctcggcttccccgtcccttccctccggctgaatcctgcgcccgacctgtgccgccctcccggggctgctacattcaagggttatcctgttaataaataagcccgcgcagctgccctcagccagggcctgtcggttggtgtctccatcggccggtgaccccccatgtgcccggccccaacccgtccttcttttcagggtctgtctggctcctctctcgcctgtcgtctcctgcttggttcccggcgtggggacagtctggtcaccagtgcgttgcgctgcgcggcccccgctcagcgcgaggctcaggggcgtgggtcctccggttacggccctttctccgcgactccaggggcagtgactgcagcgcaggctgcgggcggcacatgcgcagggagttcgcgctgccacctccgcccggctccaccagctgcagaaagtcccggtaccagagtttggggcccggcggcgcggcgggcgcagcctcctcggcccgcgccagtcgttcggcctgcgtagcactcaacacgtgcagcgacaggcgacgcagcggttgcgtaaagccctgctcgacggcggcgcacaagtacacgcccgagtcccggcgccgcagcctgcgcagcagtagtccccgggcggtgcgctcggtgcgctcctctgccagcacctgggtgtgggctgtcacccctgcgcgctggaaagtccactccacgcgcgcctgcagcgagcggggctcacactccagaaaggcgctgttgccctccacgccgaacaccttgtgttccagcagcgcgggacgagacgagtctccggagcacaacgtgctggggtcgccattccttacgtcttgccgccggaaccgcctcttggcactgggctggaagcgcgtgcacgcgaccccgtcccaggcgcagtaggggtcacgcgccagacagcattcggtgcagacgcggccgtgggcagcgcagcggtgcaacgcgatctgggccaccgcgctccgcgaggctacgtacagctggtgcctcttggaagaaatttgcatgctggtgacagcggccgagtcctc

SEQ ID NO: 137624 - DNA, 372 bp, Homo Sapiens
ctcccgctacagcttgaaggggacataactgatagcccaggcgtttttgtggtcctttggagatttctttgcttgtttccttctgggagggggagattagaggaggcttatcattaataggaaggggagctatagggatgctaggatgtgggggtaagctgagaggtcctcttgtaggatgtaaattgcaagtttgcatagttgtgtattctccttcaatgaaaagaaagcttggacataagatatttcactccatttaccttccctgttacagaaaagatcaagctgcaggatagtattgtaatttatactgccctcaggtggccatttttccccatcagagagagaatattggggccaagctgtgatgca

SEQ ID NO: 137625 - DNA, 333 bp, Homo Sapiens
  misc_feature (37)..(37): n is a, c, g, or t
  misc_feature (115)..(115): n is a, c, g, or t
aatacccactgggttttttaaaagaggccctggaaanccactggttcctggggtaagaaaatttcctgcctggaattggtcaaatgctgaaaatccaaaagctgaatgactgttnaggagaatgaagagtgggtgtatgatcccaagaatgctgatacgtgtcgttcgcctctgtcttttcttgtctcaggctcttgtgtaggactctgctagtgcactgggaagactctagcattttaaatctagctgaatttgagttgctcctcatagagaccaatgctgcaaggttgctgacttggggaaaaatctctctcctagcagcttctgacctcc

SEQ ID NO: 137626 - DNA, 864 bp, Homo Sapiens
  misc_feature (43)..(64): n is a, c, g, or t
ccctcacctaaagggaataagcttgcggccgcatacgcggtcnnnnnnnnnnnnnnnnnnnnnnaattacgggatatttttactggaatgtagacattacttttgaatatataggacaatagaaattgcatcaaagcaatgctgcctaacagacacagcaggaaacttattggcatggccaggctagtatattttctcattagtatatcaactaattataggaaaagtactgtttctaaagtgcttgaaacatttgcctacgtcactgttctctttttcaatgacctccttcataaagtcaaactctagcccaaacttaagcccatctcactgcatattgtaaagaatggattctgaatgaattaacagaaatgcttttatataggaggttgcagagattctcttgcagtcaatgtctagaggagctgaccctcaggcatcactcagaggaagtcccagccaagattcacagatctgtatgtagccttcggtcaatatcacagtgtacatcaggagtctcaagttcattgcacagaactggtcctgtagcagggaagactcagaattcctgagttttctccttatggtgactcctcagggatagccaccatcttaaatccaggaatggggcccagctgggaatggagaaagttgcaggcccacatgctccctggacggaagtcacacggagcctctgtgcgggcacctgagaagctgccagaacacctgcccagcagcagtgcatcctccccactcagtgtccatctgccatcacaccgctgagaaggagaggaatgtgagaatgatcacaacagccagggaacccagtcctacacccgccatctgcagcagcatgagtgacga

SEQ ID NO: 137627 - DNA, 270 bp, Homo Sapiens
  misc_feature (181)..(181): n is a, c, g, or t
  misc_feature (216)..(216): n is a, c, g, or t
  misc_feature (234)..(234): n is a, c, g, or t
  misc_feature (249)..(249): n is a, c, g, or t
ctgttaaaacatgcttatgtttacttctgtgaaactgtgccaacaggaaatgtggtatttggcacgatgacacatcccggcatgtctccttcccaaacaatactgacaaaaaaggaaaatacgtggggactgactcatcgggtgcttgcttaggagggcactacttaaaattccctttggnttgggaggcatggggggctttcccgcggcaggacnacctgtgtgtgggccctntggaaagcccaaatntcccttattaatgtttaattt

SEQ ID NO: 137628 - DNA, 388 bp, Homo Sapiens
  misc_feature (377)..(377): n is a, c, g, or t
agaaatgacttcggcagttatttcttaagagttaaaaatcctataatttttaccctgtcatcctaggtaggcccagttgaagggttgaatgatgaagatagaagagaagtgatagatgcataaaatggttggaagtggcagtttccctccttgaaagaaggcagatattaattcttttatgaacctagctttctttatgcacttaactcttgggacttgtctcttgggcacccaaaccttcccgagggtaatggaaacagcatgctggcggacccagggcaccagagcaaggtcagggctgtgaccactttcaaaagattttccaggaaattattctattgaataatgtttaagtttccacagaagctataagccancgcgtgctgca

SEQ ID NO: 137629 - DNA, 1016 bp, Homo Sapiens
  misc_feature (95)..(95): n is a, c, g, or t
ggggagcatttaaaaggcttgggcccccggtgtgttttcggaagttgcctggttaactcattccctttttgcaaaacggccattccccccctttncccaggagcatctgtaaggcttttctccctgtgtgcgtccgctggtgtgctttcaagtgggagcttttggtgtaaactttcctgcagccgttaaagtggcaccggtgcaccctcctcctgccgtcgggggaggcatcgccatttcccttgtcacctggcttccccgaagtcccgctgcgcaccttccctggcgagggcagctccccgggcacgcaaccccacagttgagaaggttccctgctcagttccggagaagatggaggcgtggaggtgacagaggagctcaattttcccgagctgaccaaaacttcgccaatggggtcggaggtaaacttggccgtgggagaaagttcctcggagctgtcagaggattcgctgctgacatctgagttcaggctgttggtctctaagttgtaacaaaagctcgggctgatgagagtgtcctctggaggactggaagatatcttcagttcggattcctcctttttctcccgagccagaatgattttggtccacagatcttcctggctgtcaaatttgatttctgaggctgaaacatagcagggctcgctctggaggtaacgttccagctctaggcaggtctgttgccagtactcctccagagacggcagcgccgagaagtagccggtctcgtgcacgatctggagctcctggaagatgctgcacatggggagcacgtccatgtcgggccgggttggacggagcccgcggtcgcgagggcggcgaggcgcgcggtgggagccggagccgaaagtctccccggagcgcaggtgaaagtttcatgcaaactccaggctcgcagagacgcccggccggaccctcccgcagcccgcagcgcgcggagcccacacaatatttgcaaacacctgccgaattcgccacccaggctcgctccttgac

SEQ ID NO: 137630 - DNA, 1368 bp, Homo Sapiens
  misc_feature (411)..(419): n is a, c, g, or t
gcatggtgactataaacaagtttgtacaaaaagcaggctggtacggtcggaattcccgggatatcgtcgaccacgcgtcggtctctgacaaatggtcctttgccttatcttgtgctggtggtgaagaggccctcaaagccaggcctctctattcctttgactgtctcctcagccattaacccattcttcatcctcggagtgagtgattcccaagtctttgtcttggcttaatccctaaagaacccagttctgctggtatcgaatagttcagcttggttgtcattgaaaggaatttctctcttctgtccatcagcctgtccctcccaactgtctaggacagtcttcggtcacctaaattcctaactgcagacttttgccctttttctctctcatcaccaaagtcccatccannnnnnnnnaataaaagatcctcagctacagtctttccattttccttgcttctcttattgcacacccccagcccattttgcttctctcttggatttggttttttcagatccacatttattgggtttcctgtccagcttcttggaaaggagctcactcttggaaagactgatctttccaaaatattttccctggtctgaagctttggtgtgaacttctcaaggcttagagaatccagttacagaccttttggggttcaggatgctatagattgacaccctcctgcctgtttttctctgcatcccaacctggccaaggcccctcctgtggggtgcccatctgtgcctttattccggctgtgccctcgactttccagcttcccatgtttctttggttaggtttctctcccttccttctttctccttccccaatccgcctgtttcgtcagggcccagtttgtttcctcatacaccttcctcactaccccaccccacatggttgactctttccctcagctccaccagctcttcatcatgccactcatttcagaacttgagcaaaacagggcagtcaggatctgatgtctttctggtctccctaagaaaactaagctcttgagggacagcccttggcaatgctttcctatctgctgagcatggtgaccttccttaggacttccagagttcagttccttctggcagagaggttttctttctccatgccatatggatgtgactcaaatgaggggtcccacagcttttcctggctaccacttgctgtgaccttatacatgttggggtttgctcttaaagaggagagcaggaagaaaggttggtttcagcaaccaagaggctctccagtgcacgcgtacattcggtcacggagtcacacagaactgagccagtgagcatactctgagatactatccttgcttgtgttgaacagatacaacaggaatgt

SEQ ID NO: 137631 - DNA, 747 bp, Homo Sapiens
  misc_feature (163)..(163): n is a, c, g, or t
cttcctccatcttctggccagctgcagccaactcttccaggtcgtccttgcccaactctgaggaggggccgtagagtctgtgagtcctggggacaggtcaccctcacagagatctagcacatccaggctctgttttggcctggtgctctgcctacccaggtcnccgtagcaactccctcgtttgtcttgggaatgtagccgccccggcctcgagaaggacccccaggcaactgagttgtagatggggtcgttgagaatgggatggcccaagaactgaaggtggactcgaatctggtgtgtgcggcctgtgagtggccggcaccgtaccacactggactggccattgtagcttagcctctggaacactgtctcacagggcttgccccggggatctacacggcacacccctactttgtaagacaccactaagatgggttctttacaggtcacttcctcagtggggaactccccttccacccggcacacgtactccttctccagctgccggtcccgaacctgctcgtgaattctctcagagactgcagctgtcttggcaaacataagcacccctgaggtaaggcggtcaagccgatgcaaggggtgtagctccttgagttggtgctccttgcctaggatgaagataactgtgttgtgtcggaagcgcgacgcgtgggtcgacgatatcccgggaaatccggagcggtaccagcctgctttttttaaccactgttcatagttacaagcctc

SEQ ID NO: 137632 - DNA, 455 bp, Homo Sapiens
  misc_feature (420)..(420): n is a, c, g, or t
  misc_feature (428)..(428): n is a, c, g, or t
gtgtgagccaccacacccagcaataaagcattttcatttgcttctattgagacaataccctagaagttttgcagtggcagtgtgatgaccaatgaggtttatctgaggtgcgattattgctaattgaagcagtgccctggaggtactagaattccttatcagtttcatacaatttcagggcttgattttttataggttacccagacaattcattcaagggctgctttacttacggttcacatgtcatgtaaggagcagtggttttgagcataaactctattcctggggatttatcagataccccacttttgacaggtcttgggatttcacttttcagatcctttttagggattgggcaaatcgctttcttcactgtccctctagccaaggacaaaaaagtgattccaacttccccagcanttttgggnaagcccaaggcagaagggtttttttta

SEQ ID NO: 137633 - DNA, 796 bp, Homo Sapiens
atttcctaccatattcaggcctaaagacattgaaaaagcatcttttcttgagatcatggtcatatgaggtcctaatgaagtactacagttttcattctttcaagggtagactaaaatatagtttataaatcggcagtacagtattatgaaaccaagaaagggtttcttgaaaagcttgtcggttcaaagaggaaagatgaatttcaatgtgaaaacacgttttgttgagggctgtactttttaccccctttaagtgctttaacaggatatacgtttgattttcctcatatcttatttacctaggagcatgtcagagaaagaagggagagaaaaggttgcatctgcaggatgccttgataactacacagtcccaaataaaaggcctttttctaacctacctctaatggggttatcagatatgtttttaaatctctcgccctgagtactcttcttgggagttgctgctgtttacagccacagtctcatctatcactaaatatgaaactgggccaaggggaaaattcagtaagttagcgttaaatggcaagtaaatatatgtatacctaagagaatgtcaaaataaacaccaaaccagaagaaggtcaggagtgccatttttagaaaagacacaactttaattcctgtcaagagacctaggtctactgactggcagtcactgcattggtacattattccagattcttcagtaaattctgtttaaactgtgatatctcttcatcgctgttaggatgccactattttatctatcatttaaccctcagcgatattcagacca

SEQ ID NO: 137634 - DNA, 465 bp, Homo Sapiens
tccctggatctagaacccacactgcgagccctttcagaccacagagaggagtccaacagccatcgcccacccccaggctcacaaactcgcctgggccccgctctcgagaaccagtcccagcaaaaactcccagacggaaatccacagttgcacagtttgtcagtgggacagatcttgaccaaacatacgaactgagccacagtgttcaaacaccttgtttgcatccagccacccaccacagccaacaccaaatacctttgggtcatcagcctcaggtttttcagtctctgaatcgtcatcttcctacaagaccaagaatttagaggattaagcttaaaggagcgggcctgaggagtcttcacatgcattaactaggggccggagcaacagcccatttacccagctggggtcatcccaccagaatccctcccctaccatataactcagaaccagagaaaaataagg

SEQ ID NO: 137635 - DNA, 544 bp, Homo Sapiens
  misc_feature (475)..(475): n is a, c, g, or t
  misc_feature (498)..(498): n is a, c, g, or t
aatgggttcaagtcccacgcgctgcagctgaacaaccgccagattcgcggcctggaggaggagctgcagttttcctcgggcagcaagatcaatgtgaaggtgggaggaaacagcaaaggaaccctgaaggtccttcgtacctacaatgtcctggacatgaagaacacgacctgccaggacctacagatagaagtgacagtcaaaggccacgtcgagtacacgatggaagcaaacgaggactatgaggactatgagtacgatgagcttccagccaaggatgacccagatgcccctctgcagcccgtgacacccctgcagctgtttgagggtcggaggaaccgccgcaggagggaggcgcccaaggtggtggaggagcaggagtccagggtgcactacaccgtgtgcatctggcggaacggcaaggtggggctgtctggcatggcattcgcggacgtcaccctccttgagtggattnccacgccctgcttcttggacctngggagaagcttgaccttccctcttcttgaccctttacgttgagtca

SEQ ID NO: 137636 - DNA, 1388 bp, Homo Sapiens
  misc_feature (1045)..(1045): n is a, c, g, or t
  misc_feature (1095)..(1095): n is a, c, g, or t
  misc_feature (1101)..(1101): n is a, c, g, or t
  misc_feature (1203)..(1204): n is a, c, g, or t
  misc_feature (1294)..(1294): n is a, c, g, or t
  misc_feature (1350)..(1350): n is a, c, g, or t
cgccttggggcgggcacccttcgttagggcggccgccttcccccggggtgaggggtgcccattaggcctcttgacggaagttcgggaaagctttttcacggaaaccctttttggttccacccccctccctttaaaaaggactttctcccccaagggggggaagagccctcgccccagcttcttcccaggttggagggctcctggcccccgagggagtctatgaggctcctcccaaaactgccccccattcggtgatgtccccgaccgccgggcagcctccaggtcctgggcgctcccaaaggttctcccagggacctcctgtgcacatggtttctgccgctcaggcgtcctgggctgcctccccagcacacgcatgctctgtgagtgtcttttccctaaggccggacgccctcgggaggcctaagcggggaggtcagtcgcaggctgacgctggcttgcccactgcctgagcctagcaggagcctctcccagtagatcaccgacacccccgtgggttttctctcccgagatggggaggcaccccgttgtctctgcaggctttttacactgtggcaggcaccggcaacagggaagacgctagtagtcatcccaggtggggtatctgggaaagctcgtggccattctccagaaacatctctatcctctgtcaaactccaggaaccagggttgcgcctcctgtaggtggtcctggacagggttgtgtccgttccactgggaacccagggctcctcgccacgctccagttggatgaccacacgaggtcgagaggtggagagtcccagcgaggccacaagtgcgaagttgtctagcatcacgcggcaggtacacgggccctctgggctgtgtcacaggagcccccactcctcactgggagaagtacacaagccacatcctcagaaggccatctggtcacttcctcgccgccagccatcgagcaccaggaacctcctggaaaccggacccgacccgcggtccccagcccagaccaccggtgtggcctgacgcgggcggcgaagtgacagtnccaccgccggaagtccagcccttcggttctcattggcccagtgcgcgccnggacgnttgctacagccttccgggtcacgtggttcccgcctgtttccctgcgtggaggcggggcactaccggtctccttggcaacgtccaagcccctgccgcgcgggnntggggaaatggagtcgcgcggcggcctcgggttttcaagggcttggtggcgctggtggattcgcccggtgtgtagtcctgccttcggatntccaggtgtcctcccaagcagtcccggagactaaaccctgcaggtgcgaaagaganaacttccgaggttccaagaggcaacaccagcagttagc

SEQ ID NO: 137637 - DNA, 260 bp, Homo Sapiens
ccttttaaagtcacagtcaactcgactgtggactggatatatttgtgaaatataataaaactcttttcccaaggctccccatgcttggatgtcacagttatgtcaagttaatataaacatttctaagtgctcactctcaacttctgtgttatcttgccatggtccagtaacagttcacacggcagaccacaagttgtgtagcactggcatagacgagggcttctcaaactcccgtctgcgtctcagtcacccacaagcct

SEQ ID NO: 137638 - DNA, 333 bp, Homo Sapiens
aaacaaaacatgacaaccttggcttttccgatatggaacacttttgttgttgtggagttccctcttgctgtatcttctatgcaattccttttctaaaaaaaccccccggcagaggcagagtgccctccggatatctgtccggcgccttgctgagtggtggaggtgagggataccagctccgggtgtgcctcttttctctccctggctgccaatcctgattttccctgcagtccccttggtttgtaaattgcctgcatttattctgtcagccaacatgtacaaaatgtaagaaagaatttttaaacaggtaataaattatatggggtaagcaac

SEQ ID NO: 137639 - DNA, 445 bp, Homo Sapiens
tttcgcattatgtgagtgtagccattttattgacagatgtttcagccacggccaatgatctattattcagtacaagacacattggttgataactcttattccaggacttctcctggctggaagcatcaggaaaggtgcaaaaggcaaatgagatggtcaggtgggtcagcaggcaggtagcaagcaaacaagtaggcatggtggttagaatctctgggatctcttgagcttgcggatagcagcattggtgtccccttcagtagcaatgagtgcctgtagattggcatggtggttcccaaatcccatggcctggagagaatccatctgtttgctaaaacaaatctcaggagcttgcagagggtgggaagggtccccatccggggattgtagcctctgcaggactgttccaggcttgtggcagcactcaggtcccttgggctcagct

SEQ ID NO: 137640 - DNA, 552 bp, Homo Sapiens
  misc_feature (288)..(288): n is a, c, g, or t
  misc_feature (340)..(340): n is a, c, g, or t
  misc_feature (442)..(442): n is a, c, g, or t
ggagggtcaggatgggttcctgccatcacaggtccagaggcagctcaagtcttttccttgccctggcccttgaaacacaggcgggttgctgggagggaggagatggagcagatgcatcgctgcccatcacttctggctgagaactcttcacaaccccttgaacagcaaagtcggtagcaccgtgctgagaagtctgggcatgcccggggttgagcagaagcctgtgtgggggtcacggtcgcaggttattgacaaggcagtgaacaccccacagcttcacaaagcagnaagtgcagtttacattaggccagttgagggtcccgttgacaggggttcaagnaaagggtttccgaggccattaaagccctcctttctcttggcattttgggaatgccatctctgctgctccgtggtcccgcagagagctcggggctatgctgancaaggcctcccagggtgcctgctgtgccttcactgtttcagtcagggacttgccagctatggaatgccattaaggtcacctttcccgggcctccaagaaccttgccccac

SEQ ID NO: 137641 - DNA, 950 bp, Homo Sapiens
tgttttgtttttgattttaagaaggaattcttttccaaagttacttccaagtaaattacatttcatgctgggatacctgcttatgtgcatcacattttgacaaagggcagtggctcgctaacactaacatgaatttaaggcccagcatcattgcaatttgtcactcttcatcctcatcctcatcataataccgatttctctttatctgttcttccacagagagctctttgaccacttctccctcccagagttccacatcctgggatttctgattctgagtagtgaattcttcagcaaaggtgttgtctacaaaactcgaccaattcagagacttgggttcttgtggagattgttgtttgaggaagctgttatcatcttcatcggagtctgcaccattttctacaagattctcattctccatctccaaactatgaccttccttacttctcttccctgtctctcctttagattctttgttttgccaggttgtttttcccacattcccattcttcttagaagccttggcattttccacttgtttcctttctgcaactcttccacccacagactcttcactctgctctgacatgctccagcctttcctgataggtggggacacagtttttgggctcttgacagaggtgctttgaaatgaagctgctacagtgattgggcggcttctttccttcagtgaagaagatcgtcttaggttcttcagatctagatcgacatcctcaggaacttcgggcttgctgatttcgtcttcaggaggccatttgggctttgacattttggatcccttcctccaaggcacttcctgaacttccaagttcagtggggggtggccaggcgatcctcagcttcttggtttcagctggcttgtcttccttctcctgctgagaggaggccttggcttccatacttgcagccaggacacccaccttagcacc

SEQ ID NO: 137642 - DNA, 831 bp, Homo Sapiens
  misc_feature (454)..(456): n is a, c, g, or t
  misc_feature (752)..(781): n is a, c, g, or t
ggaacttgtaatctcattgttttctaaataatgtttcatttttcttcagtgttgaaaatagttgatttacttaagaatggcatgatcatgatgttccaagattctgattagtttctttcaaagcattctgcgcctcttcaatgcccacactgctgagcactataataatagatgttgttaggccaaaggatgtcagatgtaaagtatgttctctagccccactcttagaaatgttttatcaatgactcagtccacttgattttcaaaaagtcaatgccatcccattaaacaagtaaccccttaggtacagaataattaattcctgcctgagtcactttaacagccttctatagagtgacatagtcttgctttttttcacaagcaatagctgaaaagaacaaatctcaactgtaagaactgtcagtacattgtagggataaagcactttttgaannnaaaatctctggcatgtattagacagactgaacatgagatagggttggggtgggctgagccttttggtgtcattaactgaatacacaagaatgaacctctcatcagatatcaggaatccatgtcatgcaagtactacaataagataacagtaaattcaggaatgttactggggaaaaggaagatagcctcactgagaatttaatcatttaacattaaaaaaacttttacattggttcaagaaggtaaaactgtaagaatcagattaggctcaaactggcaagaagccatctaaatcnnnnnnnnnnnnnnnnnnnnnnnnnnnnnngtccatagcgccgtctgcgctgtttataaaggtgacgaaaatttatgtat

SEQ ID NO: 137643 - DNA, 1681 bp, Homo Sapiens
  misc_feature (1252)..(1282): n is a, c, g, or t
  misc_feature (1574)..(1582): n is a, c, g, or t
  misc_feature (1618)..(1618): n is a, c, g, or t
ggcaaggctggtaccggtccggaattcccgggatatcgtcgacccacgcgtcgtcgaggtgccgggttgcaggcgctcaggagcgctagggtttgaggcctgctttctgctcgcgccagcagagcactacctgaggcagcgaggcgcagcgagcctagcctccccgcgccctgggcagtgtggccatggagaatcaggtgttgacgccgcatgtctactgggctcagcgacaccgcgagctatatctgcgcgtggagctgagtgacgtacagaaccctgccatcagcatcactgaaaacgtgctgcatttcaaagctcaaggacatggtgccaaaggagacaatgtctatgaatttcacctggagttcttagaccttgtgaaaccagagcctgtttacaaactgacccagaggcaggtaaacattacagtacagaagaaagtgagtcagtggtgggagagactcacaaagcaggaaaagcgaccactgtttttggctcctgactttgatcgttggctggatgaatctgatgcggaaatggagctcagagctaaggaagaagagcgcctaaataaactccgactggaaagcgaaggctctcctgaaactcttacaaacttaaggaaaggatacctgtttatgtataatcttgtgcaattcttgggattctcctggatctttgtcaacctgactgtgcgattctgtatcttgggaaaagagtccttttatgacacattccatactgtggctgacatgatgtatttctgccagatgctggcagttgtggaaactatcaatgcagcaattggagtcactacgtcaccggtgctgccttctctgatccagcttcttggaagaaattttattttgtttatcatctttggcaccatggaagaaatgcagaacaaagctgtggttttctttgtgttttatttgtggagtgcaattgaaattttcaggtactctttctacatgctgacgtgcattgacatggattggaaggtgctcacatggcttcgttacactctgtggattcccttatatccactgggatgtttggcggaagctgtctcagtgattcagtccattccaatattcaatgagaccggacgattcagtttcacattgccatatccagtgaaaatcaaagttagattttccttttttcttcagatttatcttataatgatatttttaggtttatacataaattttcgtcacctttataaacagcgcagacggcgctatggacnnnnnnnnnnnnnnnnnnnnnnnnnnnnnnngatttagatggcttcttgccagtttgagcctaatctgattcttacagttttaccttcttgaaccaatgtaaaagtttttttaatgttaaatgattaaattctcagtgaggctatcttccttttccccagtaacattcctgaatttactgttatcttattgtagtacttgcatgacatggattcctgatatctgatgagaggttcattcttgtgtattcagttaatgacaccaaaaggctcagcccaccccaaccctatctcatgttcagtctgtctaatacatgccagagannnnnnnnncaaaaagtgctttatccctacaatgtactgacagtncttacagttgagatttgttcttttcagctattgcttgtgaaaaaaagcaagactatgtcactc

SEQ ID NO: 137644 - DNA, 593 bp, Homo Sapiens
  misc_feature (273)..(273): n is a, c, g, or t
acacaagaaagtgctgcttacattgttgttttgtgttatttagtgatttgttcagcgctcatctcttccaccagactgcgcttcctgaggacagggcccttaaagcacctcacatagggtgcgcgtctggtacactgtcgccgagtaccagacaaccagtgtctcacacgggggaagacgatgaagacagcaatggcatccttgggaagatgggcaggagaccccatgacacctggcacctgggcctaagctgggaggccagcggcgtccccnagggagaccacggcccaggctgggagcttgaccggccagacgcccgtgggtgggcctgggccttcccgcctgggagcctcccgtctggcgcctggctctgggtggggtaacaggagctacaggccagcaatgcccttcctgtcctcggcctgggtcaaggacttggtgcagagggcatcagcgatgccaggcctagaatgtgcctcaccccgacagtggccagcacggactgtgggctacagagttgcttcagcctgagcactcagcctgaatttggacataacatcaactgaattaagctcagaagtagggtgtaaagg

SEQ ID NO: 137645 - DNA, 500 bp, Homo Sapiens
ttttattgtgagaaaaacagtcttcaatacaattgttttatttaacacacatatgtacacaggaacattcagcacacatagagtctattaagtggaatcattaagaaatgtctggagaggcagacattttaattcactcgctgtacacagggagttcaatcatcacattttcatacaggtgtcacgtcatgtcatcttttgcttgtaaattaccaatgaagccacatatgtctctacatatacaaggacaggtccaaatacagtgccagtgaaatcaataaaacattaaaggtgtacgctgggatgacaatgcagagtttacctcagtgctgagaaatctaagctgggatgaagtttgggactgtggctattaaaatagccaaggagagatttatgttaacaagaatgcagatattagtttagtagttagagatgaccgtctaatcatcaaacatcgtccaccccagggttttgcagccatagctttctactggccttgg

SEQ ID NO: 137646 - DNA, 583 bp, Homo Sapiens
  misc_feature (76)..(175): n is a, c, g, or t
agggctcaaacgatcctcccacctcagccacctgagtagctgagactacaggcgtgtgccaccacacccggctaannnnnnnnnnnnnnnnnnnnnnnnnnnnnnnnnnnnnnnnnnnnnnnnnnnnnnnnnnnnnnnnnnnnnnnnnnnnnnnnnnnnnnnnnnnnnnnnnnnncaggcccattacgccatgagccaccacacctgctggtttttgttttttaaatggaattgaaaggaactagccttggctagttgcagaattcacacatatggggctatggcaacagcagattctggagtctcagggtcttttctttctagataagttacagggcaattgcttttcagagtacttttacatttctattccattcttgtcagtaaagacaaggatcccataagctgatggagaaactgaggcctctagaaactaaacgctgggaatggcacccagggtgctgaattccagggtctcctcttttctgccacaggcacacatgccccagcagcccctttggagagccccctctctatagggtactagccgggggtcagactctgggagtcagacggcttccgt

SEQ ID NO: 137647 - DNA, 1737 bp, Homo Sapiens
  misc_feature (979)..(1039): n is a, c, g, or t
aggggaggcccccctcgcccaagtgggttttttcaagatttttattacccaacgcccttttaaatagaaaatggcgcggttgtaccgccttaaaccccctgggaggtgtattttctgaaagccggaaggccccaaggcccccgggaatttttttcaagtgccgtttaagcttcccaatgtttctggtccccctttctttatttcctttccaggcatttccttaaatttggcaaaatccaaattccgccagaaagttttaaaggcgtaaaacttccgcttggttgccccccagctttctttttaaaatcagggccaccaccaaaatgtgtggaggggatgctagtaaaggtcaaaaaggaaggaaaggcaaaattattaagggaaaagttgccatacgaaagattatctacccttttctttttttaccctcctttcttttaaagaaggcgttaggggtaaactacaaatccctgaggagttggttaccttttaatgttggctgacaaatgtatgaactattatgaaaattcccatattgggcccaattgtatgtttctaaaagtaaaatgacatggcttctttgattggggaaaactgattggagtaattccttatttatctgaaagcatatgcctagtcttgacccactaggacttatgcatcagtaaaataagatcttgattttatacagacatcagggaaattacccctgaataaactttagacataattaggtacaataattttacctatttttaaataaagttaaaatctcctctaagttattaaaaatgttaatcagatatgaattttaacatttccattaagacaattacagttgaaaacattaaatgacggaagttgccttgtaaaagccacccgtatgaaaggagtacatgtttgacaaaaataagcataaaaaaggtattaaatccctgttccttttctctgattttggctgatttatgtgtgtgtgtgnnnnnnnnnnnnnnnnnnnnnnnnnnnnnnnnnnnnnnnnnnnnnnnnnnnnnnnnnnnnnatacatagttatgtgtatatattgttttggaatgtcaatgggtttccataaccgtcggctaggttcaagcagaacttgctcccgaagccactcggctttagctctctggaatcagcgacgcctcccttaccagcttctttcacttagctttcctactgttttccacaaactccatcagcactttatccatatagaattctctgccagggctcccatcattgtattttgtatcaatggcaaaacacaagaataatacatccactaccatttcataaatagacaggaagcaatgagcgactaggaaagcaaagaggcagacgatgatcagaggcagcacccatactgtgtagtcctgctggtagttgagcagcataatcccagctaaacctgtgctgcagactatcagcaccttgccaaggaataacataaaatctcctactgtgttgatggtagccactcgcaaagcattctccaccagaatgacaaacggcatcctttcgctgaggctgcagtaagttggtgctggttgatagctgtggctgtgtatgcattctgatttaaataatttaggcacttttcaagacaccaaaggcaaccaatgcaagatttcagcacaccgacgcgtggtcgacgatatcccgggattacggccgtaccagcctgctttttgtacaactgttctatattcactatgcctc

SEQ ID NO: 137648 - DNA, 558 bp, Homo Sapiens
tttttctagcaaagtggtttattctttcaacttattgctggaagaagtcctttaaacaaaccagtgcagagaaaatgcctatcaaaagtatcagtttttcagctttcttcaccactgctttagatgtatcatttttataattttatctcttcatgtttttaaagagctgctacttcagatgacagtaactctttggtgtttatttttatttccaagattgtgatttttttaagaggctactttaaggctgtgaattgtctcactgtcttttcactctctctttttagttcttcaatatgggcatccaagcgctctagaatgtgatgagacctcagttcctcctcttccaaaaatctggtagctattgaaccaaggggagatacaggcaaggaacactcatgtaaacccaattccaatttcatcaccatttcagaaagatgacgattttctaatttgagtgactccagctgatccaaaatctccttatgctctactgctttgtcttctgccttttgcatctctgctctgagtcgcttttccatgtctgaggaagaacct

SEQ ID NO: 137649 - DNA, 739 bp, Homo Sapiens
  misc_feature (150)..(257): n is a, c, g, or t
  misc_feature (425)..(425): n is a, c, g, or t
  misc_feature (437)..(480): n is a, c, g, or t
ggggtctcgctccgtcatccaggccgcatcgccacggcacgatctcagctcatcgcaacctcggcctccccggttggaacaagtcgcccgccccagtctcccgagcggtcgtgattccaagcccacgccaccagcccggctaatcgttcnnnnnnnnnnnnnnnnnnnnnnnnnnnnnnnnnnnnnnnnnnnnnnnnnnnnnnnnnnnnnnnnnnnnnnnnnnnnnnnnnnnnnnnnnnnnnnnnnnnnnnnnnnnntgacgtagcgtgcccggcccagatcatctttttcatcaattgtagagaaggggtttcgtcagccaacgggtggagggtggggcgggttttactcagcctgcgtactgtgaaaaggggaagtgagtgtgctctgtgaactagatatggaaattgtgtgtgtgttgttgncgtgcgcgtgcnnnnnnnnnnnnnnnnnnnnnnnnnnnnnnnnnnnnnnnnnnnnccaatccccccacgaggacccggaaatagtgtttgatctgtgtccctgcctagtcacctgtcttgtgtgtcgatgactgaggattccacaaatgaaggtcagcggtatctattgagctgtttctccctctcgtgcgtctcatctgtgtgctggagaaagggaagagaagaggttccgatgggaagttgtcttcacgcctgaggcagctgaaggcagaccgaagggaaggagggcatcctaggtgacatttccatagcca

SEQ ID NO: 137650 - DNA, 487 bp, Homo Sapiens
  misc_feature (442)..(442): n is a, c, g, or t
tttggcttctaatgactccttaatttttacacttctccagtattagattgtattttcataggaggaaaaataaagttctgatttaaggtgtcttccttctgggatggggctgtctccttcccagcattcttggcagctggtgctaaagaaaatctcccaagtgctaggaaaatctttcctcagtgtggggcttcaaaagtggcaaaaagtcatgttcatagtctccttttgttctcactgcagtccggagatgggggcaggctcttttcagggaatgagaacactgcgaggctcacagacttaaaaaatgggaccaagggtcacacagggattaaggggcaggacggtctcgaactcacgtctgttgggtgctagtccagcgcgctctgctcgcgggttctcttaactgggtcttcagggctgctttccatctaaatcacgncggggggattaaagctgcacttgctctccagttcccgcggtttct

SEQ ID NO: 137651 - DNA, 409 bp, Homo Sapiens
  misc_feature (45)..(45): n is a, c, g, or t
  misc_feature (58)..(58): n is a, c, g, or t
  misc_feature (87)..(87): n is a, c, g, or t
  misc_feature (225)..(225): n is a, c, g, or t
atatggatccgagtagtgcccctctgggtcccctaccccaaaagnatcgaaagccggntccccaaagagatagttgtacacttatanttcatagcagccttattccacaagaggcaaaagcaaccccaagtgttcatcaacagatgagtggtgtgtgtatttacaatggagtatattgttccaccttaaaaaggaaattgtgacacatgctacaacatggatganccttaaggccattatagtaagtaaaataagccaatcataaaaagacaaacactgtatgattccacttacatgaggtacctagagcagtcagacttcatagagacagaaagtagaatggtggctccaggggcttggaagaaggaaaaatggagagttatttaattgctatagagtcttcagcatt

SEQ ID NO: 137652 - DNA, 1004 bp, Homo Sapiens
acaaaatgtgtatattaatagctttgcacaaatattttaaagacaaattcagctagtctaagaacttcatgaaaataaaacaggtggataaatacttcatgtgcacaatgcactccatcagacgtcgtcggctgggagaggaggtatgttgatccttggccttgtgaagaatgctatcttctccctaaaggtctgcacttggatgggctctttgtggctctgcccacgcagctggtagatctccttggaggccttcttcagcatcttctcagccgcctgctcatgacggtagtcaagtttggtctgtcttgtctgccgctcggcctcccgcagcaggccacggagccgctcgtcccgaagcacccagggtgggaggtcagtctggccacggagctgggcgtcctccaaccgctgccgcagctcacggagggcgcagagctcctcattcagctgcctctgccgtgttctcgacgcctggagatccagctccaagtccagggaggtgcgggccatgagctcagccagggaagacctgcatgactgcttatagcgaagggttcgtctttccaaagtatttcggacaaagggggacttccggggcagcgttgaactgtcgctgtcactacgataaagtctgcaaacatactggcttcgtgcttcaggcgagaatgtctgggaacggacaatcgtgccactccgaacaaaaggcgaccctcgggcccggcggctgggcccgctccttcacgaggctggctgcttctttcagaaagaaatctttccggtttggtttccttaatcaaccttaagaggcgaagggctgaaattttctcggggcctgtaaggcccctggccctgacacacaaaatgggtggccccagaatgggaatccaataccccatgcaacagggcttttgggggaacgggaaggctttctctttggtgggcaaattttataaacccccctaattccaccaaagccccccttgccaaattccccttcggaa

SEQ ID NO: 137653 - DNA, 885 bp, Homo Sapiens
  misc_feature (335)..(335): n is a, c, g, or t
ctaccttcttcccatcaatctctcaattgttcttccgttaatcaccgcttctttttcccgttaagctggccccccaccttcccacaaatttgcctgtaaacttccctttaaaccagcttgcaccgtttatttgtcacgaatttcccctttgtttggtatcatcttaagaagctcgctcaatattgctaatggtccagcatttaacctgtacactcacgctgtccctggaattttgacctcccattttgatcatgtcccaccctcgcccgagagcacagctgccggagctccgccaccttcttactcatctcggtccaatggccacctcgattggnttccggtcacgtgtggtgctggtacatgacagggatgcgcttcttcacataagggaagcagtgtatggctggtcaggatggtgcgccgtttgcactgctcttccaccccgccctgcctcttcccggtctgcgtaaatggcatctcaaacatgaagcggcggatattgtgggatctctcaaactctgttttcctttcttgcaactctttttcgtcaaagaaggggatgacgtgagtcacctggatgtatgcatacttagaatccagatccttagggttgaccttgccagaatcctgtatcattttgacattttcagaaccaaatttatccgagtacagtttaaggagtctctgagaaatttccgacacggtgtgagtttgggttccttgtaaatatactcctttccatcttcatcttcaaagaatccctgcccgaagaaggctacccggaagtaggtccccagaagcctgcggcccgagtgcatgacctcggtcactttgccccggccgtaatggccgaattcccgggcatatgtccgctaccgtcgactg

SEQ ID NO: 137654 - DNA, 791 bp, Homo Sapiens
ttctatctacagtcaattgtctctatttacacatggagtctatttgtatgttgccagctttttccctaataaaagttaaaaggggagaaggttggcaagagaaaagaactttaactcccatttcactgcttatgctttcccattatgagagaaaaaagttgggagggttaacttcaacacttctaaaaagctctcaggaaagggaactcctttaattcctttggcaagaaaagagggaagggagagagtcttacatttctattcccattaccttattaagccccaggacagtggactctgcttaccttactcatgcagtaaggtccattgtacagatggacaatggacaaaaattgtaagttggggaaattatgatttttcaactttacaatggtgtggcgatatgcattcaggagaaaccatacttcgaattctgatccttttccagactggtgatatgcagtaaaatactcttacatgagatattcaacactctgttacagaataggctctgtattagatgattttgcccaactgtaggttaacgttaagtgttccgagcaagcttaagttagactaggctaggctataatgttcagtaagttaggtgtcttacacgcattttcaacagacatacaatattttcaacttatgatgggtttatcagcatgtaagcccatcttaagttgatgagcatctatataaaattttgtacagcagatacctatattggtcacacatttaattatgaattagcacggttttaaagctggttcagtaaacgtttcctg

SEQ ID NO: 137655 - DNA, 724 bp, Homo Sapiens
taaatgaactgatttatttttatggcaaccaattcttaattcattcaatagtaattgaattgggtacctactatgtgcaaggaattggactaagcacaaatagaacagaaaataatcatcccatgtctccaacaagaatagacatctatcagtggtcgtgatttgctgttgctgcttggtgtggaaatgctgagctgggtgtggacaggacgctgtgcagtcctgctctgtgtagaatgggtccctatggtgtttacactttgatcaatctatgcagttccctgaagatcaaagaataaatggaaaggtactggcctcggaggaagagatgtgactgccaagaggcctggccagacagcctgccaggcaggctggagtccatctggctggggcagctggccttcccacagtgagactggcagtgtgctcagatggccacactgttcggaatccggtctggggacaagtagtaatatggcagctgcttcttcttgttgcgctcagcaatcacgctgacaatggcctcgaggttcttgcggaatcgggccatggcttccttcacaggcttctcgataaaatgctcttctgggtacatgcccaggaacagctcgttttcctggaactggctcagcgcccacactgcacccagatgccagcaggagcggccgcggtcgggcagcgtgtccacgatctgctcaatggtcaccacgcccttggcagtcgg

SEQ ID NO: 137656 - DNA, 453 bp, Homo Sapiens
tttacatattcttataagtggtttattgagagctgatttgtcaatcaaagaacacaccataatgatgggaatattgatgatttcaacataaaaaaatttaaataaggtcaatctttacatagtaattaggagccacttacaagatgtatcaagcaaacagagcaagatacagaacagtgtgtggttggtttgctaccatttgttttaaaagaggggaaagaatatatatgtgctacagacatgtttatatgctatgtgtactcctctgtacatgtgcttataccacatgtatgtgcatatctaactctgcacaaccccgggaaaggcaagtcgacgctgatgtcattgctggctgaggagagaggtggtggctgtgggacagaatgggagggacgtatccctacataatacttcataccttttagctttgaaccatgtgcaattattacctat

SEQ ID NO: 137657 - DNA, 169 bp, Homo Sapiens
gtcgctgtgctcagtctgtcttcccttttttattttctaatatcttgagggataatattcgaagttctctcctgttgggattcagctgctccgtccattcttcctttccactactatctctatccttctctttgcttcataatcaaacctcgtgccgaattcctgaagc

SEQ ID NO: 137658 - DNA, 905 bp, Homo Sapiens
  misc_feature (809)..(809): n is a, c, g, or t
  misc_feature (843)..(843): n is a, c, g, or t
  misc_feature (850)..(850): n is a, c, g, or t
  misc_feature (861)..(861): n is a, c, g, or t
  misc_feature (869)..(869): n is a, c, g, or t
  misc_feature (883)..(883): n is a, c, g, or t
acgcttcctgaatgaaggagtaatgaatgcagtggctgcgtctttgcctcctagagtggcacactgtcgaagtaaagatgttgccaagattctgtggtcatttggaactctgaattataagccacccaatgcagaagaattttactccagcctgataagtgagattcacagaaagatgcctgaattcaaccagtacccagaacacctgcccacctgcctgctgggcctggcatttttggagtactttccagtagagttaattgatttcgctctcagtccagggtttgtcaggttagctcaggagagaactaagtttgacctccttaaggaactatataccctcgatggtacagttggcattgagtgtccagattacagaggcaatcgtcttagtactcaccttcagcaagaggggtctgaattgctgtggtatttagcagagaaggatatgaattcaaagcctgaattcttagaaactgtctttttactggagaccatgctgggggggccccagtacgtcaagcaccatatgattttgcctcatacccgatcttctgacttagaggtccagcttgatgttaacctgaagccattaccatttaatagagaagccacgccggctgaaaatgtagccaaattaaggcttgagcatgtgggagtcagccttacagatgatttgatgaataagttactaaaagggaaagcaagaggacatttccaggggcaaaactgagtcagagcctggggcagcagccattgggagttgggagaattaaggcagctgttacctcttgggggcttccttttgncaattgttaggcaggttaaatccagggggccatnggagatngcttgggcctnttgccccngcagccttgccatngcagaacccccaaggaattgaa

SEQ ID NO: 137659 - DNA, 513 bp, Homo Sapiens
  misc_feature (314)..(314): n is a, c, g, or t
  misc_feature (398)..(398): n is a, c, g, or t
ttttcctggaggagccctctgtcaagggtcgctccagtaaccactctgcaccccgagtgattgagtgcagagaggaagcgggcagatatttgcagaaggaggctgggagagctcaggggattagttcccagggagccctcccttttgaggccggactcctctcctgcagccgagcacgcagccattaaggaagtctttgagtttggtttaatggcccctctttgttttgaagtggctgtttactgaaccttcaaagcccgctcggcagcaggatgtgatcgagggcctgaataattggatgaggcaccccaatnagggaaacagggaggcggggagcagagccagggacttagccgacagccaaggccctctgtctgagcccgctggagggctgaggnatcctgcaaccagaagttgacctggagcgggggtccctggacctgcctctttgatgttgtgctgccttaattaggacaccctaattaagtcactgagggaggagctttttttctt

SEQ ID NO: 137660 - DNA, 480 bp, Homo Sapiens
  misc_feature (27)..(27): n is a, c, g, or t
  misc_feature (465)..(465): n is a, c, g, or t
attttttggttattttattttaaactntaatttgctcaatatttaataggaagtatgattcaaggactactaaaggaaggaatatacatgtgaaaaccataaaatacattttttgcattctactatttttaggggcatgaaatgaatgaaagctttagacttttttgcccctacatatgagacaacatattttgtatttcactcaaggctctgcagtaaaaagtaatgaaattgtacctttctaatgacatctatgcagcaggggtctatcgccttgtgggatggcaccaaattatccaagtgtattaggagactgggggcttttttctttaatcccttcttattaatgaagtgcataggtgctgctcccgggggaccactggctggacagatacacaggggaaggaggtccagaggagggaaaaactggggaaggacattaaatggaatttattaccccagccntggaaacattgccaa

SEQ ID NO: 137661 - DNA, 597 bp, Homo Sapiens
  misc_feature (52)..(52): n is a, c, g, or t
  misc_feature (72)..(72): n is a, c, g, or t
  misc_feature (102)..(102): n is a, c, g, or t
  misc_feature (132)..(132): n is a, c, g, or t
  misc_feature (194)..(194): n is a, c, g, or t
  misc_feature (462)..(462): n is a, c, g, or t
  misc_feature (499)..(499): n is a, c, g, or t
  misc_feature (521)..(521): n is a, c, g, or t
  misc_feature (543)..(543): n is a, c, g, or t
  misc_feature (553)..(553): n is a, c, g, or t
  misc_feature (585)..(585): n is a, c, g, or t
ttgtttgtttttagagacagggtgccactctgtttgcccaggctggaagagnaagtggtgtaatcatagctnctgaagctcaaactccagggctcaagtganctccaccttggcctccaaagtgctgggatncaggcatgagacaccatgccggcctggaggtcagtttttaatccaacataaaatctctcccnaccccactaattcccctcagtctcctgagagcacagacaaggcacagactgtgcagtttcccccaggtctcgctggtccctgccatcagaggggcctggaggacaccctgtgccgagcttgcctgcctgcctttgtgtgtcagcacttgtatccaccaagccccaaacggaggagggcagcacttgagggaggccagcagcatcagagacagagccttgtcctcagggaggagcaattttctggggggtaatggctaaagcccaacangttggataccattaccgaccgggagacttggttcccnaccacgggacaaattttgggtnaaacacgagggctttaacccgngggttccctngttttttgagcggccccaccggtggacttcantttttttccctt

SEQ ID NO: 137662 - DNA, 163 bp, Homo Sapiens
ttacactttttaaacttcttcctcttctcctatacctaagggctccaatgatactacttatcagggaagaaagtactgtatctagataaactacccttaagtattacaggcttagcaagttgaatttctagaaaatactcactcataatttatttatttattt

SEQ ID NO: 137663 - DNA, 296 bp, Homo Sapiens
tttaaatatttaagagctcaaaggtatacaggcagaaagtggaaaatctcactactactttttattctaagctcacggtgtttcagatatctatttcacaaccaagaccatgaaacccatcatagtatttgtgactactatgaaaactatgacatgtcagtcagccttgctgcctgctgtgtgctgtatataagtccattacatattccttatagctggattgaaaacctgaaaatgaaatgaagtccctagagaaacttggccatgctggtgctttttaccaagtttgacaattt

SEQ ID NO: 137664 - DNA, 250 bp, Homo Sapiens
ctttacctttcctaaacatcaatttccttcttaagcatttatgttcagtttttccagttttaaatactattttcattaatagtaacttatatactagaagttaaattctatggttctttcctatgatcatctaattctcagcaatctttgatatgctagcatacctcatatagccacatgttatttttatttttaactgtaaagaaataggggttgattctcaagttctctgtctgggcaaatctcgtgc

SEQ ID NO: 137665 - DNA, 487 bp, Homo Sapiens
  misc_feature (232)..(348): n is a, c, g, or t
  misc_feature (379)..(379): n is a, c, g, or t
tactttctatcttcataaccatttaaagcgatttagcttgaaattaaattttatcaggctaccaacatgttatttatttatttaataaacacatttattgaaaacctatactattgtattggcaccatacagggtattgtatttatactagtgagcagaccagggcatttccatcctcatggagttcatggtctaatgaaaatagctggggccgggtgtggtggctcacccnnnnnnnnnnnnnnnnnnnnnnnnnnnnnnnnnnnnnnnnnnnnnnnnnnnnnnnnnnnnnnnnnnnnnnnnnnnnnnnnnnnnnnnnnnnnnnnnnnnnnnnnnnnnnnnnnnnnnagatcagtggcacatggtggggtcccagctncccaggaggctgagttgggaggatcatctgagcctgggaggttgaagcttgcagtgagctatgattgccactgtactctatactccagcctgggtgacagagtgaaac

SEQ ID NO: 137666 - DNA, 526 bp, Homo Sapiens
  misc_feature (382)..(382): n is a, c, g, or t
  misc_feature (501)..(501): n is a, c, g, or t
ttctttcctccataaaaataacatttatttaaaaaaattacacacagtaaaattcatcctttttagtgtacaagcctatgggttttgacaaatgcatatacttatgtaactacaataaagacacggaaaatttcaattattaagacaaattcctcatgctaccactttgtagtcaaggagcattccaaccttaacccctgacatccactgaagttttttctccatccctattgttttgctttttgagaaaataatatgaatgggaatcaaacagtaagcagccttttgagtttggcttcttttacttaggtaaaatgcatttaaggattcatccaagtgggttacatgtggtatttcattaggtttattgctgaggtagggnttcccattgcaggggatatactctcgtgcccgaattcctggcagcccgggggggatcccctaggttctaggagcgggccgccaccgggtggggaggctcccagctttttgttccctttngtgagggggttaatttcgaggctgg

SEQ ID NO: 137667 - DNA, 598 bp, Homo Sapiens
  misc_feature (45)..(45): n is a, c, g, or t
  misc_feature (76)..(76): n is a, c, g, or t
ccaataaaaggtacaggaaacctattggagggtgtgccataaaanattaacacccccaggaataggcaaaaatatntttttatttaataatttaacagttgcacagtgaaaaatcgtacatttttacacatacaatttcatttcgttaaatttgcacacatctacagaactttcacacaacaagcacctgaaactctgcaggcagtaggaaatgcaaatactaaaatgtatttattaaccaaatgatagctgaaggccctgcctcagccagacaatttatatagatatgtctatatatacataaaaaaattcttcaccttctagatccaacagcagcttttttaaaaaagaaaaacatacctttctcattttatttaaactgactcgactgtgtcattttctgttttaatttcagagggtgttgctatgctttcctctgtacaagctggtggtgtatcaattcgttcttccttaactttgggactgtcacagggttcctgcaattcgtttttgacaatgttcaacataatattcaaggggttttcaactggtgtcttgctgggagatggtgtaaatgtgcgccggatcctctagatcc

SEQ ID NO: 137668 - DNA, 444 bp, Homo Sapiens
ttttttgaccgtaggacatattaagatgtttattatttactaagagtaacatgtatacatttgcagtaatttgtacaatccaactacattacaattcacagtaacatacactagctctaacctgccttggatacaattaagtctcctcaacacactattttatcgccaaacttacattctggcttttataatcattttgcaacacctggtacagtatacacctatagctttgccatagaaatgcccctaaatgcccttcagagagcagaggtgaatactttctcatgaagaaacgccaacttttctaagcgagttcgtttcagtagtgggagccattcccagtaggataactctaccacacggtagccaagccgagccagctgccgcctcttcatattgtgcagtccaaggagatccctggagccatagcaatgctggttcccc

SEQ ID NO: 137669 - DNA, 340 bp, Homo Sapiens
aaggacctgatgaattattattcggaattttatggcctcacaggttgcaggcttcataccaactgcagctaatgagctatgggccccgagaaacactgaggacacacggcgttctgcacacagagtgggctgtttctgtctgttctccccctgcacccttctcagatgcaatctcaagtcataggagaacttgtgcaaatgtttctcctgggatggtttcctttaggagcatgtgtcctattaacttgaaatggttgtcttgaggcagaatgtttttaggaagttaggtttttttaggggggggaaacagggaaccaaaggcaaagcccaataggagatc

SEQ ID NO: 137670 - DNA, 1149 bp, Homo Sapiens
  misc_feature (941)..(952): n is a, c, g, or t
ccgatgtttaggagctctgtgtgtgagtagaatgggactctaagaggggacatgctttataaatgctaaccaggtgcatagtcgtggagtgactcagactccaagaggccaggaggcaaaaggcggcaaggcctcgactttccttctatcattgccccacgtcacatttcccctattcaagaagagcagcagagagacttaatctgtcttcctgcagagcagggggcaagagggaatggtaatacaatgggtataccagcacaggatttcttacctggcattacagcatacctctagaacagtggatgattttccatatccctctttgaggctttgatgaggccattggattccctccattgtaagaataatcaacttttcaggtagagagtgagaaggccatttttaaacaataaaacgagcaccactggttgatgccacaggtttgcagagatttggattaacaagggtaagattcatgggaggcagggacatgcttgctgtgtgttcagaggtaaccctgagcactagagaagatctctttgctgtcttccacctaatggctcatgaaaaagggcccagtagatctgtttctcagagagtgtccagggcagagtagtttaattatatatagtctttaattgtttaagttaaaggttttcttacaatccctaatatgtaatatgttaagcaatatgagtgtgaaaataatacaggaacagcctgcagagtcacgcgacttacccaattcacactagcatgagtgcacattttcccttctgtgtatcaccttctgctcagtttaccccaagccagtttataaagtttatgaccattttggaagactggctgataacattttactgacttgggctttgaggaaattattttcaagagaaattaaataacgactcatagtaaaccaataccaaaccaaagcnnnnnnnnnnnnagtttgtttcacagtatctaaaatggcagagatttcaggaaagtctaatcacacttgaccatgagtgttgagttgcttttccttcctctgaggccaagagttacttatatccaagaccgtgaagaactctttttgacctgttggatacccggccgtaatggccgaattcccgggcatatgtccggtaccgtcgactg

SEQ ID NO: 137671 - DNA, 844 bp, Homo Sapiens
gatcacacttgaccatgagtgttgaattgctttccttcctctgaggccaagagttacgtatatccagaccgttgaagaactctttttgacctgttggatatgatcttgtgacttggtcgagggaaaatgaactcccagggttgttggagtagagctgtttccaccaaaagacagaactgtatgcagctaataagagctccagcacagtgaagatgagcatcaccactaggacacctgttaaactgacactggtcaggagacaatctttgatttcatatattggataatagtactccgaataaggcaatgaggatagataatccatttctgagccacaatgttgagaggcagtcctcagggctaccattgctgtcagcaaggaggaagaggcctgctcctgcagtaacagaactcactgcatttgaggtcaagctgctcaggtcaaagggcttagttgattgttttccagagataattgagagggatccagtaatgccaaacccaagaacggtggtttctgttggcagcccgttctgcaggtaatcttcgttttggtacatgtgtccaggtttctctctttgagggatagtgatgccctttggtgtaaagctgtgagaaacccccatggtttgggattgtaatagcatgatgctgatgatgctgttctcgcagcctggtcctgtgtgctgtggctggggatcagctcacctctggggagcgctcagctggaacctcccactggctgttcctgccagaacgatcttggtgctctgctctccagcctctgagacttccccggccgtaatggccgaattcccgggcatatgtccggtaccgtcgactg

SEQ ID NO: 137672 - DNA, 963 bp, Homo Sapiens
agtttgtttcacagtatctaaaatggcagagatttcaggaaagtctaatcacacttgaccatgagtgttgagttgcttttccttcctctgaggccaagagttacttatatccaagaccgtgaagaactctttttgacctgttggatatgatcttgtgactgggtcgaggaaaatgaactcccagggttgttggagtagagctgtttccaccaaaagacagaactgtatgcagctaataagagctccagcacagtgaagatgagcatcaccactaggacacctgttaaactgacactggtcaggagacaatctttgatttcatatattggataatagtactccgaataaggcaatgaggatagataatccatttctgagccacaatgttgagaggcagtcctcagggctaccatgctgtcagcaaggaggaagaggcctgctcctgcagtaacagaactcactgcatttgaggtcaagctgctcaggtcaaagggcttagttgattgttttccagagataattgagagggatccagtaatggcgaaacacagagctcctgaaaatgggtacccagacatcaaagtggtggaaattgctggattgaagtgggaggggtagggagcaaaaaccaagatggcccccagacttgaaatcaacaggcaacacaggatctggactgtcccaagaacggtggtttctgttggcagcccgttctgcaggtaatcttcgttttggtacatgtgtccaggtttctctctttgagggatagtgatgccctttggtgtaaagctgtgagaaacccccatggtttgggattgtaatagcatgatgctgatgatgctctggggagcgctcagctggaacctcccactggctgttcctgccagaacgatcttggtgctctgctctccagcctctgagacttcctgtccctttcttagagatcccgggaattccggaccc

SEQ ID NO: 137673 - DNA, 307 bp, Homo Sapiens
tttccacgcgtttaccttatatgtattaaatgtaaaccgtttcctgtacgcttatatgcaaaacaacgacaacgtgtatcctctgcattgaaatactcttgccgtatggtaaataccgtatcggttgtatggaaatagacttctgtatgatagatgtaggtgtttgtgttatacaaataaatacacatcgctctataaagaagggatcgtcgataaagacgtttattttacgtatgaaaagcgtcgtatttatgtgtgtaaatgaacgagcgtaccgtagttatctctgttttctctctcctcgtgc

SEQ ID NO: 137674 - DNA, 869 bp, Homo Sapiens
  misc_feature (43)..(43): n is a, c, g, or t
tttttttaaaaattccacaccactttatttcaacctttatccnaaaaatgtaaaaactaattaaaaatgtgtagctctgagcttcaggcactaacctcccaattctcacaggcaggtgggaagggaggccccgggcatggtgaaaatcagaaaaccacggctgtgtggagcacaggccctctcctagcaccaaagacccaagtccctcccacccaacccccacccaagctctcctcttcaaggaagaaatatttacaattgttgaaacttgtcagggaacagggtgcatggcggtgcatggcacatggagctgacctaggagggctagggcctgcccccctgctttttggcaggaaggatggggcacagctcaacttcttcctcatcactgtcctcttcctcttcctcgctctcctcctcagacacatcattgctcatcgtaacaatctggtgccgcccagtgatccgcacagggccagagcccgacttcaggcggaaggttacaggtggttggagctggaagtcatccagactgagcatgggttggcaggacagcttgaggttggccacagggactgcgatctcctgatggtcatggttccgggccacaacttctaccacattacactcgtctttggctccctcggtgaggcagagcatggttagtgccagcacgtgctccgcatcatcctcttcctctaccttaaaggtgaaggagcgggtgtggccggagagctcacagctgaagaaaaaactgtccatagtgaccggggccgggacctgtaggcccccgacacccccggcccgcgttcggctctcctgactcaaaaacgctaaggcagctgcagtaccggcggccatgctgtccc

SEQ ID NO: 137675 - DNA, 341 bp, Homo Sapiens
attagaaaacagtctgtttattagaagtgactcttggccccaccatggagcagcaacagactgggtgacagagggttaggtgactaatagaagcatgcttaaggggctgtcatttgtgggagctgagctgagcccagcctggttatccaagctgagggcaggtagtctgggaggactgaactcagccaaggagccagagttgcagcatcagggccagactgagcaggagacccccagtcccatgaagcatctcaccagcattcacatgcatggctgcagcatagaacctcgccacttcctcgttggggttgccctgggctgaatcaaaccacatctggatg

SEQ ID NO: 137676 - DNA, 305 bp, Homo Sapiens
  misc_feature (247)..(247): n is a, c, g, or t
  misc_feature (286)..(286): n is a, c, g, or t
cagcctcctaggtgataattttcaaagtatcaaactcattcaacaaatctgtgtttatgacttaagacgctctcaacatagccagagcaacataagtaccatgggtgccccctaccgtccagtccctgattaaatttcaaggggctcactttgattttgaataaacaaggtgtaaagcagtttaaaagccattattttaaactactaatataggttctttgttcttcctaatctatcttggcaatgnttgacataagggttaggaatcaatatatgtgaagggctncagcctcgtgctgaattcc

SEQ ID NO: 137677 - DNA, 606 bp, Homo Sapiens
  misc_feature (451)..(451): n is a, c, g, or t
  misc_feature (459)..(459): n is a, c, g, or t
  misc_feature (481)..(481): n is a, c, g, or t
  misc_feature (515)..(515): n is a, c, g, or t
  misc_feature (578)..(578): n is a, c, g, or t
gaaagtttaaatattaaaacaataaatctttattaaacagttttcacggcattttaaaataaatttaaaaaataaatatttgcattatagcagaaagtcacatgtattgcatcaactcacttttacaatttaatggcatgagacaactaagcatcagcaccataaaactgttaagatttgtttcttaaattcaaggaaatagctctaaagcactgcagcatcaataattttgaaagctataacccagtgattggtgctcatagtagccaatgtttctttttattactggcaactgtgggagacagagttcttccagtactaaatattaataaggttctctgatcgacaatcccccatctatcagtgtgtcagggattcacaaaggaaaaggaactgcagggttatgtaggtatattcccctatctggtggatttaggggtttggcaccaangacacttnttctaggccaaaaaggaaaggntaggtgtttcccccctggctaccctttttttctntttataggagtctcaggggtagggttttaaatcctaattttttacccctttaaaggtctggtnccagggtccatttccaccctggggactt

SEQ ID NO: 137678 - DNA, 920 bp, Homo Sapiens
  misc_feature (61)..(79): n is a, c, g, or t
cagtgccaagctaaaattaccctcactaaagggaataagcttgcggccgcatacgcggtcnnnnnnnnnnnnnnnnnnnagtcaaagaacacaattttaatgactttatcaagccttaggacagagatgagagaaacacctttccaatgatgcatcaagttaacgtctaagcaaaagatcagcagagatcagagattgttgggtacacacgtatcttgtgatgtcttctgagaaccaacttattcctctttctctgagaagaacttgacccctcgccccggggctgagtgcttggcagccacatttgtgttgagatcttgattcctgctctaactacacagggctgggatggacacctgctccaagtttggccagtcatttatttttccagtaatttaaagctgtgactaggagacacagcctctgtgggttgtgagggttgagatgatataaactcaggagctgtcgggtggacatgttcactgagaaggacagtcagtccacagagagagaacaccgctaacatgcaggggggtctagagaacacagaccatgtggatccgagagtgttggaggggcagctctagcttctctgggcttttcggatccgagttctgttcctgggaggcctggctaaaatctacccttgggccctgcactcctccccatggctatattgcaaatatcctatactttgcatgtgatcacacaaagagggtttctgttactggcacacaaaaagtttgcctgagatgattctcctccacttccatcagggtcttctggtcattgatttcaacttattctctcttaagaagcccattgagtccccataatctcttggtttctttcttttccaggaccaactgccccggccgtaatggccgaattcccgggcatatgtccggtaccgtcgactg

SEQ ID NO: 137679 - DNA, 305 bp, Homo Sapiens
taaataaataatgagattatgcatttttgtagtgtaggtgtttcaggtatttgtttaagcaaagcatatgttaaggttaaaagcctttggaacactctgcccccacatcctgggaagcgttttctttcctcccatccagttagggtaaagctacttgccatctcagtgtattcagtcagcttttagggaaataggattatttcttgatgaatgagggtcctgctgctttcacaagtagatgttgacactcatggctccccaaagtctgcctcaaatctatttctgtgggccaggtacggtcgtca

SEQ ID NO: 137680 - DNA, 825 bp, Homo Sapiens
ttgttatctttggatacttacttttctttgttttcctcatttaaagagaatagggatatttctgtattatatatttactgtttcatccctcacctttggagtgaccatgaccttggcatgaaggagagaaacctctgctttccgcctattgcttccaggagttactaccttactggccttggagataatgctcttttgtgccaacctgaggataattttaacaaaatgtaaggccagtttcagaggttgttttgccccacagagagactaatcccaatacaagaatattgacaacaaaaggacaaagtagttattgcacaggacggaaaggtgtctttatttcatcccctccccacttccaaagatgcaaaaggcctaattgaatcaagtctcctttccatctggcaggagacattttaataaggactttttaatttcctacatttcttggccaagtgtcataggaatgtggcctcttttgaaatttaaaaatgaagaagaaaaaaagagcaacactaagttaatataatggagcagatacttttaatgttcttaccattgaatatgccatttaagtttgttatacttgaaattatatgatttttgtccagctctctaaattgtcatctccaatagatttagatgcttcaaatagtaaccacattactggtaagtaaacggtggggttattgggtttagcaagtggggaagtaaggggtgaacaaaacacgagagatggtggctacacccctactaagactgccttaccagataaatgaaatcctttttgtattaggcacaacatggtaaattaagtcttggttt

SEQ ID NO: 137681 - DNA, 381 bp, Homo Sapiens
  misc_feature (87)..(105): n is a, c, g, or t
  misc_feature (167)..(167): n is a, c, g, or t
aatcagctgaatttaagattcaaagatcctgtctttaattcttttggatctatacccagaagtgggattgttgggtcatatagtacnnnnnnnnnnnnnnnnnnngaggaccccccgtactgttttccagagcggcctcatcattttacattcccatgtgcaaggcnaaaaggtcccaatttcaccacattcttgtcaatacttgttattttctgtttatttgatagtggccatcctaacaggtgtgagggtaatagctcattatgggttttgatttgcattttcctaatgactgggtaatattgctcatattaccatatgcttgttgggcatttgcatatctttttctgaggaaatggtctactcaaggccctttccccg

SEQ ID NO: 137682 - DNA, 893 bp, Homo Sapiens
atgctgggatagttgatctgatcaccaagacggctactaagtcactagcagggtgggtggcgtatacagcgtggatgtgctggaccaagggatgactcacatccccggccggctggagccggacagcgagagatttcatcacgctactcagaagggcacaccatttgagacttaaaattctttatttctggaattttccatttaatataactgcagttgactgcaggtaacaaactgtggaaagcgaaaccatagatacgagcgggctactgcgttcaaaaggctcttcaactgttgtggatcctctgatgttctcggagatggtttaggtggttacatgccttcccgcactccttacattcgtaggatttcgccccactgtgcgttttctgatgttgtgtaagctgatggccgtgactaaagctcttcccacattctgtacacccatagggtttcaccccggtatgaattctctcatgtttcacgaggctcgatccataaatgaaagccttcccacactccttacatttatacggggtttcgcctgtgtggattctctcgtgctgagtgaggtgatagccacaattgaaggccttcccacattctgtgcacttgtacggcttctcgcccgtatgtatcctctcgtgcttaacgaggctcgaaccccagcgaaaggccttcccacactccttacattcgtgaggcttctcaccggtgtggatcttctgatgctgagtaaggtaattgactcgagtaaaggccttcccacattcttgacattcatagggtttctcacctgtgtgaattcttttatgctgaatgaggcttgaaccacaaataaaagccttcccacagtctttacactcgtaaggcttctccccactatgaattct

SEQ ID NO: 137683 - DNA, 374 bp, Homo Sapiens
  misc_feature (244)..(244): n is a, c, g, or t
  misc_feature (268)..(268): n is a, c, g, or t
  misc_feature (304)..(304): n is a, c, g, or t
  misc_feature (318)..(318): n is a, c, g, or t
  misc_feature (354)..(354): n is a, c, g, or t
ctgtccccaattccattcaaggttcagttgtgttcagctttaaaaccagctatgtgaatgtgagttctagtgcagattatttagtgattatgtaactaaaattgatgaaaaaatcacactatacaactgtgaggagcacacaactgctaagtttgtacttttgaaagtaaattattctttgtttgataccttattttttaagaaagtggggattaaaaatattttgggtcagtgctgttttctncccaccttccaaaagccaatgggntttgatatttctatttaatttgtgcttcctttaggntttaataggggggntaggaaggcttgcagctgggttggggtcttggaaanccttaatctgggggcaaacg

SEQ ID NO: 137684 - DNA, 402 bp, Homo Sapiens
  misc_feature (52)..(52): n is a, c, g, or t
  misc_feature (66)..(66): n is a, c, g, or t
  misc_feature (74)..(74): n is a, c, g, or t
  misc_feature (93)..(93): n is a, c, g, or t
  misc_feature (102)..(102): n is a, c, g, or t
ttttaacagatgaagaaaccccaagggtcccctaaatggttcctgggttganttttgcccaaaaantccaacanggactggaaactcaactanttttcccanttcccaaaatacagggcatttttaatacgactctctttccctcctcaacatgcttaaggccctggtgaaaaccatgccgcaacctgattgagatccgcaagagagggccccaggcacgtatccgatcatctttgtgtcccactgagctttgtacccaggcagggggaatctgtgaaggcaacctctctctgcactggcccattcgctaaggttgagggatgactgggctaattaagagagggcctaaaaaagaatcgtgctttaggctgggtgccgtggctcatggctattatcccagca

SEQ ID NO: 137685 - DNA, 465 bp, Homo Sapiens
gctctggacaccccatctgagcaggccactcttccttctctatcttaccatcttgtttctgtcccagtagttagggctacctccagtaatcctatttgtccctttactgtttagtgcgtctcgctttgactagaagctccatgaaagcaagagaccttacttgcctccttcgccactagacccccagggcctggtatgtggtgatcgctcagggcccattttcttcctttcctcctcctccaagggtggggaaagagcatcagaaggtctagtggcgaaggaggcaggtagggtctcttgctttcatggagcttctagtcaagcgagacgcactaaacagtaaagggacaaataggattactggaggtagccctaactactgggacagaaacaagatggtaagatagagaaggaagagtggcctgctcagatggggtggtccagaggcctctcgggggatggaca

SEQ ID NO: 137686 - DNA, 1254 bp, Homo Sapiens
  misc_feature (686)..(738): n is a, c, g, or t
  misc_feature (1058)..(1085): n is a, c, g, or t
  misc_feature (1091)..(1134): n is a, c, g, or t
ggggagagtgcacccgtacctatggaagtggtaaaatctggtatttactggcttacactcaaaacgaccacagtcctacctcagttcaaggtaaagccggatttccgtggcgggggtcccacaggacctcctgtagtagcccctgcgctgtgtgtctggagcgcggtcctcggccttattgaaatggtccaagtagacagctgcttgttggattccagtgcaggtacctgcgatgtttacgtccacaccgagcccagtgtgggactgacatttctcaatggaagtgaaatttgggattggactttgaagacggattactaaataataattattatatgtaactgaagcaacctacttttgaaaatcaactgtattgggtagtgggaggtgggagggaagggctttgggaaggggatgaatatctctttttacctttaacagacttgtttaatcttctcgatgtagatgtttatgtaggtacttcacattgcaaacgccttttattctatttacaagctcagatgtctctgctctcctgaatcttgggcatgcctttctgtaaccaaaaatccctgtaggcgtgctagcaattccagggtggtccgggtttggcagatttgatttttaaaaaacgtattatctttaataaaatgttattatgtcaaccagtgaggctgccctgaacnnnnnnnnnnnnnnnnnnnnnnnnnnnnnnnnnnnnnnnnnnnnnnnnnnnnngaggcattccagcccctatgttattgatggaaaaagaaaaagaagaaaagcaatctcgcagtacatgttacttgtcgaaaaaattccggacaagactacccttgttttatgttttcagtattctgaaaataccagtgtgtggcagttctcgcagatgttacctaaaactgctgaacttgaccggcagaatgttctgccgttttctgctccctcgacacttgattggagggctgtcgacctctcctcccgtgggggcttccccagtgcctatcttctctgatagtcatggagaggttacactaattcattggagatgtaannnnnnnnnnnnnnnnnnnnnnnnnnnnagaaannnnnnnnnnnnnnnnnnnnnnnnnnnnnnnnnnnnnnnnnnnngcattaataaaatgaggcttttttagaggaagaccaaaaaattcaatgtcttaaaaatatatttaatggcaatgcaaaagtcttcctgcttccgtgctgaactttagaacagcctcgtgc

SEQ ID NO: 137687 - DNA, 1813 bp, Homo Sapiens
  misc_feature (111)..(111): n is a, c, g, or t
  misc_feature (115)..(115): n is a, c, g, or t
  misc_feature (120)..(120): n is a, c, g, or t
  misc_feature (308)..(308): n is a, c, g, or t
  misc_feature (496)..(506): n is a, c, g, or t
  misc_feature (510)..(519): n is a, c, g, or t
  misc_feature (676)..(676): n is a, c, g, or t
  misc_feature (689)..(689): n is a, c, g, or t
  misc_feature (692)..(692): n is a, c, g, or t
  misc_feature (694)..(694): n is a, c, g, or t
  misc_feature (696)..(698): n is a, c, g, or t
  misc_feature (700)..(701): n is a, c, g, or t
  misc_feature (703)..(709): n is a, c, g, or t
  misc_feature (1655)..(1744): n is a, c, g, or t
gttgtacctacataccacaacgaaggtggggcgaagttcaaactaacgagggtggttgctgtcttctagaaatatatctcggcctcaccactagtgggcaggcaaagtttnttantgcgngggttttttcttcacttccaccaagtggcgcccccgcttatttagtgagagaaagatggggtgtttttccacccacattgtgtgggcggccccaaaaaatatatggtctgtaagagtgggaaaatatttaccacacgcccctatttttctttcttcgctattataaaaatattggcacacaggcgggncgggggggccggggagaaatttgtcggaattatttcggaggcgtcttggcctttgggagaacttccccctggttgagaaataagatttcccgcggtaaaatggaccctctccaggaaaactttcccttttttggggattttggtttcaaagaaacccgtcttcgggttttgccccccccgggggccgnnnnnnnnnnnattnnnnnnnnnnaaattccccaaagccacttagttccattgacccagggattcttccttaggggaaacccagcttatggccccagtgtttcacctttcccttaactggggccccgcggcgcccaaaacgaaatggtctaagaaaggtttcttggagggcccgaggcggnccgacatggtttnttntntnnntnntnnnnnnntttttcataaataatgtactttattttattgcatatggctattaaggagggcatccatgatcaatacagactaaatacaatgcactattctagtccagtttattctcgtctccagcagcatcacattgacccctatatacagcgtgtacagtggaagacagagcaagataagttaagtctcttgtcatatcacaatagcaagaaatatatttaacatcttgatatccagaaacaatacgtacccaaaaagaaaacactgtttaataactgttaaagtttatatagcaaaaaatattttaaatttaaggtaagtcaggcaaaatgtacaaagacccaatatacattgtgaagttttagcaaacataacatttatacattttggttccattctgtaaactaaattaaaaatgtaaatattgcatatgcctttttgtgaaatgtacaggatagaggaaaatttagcatattatcatctgtgtattttgcttgttttaagctgcagtatgaacacgaaccatctgtatagtgtcatgactactctacggatagagggcgagttaaatatgcgtcaatacactgctttcagcagggtccatattcagtccctatcgtacctggggggagttacaaagcaaataccacccattgatgcctattcccaaaactaaataaaaacttcaggatgttttatacatcttaataaagtatatcatacactgaaattgaccttccagctaacattatatggcctatgcactgctgtgatgtataatttcagaaaagtaaaaccttaaaaatgttcagggagatcactttacattcaactttgtcttgcaatacaatcctctgttctaaagttcagcacggaagcaggaagacttttgcattgccattaaatatatttttaagacattgaattttttggtcttcctctaaaaaagcctcnnnnnnnnnnnnnnnnnnnnnnnnnnnnnnnnnnnnnnnnnnnnnnnnnnnnnnnnnnnnnnnnnnnnnnnnnnnnnnnnnnnnnnnnnnttacatctccaatgaattagtgtaacctctccatgactatcagagaagataggcactggggaagccccc

SEQ ID NO: 137688 - DNA, 1195 bp, Homo Sapiens
  misc_feature (1178)..(1178): n is a, c, g, or t
atcgctccttgctgccaggccttcatgtctggtgactgatacccggaggcaggtggagtttgctggagcagagaactctgaggaggagggattggcatcggcaccatggagctcccagggcttagagatggagcaaagttggcctcaccttggggaaccattcctgctcctggatactggaagacattctgctgcatctgaggattgattccagtgccaaactgtcctcctatgtttcctgtcatggctctgctcaccatgctgttgcggttggccaaggatgcttcaggatttgctgctagttgtgaaaacgggctggtagaagcaggtggggttcctggatttgtaccatagtttggtgtataggggatttgctgtggagcaccctgaggaagacgggggttccccatttgaactggtagtccagatgagggagggaggttgttcccaaagctttgctgcctcataagcatggctctttgctgctgtattagctgcctctgtcggtgctgttgactgtacagttcccgctgacgttgtgccaacatttgagcattcaggggtggctgaggtgtaatttgctgttgcatgcctgatctcatattgatgccaacaggagcagttgctgcaaactggtttaagatagcttgccgattttggtgtatcaactgctgttgtccctgtaatcgctgctgtagttgaagtcgaagctggttaggtgcagccggaggtctgtttagagtttgcctgggctgcatgcccatgccaggtgaaaaagcacctcggggaggtgttacttgaacaggcatcgtccccagtgaaggtttttgcctgaccatgccttggaaagggctagggagattggcagtaggagaaggagaagagtaaggctgggaataaaggttgggtctttcttccatgatcaaaggtggcgttgcttgttgtggtggaaatctctctgataatacatctaatccacccccctgaacaagtttgtcaattcccagagctctgtctagttcagctagctcagtttcatctttgccactaaggaaggataccagctgttcaagaagagccttctcatcatttctccccttatactgttgtgggtggacagagaagctcatctaattgtgagctaatacactgtcttccctcgtgccgaattcgccacnccaggcctcgcttcctt

SEQ ID NO: 137689 - DNA, 572 bp, Homo Sapiens
  misc_feature (552)..(552): n is a, c, g, or t
tcatgcttgttgatgcattttattgtgagatgggagtctggtaaaaaactagaaaatgaccatgatgtaacaaggaacttaaaaatgaagagtcagatctgtaacttacatacatgaatacaggaacaaattggcacaaaatgttaaacattgttcccaacactgtttatagaagttaatcctaatttggcttactaaggaaatgagagttgtatggttaggctgatttcttaataaaactgcagagcatcatgctattagtcacacagtgaatttcaaaatttaagttttatattaaaaactgggtaaaggtaaaatgacttgattgtagttgtaaaactaatacattcccatttaagttctgttctacagtccaaggcaagtataaatgttaacataacactgttaaatcaaatctcaatgcaggagaaccaattgcatctctactttaaatcttatcaactttccaaattttcatactaaaatatattattgtattaatacaaactacagtattatacactacactgtgtaataaataaagaaatatanaaataagacacataaatata

SEQ ID NO: 137690 - DNA, 385 bp, Homo Sapiens
caaaacggggcacatctggctgggaagtcacatggactcttccagggagagagaccagctgaggcgtccctctctgaggttgtgttgggtctaagcgggtgtgtgctgggctccaaggaggaggagcttgctgggaaaagacaggagaagtactgactcaactgcactgaccatgttgtcataattagaataaagaagaagtggtcggagatgcacattcctgggataggaatcacagctcaccccagggatctcacaggtagtctcctgagtagttgacggctagcggggagctatttccgccgcatagttatagtgttgatgtgtgaacgcttgacctgtcctgtgtgctaagagctatgcagcttagctgaggaccatcgtt

SEQ ID NO: 137691 - DNA, 906 bp, Homo Sapiens
ggggtggattgtggggtccgcctggagtggggccccgatgatcgacaacagtcaccatacgcacctgcagaagcagcttgtggggacggtcagttcaaagatcctagaactcgcccggaagcagaggatgaacacagacatccggagaaacatattctgcacaataatgacaagtgaagattttttggatgcttttgaaaagcttctgaagcttggacttaaggatcagcaggagagagaaatcattcacgttctcatggattgctgccttcaagagaaaacttacaatcccttctatgctttcctggctagcaaattctgtgaatatgaaaggagatttcagatgactttccagttcagcatatgggacaaatttcgggacttggaaaacttgccagctacgaatttctctaatttggttcatctggtggcccacttgttgaagacaaaatcgctttccctttccatcttaaaggtagttgaattcagtgaattggacaaacccagagtccgttttttacgaaaagtattaagtatcctattaatggaaacagaagttgaagacctcagtttaattttcacaagagtatctgacaacccaaagctgggggtgttacgtgagggtttgaagcttttcatcagccacttcttgctaaagaacgcacaggcccacagaagcgccgacgaagccaacgtgctgagagagaaagctgaccttgcaacgaagtgtctgcaaggaaaagcttccctgagaatgtagtcagggaaggaaggagggcaggtggccctttgactgtaaaatgtccttggtaaacccaaaggcttattctgttgcctgcgtgtgaatgtttggtagagctatatcattgtctgttaatgtattatattttgagattttttttgaaa

SEQ ID NO: 137692 - DNA, 1345 bp, Homo Sapiens
  misc_feature (140)..(148): n is a, c, g, or t
  misc_feature (1157)..(1281): n is a, c, g, or t
aaagtaacatttaatgaatacacattttataaaagccatcatcccttaacatggggaaagtgtacaaaaataatgtgaaagtgtaaaaatttttctagaatacaggaaacatatcagcagtaaagaagtttagtttaacnnnnnnnnnaaatgtaaaatagtttggatctgttaaaaggaatacagttcgcccaaagcacttattttcatctgttgtaaactcattctttctaccttaagtaaactggaggagtcagctgtgttaatatggtcaaattaatttcatagttttgggagcagggaggttgtgggaaggacagaaggagaacttgggctttctttggtcagctggtggggcttggagcacttgtggttggggccaaaggtcaggtctggaaatgcagctattatgccaaaaccatcagagtgctctttagcttcaggcttcatgaattgcttttaactactcaggtagagcatttttactaggctataaaagtagagttcatttttttctataggtcagcattttacctatggatggcattttctattttcggtgacggactatgagcccaggataaacacattactctcttctttaacaaaaagagcatggttaactccaaagacttctctagaccagcctggatggtacctaaactttaatcaaccaatgctcaagtaaaagagcagtatccagccccagcacacctaactgttttgcataacataggtgagtagtgacattttccttatcttttccactgatactgtagggtcagcaccgtataccatgactctactcaatgtcgtccaactttttgtatccttgcttgggtttatcaaagataagttgaaggagcgtgtgttctgtgtacctttgcaaccagttataaataaacgcaaattgaaataaaaaagacaatctacaatggtgcgatgaaagctacaccctcatccaatggtaattaaattgataaggtcactttagaaatggcttggcaacattatcagtgcaaagatattatctgaaatgttatttattttagtaaaaaatggatatagtctacatgtttaataaggaaagaggtttgaaaaatgcctatttgatgtgatattatgcagccattaagaaaatatattacgtaaggccnnnnnnnnnnnnnnnnnnnnnnnnnnnnnnnnnnnnnnnnnnnnnnnnnnnnnnnnnnnnnnnnnnnnnnnnnnnnnnnnnnnnnnnnnnnnnnnnnnnnnnnnnnnnnnnnnnnnnnnnnnnnnctgggcatagtggcacatgcctgtagtcccagctactcgggaggctgatgaacaagaatcactt

SEQ ID NO: 137693 - DNA, 820 bp, Homo Sapiens
  misc_feature (715)..(749): n is a, c, g, or t
gattccccaagagtacaaacagaaaaacccaagtattcccaaagccacatatgaatcactgagccaggctgaggaggtgctaaatggattctccttcttgagtattgcctgccgacttgcatccagtgctcctgactggagagcccaggctgagatggtgttaaatgcttttaccacgtgggctcctggcaccaaatgagcaaggtactctgcattagattctggatattgattgattttgaggttgttgctgatgtctaccaatatttttccattgagaacctcagttaattctgtgagaaaatcataatgctctctgtggattgctatgattatgatgtcagacttcttggctgcttctgaatagctcaagacttctgcaccactgggcagtagggtggtcttctgggggtttcgacttccaaaaacaacagaataaccacactggagcattttcaatcccagtgatcttccaaaatcaccagttccaaaaatacatacagtctcttgcttttctgaagaattcatagtaagaggaagtgcatctatacaagttttctccataactgagggagaggcgcttccaaggaggaagcgtccagcgccaacggtgcgcgccgcgggccgggcgggtagagggaagtttcgccgcgcctgcagctcccccggccgtaatggccgaattcccgggcatatgtccggtaccgtcgactgnnnnnnnnnnnnnnnnnnnnnnnnnnnnnnnnnnncgccgcttcctcgctcactactcgctgcgctcgtcgttcggctataaggcggagcccctatatgattatca

SEQ ID NO: 137694 - DNA, 291 bp, Homo Sapiens
tgctgggattaacaggcaatgaagacaccacgccctggccctatatctcttactctgggattgaaagcctttcattatctgccctgggtagtcacgtttcattcatacgaaccctacataccaaccatcgtcatggcagctgaatatttaagttcccacccagtttctgggatctttccttagccagctcctatctatctagaatacctcctatcctctttccaccccaatcctgcctcccctccaaggtccaccttcaattacacggctaccttagaaacttcccattga

SEQ ID NO: 137695 - DNA, 353 bp, Homo Sapiens
tcctgaatgaatttggggggcccagcaactcttcctcacatgtgtaaaactaagaattgttccaaaattcccacagaaagaccctaaattagcactcttgaagcatgctgacccagtgctggcataagctgaaactcaaatatcctttggcctcccacactggctgcaggctgggagctcggtgacttctgatgtagggcaggtcaaaaagagtggctctccactcccaggaatacctcaaaatctgctcctgacaagcagcaattcgcttcatgaatttgtaaaacgtctgatctccacttttaattatggtcttctcatatttttcatcaccatcattaggaacggctttg

SEQ ID NO: 137696 - DNA, 499 bp, Homo Sapiens
ttttttggatgtaaacatttgttttaatttatattaataaaaggaaatgctctacttaaacaataattcatctgggtcttcttgtataatacaaaattcttccatgggagtctgatgatttgggggccagcaactcttctcacatgtgtaaactagaattgttccaaattccacagaaagacctaaattagcactcttgagcatgctgaccagtgctggcataagctgaaactcaaatatcctttggcctccacactggctgcaggctgggagctcggtgacttctgatgtagggcaggtcaaaaagagtggctctccactccaggaatacctcaaaatctgctcctgacaagcagcaattcgcttcatgaatttgtaaaacgtctgatctccacttttaattatggtcttctcatatttttcatcaccatcattaggaaggctttgggaaagcaactgatccatggcaatgccttctctctgctgatagtccctcaga

SEQ ID NO: 137697 - DNA, 473 bp, Homo Sapiens
  misc_feature (278)..(332): n is a, c, g, or t
  misc_feature (369)..(369): n is a, c, g, or t
  misc_feature (378)..(378): n is a, c, g, or t
  misc_feature (384)..(384): n is a, c, g, or t
  misc_feature (392)..(392): n is a, c, g, or t
  misc_feature (451)..(451): n is a, c, g, or t
ttgtaataactatcaatctagccattaagttccaaagaaccttatttccacagcctgtggttttgtggggaggcttttgtttttattcagttttggtttgggttcttatagaacagctggaactatagagcctggaccttagagaaagagcttggggagacggagggggagatgtcatgttggatgtccttatgacattcggttatatgattgaaaccatgggactggagatgatatcactggtgaggaatataaaaagggaagagagaccaggctcnnnnnnnnnnnnnnnnnnnnnnnnnnnnnnnnnnnnnnnnnnnnnnnnnnnnnnncaccttgagctccagggagatgggagacccagccttnagccaaccngggtgnaacccccntcttcttaccaaagttaccaaaatttaggcttgggtgccgttggtgcccactttgttanccccagctactccggggagctt

SEQ ID NO: 137698 - DNA, 493 bp, Homo Sapiens
  misc_feature (15)..(15): n is a, c, g, or t
  misc_feature (44)..(44): n is a, c, g, or t
  misc_feature (376)..(376): n is a, c, g, or t
tgggagccttgaggntttggaacgtggcctgcacggcgaggggnttgcaaccaggtccttcatggtggcggccatcttccatgtgaacactccacatggaaagggttcgttcttgggcttccatgtgcagaacctcgctccgttgggcggatcctcgtctggactctgaagtagggcccagggtataggttgaagccagggcttagggaggcgaggagggataaagaaagccaaccacagagaggaggtcgcagccgttgcaacagctgggcagatttcaaacccgagagaggggtttggggcggcagggctgtggtgtgtgacggttctacttccacaggagagaggctgagcggagctgagtggagagctgtcnggctgggagccctgcccgctcgcagagacctgaccttggagctggaggagccgccgagggacccctgccacgcgggagccagaggtcggagagctggagctggagagggactgaagc

SEQ ID NO: 137699 - DNA, 335 bp, Homo Sapiens
  misc_feature (95)..(95): n is a, c, g, or t
  misc_feature (173)..(173): n is a, c, g, or t
tggagattaaaataatacttctcttcaacacccctacctacttctctcacctgttctttctccctacttccccactttcaaaacaacaaaggccnaaatcccccaaagactctgtatttttctggctaaaactctctggggaaacacagttgtgagggtgccttgatgcttcnccaggtcatttggtcgactacatatagagatcagctaaagtctggcagtggtcactctacttggtcatagggagaggccagaaggcagctcccagccagttgtacctctgtcacaccatatcagagtgggggaaggaagtggctggagatgctccaagatga

SEQ ID NO: 137700 - DNA, 1092 bp, Homo Sapiens
  misc_feature (567)..(577): n is a, c, g, or t
  misc_feature (879)..(879): n is a, c, g, or t
  misc_feature (969)..(969): n is a, c, g, or t
  misc_feature (1024)..(1024): n is a, c, g, or t
tcatctttttaaagttgatgcattttcaatcctgcttacacaggctgttcatttggataagtaaataaaatgtctaaggtgaacttggcattatgtggagatgttggaccgttatagagcaatacaaattcctatgctgtcattctgttttctgcaaatgcaaacgtgcttatatggtcaacagtgcaaaaatagggtagttggctgcatatttagggtattacctaagcatttgttctctaacgttgctctactagaatgatttttttcttgcatcttttcacattaatgatgttctttatataactttcatgcgattatttagttttttaaattaataaagtgaatttaagaaatattgaaataaacatctaagtaattgccattttaaacccttgtttcttactgtgggagagggggaaatacagcactcatttcttgtttttaatttgcagaagtaagtgaaaatctatgtaaaatcaaaccaaaagagttggactgagtgtgtattgtcttgagattaagtgacaaatagtaaagtgttactgagtaattaagcccatgtannnnnnnnnnngtgagttgaaaatctttgaaatatgtgataaccgaatgtcaaaagttcctaaactctaacagtgcaggttgttcactgtaacgaggtaactcatatttgctggttacataaactacaagtactgctctcacaatatgggactttgaactgtgatgtagttcaacagttgccggcatcctctcagctgatacgctgcgaatattttgggttagacttgcagccagatgcagttttgcaacccaagaaaaaagttgaacctatgatcaaaaactgctcccaagatgaacctggaaaaaaatcanctaagctcccttggcgatctgcaggaacactagtaatgactggaattactccgtgatctttgatgactattacacataacagcactctancaccttttcttactggcatggacttcctcagggactgctacttcatggatgatancttcattgctttgggtagggatttaagtagtcaggggaaaatacgcagttttaatacaggtcttaaca

SEQ ID NO: 137701 - DNA, 133 bp, Homo Sapiens
ataatacaataaataaaataaaataaacgttggcttatttcagtgtgaagtaaggcaataaacggagggctaacaggttcccttcgtagagctcagacattttaagaagcgaggaggccgcgtcctggaaacc

SEQ ID NO: 137702 - DNA, 395 bp, Homo Sapiens
  misc_feature (325)..(325): n is a, c, g, or t
ttcattttatttggaacaattatctcaaaaatgaattttctgatgttctgcatggaatgaccacagagtgaagaccttgccacccttacatttgtaaggcatctgtccagtatgaattctctgatgtctaatgaggtgtgaacatgaagtaaaggctttgcaccaatcatcacacttgtgaggtttctctcctgtatgaattctatgttttgcataggatgaagcttgactgaagaccttgtcacagtcatgatatttgtaaggtttctctccagtatgggttcactgatgacctacaagttatgaatgacgtctgaaaaatttngccacatttattacacttgtagatctctcttcaatatggattctgtagtgatttgcaatggttgtagcat

SEQ ID NO: 137703 - DNA, 965 bp, Homo Sapiens
  misc_feature (820)..(832): n is a, c, g, or t
tgttttttcacacaacatatatttattcagaaaaaaatttgcaataaattataataaaaaagatgacacgaaatatagaatcccactagcagctttgcttagtgatcaagacgtttttgggaaatataacaaacaattacagaataagaaaacagtgaaagggagactaatgcaatgtcaccacatggatttgaaccatttcttccctaagacagcaggtgcagagtctttccctaccagctgaatccgaaatccttacttcagagcagctacaaattagtaccttagaggacttggcaattacaggttggggtgctggaatagccatggtagggaagcagatttcttctgtctgggtctacatcttgtctcctctacctagagattgtctaaaactctcaactctgtatatgttccaggatgagctgaaaaaaggtcgaggcagtacaccaacttagtgttttgatctgatgtagaaagagataggatactgcatacgtgcagcacagagcctccactaaccacacccttgatcacccaaagatcccaggtcagtgatatgctagaaaacaagcccaggaaaggtatttccctgtggtatgaccctaccccagtgtctatcatctgcctctttttgtgatcactttctggccttgcggagatgacaaacctgttctgctctcagtcttccattaactaagttcaacacctagcccctgacctatcatacctccagatctgtggcaccagtaacttgactcctattgctttaactctcaatcaggaaagggtttagccatattgcagaatacgtaccttnnnnnnnnnnnnnaccaagaaacaggagaaatcactggtggtgccttggatatgctagaaatgtcacagagtcaatgcccaggattgtacatacagcctgtacgttatgctccttgcaattaatgtaaacaggtaagggtggttgt

SEQ ID NO: 137704 - DNA, 559 bp, Homo Sapiens
acgaccgcgtccagccatacatgtacattttcagagttcaagtgaacatacagttttctttataagtatgtaaataaatttcatagcactacaaaaatacaagtcatctgagaagtttacagtggtcccagtactgtaggagagaattaaataaaataaaatagctgtagataattaaaagctaattagataaatcaagttacagtatcatccttcagattaaagtgctctgatataaccaatgccacagcaaacgaaatcctggaaagagattgcactgccaatgattttgtctcttaacctcaatgtaacaaggacatacataaaagagattcctgatttaataactgctatcatcttcacccccaaccacgctattagcctgtgatattcttcccctaggagagatgtcaagattagatgagattctatcatagccagggaacaaaatgagaaataccagaaacattctaattccagtcttaagtgagtaacaacaaaattacctgaaaaatctcagctggtgcttttagctaagaaggaagcaagtgccctagtt

SEQ ID NO: 137705 - DNA, 1565 bp, Homo Sapiens
  misc_feature (1184)..(1184): n is a, c, g, or t
ttttgcagtgctcccaattttatttttatttaatgctaaaagttaaagaaaaaaaggtactgtaaatctgacaaatgacagaattcaggtgatatttccatagcgtgattttaaaatataataatgttgatatctgagattacactcacttcagttgacatgagtttcatcatatatagaaaaagtatcaccttcaacttaaaaaaagtaaaggttaaaaggtggcacacttttaaaatacttggtggccaaggaaaggtatatagtaaaagttgtaaaccatgtgtatgttctcataactttaaatgtgaggccacatgaaagacagtacatctgttaaattctataaattgttaaaagcaaaaaagggaaagcttcaacaccccatcccctaatattttgagtattaaaagcacagctgaaatattaggatttgaaatctgatactgcccatgtacagtaagtagctttgtgacatttttatccagctgtggagaatctctgcactgtcatcaggtacaacaaaagatcaaacccatgtcccgatgttaactttttaacttaaaagaatgccagaaaacccagatcaacactttccagctacgagccgtccacaaaggccacccaaaggccagtcagactcgtgcagatcttattttttaatagtagtaaccactatacacagctctttaaagctgttcatattcttcccccattaaacaccagtacagagaaaccacaggttgccctttccacagctggatagacttatccagaacggcaggatggttctgtattaatctttttggaaagcatgtctgtattaagattgcaaaacatacagatagctaccacaaattaggtcaaatgactgatcaagttgtaacatctgtgaggtcaaattccagttataataaagtgcctagatacacatttatacaacagaccataagagctgaattctttacaaatgtctttatgggcatgtaaaattgactctgcatttctgcatgtgtgcattcacataagagagaccagtctgcactgagtcatatatactccaacttgaaaaagtaagtgtaacaactggttaatcatgcaagtctgtttgtaatataacaatgactggtaaaacatgaattctcgcacagtagtaatagggtgcactcatttaaaaacactangggaaaaacactggtatttgggtgtagtatctgattttcaagtgttagtaacttgaccattaaaaaatagttttgaacaatttaaaaaggaaagacaaacatataactaaaaaagaatccaaagttggtaaaaatctgtattttcaaatgtaaatagaagctaggctgtgaaccatacacataaattgtagaccttgaagccataattcagcctaattataaggccaagttacaaacacctgaacgtaaggatttaaaatagtgttcctgtcaatgttaaatcataacagcacaaaagaaaaaccagtatcactgtgagacaactatttctaataattgatgatttgttggttttaaaaaaatcattttactgatgcaaat

SEQ ID NO: 137706 - DNA, 951 bp, Homo Sapiens
  misc_feature (94)..(94): n is a, c, g, or t
  misc_feature (98)..(98): n is a, c, g, or t
  misc_feature (123)..(123): n is a, c, g, or t
  misc_feature (140)..(222): n is a, c, g, or t
  misc_feature (232)..(232): n is a, c, g, or t
cttcgcagctggacagtgtcatctgctcatgactctgatcctgtcagcgatcctgctcactcccaatagtggatacagcatgcaccacatcagntatnttgtatttaggagagacaggttcanccatgtgcccaagatgnnnnnnnnnnnnnnnnnnnnnnnnnnnnnnnnnnnnnnnnnnnnnnnnnnnnnnnnnnnnnnnnnnnnnnnnnnnnnnnnnnnctaaatttcntataggaaagccaagatcattcatttcctactttttttctttcctaattcattcattcgtggcttgtagttttccagtttcatcgcttgatgtgtaatatttacattgtgattcagtttaatgcactttctgacttagttttctcagctacttcattgattattgagaagtctgttgctttatttcaaaattgtagagacattagttatttatactgcagaattgagtgacccctaaaagttcccagagtctcctggggtagatccaggctgggtggggtccaatggtgtccactgggggggcagctcccatgcattccagactccatggagtgtggggtctgcgtccccccgtgggctagtggatggccagggtggcgtagatgctgggttcagctggagagttccctttcctgggatggaggaggctcagttgcctcccgtctgagggtcaagctgtgcagctgggcgtaggtcacatcctggggggcttcagatgcagcagcctcagtgtccatctgcctgtcctcttccgcctgtctgtcctttgtgtccaggaattccccagacagtggggaaggaggagaggccatttctctcctaggtctggagtgtttcacctcggcatacgtcactgcctgggggtcttcatcgtgtgggctctgctggagagagacagtggtggggggtgtccttgaatcctcctgaccccctggagtc

SEQ ID NO: 137707 - DNA, 263 bp, Homo Sapiens
  misc_feature (25)..(25): n is a, c, g, or t
  misc_feature (44)..(44): n is a, c, g, or t
  misc_feature (95)..(95): n is a, c, g, or t
  misc_feature (247)..(247): n is a, c, g, or t
gacacagcatgggatgtatgtgcanaaggaggaaggagggaggncacgatggacacagcgtggattgtacatgcacacggaggagggaggccacngtaggacacaggatgggatatgtgtgcacatggagggaaaggaaggcctcacggggacacaggatgggatgtgtgtgcacacggagagagggaggccacgcatggacacagcatgggatgtgtgttcacacagaggagggaggggcacgcanggacacaggatgggat

SEQ ID NO: 137708 - DNA, 244 bp, Homo Sapiens
  misc_feature (18)..(18): n is a, c, g, or t
  misc_feature (42)..(80): n is a, c, g, or t
  misc_feature (183)..(201): n is a, c, g, or t
gtgttcacacgcatggtncccacacccccaggttgggtgggnnnnnnnnnnnnnnnnnnnnnnnnnnnnnnnnnnnnnnncatgttacatccatatctgtatttatatcttatttgtttcactttcaagtgtatcatggcaaatgtacagatttttttgttaataatgtgctaggatttgctnnnnnnnnnnnnnnnnnnncccttttgagtttgccctagaataaatgagacttaattcaaaa

SEQ ID NO: 137709 - DNA, 520 bp, Homo Sapiens
gattttcctcaaaactgctttattaggaatgtaccagggattgagttaggggagttggacagccccggctcctataggagtcctacttctctccagcatcctgtgccatcctcttgacgtaatcgctgtacattgtgtacacagcacctagcatgattgcacccactgcacaggcctgcgctgccactcgggtgtgaatcaggtgtatggacatcttggtggaaccacgagacctcagccggtaaatcctgtatgctgctaccaccaagcagcctcctaagcctataggcaccagtggagattcccgagtcttcctcaggagcttctcagacacacagtcttcatcgtcaggtggtacccaccagcgtctgttagcagacataatcctggacctggatgtaagcagctgagactcctatgctgcagccccgtcctagagagaggcactccacaatcagaactttgattcctcagtcctaagagatggctagaacgaggagaacgggcggcaggcaggggt

SEQ ID NO: 137710 - DNA, 711 bp, Homo Sapiens
  misc_feature (571)..(571): n is a, c, g, or t
ccgcctgccttttaattcagtgttcccatgagcgccaaggccccattattgcccccttgctcccactccatgctgcttctgggtgggacctaagatggcttgggagttgttgggttcctgcgatcagaagtctaccccaccacctcctcaggaaactgctgcctcccctaagaattttccttgccctggagtagggggccagagcactttgatttccagccatttactccaagtcctctccccagctaccaccagtcccttactctgttctcccccagtgaaaaagagtctgttgattttcctcaaaactgctttattaggaatgtaccagggattgagttaggggagttggacagccccggctcctataggagtcctacttctctccagcatcctgtgccatcctcttgacgtaatcgttgtacattgtgtacacagcacctgtgtgagagaaaagaaataatgccccttggcatcaaacccttcacccgtcctctggctctcaggcgtcccaggggttcacctctagctgctcccttgagagtccagcttcccgctcatctttctgccncaggtcccaacagctgcttcaagcatctgaccacacaacctggggaaaccacttatctgacagttcacgaaacactttcacatgtattgtgtatctgagaaacctcacagcagcctgcaaggtaggcaggccaggggtgg

SEQ ID NO: 137711 - DNA, 301 bp, Homo Sapiens
  misc_feature (256)..(256): n is a, c, g, or t
tgcaggaaaagttttttctttatatccagtttttacatgatgaattatttcccaatatttcatagtttatgaggctgaattcctcttgaatttattaaatgcttccttcacatcctctgtgatgatcatgtttatttactgataaaactcaatacctagaactgcacctagctcatgatggtacctaataaatacttcaatgaaatgatgtggtgatgcatgcctatagttttagctacttgggagggtgcctgancccaggggttctagaccagcttaggcaacatagcaagcccccatc

SEQ ID NO: 137712 - DNA, 445 bp, Homo Sapiens
  misc_feature (89)..(197): n is a, c, g, or t
tgggtcaagtttgttaatcaggttggtcaaattatctacgtctttactgatatttttgtctgtttttctataaattactgagagaggannnnnnnnnnnnnnnnnnnnnnnnnnnnnnnnnnnnnnnnnnnnnnnnnnnnnnnnnnnnnnnnnnnnnnnnnnnnnnnnnnnnnnnnnnnnnnnnnnnnnnnnnnnnntgatgttttctggtagagtgaacctttattatgtgaaatggctttctctaccactcacaatggtatttttttcactttcccccttatttttgaattttcaatgttcttataatgatgtcatgtctcttgagtagagttgttttaatcaagtctgtcaaattttgtcttttgtgtatttcgtgaatttacatttattgtaattactgataataagttgtgttcataaataccatcttactacttgttaa

SEQ ID NO: 137713 - DNA, 794 bp, Homo Sapiens
  misc_feature (80)..(80): n is a, c, g, or t
  misc_feature (480)..(519): n is a, c, g, or t
  misc_feature (572)..(607): n is a, c, g, or t
  misc_feature (609)..(668): n is a, c, g, or t
  misc_feature (715)..(749): n is a, c, g, or t
ctgattaaacactctattcaagagacatgacatcattataagaacatgaaaattcaaaaataagggggaaagtgaaaaanataccattgtgagtggtagagaaagccatttcacataataaaggttcactctaccagaagacatcgattttaaatgggtatgagcctaataacacaacctctaaatgcataaaacaaaactaacaaactcaaaggagaaataaacaaattcataataacagtggcaggctttatcctctctcagtaatttatagaaaaacagacaaaaatatcagtaaagacgtagataatttgaccaacctgattaacaaaacttgacccagttgaaatacacataacacctgcacacaactgcagaatgcacattctttcaagtgcaagaacattatgataagaatattataggaaagtctgtcataaacatagcttatataaaaatataacagcaaattaatctaannnnnnnnnnnnnnnnnnnnnnnnnnnnnnnnnnnnnnnnacttatgtcataaacatagtttatataaaaatataacagcaaattgatctaannnnnnnnnnnnnnnnnnnnnnnnnnnnnnnnnnnngnnnnnnnnnnnnnnnnnnnnnnnnnnnnnnnnnnnnnnnnnnnnnnnnnnnnnnnnnnnngccgtaatggccgaattcccgggcatatgtccggtaccgtcgactgnnnnnnnnnnnnnnnnnnnnnnnnnnnnnnnnnnncggccgcttcctcgctcacatgactcgctgcgctctggtcgttcg

SEQ ID NO: 137714 - DNA, 894 bp, Homo Sapiens
  misc_feature (849)..(849): n is a, c, g, or t
tgatagcattcagcacataaatacatcaaaaccacatgatgagctgaaactgcccagtgtgcccatcccgtggagtcctatgccaacagcagctcaaacatccactaataggaattcggaaacagtggcacgaagatattactcaggatcttcgaactcatcttgttcaccaaactacgtccaagccatatttcctacgccggatcctgctgctttaaaagacagacggatggaaaacctagttgcatatgctcggaaagttgaaggggacatgtatgaatctgcaaacaatcgagcggaatactaccaccttctagctgagaaaatctataagatccagaaagaactagaagaaaaacgaaggaccagactacagaagcagaacatgctaccaaatgctgcaggcatggttccagtttccatgaatccagggcctaacatgggacagccgcaaccaggaatgacttctaatggccctctacctgacccaagtatgatccgtggcagtgtgccaaaccagatgatgcctcgaataactccacaatctggtttgaatcaatttggccagatgagcatggcccagccccctattgtaccccggcaaacccctcctcttcagcaccatggacagttggctcaacctgggagctctcaacccggttagtttgacgtctttggtaatctctttggcgtttacctgggtattttgaaaatcctgtttgttcctactttataaattctcacagtcatttaaacagaccataactcctagttcttctgtaattcttctgtatttaactctactaggaaagctgaccaaaaaacggaaaacagccagtcccttgtccngggggtgtcagtgtttagtgggcctgcatgcgttttcagggtcaa

SEQ ID NO: 137715 - DNA, 429 bp, Homo Sapiens
  misc_feature (298)..(299): n is a, c, g, or t
  misc_feature (314)..(314): n is a, c, g, or t
  misc_feature (319)..(319): n is a, c, g, or t
  misc_feature (334)..(334): n is a, c, g, or t
  misc_feature (336)..(336): n is a, c, g, or t
  misc_feature (350)..(350): n is a, c, g, or t
  misc_feature (357)..(357): n is a, c, g, or t
  misc_feature (361)..(361): n is a, c, g, or t
  misc_feature (370)..(370): n is a, c, g, or t
  misc_feature (377)..(377): n is a, c, g, or t
  misc_feature (386)..(386): n is a, c, g, or t
  misc_feature (389)..(389): n is a, c, g, or t
gtggaaataatacgaatatcccctggttcaaagaattgcagcctagtaaacacagctcataaaacttggaggtgacagggtgcttaccccaacagatgctgatgaagtgaagtgtaaatgaattagaaacatgtggatacaatgtcttaagtgtatatgcaggggttaaataaaataaggtgcttgctcaaagcaaagcaatggaccagtttgcagcatttggtctagtaactaatccaggagcagtcagagccacagcagcgccagactttttcttcactgcctgcattatctacgnnggttttttccccccnttttncaaaaaattttcccncnccccgggggttccnatttgtngccnaattccctncagcccnggggggttnccnctagtttttagaggcgggccgccacccgggtgggaagcct

SEQ ID NO: 137716 - DNA, 426 bp, Homo Sapiens
  misc_feature (67)..(67): n is a, c, g, or t
  misc_feature (317)..(317): n is a, c, g, or t
ggccagggcaccttttggtcagtgtggaagcaggggtgaccgactttagaggaatggttcagatgcntcctggctagaggtactggagtccagtgaggagctctgatttatcccacatatcactatcagactttcgggtccatagctgcctctattcgatgccgctcaagttggtaagctttatcttctcgaagttcttcttgggaacgtgtaacacgctgcaaaaagaaaaagaattattatatttcagccatttactagaaattaccaaatatccacaaacattttatcttcagacagaagaaaaactgttaaantcagttgtacagaaagagactgagacttccctacaaggctcattggctaatgtggagtaacagtgcatttatctgtgtaaagaaggaaaagcggccaagcgtgggtgca

SEQ ID NO: 137717 - DNA, 470 bp, Homo Sapiens
  misc_feature (25)..(25): n is a, c, g, or t
  misc_feature (53)..(53): n is a, c, g, or t
  misc_feature (80)..(80): n is a, c, g, or t
  misc_feature (411)..(411): n is a, c, g, or t
ttccctttcatatttttacttgttncagaattttttccctagtacaatgactnacaaaaaagttccttctcccaccaacnagactcgctcagtcaaacgcctagtgaggtccacacctctaaggtgggagcagcagccaatggagagaataaagcccatgcttttggccagcacagcagccagggaaagcccggggaggaggaccgaaatagagccagggcactaaatagtagacactggctgatggaaaatgagtttgaagatgaaccgtgaatagcacatcgttagggaaataaccgcatgtaataaaaattacactgcaacaagagtacccgatggcatgatggactgagagtctaaagagtgacattctgtaaaatggaagcagtgaatccaaaacagacagaaaantgttctgaaaacgaaaaaggagagaaaagtaaaaccatatgacacatagacgacccaga

SEQ ID NO: 137718 - DNA, 532 bp, Homo Sapiens
  misc_feature (62)..(62): n is a, c, g, or t
  misc_feature (84)..(84): n is a, c, g, or t
  misc_feature (95)..(95): n is a, c, g, or t
ctctgggtggtttccttggaaaacgaggtccaaaaacggccaagcattggtaacagaagccncctgggcagggtcaatacaccncctttgaaggncctttttaaatatcaaaagacaaaatttcttggcccaaggttaaatgtttttcaattcaagaaacaagaagaatgccaaagtggcccttcaaatcaacggctaatactgcatcatcacggcgctggtcactgtgtcacacctgtagaatgcgtgcgtctctgttatcgctcggtagagcccgctggccgccctggtgctgatcattttaaacaagagcacgatgctgttcccagattccttggtgaccgtcaaatatacattctttcctgactgggtggccatctgcaccacaggataagctatcctattaattgggctaaagtcatctttacaaattgagattccttcaggtccaaccccaatgagcagtttctgcccttcgctatcccgcacagaatgccattctatgccatagttttccattgccgacacaatc

SEQ ID NO: 137719 - DNA, 740 bp, Homo Sapiens
  misc_feature (35)..(35): n is a, c, g, or t
  misc_feature (46)..(46): n is a, c, g, or t
  misc_feature (59)..(59): n is a, c, g, or t
  misc_feature (669)..(669): n is a, c, g, or t
gttccacttaaccaggagccgccttgatgcaaagntgcttcagatngtgctgcaaggcnctgtgggaggtactgtaaatcagggaccactggaagtagcccaagtgtttttggctgaaattcctgctgatccaaaactctatcgacatcacaacaagttgaggttatgctttaaggaattcatcatgagatgtggtgaagctgtagagaaaaacaagcgtctcatcacggcagaccagagggaatatcagcaggaactcaaaaagaactataacaagctaaaagagaacctcaggccaatgatcgagcgggaaaattccagaactgtacaagccaatattcagagttgagagtcaaaagagggactccttccacagatctagtttcaggaaatgtgaaacccagttgtcacagggcagctaagaaaagccatcttcattcgtggagactgtggccctgcaaccctggagaaggacttgctggtacttaaaaaatgggacatttgccacccaggactgactgtacactccctgatcagccagcactctggaagctttgggatcccaggaaccatggaattattcccaaatggactctgaccagatttttgccatactggggggtggcgggatggaggatgggtactcaggcatgactgcgtatttattanagtgtgtttttccacaatgtaccaaacaaggcataagcagcttctcctgctgactggccaatcactgcccc

SEQ ID NO: 137720 - DNA, 255 bp, Homo Sapiens
attcatgcaagatccctggggcttgaatttctaccctccctctggctcccaagttcctctttctgtgagtctctaacttccacttaaggcccaccttctattgtatttcccttctgtcagctaagccaggctctgaactgtccagatgtgaaatgtggccccctttctgtgctttcttcctcaagcccactcattcaaggcatatggtcgttaactgttaactatagctctccaataagtggtaattgactgtct

SEQ ID NO: 137721 - DNA, 831 bp, Homo Sapiens
  misc_feature (75)..(109): n is a, c, g, or t
  misc_feature (158)..(253): n is a, c, g, or t
  misc_feature (640)..(640): n is a, c, g, or t
aatgatagatcatatagggcgctagctcgcgagcgaacgacgagcgcagggagtagtgagcgaggaagcggccgnnnnnnnnnnnnnnnnnnnnnnnnnnnnnnnnnnncagtcgacggtaccggacatatgcccgggaattcggccattacggccgnnnnnnnnnnnnnnnnnnnnnnnnnnnnnnnnnnnnnnnnnnnnnnnnnnnnnnnnnnnnnnnnnnnnnnnnnnnnnnnnnnnnnnnnnnnnnnnntgagccaccgtgcccggccattcttaacctcttgaaactccttaagactttggtgaaagccatagacctctcttcccagaagaatgaacacgtggtttgccggcaccttaggaacccccaaagcccatgagacaaagccctggatctataaggccctgtcccatctgacccccggccttcccctggggcacatacctccagctacacagggctttcatacacactgcccctttgcctgggtccagctctgctcatccttcaagtctcacccttccctgacttccagcttagattaggtcgccctgctagacatgcgtcccccaccctgaatttagcactgatcaaccgggataactaagtgattcttcggtgcatgttatcggaccntccccaagctccgtgttggtatttgttgagtaaatctctgaggcccctccagctatgacattctgagactgatctataagtttgcagatgtgtcataagagagtccctgagcttgtatttcctatgacattcgacacgtggtggcctttgccttcgatgatttcctccaggcctggacaggaaagttactt

SEQ ID NO: 137722 - DNA, 542 bp, Homo Sapiens
ggcctccccacaatttgtttaaaaaaatcccccctttgtcaaggttgtcaacttaaggcaaagaagtgtgacccaaaacttaggatgttagcgcccactctccgttactatcattttggatttcccagtctcagtatgtcactcatcggtttcggtgtcctcgtggtcacacatttctttcagctcttgtcattccagttgaagagagaccatctgacgttctaaagatggcttcatgcaaacatttaaaacctttgagagaatacagtgcaccagggagactattcttatgactactgagagggttaacaccaagaatttggagtatgctccttagccagggtccccataaaccagaccacctaaactcaaatagaccattctttgacttaactcagtggtcttttcgttaattccctacaacagactctctataacacctgatgttttctccataggccttaagtgccagcatctgcacaggtactttcctgtttagccaattctattttttagcataactttcacaagagaatttaaca

SEQ ID NO: 137723 - DNA, 651 bp, Homo Sapiens
  misc_feature (21)..(21): n is a, c, g, or t
  misc_feature (57)..(58): n is a, c, g, or t
tccacataaggggcttttaantgagcacatagaattaaacaagaaaggaaatacccnntcaattacattgtttattatatttgcaaatgacatttatgaatatttctgctacttggctgtatatagaacaacctccttaactgagatttagctgggagcgcacacattttctgtatggacaaatcctggattggcttcgttatttggtggcctggcaacctgtggtgataggaatagttcaaggcattaactattcactagggctggaataggacagcagaccccagaagcaacatactgcatggttgaaatccttggtccaacatttaatattaatttttttaattttagagatgatcccaagtgtttagaaaactaagtaaactttgttgtcaagcaatttgtccatgtggaaagaatttaaagagaagctgaacaatggaataaacaaataaagcatgttttttcatctttcccattacagctgtttcttaactcatgcacatgtcacatttgttacactgcactgtggacattctacttccggtttgactgataacaatatctgtaaagtgtttcagaggtttgcaaagtacttctcacacacaacatttagccatagctaatactttctcatcagttcaacatctt

SEQ ID NO: 137724 - DNA, 1006 bp, Homo Sapiens
aaagggctccacttccaggggaggttccccaggatgagccagcagatctgccatgggggaaatcaacccacatgcagcaggaacctctggggcagggctcccccaaagaacacaatgtcgggctttcacaacgccggtgcagaccgggcagcggggaaccctgtctgccatcaccgtcagccccgaatgtcctcccctgggaaagggttctttggcagactgtgcaggtggcagaggcaaaggttccatgagcttcaaccagctttgaggcaggatgcccgacactctctcaagcccatcgatgttctgcgtgtagagccgcagaagcagccccttgtcatgaagcagccggagaaagtagtgagtgacgttgggcttgtagtttccagggtacagctccttggccaaagtgaaaaagggcttggggttgtgaaagaagaatgggagttcaaaaatggcctcggggtacgggagatcgtactgctggaggttgctgtacaggccactccccggcgatctgaagtctggaatgccactgggtgtgctgatgccggcccccaccatgaccaccaccctctggcaggctctggcccgaatcagctcagctacatcctgcagggaaagcttccccttgtcactgctgcctccacttccaacaacacttgaagcacccacagaaaaagatatggaccttcttccacctttaatactcgaaaagaagaaactgggagctgctgccctcggctgcctccggaatgccctgggcacctcgggtctgggaggcctctgcaaggggcgcgccgggtccaagggctcaccgcgggccccatggctgcctctcagccccgcactcacatcgtccctgccgccaagcaccagccgacagccgcaggcctgaaacggccccacgcctcccccggcctcgacccgttcaactacccggccccacagccggagggctgccgcggcgcgccaaccccagaacgccatgttccgcgcagtccga

SEQ ID NO: 137725 - DNA, 2223 bp, Homo Sapiens
  misc_feature (1702)..(1742): n is a, c, g, or t
  misc_feature (1973)..(1987): n is a, c, g, or t
gtagcgaggcctgggtggcgaattcggcacgaggcaggcctgcggctgtcggctggtgcttggcggcagggacgatgtgagtgcggggctgagaggcagccatggggcccgcggtgagcccttggacccggcgcgccccttgcagaggcctcccagacccgaggtgcccagggcattccggaggcagccgagggcagcagctcccagtttcttcttttcgagtattaaaggtggaagaaggtccatatctttttctgtgggtgcttcaagtgttgttggaagtggaggcagcagtgacaaggggaagctttccctgcaggatgtagctgagctgattcgggccagagcctgccagagggtggtggtcatggtgggggccggcatcagcacacccagtggcattccagacttcagatctccggggagtggcctgtacagcaacctccagcagtacgatctcccgtaccccgaggccatttttgaactcccattcttctttcacaaccccaagccctttttcactttggccaaggagctgtaccctggaaactacaagcccaacatcactcactactttctccggctgcttcatgacaaggggctgcttctgcggctctacacgcagaacatcgatgggcttgagagagtgtcgggcatccctgcctcaaagctggttgaagctcatggaacctttgcctctgccacctgcacagtctgccaaagacccttcccaggggaggacattcgggctgacgtgatggcagacagggttccccgctgcccggtctgcaccggcgttgtgaagcccgacattgtgttctttggggagccgctgccccagaggttcttgctgcatgtggttgatttccccatggcagatctgctgctcatccttgggacctccccggaaggtggagccttttgccagcttgaccgaggccgtgcggagctcagttccccgactgctcatcaaccgggacttggtggggcccttggcttggcatcctcgcagcagggacgtggcccagctgggggacgtggttcacggcgtggaaagcctagtggagcttctgggctggacagaagagatgcgggaccttgtgcagcgggaaactgggaagcttgatggaccagacaaataggatgatggctgcccccacacaataaatggtaacataggagacatccacatcccaattctgacaagacctcatgcctgaagacagcttgggcaggtgaaaccagaatatgtgaactgagtggacacccgaggctgccactggaatgtcttctcaggccatgagctgcagtgactggtagggctgtgtttacagtcagggccaccccgtcacatatacaaaggagctgcctgcctgtttgctgtgttgaactcttcactctgctgaagctcctaatggaaaaagctttcttctgactgtgaccctcttgaactgaatcagaccaactggaatcccagaccgagtctgctttctgtgcctagttgaacggcaagctcggcatctgttggttacaagatccagacttgggccgagcggtccccagccctcttcatgttccgaagtgtagtcttgaggccctggtgccgcacttctagcatgttggtctcctttagtggggctatttttaatgagagaaaatctgttctttccagcatgaaatacatttagtctcctcaaagggnnnnnnnnnnnnnnnnnnnnnnnnnnnnnnnnnnnnnnnnnggggggggccgacacaaagagagtctcgcgaggggggcggccaagtataaagcgagatacacagaggggctcggtgaccaaaggtggccccaaataggggagaccccgaataaaagcgactcagggcacgtggcccaggcggataacacacgactatagagacggggaaacactgtgtacagcgagggaagccacacgggggcagaaggggaccacccactaagactgctnnnnnnnnnnnnnnnaaccacatattgtgtggggcaaaaagatgttatcctaacaaaggagaagaatatttaaagccgcccctcatggagcgcgaaaattttataaaaaagtttaacagaagcgctataccacggctgggtaaacaagcctagagcggtgatataatggttaagtacataaattagaagaaaattggtcgctatacgccggggatatgaactatgaggagacgagttttttcttcacgaga

SEQ ID NO: 137726 - DNA, 882 bp, Homo Sapiens
  misc_feature (767)..(801): n is a, c, g, or t
tttggtcactttttccaaccggtggttattttcttgtatatcttactaatcttataataaaagacagtgctaaacctacaaattcaataagacattcatctttaagtttcataaatatatgcaattctaatcataaagtctctacaatacatttgcacgttttcatagactaacataatacaccaacttatggaagtctcctgttattgtgttatttttgtctacatctgacattatcttcataaatattcaatgaagccacaaaggtactgtaacttttggaatctatccaagttttaaagaaaaaatgatcagcagcaattccataaaacagaagggtgtcaatcccttactttcttttgctttttgtgtcagttgtttgaaaaacactagaagctgacatgagattttctatatattgtccaagaacttggttttctgattttagcttcagattttcttccttaactgcatctactcttgcagagagatcttcaagtgtgtgttggagttccaacacttgattaataagtcttgttttttcctccagttccacttgattttcagcatcaactgcatccatgtcagcattcatcatcttgggtaacaaacttttgggccttggatacaaaattcttgaggaatggtcttccgcttgaggcgccgggagaaggagggatccggccgacacctcaggccgggacacttggaccaactccccggccgtaatgccgaattcccgggcatatgtccgtaccgtcgactgnnnnnnnnnnnnnnnnnnnnnnnnnnnnnnnnnnncggccgcttcctcgctcacatactcgtgcgctcgtcgttcgcaataacgacgcaccctatatatcttattttttttccttt

SEQ ID NO: 137727 - DNA, 855 bp, Homo Sapiens
  misc_feature (276)..(276): n is a, c, g, or t
cgttttcctacggatggaaataggaagaagaggccaatgagagaggccacaagatgttgaccggaccaataactggccatttagacatgattttggtcctgttttcacaacccgtggttattttctgtatatcttactaatcctatgataaaggccagtgctaaacctacgaagtgtcatgagacagtcatctttaagtttcataaatatagcaattctaatcataaagtctctacaatacattgcaccgttttcatagactaacataatacacanacttatggaagtctcctgttattgtgttatttttgtctacatctgacattatcttcataaatattcaatgaagccacaaaggtactgtaacttttggaatctatccaagttttaaagaaaaaatgatcagcagcaattccataaaacagaagggtgtcaatcccttactttcttttgctttttgtgtcagttgtttgaaaaacactagaagctgacatgagattttctatatattgtccaagaacttggttttctgattttagcttcagattttcttccttaactgcatctactcttgcagagagatcttcaagtgtgtgttggagttccaacacttgattaataagtcttgttttttcctccagttccacttgattttcagcatcaactgcatccatgtcagcattcatcatcttgggtaacaaacttttgggccttggatacaaaattcttgaggaatggtcttccgcttgaggcgccgggagaaggagggatccggccgacacctcaggccgggacacttggaccccccggccgtaatggccgaattcccgggcatatgtccggtaccgtcgactg

SEQ ID NO: 137728 - DNA, 1301 bp, Homo Sapiens
  misc_feature (1050)..(1050): n is a, c, g, or t
cagtcgacggtaccggacatatgcccgggaattcggccattacggccggggggtccaagtgtcccggcctgaggtgtcggccggatccctccttctcccggcgcctcaagcggaagaccattcctcaagaattttgtatccaaggcccaaaagtttgttacccaagatgatgaatgctgacatggatgatctctctgcaagagtagatgcagttaaggaagaaaatctgaagctaaaatcagaaaaccaagttcttggacaatatatagaaaatctcatgtcagcttctagtgtttttcaaacaactgacacaaaaagcaaaagaaagtaagggattgacacccttctgttttatggaattgctgctgatcattttttctttaaaacttggatagattccaaaagttacagtacctttgtggcttcattgaatatttatgaacgataatgtcagatgtagacaaaaataacacaataacaggagacttccataagtttgtgtattatgttagtctatgaaaacgtgcaaatgtattgtagagactttatgattagaattgcatatatttatgaaacttaaagatgaatgttttattgaatttgtaggtttagcactgtcttttattataggattagtaagatatacaagaaaataaccaccgtgttgtgaaaaagtgaccaaaatcatgtactaaatgcacagctttatgtaccctgtccaccatcttgtgcctcttctccatttgcctcttccttcctatttcccttccgctaaggaaaaaaattggtgtcacatttgtaaaagtaattttaatagttaatcatctctgagagtaacctgtattttaattgttgaaacttaaccaaaataagatactgtctcagctagggcttgtcatttgtgtatttagtgttaagataggaatgctagtgtctctttaattaattggaaatagatggaggctaaaaatgaaggtttttctttgaaactgaattaacttgggaatatttgttgttaaaaaacttctttttgccccaaataactcattntgtattatctgaaaaatatataatttctggtcatgtgtctgttacaactagaaaattttgaggaaaaatgggaatagggtgggaaaagtactcgggtaaacagtagtaacccaatatttttcactccaaaatttgggtttttcctctggccccaaaagtagatctttttggggaaattattttgaaacagtgggattaaagtttggactaaccctttatgtttagcccccatctgggatgagaacccggtt

SEQ ID NO: 137729 - DNA, 623 bp, Homo Sapiens
  misc_feature (198)..(421): n is a, c, g, or t
ttctaaatgttataatgatttttttcttagttgtttactatacatatacacacatatacatatgataagaatttggtgtactcagtgtcatttgacaaagaaaagaattgaggatgtaaaatgagtttgtttcttttggtggagtgagaattttgttataatcaagttagctaataattaagtagaaatattgaaaannnnnnnnnnnnnnnnnnnnnnnnnnnnnnnnnnnnnnnnnnnnnnnnnnnnnnnnnnnnnnnnnnnnnnnnnnnnnnnnnnnnnnnnnnnnnnnnnnnnnnnnnnnnnnnnnnnnnnnnnnnnnnnnnnnnnnnnnnnnnnnnnnnnnnnnnnnnnnnnnnnnnnnnnnnnnnnnnnnnnnnnnnnnnnnnnnnnnnnnnnnnnnnnnnnnnnnnnnnnnnnnttgattttttgtctctaatcaaaccatatttaacttgttcggcccgccctcggcccctcaaaaaagcttttctaaaccattccgtttggggcgcgcggggccccagtaaggtaagtggaaccatgggttcataagcttggtttccttagggaagaatcctgggtccatgaccatagggccttgggatttcctcccaccaaat

SEQ ID NO: 137730 - DNA, 373 bp, Homo Sapiens
  misc_feature (308)..(308): n is a, c, g, or t
  misc_feature (347)..(347): n is a, c, g, or t
  misc_feature (356)..(356): n is a, c, g, or t
ctctggaaaaggggaaaatacagatgagctcaccaaagttgttttgtaacaaaaaccactggctgtgggcgcttgctgcaggagtgggcgttagttttttgttggagagagccttaccaggccgacgtccttgtgcaagctgcttatctagaatactgcagtcctgaggaatttccctgcagtaagtccggttacaggcaaacgtgcaggacgtgcaggagcgtcttgtgaggaggcctgctgcaggtattcctgcatgagagctcccccttcgtggcctcccgactccatttgtttagggattggtngaagtagttccattttggtacctgcaactttcacagctngtcgtgatnaaatcaggcttagctct

SEQ ID NO: 137731 - DNA, 356 bp, Homo Sapiens
  misc_feature (15)..(15): n is a, c, g, or t
  misc_feature (37)..(37): n is a, c, g, or t
  misc_feature (84)..(84): n is a, c, g, or t
  misc_feature (285)..(285): n is a, c, g, or t
  misc_feature (342)..(342): n is a, c, g, or t
ttttccaaatttacnaatttggtgatgacaataccanaggtaacagggcctggattgaggtagaaggaactatgcatacgtatncagttgtgtagagcaaagggacaggtaacgtaactagccctatgtcaccatagcaggcctacatacctttttctaccacagctagagcttaggtcaggtggctttctgttccttctggtctgcaacctctggttaccttccaaatactaggaatcacaggcatggcagtagaacccgaaagccccctaaaagccacgaagnaaatacccagactcagatatgtggcaaaaaattaggagcaggtccagattttgtggncccagaaactttga

SEQ ID NO: 137732 - DNA, 1233 bp, Homo Sapiens
ctttggaccaaacaaatgttggataaaaatagtatgttgaatggcggagaatgaatgtgagtcagcaagtaacagatatgtcagaatttagttacaactttgggatccttttaaaagtagcatcactaataccttccaggaagaagcataataaatctaacaccataataactaacagtgtaaatataaggtaatgtttaactcacattttggacacctgattaaactcagctctaaaagtacagataaaaaattatatactcgtttgtgacatttaatttccaaagcaccaaggcaaaagagagactcacctctcatttaagtaccaattgcctatggcaaacatttgcacaatatcatataaaaagtcaagcaaataaaattacataagcaaattcaaatcacagtgctttaaaaaatataatcattggtaatcttcaaagaaggcattgcctcattaacattctgatctaggcgatggtattccactgttttggaacaaaggccatcacgccatttcctgctttgaaccagaagaaaaatcttccttttgttgtgatatgtaatgtaaacaacagcaatgcaaaaagcaaaaataataagatgaaaaaagaaatggctgtcttcctcttctatatttgaggatggcatcttaaaagatttcactgactgttcaatttccatgtaacccctgttttcttccaaggtgtcatcagactcgtcgtcgtccctggggcccgtggtccagtcatagtctggttctccataatcgccattgtctagagtgtctttggctgtggatggagaactgttcagcatgagaagatcctcctcctctatactaggatcttcattgttatcagcttcctcttgagacagaggagtaggcgagggatgagggaccacagatgctcctccacttttcttggtactcgtcgtgggagggagggtggtgctgatttgggaaatagaaggtttggtttggttttcatgtgttaaagcattcacatttggggtagaaatatgtgagttgagtacggttgggctcggtgaatcagtccgtgatacaacactggatagagcggcggacacaagcaggagcgccaagaccagcggccgcgccaaccccacaagggcttggatggccgacccgggcagcagtttcgcttgtgctggccccctcatcctcttcgggacggcagcggccatcacggactcggctgggagcatgct

SEQ ID NO: 137733 - DNA, 870 bp, Homo Sapiens
ccagtaacatttgaccttttcagctccctagctaatttattagattgtgttgaaggtctgattctacaaaggccaactctacatatttggtagccctaactgtctgagcagtagtggctgctgtgatgtaaacttagggtgctgagataagcaattagctctagccttctgccttaagaatgcactctactggggatttcctggcatagttaagagcgctgcctataaggttggtgaccaaatctttcctcggtgactttaagctttatgtgaaagcttagttaaggtgaggaggggcacactcctaaattgctggatgactgaactttggattttctctcccctttcacatggatttcatgtctctttagataaaactgactagttttatttataaaatcttaagttttggaagtctaaaggagaaaccattccagtatgcatatttttttctcctctagattcatacatttatatagcattgaaacactttcaaactccctgctggtagtaaaaggggatttaaaaatagaatcatagccataagcctgttagtatcatatgaagagagaacagttatcttagtacctatggattttctttatttgctgtttgaatggattgaccttggttatgtgttgagaattaaggaacattctttgaaatgcctctctcagacccatcttggaggctgattacttactgcaccaaagctatcactggggtgagatttactgtttggacaaatttagccccatcccttcaaaaatacacttgtaaccagggtttcccagagttgttggatagggttctgctggaacatatgccaacccacctggcataatatatttttgttgcttttataaatca

SEQ ID NO: 137734 - DNA, 366 bp, Homo Sapiens
ccgtggaactccaaaaaccatggcaacggcaagaggctgggaaccagttgggggatcttcaagcttcctaaaatgcctaattaacacagtgagctttgggctattttttcccatgaagcttaatgatgctttctctgggcttttgggggagggtgtccaccagcttcttcagctgagcccctgcctccctcatgtcttgatcagggctgaaaagttccatggcagcctcataactggagggtgtgtccatgaggagggtttcgatgaccacgctgaaagctcgggcagatctctgcagaagcggagctgcagcagagagccagtgtgaccagggtgagggtgacaagcgagtttcaatggtggacg

SEQ ID NO: 137735 - DNA, 466 bp, Homo Sapiens
gagatgcttgtggtttattgaagagagcaaggctggtgggcgtggactcaaagcatggcagcggcagaggctggagcagttggggatcttcagcttctaaatgctaattacacagtgagctttgggctattttttccatgagcttaatgatgctttctctgggcttttgggggagggtcttgccaagatcatttattccgctgcattgccaaagtgtcttcataccaaattaaaggtggttttaatatatgtttcatggaagttgtttataaaattcaaaggtatttcatttaggtgaaaagtcttatttattaaagtggtttgaataaagtagatcaaaacttccagagatcttaatggctatataggaagaaatatcactcaccctaatttaaataaagaataaaaatacttgtattttgtggtggcaaatgtttggtagaactgtaattagaaaaatacaagt

SEQ ID NO: 137736 - DNA, 1226 bp, Homo Sapiens
  misc_feature (44)..(78): n is a, c, g, or t
aaacgacgagcgcagcgagtcatggtgagcgaggaagcggccgnnnnnnnnnnnnnnnnnnnnnnnnnnnnnnnnnnncagtcgacggtaccggacatatgcccgggaattcggccattacggccggggaatatacatgcacatcagctcaatgtcttttgagtattaattttatgtaagcattctatttaacatgaatataggacaaatcatggctatatctatagaccttggatcaaactggattgaccaattatacactcacggtgacttcttttattcgagtgggaaggggattgcgggtggggcaggctggcttaatgtaatatgagcaaccaaagtgggacttctgtctccccgctatattcccattgctttgaatggttgattgaagggtcagggaactagattttatggctttagttcactgtgattgtacatttatacttggcctatgtgctggccgcacctgaacatagctggtgcttatgccgagttatttgcgatgagtaaatatttagtttctttttcttcatatttataatgttgatctggcatcctcaggctgcagctttattagcttataacttactcatctctatctttaccagcaggctctgtattgttgatatttgcaacttgttttgcttttccattggtggaattgaaataattagtttttaattacataagatgcctgtttgctatttggtggaagatagatgttcatattgaagcagtcacatttgtactgtagttcaataaaaggccctaatgaagtattctgtagcctatatttttcatagagctcatgagcatttactgtacttgctggggtcttgccaagatcatttattccgctgcattgccaaagtgtcttcataccaaattaaaggtggttttaatatatgtttcatggaagttgtttataaaattcaaaggtatttcatttaggtgaaaagtcttatttattaaagtggtttgaataaagtagatcaaaacttccagagatcttaatggctatataggaagaaatatcactcaccataatttaaataaagaataaaaatacttgtattttgtggtggcaaatgtttggtagaactgtaattagaaaaatacaagtatatttgcgtgatgtgttacactagaagcccagactttacgactacacaatatattcatgtatctaaactgtacttgtaccccctaaatttatttttaaa

SEQ ID NO: 137737 - DNA, 964 bp, Homo Sapiens
  misc_feature (826)..(860): n is a, c, g, or t
  misc_feature (863)..(905): n is a, c, g, or t
gcggctattgtttgggtgggcgtcctcggagtctcctttagacggtccgcctttggcctgtccagatgtgcactgcgtgtgctggtgtccaggacgtctgcgggttgcggcacggggcgtttggttactgtgcggctggtgatctctcctctccttggtgtctgtgccccgggtgtttctctgtggggtccccttggtgccgccgtggtgtctctgtgtcgtgttgggcgccccgtgggcttaactctgttgtgtgtggagcgtgctgttttcgtggggtccatggtggctccacgtgtggtggtgctgtgtgtgctgggtgttcgtggttttttgagatgcttgtggtttattgaagagagcaaggctggtgggcgtggactcaaagcatggcagcggcagaggctggagcagttggggatcttcagcttctaaatgctaattacacagtgagctttgggctattttttccatgagcttaatgatgctttctctgggcttttgggggagggtgtccaccagcttcttcagctgagcccctgcctccctcatgtcttgatcagggctgaaaagttccatggcagcctcataactggagggtgtgtccatgaggagggtttcgatgacacgctgaaagctcgggcagatctctgcagaagcggagctgcagcagagagccagtgtgaccagggtgagggtgacagcgagtttcatggtggaggagggggatgctctggcccgtctctggttccgtctctgagtctggtgggctctccccggccgtaatggccgaattcccgggcatatgtccggtaccgtcgactgnnnnnnnnnnnnnnnnnnnnnnnnnnnnnnnnnnncgnnnnnnnnnnnnnnnnnnnnnnnnnnnnnnnnnnnnnnnnnnnatgacgggagctagcgccctatagtgagtcttacagtctttcttgttctttgtgtttgt

SEQ ID NO: 137738 - DNA, 657 bp, Homo Sapiens
gcacgagggcagaaaagacaaaaccgtggatctgtaggacagaagtacagtgagcaaattaataattttggacaaagtgtcctgctaagttcaagtgagccaaaacaaactacaaggggtattcttatattgaagaagatatacaagaatccatttgcaaaaacccatccatcaaaaatactttacaaataataccacttctggagaagagagaagatagaaccagcagctgcagagacaagagataattccagcagaatccgtctaagaagacctttcatgtacttccctaggactagatgcataccgttttgtgaaaaccagccataggaaaacatgtgagcaacaaccccgatgaacatttgtcctaactcagattttgtgagcagtgaagtttaacagagcagtgacatttaacaaagcagtgaagtttaacagagttctgagaataccatgaaagacattatgcctgcctaaacaaaaagcaggacataacctagctctgaatacatgccacaaggatgaagcttgtgagtagagcaaacaaacgtttttccaaagaattcacagtgctcctttgcaatttatagatttcatgttgaaatatatgttaaataaaatttctgtttattgaacctctttattaaacctctaact

SEQ ID NO: 137739 - DNA, 627 bp, Homo Sapiens
  misc_feature (241)..(339): n is a, c, g, or t
tttattgaaaaaaagttagaaattccatttttatttaacatgcattcaatgttacacatgtttcactaaggaaaatccttctgaaagtaagattactcttttatttataagaaacagaaaatatttccttttcaagggattctggatttctaagaataaaatccaagtcgtctcaacctgagtgctacgtatttataaactgagaaaaatacgtcttaccatacaggaaaaatgttatgannnnnnnnnnnnnnnnnnnnnnnnnnnnnnnnnnnnnnnnnnnnnnnnnnnnnnnnnnnnnnnnnnnnnnnnnnnnnnnnnnnnnnnnnnnnnnnnnnngttatagtgaactatgatcatggcaccgcaccaacagagccagcctccatctctttaaaaaacaataacaacaaatgccacgtaccatgtgatcctcaactttatccttgaaggatcagatgcttttattttacataacttcagagaagggcacctaatgactacaacagaataatagatatttagcacctaaatttagagatgcttaagtattgccatagttttaaatagctgtatgtctggtagttgagggaaaccaaatacatgttgttaaacgatattatcctt

SEQ ID NO: 137740 - DNA, 525 bp, Homo Sapiens
  misc_feature (512)..(512): n is a, c, g, or t
tgagtcaccccggccggctgttatgctcatcatggcacttaagagatgcttaacaaacctttcctacaatgttcctcagattttcagagcttatttgatctagcatctggttcctaaattctgagtcacatcagaagccaaacttgaatgcttttggaaagagctagcctcataccacttcagttgggaaggggagtactgaggtgtaccttggcaggacagtggaatgattgctggttcttctagtttgctctataccaagaactgctataacatgtttctaaaccagggctatgcaaagcactagagttcctgaccagcaatgcaaaccagtggcatacaaattcaaaatactgtatacaggccctgactccagcccaaaccaaggctggagggcatccagggggatgtggttccccacggggtagcatcttggttatgtgagatcaccaagacaccaagcctgttttatgagctgaatcctcagcttgttgctggatttgtggctgatnaaaaatacaggca

SEQ ID NO: 137741 - DNA, 771 bp, Homo Sapiens
gaaaggtttaaattttaccccccaaattttaattatgccagcatccccttttatccaaagggaaaaaataataaaggtctattaaaaaatatttttagtatggcaaactgctgcaataatttattgtaggcaaatggtagctataaagagggtccttgccccctaaaagaaaagaaaaagtacagcaagtttctaattagtagaactaactagttgtttttttgttgggggagcggtataggaaaggagaatacattttctcccatctcagaaagatttttaaaaatgcagtttgcttttgtgtaggtggctaaaatatctgatgactaaccactgcaaatgaaatttacggagacaaaggataagtgtgacaaaaaagctaagtgtggaatatagatgctagttagtcaaaaagtgtaaaagggacctgagaggaggacaacttttttgtagattcatctaatcaatcttgtattttcaaatctagtcaatataccaaagtcgactccaaaccatgttggcaggaaagcatattctacatcccttctatctttattccattttctatccccatattatggagaaatggcaaatctgcaacactctgaaaagaaacaatagcgcatttgagactggtgattgtaggtgtctcactctctgttccctggcatcccaaatgctgacactagttggtataaagtaagcctctttcagaaatgacattttgttactcctctttttgggaaaaaagaattctttgaaaaaattgcc

SEQ ID NO: 137742 - DNA, 837 bp, Homo Sapiens
aagttaaactgtagtcttctctcttcagagtctacttttatgccagttgcatcaggactgtctccactatcacctacagttgagctgaggctgcagggcattaacttgggcctagaagatgatggtgttgcagatgaatctgtgaaagggctggaaagccaggtgttggataaggaagaggaacagcctttatgggctgcaaatgagaattctgttcaaatgatgagaagtgaaatcaatacagaggtaaatgagaaagctggactattaccttgtcctgagccaacaataatcagtgctatcttgaaggatgataaccacagtcttacattttttcctgagtcaactgagcagaaacaatcagacataaagaaaccagaaaatacacaaccagaaaataaagaaaccatatctcaagcaacttcagagaaacttcccatgattttaacccagagatcttgttgcttttgggacaagacaaagttgcccttcagaaattaaatgatgcagccaccaagcttcaggcctgttggcggggattttatgccaggaactaccaccctcaagccaaagatgtgcgttacgaaatccggctacgcagaatgcaagagcacattgtctgcttaactgatgaaataaggagattacgagaagaaagagatggagaacgtattaaaaaatttggtacaggaagaagctttcaaattccttttggaaaccagggaaaggtcttctacagggtttgggcaaacagaccagtggaacccagcgtcctaaagtttccctgggcatacctgaatggttccctccctattattcaaggaaactccttggtga

SEQ ID NO: 137743 - DNA, 1646 bp, Homo Sapiens
  misc_feature (518)..(575): n is a, c, g, or t
  misc_feature (1535)..(1569): n is a, c, g, or t
actagttcattgtttgaggcaatggattcaagtacaggattacatctgtattattgggtgtccctggcagtatgttcactcgtccctcttcggttaccgaataatcggttcgagtatttgggttctttcaagtcttcgcacttgtttccgttagtagcctaatcggaccaggggtgaatgtctttctgtgtggattggcgcctgaggtattctcatattccaagggggatgcggtgctcaccttctgggagaattctattcttataggagtaacgaatcggttaggccttcttctttatttgagccgcgataggtgccacttgatgtgcccgtacatctcccactgtggggctggccgtctactttgggtccggtcttcgtgtccattgggctgagcgcactcagctgtggctgcccgccctgtgggctgtctgtttgcgctggtctctgctagttctgggtacggcggcgtctcctgtttgttcttttgttcgattgcaggtagtgttccctgccgnnnnnnnnnnnnnnnnnnnnnnnnnnnnnnnnnnnnnnnnnnnnnnnnnnnnnnnnnnagcctgacaaagagcgtgggctttattgttcattcatgattagaaaagtgggtgctgggacccccgtggagggggttgggctctgcccggtcactgctggtgcagggtatatacaaggtctacggccctcacaggcctgactggctccctcttgatggccaccaagcccaggcactttagaccagagccagtggccatccgtagggccaaaggcagttctggctgtgcagggtccctgggttaggaagtggacagaggctggggtcaccagggcaacccggacagggcccacgggaggcagggacgctggtgctttgggagagggagagacatctccttgtccttctggaatgtcctgagacagaggctggccctggtcactcatccagcccatccacggacctgctgtgtgtccttgagtgggtcgagacccttctctgggcacaggtctctgcagctgtccagttctgaccctctgggctattgtggccagcccccatgtgccaggagggagctgcctcctgggaacagctgctgagagacaagagtggcctcctgcgtggtgcttggccgcagtcagagcaagggctggtccggggacatggtgcagatgaggccagcctgggctctggcagtctgggtagtgccatgtgcagggaggtggacacctcacaggtatggcgactcctggggtcgggcagctgagttgcagggcaggcagcatccagggtcctgggtgtcctactgctggggtgccatgtccatcaagggcttctggaccccgaaggccgtgatgaagatgttgactaccacgatgatgaacaccaggcccgtggccaggttgttgaggaagtccagcttggcgtgcttgtccgggttgttaaggtcgtacttgacaaggaagatgagcccggccgtaatggccgaattcccgggcatatgtccggtaccgtcgactgnnnnnnnnnnnnnnnnnnnnnnnnnnnnnnnnnnncgccgcttcctcgctcacagactcgctgcgctcgtcgttcgactaagcaggcgggcgccctatatgatctatacatt

SEQ ID NO: 137744 - DNA, 1014 bp, Homo Sapiens
  misc_feature (922)..(922): n is a, c, g, or t
aaggtagcgaggcctgggtggcgaattcggcacgagggcggccgcaccatggactcgggaaccgaggagtacgagctcaacggcggcctgcctccgggcacacccggctccccggacgcctcgccggcccgctggggctggaggcacgggcccatcaacgtgaaccattacgccagcaagaagagcgcagccgagagcatgctggacatcgcgctgctgatggccaacgcgtcccagctgaaggccgtcgtggaacagggccccagcttcgccttctatgtgcccctggtggtcctcatctccatctcccttgtgctgcagatcggcgtgggggtgctgctcatcttccttgtcaagtacgaccttaacaacccggacaagcacgccaagctggacttcctcaacaacctggccacgggcctggtgttcatcatcgtggtagtcaacatcttcatcacggccttcggggtccagaagcccttgatggacatggcaccccagcagtaggacacccaggaccctggatgctgcctgccctgcaactcagctgcccgaccccaggagtcgccatacctgtgaggtgtccacctccctgcacatggcactacccagactgccagagcccaggctggcctcatctgcaccatgtccccggaccagcccttgctctgactgcggccaagcaccacgcaggaggccactcttgtctctcagcagctgttcccaggaggcagctccctcctggcacatggggggctggccacaaatagccccagagggtcagaactgggacagctgcagagacctgtgcccagagaagggtctccgaccccactcagggacacaacagcagggtccgtgggatggggctgggaatgaatgacccaggggcccagccctctgttctcaagggacatttccnaaaagggacaagggagaatgtcttctcccctcttccccaaaggcacccacacgttcccctgcccttccccggggggggccccttgtcccggc

SEQ ID NO: 137745 - DNA, 1229 bp, Homo Sapiens
  misc_feature (220)..(220): n is a, c, g, or t
cctttttggatggcccaaccaagccccaaggcccctttagcccagaagcccagtggcccatccgtagggccccaagggcagtttctgggctggtgcagggtcccctggtttagggaagttggacagaggcttggggtcatccaagggcaaccccggacagggggccccggggaggcaggggacgctgttgctttgggagagggagagacatctccttgtnccttctggaatgtcttgagacagaggctggccctggtcactcatccagccccatccacgggaccctgctgtgtgtccttgagtgggtcgagacccttctctgggcacaggtctctgcagctgtccagttctgaccctctgggctattgtggccagcccccatgtgccaggagggagctgcctcctgggaacagctgctgagagacaagagtggcctcctgcgtggtgcttggccgcagtcagagcaagggctggtccggggacatggtgcagatgaggccagcctgggctctggcagtctgggtagtgccatgtgcagggaggtggacacctcacaggtatggcgactcctggggtcgggcagctgagttgcagggcaggcagcatccagggtcctgggtgtcctactgctggggtgccatgtccatcaagggcttctggaccccgaaggccgtgatgaagatgttgactaccacgatgatgaacaccaggcccgtggccaggttgttgaggaagtccagcttggcgtgcttgtccgggttgttaaggtcgtacttgacaaggaagatgagcagcacccccacgccgatctgcagcacaagggagatggagatgaggaccaccaggggcacatagaaggcgaagctggggccctgttccacgacggccttcagctgggacgcgttggccatcagcagcgcgatgtccagcatgctctcggctgcgctcttcttgctggcgtaatggttcacgttgatgggcccgtgcctccagccccagcgggccggcgaggcgtccggggagccgggtgtgcccggaggcaggccgccgttgagctcgtactcctcggttcccgagtccatggtgcggccgcccaggccgccaggatccgggcctgagcgcgcccgagcctcagccgcaggctccagctgcgcctcgtgccgaattcgccacccaggcctcgctacttagggggtttgtggttcgcttagattaaattataaaatcta

SEQ ID NO: 137746 - DNA, 707 bp, Homo Sapiens
atctatgaagtattctattaatggggaagacatgacacctcaagagtcacaccaatgcatctagacacaggattgtttgtgatgaactgctaagtaaccgatctaactaagcctggaattgaggttggtaagcaaagtacagaacttcctatttatctttatgtgaacttttacagtttaagtttctgttaagtttaacatccaaatatcttctcaaaatcctgaaatctagtgaacttctacttgtgcgttttgaatgcagctataaattacagagcaagaccatctgacattaatatagaactgttaaataggacggggccaagtaaagaatcttgacagcactctctgcatacttgtctcacaggtaacaaacatcccagggaaaacttactttgggaatgacctttcactcatgcagctaaaaagccatgttcctctaccatgatccacaaattagctcaaaaggttgcctgtattgttctggctacaatgtccttgaccactccagcaatcctattaaaaaaataggattattttagcatgatttattccagaccactatttctcaatggaagcaagtaaggctttctccaagcctgcgcgtgcatgcatgtgtgcgtacctgtggtggtgccttttttagaaatttgtgtgcccggccgtaatggccgaattcccgggcatatgtccggtaccgtcgactg

SEQ ID NO: 137747 - DNA, 443 bp, Homo Sapiens
  misc_feature (287)..(287): n is a, c, g, or t
  misc_feature (311)..(311): n is a, c, g, or t
  misc_feature (399)..(399): n is a, c, g, or t
  misc_feature (404)..(404): n is a, c, g, or t
  misc_feature (410)..(410): n is a, c, g, or t
  misc_feature (429)..(429): n is a, c, g, or t
tgctgggttcaagccattctccatgccgcagcctcccatgtagcttcttaagatgtgaagatttttaaattaagatgactcttgggatgaaccatcttgtgttggttaaagacttttactgacatatttttaataatttttaacttttattttcaggtcaatggcacatgcgtaggtttgttatgtaggtaaactagtgtcacagggatttgttgtgcagattatttcaccacccagctattaagcctagtacccattaattgtttttccctgatcttctgcttccntcccacccatccaccctcccagangccccagtgtctgctgtttccctctatgtgttcatgtgttctcataatttagctcccatttgtaaatgagaacatgcagtatttgggntttcngttccngcattagtttgttaagggntaaagacctccatc

SEQ ID NO: 137748 - DNA, 303 bp, Homo Sapiens
gagttaataattacctaatattttcacatatctagctttttactaacccatggccagcctttttttcaagtaccccaacgtttttgccacatgcctaacgataccgttttccaaaggctcaaacacatccgttgtgtctaactgattctcctgttccgacctagaccgatcacttcctgacccggctgcacagctcttatctcgagcttttctctgctctcatccttgagactcactttgtctgtctcctttcttggattccctgtgtaaacgaaaaataaaatcctaagctctctaccaaaa

SEQ ID NO: 137749 - DNA, 552 bp, Homo Sapiens
  misc_feature (520)..(520): n is a, c, g, or t
  misc_feature (531)..(531): n is a, c, g, or t
cccccagggggcaaaagtgtgagatgccttaatctttccttcatttctgctgtctcgaacactctagcccattatttcctttcagttccttgcagcataacctctacgataagccccaagcgggttgttgtattatgacgtttatgatgttccaggtgaaggcattattaagtacctctctgggtgtggggtttggacgcaccaggatagctattgattaatgttaagggtgttctacccacagcaaagcacaccctcttaaaccaggcactgcctgggtcctggtcccgagagccctaccaggatcaggttcctgcaagccgtcagaatgtgggagcccccagcccaactgattgtaactgtcccctgttacctgtgacatgaacctccaacagcacctggaaacggttccctctgtcagctgctctgtagacagggctggggagatcttcagagttcacacctcgccttgttgttagggggaggttggggggtagggttttggattggccaagtgccntttggaacctnccacagttattggcccttcct

SEQ ID NO: 137750 - DNA, 1500 bp, Homo Sapiens
gccaacctgataatactggtttactctgagaaagaaacaggtggattgctgaggtgtatgattgagagagagactttacattttattttgtacccatgcaaatgtattacctattgaaaaaacaataaaattttgatttcacaagcaggttgaagggagaaggtcctataaaataacactttcttggttgagattggttggttgagactcatttggtaaagatggaagaaagaaaatatttcagaaagaagaaaatgctaatattttctatctttgttaggtggaagtttagctgatgctataagtgaaaactacagaatcatgagttactttaaagaagcagagttgaaggatctccttttgcaagttggccgaggcttgaggtatattcattcaatgtctttggttcacatggatataaaacctagtaatattttcatatctcgaacctcaatcccaaatgctgcctctgaagaaggagacgaagatgattgggcatccaacaaagttatgtttaaaataggtgatcttgggcatgtaacaaggatctccagtccacaagttgaagagggcgatagtcgttttcttgcaaatgaagttttacaggagaattatacccatctaccaaaagcagatatttttgcgcttgccctcacagtggtatgtgctgctggtgctgaacctcttccgagaaatggagatcaatggcatgaaatcagacagggtagattacctcggataccacaagtgctttcccaagaatttacagagttgctaaaagttatgattcatccagatccagagagaagaccttcagcaatggcactggtaaagcattcagtattgctgtccgcttctagaaagagtgcagaacaattacgaatagaattgaatgccgaaaagttcaaaaattcacttttacaaaaagaactcaagaaagcacagatggcaaaagctgcagctgaggaaagagcactcttcactgaccggatggccactaggtccaccacccagagtaatagaacatctcgacttattggaaagaaaatgaaccgctctgtcagccttactatatactgagctactcctttcccacctccccctgaacactgtgacaagaggaagctaggttgaaatcactgatagaatccagtttgcaattactttctcgattgggtgtcagtagttttactgattagggcttttattgtgaattacagttggaaagctgtattttggtggattgctatgtcaggctttcatctaatcttaccagtctgtcttctgtaggatgtgtcactgttggatgttacaccagcctttccagggttaaccactgtggtggtgtgctgcttaatagttagctgttgcattgtaataaaagggtgtctttcccctgtagtgacctggtaaaaaagtactcaaggggctttattacagacataccctccctttgaaaagggacatgctaaaaggactcattatactcagcctccatgt

SEQ ID NO: 137751 - DNA, 462 bp, Homo Sapiens
  misc_feature (19)..(19): n is a, c, g, or t
  misc_feature (35)..(35): n is a, c, g, or t
  misc_feature (69)..(69): n is a, c, g, or t
  misc_feature (90)..(90): n is a, c, g, or t
  misc_feature (375)..(375): n is a, c, g, or t
  misc_feature (385)..(385): n is a, c, g, or t
  misc_feature (404)..(404): n is a, c, g, or t
  misc_feature (419)..(419): n is a, c, g, or t
  misc_feature (450)..(450): n is a, c, g, or t
taacattgcccccaatgcntcgttcccctggcccnaaaggtccccaaaaaagtactaccatgagttgtnacctgcttataaatccacccnaatgcttttatccaagtggcaaagtccagaggaaagacaaagaggagaggaaacaggtcctctcccgtagagaagaggggcctatcacagtgtgtgggggtgtgacagcgaggtcgggcacacatgcgtgagaagcttcctcttgccacatgcttctcttcagctcatccaaacagaaagaaaaacacgttttctctcttaccagagtgccaaggaaggtgctgatggagcgtgcggcctggcagaggcgccgtactcctcaagcaggaggagatgaactggtgncttgcgggcnggctgcaggccagatggtncttcaccttggcgcngccgacaagtgcggacacacggccttcatcnccagcacatcct

SEQ ID NO: 137752 - DNA, 249 bp, Homo Sapiens
ccaaaaaatacaacgtgcactgatgatgtgacacaggggtcacttctcaataatatgactgtggcaatcatacactgcaggaaggagttacagcttatggggaaaagtactggatcaagagttctgagaagcagcatgactcagccaggcttatgagtcaggcttattggggttcaactcagctgtaccactcactctttgtgtgaccttggacatattctacacatgtttttattctatcatctgcaa

SEQ ID NO: 137753 - DNA, 447 bp, Homo Sapiens
  misc_feature (99)..(99): n is a, c, g, or t
gcacgaggtcaaccaagagaagagagtgggtggcataagctgggggccaaaaggaaggctctcaggaatattctctaccatccaaaatcaacagcaaangccagaaaaggggcatgagctcctaattcattgaaagagaacacccacaaaaacagttaacaaagggatctctttcccaacacatgctccctctcccatgaggctcaaccgtcagtgcagggcttgcctgatgtggacaatgtggatacctcagccctgagttgaacttggcatgccacctttgattccccatgctgcaaaaagaattggaacgctgtcaggtcctggcaccgtggtaatggctatatcctatttcactcacacacgtccttttaaagtctcccttcctcaagctattaaatagaaccctctagggatcctgtatgcagtgagggtctgaactgatga

SEQ ID NO: 137754 - DNA, 386 bp, Homo Sapiens
  misc_feature (71)..(71): n is a, c, g, or t
  misc_feature (77)..(77): n is a, c, g, or t
taccttttaaaaattaagtttttccatggattcctcaaacatactttcctcctgaggatcccttccaacancgaggncggggtaacaacccctgggctttttagtcttttggggcccatgggagaatatgcagatctatgcagagtacccttacccaggagggttctttgaggcttcaaagaacccagaatctttggctaaagttgttagaaatgtcttttccttttcaggagtggtctctgaactaaagctaggtaatttcagccagtgctaagttacccacttgggtggtctagtctactttcatctcctaacttgtttaactttaatacttgaatgtgggcttttcgtttctttttgattaaaattgacaagctgtaaaagta

SEQ ID NO: 137755 - DNA, 805 bp, Homo Sapiens
tttttttaagaaattttaaataaaatgtattttctgcaaaatgtcagcagtcctactattgcattcatctttccacaataacatatttagcaacacctcacattcacaaagagctctccttcctacattgcagcatcccttcatgtccatgactcccacaggcatgctctcaacccctgggaaccgaatacaaacccactgccagcagctcatagtggaagggaagggggcttagagacagcaacctacttgctcaaggccttgctttagaaaagatcagcaatactcaaataaactccaaaccagcaacaagtcaaataatagccaatattacttaacacatagtacattttggattcacaaaaccgaatgcatcctatttgaaaattatggtagaagtattccaaagcatagaagaggaggccagaggagaatggaaaagtcatttcacgtactccagcttgatttcagtaggggtagcagagttcaagtcttcatggtgtgagctatccggcccaggtgtttcatataattctggacccacttcttctttgggtcagcacagatctccttgccccagtttggttctgaagatgacagccttctggggacacctgcttgtggtgatcacatagctcttcagcctctgcaaggagatcttcttactgctaaatgtgaaagcagcaagtagatgggaccgttgagtgcatctggctgagcaagtccctgtgggttgaaagctgctgtcatgagcagcaggcacagaagcactgcagagactttcatgttgaaaggttaagagttg

SEQ ID NO: 137756 - DNA, 1309 bp, Homo Sapiens
acaaaaccaagagtattttattgcaccaagatcttggcaacacgtggggctccccaggcccccggaaaggaggtgcagaggatgggacacagacctctgcacacacacaggtgcggccatgcaaccaggacgcggggcaggcaagtgagaggacctgggagaggtagctgctgtacacaggccccactccctccagctccattcccaagcacaaaattcaacagacccagatcctaagtcaaccaagtgactgctatgacaaaggcttgggttattgacatttacttacatacgtgtacaagacctagagtttgaactcgttttctgggcctcatctttccctttccctatctggttgatgacttcggtggagggaagggacgtgactccacccaacagtgataaacgctgcagaaagtcatctcgtgctcaccactgcccaagaattaacgaatgtatgtaccccaggaaaaggttttacagttatctagtggagaagggaagagactgatttggaggagagaagggagagaaaggaacgagataaattctgtgccagcagacaactaacattttcaactacagaacatcacacggtaaacatggcagagggaacagttcacacaggaatgcaagtcaacaccccgagaagaaaaggaacataccctgcccgtgaaggcatgtgctttcccttccagataagttacaaagccagagcacggaagccaggccctcatctttgaacattcagagactggtccgcaggagagggcaccctgagcagctccactcactgctgctgggacacaggtggccacaggagcttgattctctcccacccttctaagaagagaaacgtaaaaacagaagaaaatccaaaagagacacccacccacatggaaaaaaataaatgtatcttcccatattaaaaaagcaattccatctacacgccagtaaccacccaggccccgagcacaggggcaggaagcaaagctgccccagggagagggggtgcagacagcgaggcagccacccgggacagcaggatgcctctggcccagcagagccacactgaaggaggtctaagtccaacaccacgttgtccatctccacctgcgacgactccgggaggaaatgacggggacagacccgatgaggaaggatgttcacggtcaccttcacacttcccactactatgagggcatttgtctttttcctgaaaatatcacgacgcgtgggtcgacgatatcccgggattccgaccgtaccagcctgctttttgtaaacctgttctatatgtcacatagcc

SEQ ID NO: 137757 - DNA, 1074 bp, Homo Sapiens
gggactggcgtccggggagcccagggtatgtgagggccacgtggatggaagcaaatgcctcctgcatagcccttggctctttgtcccacttgggaggagtccatggatataatatttacaaaacaattttttccttaccatttgcagaaagcattgcatatatttccttttagctcaggaaactggcatgccccaccctctgctactccatcagatgtaaatacaatgactataagccgtacaactcccctctcttagaaacctcagcaggaccacagagcaagggagtcaaagctttcttaattctctccagtaaatgactcaactaatttgatttttttaattaagtcaaaatatcaagagaaaaattgctactaaaacttacattttgatccacactgatgtgcaacacaaaatgaaagttttcacctccattccattttttaaaaattcacggtccacactgaaacttgctggggttttagcaggagacaaaggtgtcacccacgctgtccttcatcctgctctctctgtcccagtgacgctccagcatatgatcactgcagccggtccctggcccgtgccgattctgccacctcccagccacacacatttgcagacccacaagaagaactgtagccttgataatttcagttcaggctggaaaaatgccatgcaataatctggtttgctttcagtaagtaggcaacaagtgaaaactgtataattttcatcacctattctgctgttctatctaaaatgagtgtacctgtggtttgtgaactgggcccttgtttgtgccagatccttcaaagatgttccctgtcaggacacctgtggccctgcccctcctcagacacctttccactggcattcacgttccttatatgcagtgttagccatctttggcctacgtggactttttttgtaaattacaccatttccagacattaaactttttatattatgaaatttaccatgtaaaaagaacttcatatttttattgagattgctaaggcacttggccttcctcctttgtgattttcagtgtctattaaagcatgagttccctca

SEQ ID NO: 137758 - DNA, 278 bp, Homo Sapiens
ttttttttaggcttgaataatggtgtttattttctttaaatacacttaaatatgaaacatcagatggtagttcattaaactggaagactataagctggacagtaatcagaaagtcagtactgatcatacgaatcaaattctgcataaaaaagaatcagaataattcacaagagttgcgattagaaaggactcagagactacagttttcctcatctgctctgagtaatcagtcatatgacacctgccattccatgaccagcacacctttctcattcacc

SEQ ID NO: 137759 - DNA, 405 bp, Homo Sapiens
  misc_feature (368)..(368): n is a, c, g, or t
  misc_feature (394)..(394): n is a, c, g, or t
gatagttgagacagtatttattttttaagtggcactgaggtcatatactttaatccctcccaacacatgtaacagtcctctgcccatcattagcgattctgaggatgaaacgttatgcaaagtcccttgcagagtcaaatttggcctgagagataaaaagtcgagcttagcagatggcagggaataaaagggagcaggggcaggagaaggctcgtctttttaatctaagcccaaagcccaaaccagggtgccagaaagataaaataaaaactgtgcctatagttttgcaatgctttaggggatgctggaaggacagtctttaggaggatcattttaaattaatgtatctattcttcatttccaaaggnttaattggaattaccatcccggtggnttccggttttt

SEQ ID NO: 137760 - DNA, 501 bp, Homo Sapiens
ttttttgaggtccagagatgcctgctttatttcctacggggtgatcgcatttcaggctggtaacatcacataacaagtctaatcgccaactagttgtacgcctctgaactacaagtcaacaatccaattcagcaaggaacaacagtgtcaacagctcattagcgggtggggaccggattttccaaatcaatggtcttggctggcagagtgctgagtggggcctgagtgaatgaggctaaaacgcttggccgaagccgtccatccccaatcctgagaacagagttgtctgtttctctttcgggggtcaggtcagcccaagtaagaggccaacaacctacctgggccgatacaaggcgacacaaggcccacccgtggctgacgcgccctccaccctcactccatcccggggcacagctccttccgctggtgcttaggaaaaggcgaggcttctggtaatttctcatctttgtagttctgctttgaaaagaaagggggcgggca

SEQ ID NO: 137761 - DNA, 796 bp, Homo Sapiens
agccatatactgcacacacacgtggccactccacactggcaacatttacattctcatcacagatcggggcccgtctgtccttctagactctggtggatggattaagactgagggtgataaagaaaaagccccaggactgatgggcctgaaggacagggacacaggcacttgctatggctgcgtgtgctccaagtgcctgggcaagggctgcagctgggggtgtcctgtacttggctcagcctccagcattaattaggctgcctaatggccccagaccagctcgggccagggaacgcagggactggcatcatagggaggagactggctttcttctggatgaggcaacactgctcaaggctaggccctagctcagccagcagccagggaggctagggtctcttccctagctcctgggtggataaaagtgcgaggagagagctatgattccttgaggggtagctggctgaacagaaaaaagttaatttaccacctcagtaactccaagaatcttcccagggagggattcggtctccccacctgtcagccagggagagaatcctagattctgggtcatcaagcctaactttcccatcttacatatgggaaaactgagttcctgggggaacctggctcagagtcagttggcctccctggaggcagagggctggtcacggcccctgcagttttcttgcctcctaagccagccccagggtttggggcacaacacgtcaggagcagaaagcttccagaaggggacagctgataaggcagcctggctgacagaagcccgtcagcc

SEQ ID NO: 137762 - DNA, 955 bp, Homo Sapiens
  misc_feature (852)..(886): n is a, c, g, or t
gcatgtgtgtgtgagttatgcagtcataggcgagcgtggcaattcaattgtctattactccgttttgtattcgctcgaaactatttcctgtcttttgctaatggagttacattgggtccgcatcgtctgccagtccatggtgctgcagaggcaatttgcagctagtaagacagtccattcgagttgaaccagggactccttaagcttggtgttgaattggaaggcttggtctggatttcactggtggtgcttgtgtataagtggagtttgtgtgttaacacctgggttataacaacagtgacagcaacttggcaaagcagcatgctgtttaaaaatgacagggatggggaacttggaacgctgaatcaaggattctttcggctgtggggcccctgggcagcccttttctcctttggaaagcggcaatgctttgcacatgctgttttgccacttgcacatggtctggtatgaaaggggcatctgtcctcacagctgcaggtgtctgggtgaaatagcttgtgcttctggcagcaggtctccagactttctttgcactcaaagcaactgcagtttttggggtgctggattagatctttgggacatggtgttttacagacacactcgcaacgatcttcgtcaaacatcatgtgtggcccacagagagctggttcctggagatgagagtggtctaaagagaaacagaaacgtgttggtcagatagttgtagtgtggcattggatcaccaagttgattgtatcttttatgtcatccgtaagtaacttggattcacccatctccttccccggccgtaatggccgaattcccgggcatatgtccggtaccgtcgactgnnnnnnnnnnnnnnnnnnnnnnnnnnnnnnnnnnncggccgcttcctcgctcactgcttcgctgcgctcgtcgttcgctgcgacggcagccctatatagtcgtt

SEQ ID NO: 137763 - DNA, 523 bp, Homo Sapiens
  misc_feature (425)..(425): n is a, c, g, or t
  misc_feature (442)..(442): n is a, c, g, or t
gccaatccagagcaaggccctcgtttcaattctgtgaagcctaagagaggtgatgaagctgcagaagaaaaattggaagctagcagaggttggttcctgtggtttagggaaagaagccatctccatgagtgcagaatgaagcagcaagtgctgatgtagaagctgctgcaagttacccagaagatctagctaagatcattgatgcagatgactaaacagattgtcagtgtagaggaaacagccttccattggaagaaggtgccgtctaggactttcataactagagagaagacaacatctgctttgaaaggacatgctaactctcattagtggataatgcagctggtcacttttaagtggaagctagtgctcatttatcattctgataatcctaggacccttagaatttgctgaatctactcttnctgtgctttataaatgnaacaacaaagcctggatgacagcatgtctgtttacatcatagtgtactgagtattttaagcccactgttgggaccgacccc

SEQ ID NO: 137764 - DNA, 559 bp, Homo Sapiens
  misc_feature (121)..(121): n is a, c, g, or t
  misc_feature (405)..(405): n is a, c, g, or t
  misc_feature (412)..(412): n is a, c, g, or t
  misc_feature (431)..(431): n is a, c, g, or t
  misc_feature (524)..(524): n is a, c, g, or t
cgctggtcatcaatttattaaaatagttgacttaagatctcaatggtacttcacctcaactcctggctaatactgatggaagaatctgcttaacaatctcgaaggctgtcaagcaatgagngcttgtgaattctcatctggaaacgacccacgtcttagaccttcaccacaaggagtttttcttgtagtgattctaaagcttggtaggattcgactggtctttactttgagattcttttcttttgcgctcttatcaagtcagacacaccttttccaaggtttacgttgcggcttgttagggtgattcgattcggtgaattccacctccgctccacgggtgttttccggtatccttaaaagcatggtgctgcgcgcgggttcctgaccgcttgttcctcggcgagnggaacanggtgagtcaggagcaggancgtgcggaccaaaaatcctcagccttacgacctcgtgccgattcctgcagccgggggatccactagtttagagcggccgcaccggtggagctncagttttgttccttagtagggtaatttcgagttgg

SEQ ID NO: 137765 - DNA, 617 bp, Homo Sapiens
  misc_feature (175)..(224): n is a, c, g, or t
attttctcttttcctatgctatggttatcagaaatattgtaattaagcaacaggtataattttaacaggtctttttttgtgtgtgtggagccacaagcaaaatgagtttataattgtgcaatatacagatatatatataaaaattcaactgctttgtgtgtctagtcggtgcgtnnnnnnnnnnnnnnnnnnnnnnnnnnnnnnnnnnnnnnnnnnnnnnnnnnagcccatgatagaggagacaaagcaggcctatgcgcacagtctatgtgttactggatataatcagggtcaccagggaagaacagctttgccacttgacacacaaacactgcggggagaggggctatcagtgggcaggagccaaacctcttggccttttcacctcatctgctctcactgctgagcaggacctgattaaaggtaggacagaatgggggtttgggggcaaagagatttccaaattccccaaatgttctttgaattccaaggtagggtttcctcccgggtctgggctctgcctgtgcacaagtcggagcccggagcggaacctgggggttgtgctccctccttgcattgccctcacacctgcttccttctgcctcctgaaagggcag

SEQ ID NO: 137766 - DNA, 403 bp, Homo Sapiens
ccccaaagtggctggcaaattaacaggtgtgagcccaccatgcccagcttggaaccacttttattttattccttctcttccctaaaaaaaattgaggataagctctgccttttttcatcaaccataataagtatggtatccattcactacttgactgctggagagctcaggacatttggacagaatgcttcaaactggggccaaagtagcctgtctcctcagagagctgacttctgggatacgcatctctgtagtgggaggccacatgaaagtgaacctaactcatgtacagaggtcatcgccatgtcacttcctagtaaatgctcaataaacttgtaaaccaccccctctctttagagccctacaggttttgttcttattgtggtggtggaggtggggagtt

SEQ ID NO: 137767 - DNA, 590 bp, Homo Sapiens
  misc_feature (25)..(25): n is a, c, g, or t
  misc_feature (43)..(44): n is a, c, g, or t
  misc_feature (54)..(54): n is a, c, g, or t
  misc_feature (59)..(59): n is a, c, g, or t
  misc_feature (424)..(424): n is a, c, g, or t
  misc_feature (443)..(443): n is a, c, g, or t
  misc_feature (449)..(449): n is a, c, g, or t
  misc_feature (472)..(472): n is a, c, g, or t
  misc_feature (477)..(477): n is a, c, g, or t
  misc_feature (489)..(489): n is a, c, g, or t
  misc_feature (519)..(519): n is a, c, g, or t
  misc_feature (526)..(526): n is a, c, g, or t
  misc_feature (535)..(535): n is a, c, g, or t
  misc_feature (544)..(544): n is a, c, g, or t
  misc_feature (550)..(550): n is a, c, g, or t
ggtgtgcactccagcctggcaacanagcaagactctgctcggnnaaaaaaacanaacanaacaaagagaaatggctgaaaggaatcctttattaccccacccaaacctgacagtcatgcagccttggcttaggctctaacctgtcaactggcggtgtgaccttgagcaagtcctggcctctcagcagcctctgtaaaaatgaggttgttgcatttagtggtctctggggacctttccatttctgagattctgtatattattttcaactgctctgggaaggtccccttcctcttcctgggttttttcctgcatttctccccctccccctttccttccgctcttcacatttgtcccttcttgtatccggcctcagcccccatttcctggggcaccccccaattccacttgaggatgggttaccatnggggaatcatctcctgggnaagttnacattcacacattttcctagggnaactnttttccaggggncagttgacatcatcttgattcaccatgggnaaccctncagggaggncactttttncagttnaattgggcagagagattttaaggtttttttcttggagatt

SEQ ID NO: 137768 - DNA, 566 bp, Homo Sapiens
  misc_feature (126)..(126): n is a, c, g, or t
  misc_feature (139)..(139): n is a, c, g, or t
  misc_feature (312)..(312): n is a, c, g, or t
  misc_feature (316)..(387): n is a, c, g, or t
  misc_feature (474)..(474): n is a, c, g, or t
  misc_feature (505)..(505): n is a, c, g, or t
agaaccagattcggatatggcgaaagttttagagttatcagcttgggaactgaaataactgattaatatgagggtgcgaatggaaaggtggacagatgggaacagaagcgagagattttgcacacntccaggagtggtnccccagacatgcccaaaatcaagaagaattcacaatgtacatcagaaagtattttgaacttcaagacaatgttaaaatatcaacacttttatcttgagatgttgccactacagcatttcggggagaaatctgtttgctttacatgcttatattaggccggcccgggggcacanactnnnnnnnnnnnnnnnnnnnnnnnnnnnnnnnnnnnnnnnnnnnnnnnnnnnnnnnnnnnnnnnnnnnnnnnntggtaaaaccccatcttctcaaaaaaaaccccaaagttagccgagtatgttggacatgcttgtagtcccagctactcagcagggganctgaggtgggaggtcacttcaacctagaagncgaggttgcagtgagccaagactgaccactgcaatccagtataggcaacagagcaagcccc

SEQ ID NO: 137769 - DNA, 799 bp, Homo Sapiens
tttaatagtatgagcatggtcattgaatgacttctatagttcattgctagaatagctaaaatattttggagaactagaacagaataactggaatttccctaacaattttaataaaaagtatgctggtgttgattcagtattggacaataagtggaaagaataacattcggaaataaacattcagaagataagcccagtatatgtaagaatctaataagataaatatatttcaaattaatagggaaattatagttattctacatttacagaagattttggaagaaggtgctggctatttgttatggggaaaggatggattaattgctaccccatacttaagtatgttcttttttccttttttgtaatggcagtttgtcagtgtgaaataaaatgttcttttttaattaaaatctaaattaaaaattaaacatggagacaaaaggaaaataggctggcatttttacagtgtcagggtgggttagcaaagacatgatatcagaagcagaaaataaagtgatccgtttgactaaatagaaacaaaacatatagcagagacttgtaaataaaattgaaggcaatcagtaaactgggaaaatacatttgtaattttattgacaaggggtcaacattcttactatttaaagagcccttacagatgaagaaaaagaccccaacacctcagtagaatgcaggctgaagaacatgagccagcagttctcacaggactaaatataaactacacatatatagatattcttttgatttaataatcctacatgtaggaataagttctaatagc

SEQ ID NO: 137770 - DNA, 855 bp, Homo Sapiens
ttttattgaaataataacttgcatttttattttttaatattgcaaatggcataaactccaggattcccacttcccaagatgtgtttttatttctcactgattgtatcctgaaggaatcacaggtcttggcaaggtcaagtcaccatcgctggttacacatatcctggatatgtgcaggttccctgtgtcaaggccttttgagccacttggagatgtaatttaaaaaggcaaaacaatgcacagaacaattggggaaaagttacaagtaaaataattttatgcagacagaaatgtttttaaagctgttcatgatttagtagaaagaatcaggagcttgaaacaattacttctgttgctctttttctgaggtttcattccaatgagagttgcacactgtcagcttggttttgtggctgctgatagtcgtactttcttgaaatggaatacatttccagttgttgtcttaaacgaatcttgcttatcgtgtcataaaagttgggctctgacaaagtttcctctgtaggtggcacactgaatatcctcataattctccttttgttccttttggcatacatgaagagaccgaagctaacaaggataactatcaagtaaacattggtggcttcattccaggcttcgtgaacagtataatcaatagaaccatcgtcacccatcactccataacccccagccatgggggctgccggctccggaggcggcacgcggccagcgctgctccgctccggggctctttaccccggagtcggggccgggcgcgcgggaaacggttaccgagcggacctggacgcccggacgcgtgggtcgacgatatcccgggaattccggaccggtcca

SEQ ID NO: 137771 - DNA, 341 bp, Homo Sapiens
  misc_feature (52)..(52): n is a, c, g, or t
  misc_feature (70)..(70): n is a, c, g, or t
  misc_feature (93)..(148): n is a, c, g, or t
  misc_feature (152)..(152): n is a, c, g, or t
gtgcccaccaccactcccagctaatttttgtatttttagtagagatggggtntcaccaagttggccaggntggtctcgatctcttgacctcgnnnnnnnnnnnnnnnnnnnnnnnnnnnnnnnnnnnnnnnnnnnnnnnnnnnnnnnncagnctccatttctttttgaatcagttttggtaatttgtgtcttccaggggaatttgtctcttccatttaaattgtcaaatttattgggcttgaagttgtccacattattcccttagcctcctttgaaatgtatgtaggatctgttagtgaatgtcctatttcaattcctaatactgggcaatttgtatcttt

SEQ ID NO: 137772 - DNA, 699 bp, Homo Sapiens
  misc_feature (16)..(16): n is a, c, g, or t
  misc_feature (429)..(429): n is a, c, g, or t
  misc_feature (554)..(554): n is a, c, g, or t
  misc_feature (591)..(591): n is a, c, g, or t
agtgatccactttgcnttggggagaaaaccactttgtgtgtcggctgctgtgtctgatgagtctgtggctggagacagtggggtctatgaagctttcgtgaaacaacctagtgaaatggaagatgtcacatacagtgaagaggatgtagccattgtagagaccgcccaggttcagataggcctcagatacaatgcaaaaagttcaagtttcatggtgattatagcacagctccgaaaccttcatgccttcttgataccctcatacttcaaaagtatattttagggttgccgttcttccttcctcaactgatgtcagctgtctgtttcgcacaaaagttcatccgccccacagaatccattttatttcaatgatgtgttcagagtcgccattttcccaaacagccttacaacaggaggacactgagggtnggacctttgctctgtcagtaaacaccgaagggaagaatgcctggctggaactcagatcagcctggcagatttaccattttccagtgaggttttcactctatggtataacttgcttccttccaagnaaatccttgcaaaaagaatgaagaaaatgaggactcntgtatttcaaccaaaccagccgttagtagattctatagacttggatgcagtgtcagccttacttgcaagaacatcagctgagttgttagctgtggaacaaccattagc

SEQ ID NO: 137773 - DNA, 509 bp, Homo Sapiens
  misc_feature (13)..(13): n is a, c, g, or t
  misc_feature (33)..(33): n is a, c, g, or t
  misc_feature (331)..(434): n is a, c, g, or t
  misc_feature (456)..(456): n is a, c, g, or t
ctcaaaggaaganttttaaaaataaaaggttantgttcttggatgtttgaatgcacaagtcaacagataggagaagaggaatctcaaagccccatgactgagaatagtggtacccttgatggaaatagataaaaataataaatgggctgggcggctgacctccattgtttgggacattttgagtttgagacaagggaaggggcccctaagcagaaatgccttgcaaatgggtggagatcccaggacgggaactgagttcactacgggagctgtagacttcccaaggcttcaacatgcagtaggtgaagtatgaaggctgggtgtggtggcnnnnnnnnnnnnnnnnnnnnnnnnnnnnnnnnnnnnnnnnnnnnnnnnnnnnnnnnnnnnnnnnnnnnnnnnnnnnnnnnnnnnnnnnnnnnnnnnnnnnnnnnttagttgggcatggtggtgcanacctgtagtcccagctactctggaggctgaggtgagagaattgcttgaaccca

SEQ ID NO: 137774 - DNA, 182 bp, Homo Sapiens
gcacgagcttagttatactgaatgctgcatgtagaggtctgcagggttgccagctgatggctggcggaagatctgctgacttggattcagttactactaaaatggcaggtttagaaagaggagagaacttctagatccagaggaaataatcaggtaagtatgctaagatgtgtgtatgtgtt

SEQ ID NO: 137775 - DNA, 843 bp, Homo Sapiens
tttggaaaaagtctagtttattgcactgactcaaagcacaactaaaaattaaaaccagaaagaaaactgtacaaagcacgaagctacaactttaaaagcatcacctagacgcgggtttaattgcactacagtcccatgggtgaggagagctttgccatccgtgaggcgccgggcaaggcacaacagacacagagagatgcagcccggcctggggctgcctctgctgccaccaacttttacaaaaggttctagaaaagggaagtgtgaagtcagatctgggatttcggcatcttgacctcatttggacatggaaaacctccacctatgtggctggctgggtcctgtcagagaacatattttatcaccctccacctgcggcctgggggctccctgacaccaaggactgggcctgggccaggggcaggctaaaaaaagcagccagcctggtgtcctgtcctgaagctgcctccgggagggggcgggatgtgtggcagggcggcctagccctcacacgcagatgccagtgggcggggtgggcactgcccattgtctgaaggggccacagcagccgtccatagaggcactggtttcaacctgtcaagtgtcaacccataccccgcagaaggcatgggctgccactcggagccagcccgcaggtcccgtgaccgccctgccagtcaagtctgtgcggggatgcctgcccctctgaggctgcaggcgaggacagtgcaggctcaggacaaacccgggaaggaacaaagggcttccactgttttcggaaaacatatctctcttctaaatttgtaagatttgatttgaaatgaggtattttatgcagatttg

SEQ ID NO: 137776 - DNA, 211 bp, Homo Sapiens
aggaaggaaggagggagacaggcaggcctttctttcatctttatggctctcacaaccaccccaaggtatgtggctaagatcactccatttttattttttattactgtcctcagaagggaagagggcagttggggttaaaagccaagggcactaagccagggtgacctgcttgcaacctcccagctaggcagtacccaaaccaggacaagct

SEQ ID NO: 137777 - DNA, 957 bp, Homo Sapiens
tcaaatagttaaatgaaattgtattttgcccacggctgcttctgtttgatccctggggacagaggggagcaagggaggggagtggcagggggaggcccaggtgtggggctggagggggtactggcggcagcgggaggcagtaggcttgggcaggggaggagtgcgctgcgcctcaggaggcaaaggtgccccagcctgggcaggccctggaccagcccaagctgagcagcgccgcccctgggctggctctcagagcctgggctaacgtggagcccgccacgtcgcttggcactcagaggcccctgcttcttgttggctcacgtaggccacgctcaacacgtagcctgtgccacacccttcgaggcccgggtaggagggcagaggggctggtctgggctcttggtggacccctgctggtgctgcctgcctcctcctcccccacgtgggactcaagccaagggtcagaggcgcttccgctgctgggagcaagggaggagagtaggggtggagcagcctcccctctgcgtgggaacccggcctgtgtaagcagtagcgggacagggtggccggagtgatgccttggggcctgcggggaggagtggaagaagtggatgggctggctggctgtggcttgcatggcactggcagcccagcctggcttagaagtctggccggtccttcttcagcttcttatagtcagtggaaactgcaaggaacttgtattggtcattggggctcaggcggttccagggctccgggttgttctttctgtcccagcagacgtcggggctgcgaagggcgagtcgcagcaagtaaagcgcagcgctgcccatgcccaggcagattaagccgatcatcgggatgatccccggatgtcttttgatctgccggtagaagcgggccccaagactggctcctgccatatcgttttttcccaatcccgggaattccggaccg

SEQ ID NO: 137778 - DNA, 358 bp, Homo Sapiens
tcaatttgttaaatgaaattgtattttgcccacggctgcttctgtttgatccctggggacagaggggagcaagggaggggagtggcagggggaggcccaggtgtggggctggagggggtactggcggcagcgggaggcagtaggcttgggcaggggaggagtgcgctgcgcctcaggaggcaaaggtgccccagcctgggcaggccctggaccagcccaagctgagcagcgccgcccctgggctggctctcagagcctgcctcctcctcccccacgtgggactcaagccaagggtcagaggcgctttcgctgctgggagcaagggaggagagtaggggtggagcagcctcccctctgc

SEQ ID NO: 137779 - DNA, 2271 bp, Homo Sapiens
  misc_feature (219)..(239): n is a, c, g, or t
  misc_feature (391)..(399): n is a, c, g, or t
  misc_feature (836)..(836): n is a, c, g, or t
ctgtcttgggcttgttgtctcttccttctgttgctccctgcccctccccctgcctttccactctgtctggtgagctctgctttttcagtgcaccatcaagagatgcagccccgtggacatgaagacacaatctcccacggacagctttcccccttccgccctctcccaccctctcctccccttgcgctcgcgctcgcgctcgctttctcactggcgtgnnnnnnnnnnnnnnnnnnnnncctctgtacctttctcatagttgcttcagatcttaggtctcaagggcactttggcgcgtagtaagtgctttatgtaagaaggcagggcaggggggctttttacaggagaaaaaaaatgacttataagagaaagagcctggagtatttttggnnnnnnnnntaatatttttatgttaaaacaattttaaaatcttaaaatggccatcagacatagagagctttgtgtgattcatgttttaaaaagaaccgaagaagccacaggcagggcctgagggagcccctggctttcccctcagcctcaggaaaggtggtcaggaaaactctggctggacaagggtcagtcttcggggtcagcagcgagattgctctgcagccagtgagggaggtccccgccatgccggctggaagaagaacctcgcatcttttggtgtgtatgcaccttggcagccagcaggaaagcagcgaagagccgcgcgccctctggcctcaagggagcattggcagaaccataaggtactgcagaagccgtcgaaaccgactgctcggctgggattaggcgtgttggctacatctttcccacaaccgtataacgaccgnatggtcattttctccaagagcagggttggcgagtcctttgcagagctgacatagaggcgcccgcatgtcacttagtctaacgctgacagaaatgaatgcagaaggaagattttcagtcctgaacgtgaattatagaggtagaacgtcgctaataatttctgccatctttataatttctttgtctcacagaagactaggagaaagatcttttttaaataatctttttgctgtttttaaaaaattaaacaaggctttgtgttcctagaagagcttcatttcagtgaatctggtgacctccatctgcttgctgtcataacccgacacggacttatttttgtcattagcaagggggaaaaggccaaaggacaagggcctcttctcccattggttttcctgtgggcagaagggctgaggaagatggcccagcccgtgggggctgctgggtcaccagcagtgggtagggtgcaatctggtgtgtgttccagcagtgagacggtgttattgtgaaggtggcattcatctgcggagccaaaacccagccatcggggaagggtcagggcttctgtggaacttggaacgtgccaggaccaccctgcaaaagccagggtgcgttgatcattctcagatcattgattggcctccacttgggtatgtgaattattcatgtcccagaagaccaaaaagtgctctggttctgagatgagtattttattcgtgttctgtttccgaaacacttagcaaagaaggtcacagtgatgtggagtcgccgcacccatctttgaagatagccagtgtccctggatgaggtgatgatttcccgtcccaaggactctgtgaagtttagagtacagtttgttggggtccaaaagacaccatctctaccccacccaaataaaaatgcactcatctctgtagaacatctgctgtcaaaggccagcctgtcgttagggcatggcttatgcttgacaaaccagtaacaactgtgggatggcgatggtgggatgtgtcgcaagcaattcactagacaatcttcacatgaatgtcggtagccagggtctctcccgagggatggctttagtcttgatgaatgtgaaccatgtcggaattgttaggtagaaacctgggctgggaggcctcggaccccaggctccatccctggcttccccagcctggcggccgcaagccaaaccaaggcgcgagatgcagctagcacccttcttatccatccccgttctccgcgggaacaacaccctggacagccgttttcagaaacctccagctttggaaaaccactactcaccctctctggtggcgggcatggtggtaaaaaccatccctggaaacaaaaaaaggccccgggggaaggttattggttcacccttgttttcaagcttttaaaaaggggggaggaatgcccaagtctttaagggacaaa

SEQ ID NO: 137780 - DNA, 460 bp, Homo Sapiens
  misc_feature (311)..(311): n is a, c, g, or t
ttttcatttagttatttcccgttccatatggtgttaaaacagtcgtattaaataaagattatttctagttttcagtggtaatttaaatgagaggatatgtaataattgcttattagatacttatccaaatgaaatataacagagtttacagtacttaaaatggctggttatggtcttggaaatgtttgaaaattcattatcctgaaaaaaactttaccattctgttttacccttgaggtattttttggggaaaaatgtttttgataactattaatctaaatatagtataattatagggcaaatttcacctngcctagttttattgatatccctgagtctaccagctagtcccattccgtatgacctggattgatttatgatagctcccagagacccataaaatttccaaaggctaaactctcctggattttagtaaaatgagtagggtaaaagtgacccc

SEQ ID NO: 137781 - DNA, 504 bp, Homo Sapiens
  misc_feature (186)..(210): n is a, c, g, or t
  misc_feature (219)..(319): n is a, c, g, or t
  misc_feature (427)..(427): n is a, c, g, or t
  misc_feature (467)..(467): n is a, c, g, or t
  misc_feature (476)..(476): n is a, c, g, or t
  misc_feature (485)..(485): n is a, c, g, or t
atgacactgtcttaaatgatttaatgtcttaaatcgggaaaggagagtaagagaaagcactcaactggagtcagaggtgtcttgcagcctagctctttccacagacaagctacatgggcctatcatctaaccttttcaagcttctccgactgcttctgtgttggagggatttgggctagaggatcnnnnnnnnnnnnnnnnnnnnnnnnnggtgacggnnnnnnnnnnnnnnnnnnnnnnnnnnnnnnnnnnnnnnnnnnnnnnnnnnnnnnnnnnnnnnnnnnnnnnnnnnnnnnnnnnnnnnnnnnnnnnnnnnnnngcttagtcggggaggcttgaggcaggagaatcctttggaacctggggaagttcggaaggttttccagttggggccgaggttcgttgccacttgcagttccacctgggnccaacagaggcaaagattttgtcttcttaaaaataataantttttattnatttgttantcctttgaacaggcccagt

SEQ ID NO: 137782 - DNA, 612 bp, Homo Sapiens
  misc_feature (472)..(472): n is a, c, g, or t
  misc_feature (496)..(496): n is a, c, g, or t
  misc_feature (509)..(509): n is a, c, g, or t
  misc_feature (530)..(530): n is a, c, g, or t
  misc_feature (568)..(568): n is a, c, g, or t
  misc_feature (576)..(576): n is a, c, g, or t
atcaatctttagaaaaggcatagtctacttgttataaatcgttaggatactgcctcccccagggtctaaaattacatattataggggaaaagctgaacactgaagtcagttctcaacaatttagaaggaaaacctacaaaacatttggcagaaaattacatttcgatgtttttgaatgaatacgagcaagcttttacaacagtgctgatctaaaaatacttagcacttggcctgagatgcctggtgagcattacaggcaaggggaatctggaggtagccgacctgaggacatggcttctgaacctgtcttttgggagtggtatggaaggtggagcgttcaccagtgacctggaaggcccagcaccaccctccttcccactcttctcatcttgacagagcctgccccagcgctgacgtgtcaggaaaacacccagggaactaggaaggcacttctgcctgaggggcagcctgncttgcccactcctgctctgctcgnctcggatcagctngagccttcttgagctggcctntcacttgcctccccaaggcccccttgccttgccctgtnagggaggnagtaagggaagcaggtgttgaagggcagtgcaaggt

SEQ ID NO: 137783 - DNA, 495 bp, Homo Sapiens
  misc_feature (299)..(299): n is a, c, g, or t
  misc_feature (432)..(432): n is a, c, g, or t
  misc_feature (458)..(458): n is a, c, g, or t
atgagccaccatgcctggccaacaccaacctttagttacttgctgaatacacaggattaaggaggaagagaaagtatcaaggatgactcccaggttcctagcttggtggtcccagtaattgagagagagaatgcagcaggaagagcagctctagggggaacaggatgagtatctccacatgatgggttggaggtacctgtgagtcacatccaggtggatgtgtcctgtgggcagtgggacgcgagtctgaagctcaggcaagaggctagagttacatctttggagtcatcagcctaatnggaggacttttggcatccagggtgccaaaagcttaggggaaacggctctttggagagagaggggctttcttaatttgacctgtattgcttttgaagctctattagagacacaatcttatccctttcaggcctntattttctttgggcacttaagatttngttacatattttctctcacatcttcctagaacgtttt

SEQ ID NO: 137784 - DNA, 330 bp, Homo Sapiens
  misc_feature (311)..(311): n is a, c, g, or t
tcaccattgagtgctacatgtgaatagatattaagtgccatatataattagttctcagaagaagggagaaatgatcataggactgggaattgttttgcaaacgttctaggagatgtgagagaaaatatgtaaccacatcttagtggcccaagaaaatacaggcctgaagggataagattgtgtctctatagagcttcaaagcatacaggtcaattaaggaagcccctctctcttccagagccgtttccctagcttttggcacctggatgccacagtcctccattaggctgatgactccaaagatgtaactntagcctcttgcctgagctt

SEQ ID NO: 137785 - DNA, 322 bp, Homo Sapiens
  misc_feature (64)..(182): n is a, c, g, or t
gttcaagcgattctcttgctttagactcaagagtagctgggactataggcacccaccaccatgnnnnnnnnnnnnnnnnnnnnnnnnnnnnnnnnnnnnnnnnnnnnnnnnnnnnnnnnnnnnnnnnnnnnnnnnnnnnnnnnnnnnnnnnnnnnnnnnnnnnnnnnnnnnnnnnnnnnnnnagtgtgagccactgcacccggccctttttcagtccttaaatcttccccaatcacccaacagcaccagagtctctctgggttcaggggaactgcccaatttgcaaatcattgtttgctcaattgacctctgtgactcgtgc

SEQ ID NO: 137786 - DNA, 565 bp, Homo Sapiens
  misc_feature (500)..(500): n is a, c, g, or t
ctgaatatttatctatggatgcccagcgctgggaagaggtggacatttcagttcattgccgacgttcacattttcacctggttgataaaatccattaaaaggaacacttaggagaataaggattgtgagatgccccactttaggtaaaaaacaatctgttgcttaatttgtagtgaaatttgtgtgtcacctgggtagtttcttcaggccaaaagtgaaatgtgggaaaattgtttggacaccggtgtttatgctcatattagtaacagccttttagggaaacttgataacctccatcttttttagttaaattatagttaaatttatggcaaatgaacagatctctagatcagcagttcccaatgtatggtgtatggaccagtgggatactagggcccttttagagggtctacaaggtcaaaacagtttgcctaataataccaagatgtcacttgactttctcactgtgttgctcagatggtacaaaagcaatagtgggnaaactgttgaagctttagacaagatcaaggcaggggcaccaaactgtactagcagtacatagccc

SEQ ID NO: 137787 - DNA, 998 bp, Homo Sapiens
  misc_feature (12)..(29): n is a, c, g, or t
acaattgccaannnnnnnnnnnnnnnnnnaaaaaataaaagccaaaataacacttttaagatcccaggttttagacaaggcagctgtagtctctccatcatcctcactgtccatttgcttcttcctgggacagacactgtggcccagtgaagctgaggggaccctgggattcaaagctggtggaatggaccctccctccccccacaagctgtaataacctgctggaatcccacacaacctgagggcttcacttgtcaacagctcccttccctcagaggctattttgaggcaggcattcggtgttttatgactgagctacccaggagaatggtttgaggccacactcaactgttccaaggagcagcactggaccaaaggctgcttggttccctgcggttcctgatgccaccccttctcttcagggtggttacctagaagacaacagtacatgaggcttccagcccagccctaggagatccatcccaaagaccccacagagacctgcatgggaggtggggccacaggtctggtatcaggcaaacctaggttggaacactggctccataaagaggaagtcacttaaccttctctggggcatggtttcttcatctgttcccacctctgaagactatcgtaagacagaatgaaagttaagcaacttaacgcaacgcccaggataccagaattattctaaatggcagaatcctacttagtctgtcatcttgggagttctctaggcaggcaggttgccaggggtggggctgagatccagatgtgctctaggtccctgtctgctgcagaatcatgtggctgctggacctgggggtcccccaggtccttgcaggagctgagggtaggagactccatttgccaaacaacttagaactttgggcctcagtttccttgtctttaaaaggaacaggtaaagaattcataaaaacaattgacaagggctgcctggaatttccctgtaatctcttccaggcagaggaggcctc

SEQ ID NO: 137788 - DNA, 426 bp, Homo Sapiens
  misc_feature (48)..(57): n is a, c, g, or t
  misc_feature (74)..(74): n is a, c, g, or t
  misc_feature (370)..(378): n is a, c, g, or t
aaataacgaactccacctaataggggccgaaaatggggtaaccggggnnnnnnnnnntccgaagaaaacccccngaaagaaagaagagaaacaaactaaacaataaccctttgttccgggaaaggctttccattccactaactgttggttagtgatgatttgaaggttttcaaaacatttgctgagactaattttctattaggttagaaaacctgttctacttctttaagagcctagctgcttccatttaaacagcctttgcatctgctgctaggagaagagggaggcatccctgctttggaaaccttgccatgctgctgagtggctacagatgtattggagtcttttaccgcagcgttatcaactgtcnnnnnnnnngcaccaataaacattttcttaaatggcaccaaagagcttggggtctta

SEQ ID NO: 137789 - DNA, 559 bp, Homo Sapiens
  misc_feature (200)..(200): n is a, c, g, or t
  misc_feature (204)..(204): n is a, c, g, or t
  misc_feature (229)..(229): n is a, c, g, or t
  misc_feature (245)..(245): n is a, c, g, or t
  misc_feature (491)..(491): n is a, c, g, or t
  misc_feature (494)..(494): n is a, c, g, or t
  misc_feature (500)..(500): n is a, c, g, or t
atcttcaaccttttattaaatgtaacccccttgagccccgtctgcttgaggggacccaagaggaaatcggggtgttataaattaaccatttcaggggacatcccgggagcaccgccagttggacgctggcctcctccagtccatccgaaagtttccacccgccggagctgtcacagccctggtccgctgcctgcccacgncggntcagagctggagtttctcgtctctntgccaaggaccagggntcagcagtattcagaataatcttcctccacgtagttggcagggaaccagccaacccggccatagatctcccctcgccaccagccttgctgtcccttcttgttaaggatcttgatgatgtcaccctccttgagcgacagctctgatcggtctcgggcgcagaagtcatagcgggctttgctgtgccaaaatactttgtgcttcccactgctggcctgctgatggttctcttttcaggctccttgaanggnaactgnaaggtggtgtccagagacttgaagcaatcctttagagagttctgctggtaaaacctcca

SEQ ID NO: 137790 - DNA, 1500 bp, Homo Sapiens
  misc_feature (71)..(71): n is a, c, g, or t
  misc_feature (527)..(527): n is a, c, g, or t
  misc_feature (714)..(722): n is a, c, g, or t
  misc_feature (768)..(777): n is a, c, g, or t
  misc_feature (953)..(953): n is a, c, g, or t
  misc_feature (972)..(980): n is a, c, g, or t
  misc_feature (1038)..(1038): n is a, c, g, or t
  misc_feature (1105)..(1105): n is a, c, g, or t
  misc_feature (1337)..(1337): n is a, c, g, or t
  misc_feature (1365)..(1375): n is a, c, g, or t
  misc_feature (1434)..(1444): n is a, c, g, or t
gatctgagtccaggcagtgtttttaaagtgatatgagttagtagtgaaaattgaaaagggatattttacancccaaatacaggttttctgggtgtcttttgaaaaatcccaaagatttggcaactcgaccctaggctccgacaaaaccacagttgttgggagctgagccggagccagaactcacaattcaccgtggcccggccacccatccccaccactcccgtgggctcctgaccaagcaccacgtgccattcatcatggcttgcttttagtgtttttggtgtttatcttaaagtacagcgaagaagaaagggaagtatttcttagacccatgtctctgtccaaataggcctttccatctggcatttcccgctcatttatatgacttgctgagttcctatggtcatttgagtttgcaaacagtggtcttgtagcacatcaggttttctggagttggagagaacgggtggcaaagagagaagtaacagttggttttattccacgacacaaccccaacgcaccacganaacgaccttgtcgggccgccctcggcccctccaagaaaccttttctaagaccatttcgttttggcggcggcggcgccccagtagggtaaaggtgaaacatgggtccataagcctggttatcctaaaggaaaaatccctggggccatggaacatacgccgcttttgggcattcccccacccccaaatnnnnnnnnnccgcccccggggcggggcaaaacccgcaaattcggttttctctggnnnnnnnnnncttccccacaaaattggggaaaggcgtttctcgtgaagagggggatcccgttatatcacccccgggggaaaacctcccaaaacctccccccactcactgggggacaggtgattctacaacaaagaggcccccgggaggggccccctttttcgccggagttaatttaataaaaaccncctttatcccacgccgaannnnnnnnnggaggcgcaacccgcggaggaccccaaaacgccttcccaaaatatcgcctaaaccganggttataacacgtggggagtggttgggcgcacaaaaatttgttccggccctatataccaaagccccncatattttttcttgttgggctccccccccaaaaacacctttggtgggcgaaaaataccccccgctatttccaccccaaaataaaacgccgggagctcacctgggcgcgagtgagacaccccctcctctgataaacatatccgccccccgcccacacacgggggaagaaaacttccgagacggcataccgcctctatggtgtggccggccaaccccttcttgtgcagaggaanaaagataaaaaaacataattcgtggtgnnnnnnnnnnnggggggaggggagagaaataaacagcgagggggcgggggtaactccacactacaaaacnnnnnnnnnnnccccccaactaatttatgggagcccccacgcgtcccttttcatacaaactcgcaaa

SEQ ID NO: 137791 - DNA, 471 bp, Homo Sapiens
  misc_feature (61)..(61): n is a, c, g, or t
aggaagtgccaaaaggctcatgttgtatgccttggataaaggcatcttggctttgagtagnagtgttcctcggtcacccatttccccctcaggattacaacacctgctatcaaatcatctaagctgaaaacatgagatgcgcttggaaaggcctagtcagaagccatttcctcttatcatttccctctcctatgcaccagtaaggcccgtccagagccccagcagggagtgggccctgagtccacactgtccctgagtgatccaggaggctgcccacatccccacatgtgcactgtggttccagtgtagctgctgtgagcccactgccactgcctcagaagggagccactgtgaacctctcgagtggctccaaagagcagtggctttttgagaatggcccatacttctggcccggctggatgaagggaatgccgaccctttggctctccccctccttccatctcttctctc

SEQ ID NO: 137792 - DNA, 506 bp, Homo Sapiens
  misc_feature (94)..(102): n is a, c, g, or t
tttttttgtgttttaatatagctttatttatgaacactggaatttgaatttttataacttttctatgtcacaaaatattattcttcttttgacnnnnnnnnncaatcatttcaaaatgtaaaaaccattcttagcttacaaaccattcaaaaacaagtggcaggccagatttggcccagctgtagtttactgtcctctgatctatactgcagattgaatatactcctacttaattctttttcaaaaacatttgctcagtgactcactcaaccagtccttgaaaagatccccttcaaagcatgaataccttcagattcaagttggtccaggccatatgaggcagctgtattaacacgagtaatagatggaaccacagttcttctctcagaggatgcctccaaagccggaagtgcaggggaaaatgctgggttcccccaccattattccaggaggtgtcactggagatcccagaactggtgtgaactcctcatttggccctgtgactg

SEQ ID NO: 137793 - DNA, 485 bp, Homo Sapiens
  misc_feature (25)..(25): n is a, c, g, or t
  misc_feature (66)..(66): n is a, c, g, or t
  misc_feature (78)..(78): n is a, c, g, or t
  misc_feature (122)..(122): n is a, c, g, or t
  misc_feature (379)..(379): n is a, c, g, or t
  misc_feature (410)..(410): n is a, c, g, or t
  misc_feature (452)..(452): n is a, c, g, or t
ggagtaggccatccttcctaagttnccctgaagatgcccccaatgtttaacaagaaagggaagggncagtgtagaacnccctattgctttctgcatggtaagagggatgggtattgggagangcccacacctgctgaggagtgcctttagactttgagcggtggtgtttctctccctcccagaaatagatctctttggggagacaggccatacaagacgtgaatctggtgacattttacttgtttgaagcaaaatttttttagatgatgggagggtttttaaaaattgcttttaaaattaaaatttgaatagataagaagtaatcactattaaaaaataatgaagcctaagggattgctagtattagctgggtgtgggnactcacttgtggcccaacttacttggagagnttgaggcaggaagaatgcttgagcccaggagtttgagtccancctgggcaacataacgagaccccatcttttaaa

SEQ ID NO: 137794 - DNA, 291 bp, Homo Sapiens
  misc_feature (243)..(243): n is a, c, g, or t
  misc_feature (260)..(260): n is a, c, g, or t
aagtaaaaagatgaaggtctcactaatgttgccccaggctggaatgcagcagctattcacaggcacgatcccactactgatcagcacaggagttacttatgacctgctccatttccgacctgggctggttcacccttccttagcaaatctggtggtgccccgctcccaggaggtcaccatattgatgccgaacttagtgtgaacacctgatcggcatagcacactacggcccaaaatcctggnctcaaacgatcctcctnccttaggtccctagtagctgagactacaggt

SEQ ID NO: 137795 - DNA, 676 bp, Homo Sapiens
  misc_feature (627)..(627): n is a, c, g, or t
ttttttaaaaataactctttaatcatatgcacataaggggaataaagggcaacaccaggctgactcaggaggggagcaagatattctccctttgtcccagtgtctgcttggcacagttctgagatcacacaaacaagtgggagggggttgggaaatagaataagtgagaggactgaagagacaaaggcaagggaggagaggcaagggcttgcagtagtctcaatcagtggactctaacacagattcactcagcgcaaggtcccagtagtgttcagccccatgctttttgaaatgctcacgagccatgttctctgtaggacactgtttaaacttcatctctccaaagctccggtctttggctgtaccctcccagactagtacacatttgttggttttcttcacagcttcctcatcagactcctcatcatcatctccctttgtgttagatgtctgttcatcccactttatccgatgcagcataagacgcttaaatttcttctgggccttggggcccccttccactactaccacgttgacatccttgtgcagtaccaccacccctgtcaggtacaagttgcccagcattggcttcaatcttgaacttcttggctgggtgctcaaatttcnaactctatatacagatatgtgaccccctgggaaatgtctctttaaactt

SEQ ID NO: 137796 - DNA, 684 bp, Homo Sapiens
cggtggaatagggtgaaagttttttgagagtatatatgatgttgacatatgaagcctgcctcccaaagtgcctaggacaagtttttattcttgactgcttgtcttttatttccttattcccagtacctggtggagctcttgattcataacaagtgctatgtaaatgctaattgtatcaattaatattactgcctacttggagcttcaagtctaatttgaggaaaataaagagcaacagaaaagagaacacttggtccaacacataaaaagggtgataatattttagagagtttgggtagacttgaatattatttgtttagaacctgaatctcaagtctaagtctgtaacaagatttctcttccagatgatgaggagtctgatgaggaagctgtgaagaaaaccaacaaatgtgtactagtctgggagggtacagccaaagaccggagctttggagagatgaagtttaaacagtgtcctacagagaacatggctcgtgagcatttcaaaaagcatggggctgaacactactgggaccttgcgctgagtgaatctgtgttagagtccactgattgagactactgcaagcccttgcctctcctcccttgcctttgtctcttcagtcctctcacttattctatttcccaaccccctcccacttgtttgtgtgatctcagaactgtgcc

SEQ ID NO: 137797 - DNA, 387 bp, Homo Sapiens
gtcccatgcacagtcctgagatcacacaaacaagtgggagggggttgggaaatagaataagtgagaggactgaagagacaaaggcaagggaggagaggcaagggcttgcagtagtctcaatcagtggactctaacacagattcactcagcgcaaggtcccagtagtgttcagccccatgctttttgaaatgctcacgagccatgttctctgtaggacactgtttaaacttcatctctccaaagctccggtctttggctgtaccctagaaaagagatatataataaaaacacttcaatttcttatttaaatcagataatattcttttataagaagacctagcaacatttgtgagacatgttgcccagctgaacgtgattttatggttc

SEQ ID NO: 137798 - DNA, 873 bp, Homo Sapiens
  misc_feature (91)..(91): n is a, c, g, or t
acagtccttttcaaaatgttgggatgtcctgagaaagttaaatgggctggcataagggaaagggctcccagtaaagcccacgcaaaacccnctgcccagtatttgagagtcgattaatggcatccccaggacctgtggatgctctctgaacaatgtggaccgcttttcctaaaatctgtagttacgatcttcataaatacaccacaaggtactaaatcctcaaactgccagataggggcagaagctgcaagagctccaactaccatatgaggatatttcatcctaaaccaggcggcaagcatgccaccataggagcctcctatggcaatgacaggttgattttcagctcctgggattgttcttttcaagtgtttgattaactctgcaaaatcagccagagcttgttctgatgtcaggaaattcaagtgtctggaatccttgaatgagttgtcaccaaaggggagagactctccatagtatcgatgttcagcaaacaccaacatagctttcagttcctcagccacatcccacatgaaccccgtgttattacaaaaccagataatgtccccttcattaccagtgtagaaaagtattgatccaccatttttcttccagtatttatcagctactaggtaccgctgattaaaagttttcacagtattaaatccaaaatgatcaaccttctgttggaagtagagaaccgaatagttcttggctacagccgggagggatgtggggttggttggcaagtgtaggctgccgagggcccttaaggccggccggagggctatggtggcccagggcgccagaaaagacagaagcaggagcaggagggctcggcggcccatggctcaggctggagactgcagtgcc

SEQ ID NO: 137799 - DNA, 779 bp, Homo Sapiens
gggaagagggtagagatgacacaatggttggccagtgttctgtttacgaaactccagagtgtgacataccacatcagcattcatatctgcgctaagcagttttatgatgtctgatccaacttgtcaatgactaaatagcaggtggttttcaagaacagtttttcaggcaggtagctgcacagtctctccatcgaggcctggaccgtcgagttgtgaacttgagcaagctgttctattacagacaccaccagcacacaccctacacaggtgtgcccattcgagaggctgggcctggactggtcatcgttggctggagaggctgaggactgaagagacaggagcaagaatagaggcgccaccgtaaggattttcccagggggactgcatctccgagctatgcacccccaagtgatcacccggctttggaagctccccaactgagggatgctggagctgaggctgcagaatcaattgatctctctctccttctcttcctcactctctttgacacacacaccccaccctctcacatacacacttttcaataagtgtgaagtgaataaaagcacacataaacactcacagacccacagcttgctcttgttggaccctgagagagccacacacaaagagctggagggagtctgtggtgtgcggttctgctgaggtaaagactgcaggataaagaaaacccaagttgcacagtggcacaacttccgtgctcctggctcagtgaagttagtgtgcataaaccccgcgagcctcgaggcttgccggaa

SEQ ID NO: 137800 - DNA, 367 bp, Homo Sapiens
  misc_feature (30)..(30): n is a, c, g, or t
  misc_feature (56)..(56): n is a, c, g, or t
  misc_feature (314)..(314): n is a, c, g, or t
aagctgccttgatggcccacggggaatggnagggttcccccccaaaatgtacctgncccctgacctatatccccccaatttaattaatacccctaaaacaattaacccatcttgatcacaatacagggcatccagtagggatgaacagggttattccctatgaagacacagaatgtgggtatgggcagagtttcaaagggagggagacaataaagaaggagatgtccactttttaactttatatgctattatattactatttgcattttcccccatataagcatgtgcttatttttaatgggaagcctaagganggcaaggtaaatcatctcggaaacagttaggaggattgtcatacaaggagata

SEQ ID NO: 137801 - DNA, 339 bp, Homo Sapiens
gcacgaggttagatatgagtctaaattctctttaaagaatcaggtatgtcaagtatgttcaattctttgccttctacttgtaaacttaacttcctcataaagcaacctttttcgattacctgctccatcctgactcattccgatttcctgctctgccataactatttttcccgccaaaccactcaccctgtcactctctttaaattagccagttggagttagtttggcctgtgtggtctaaccctagccaataggggaatgacacagcagcaggggccatgtgcatcagggataagaaccctttcccctccctttgtccagggtgtgcactcaaccatt

SEQ ID NO: 137802 - DNA, 1014 bp, Homo Sapiens
atattttaagccctatcactgacacatcagcatgttttctgctttaaattaaaattttatgacagtatcgaggcttgtgatgacgaatcctgctctaaaatacacaaggagctttcttggtttccttattaggccctcagaaagaagtcagttaacgtcaccccaaaagcacaaaatggattttagtcaaatatttattggatgatacagtgttttttaggaaaagcatctgccacaaaaatgttcacttcgaaactctgagttcctggaatggcacgttgctgccagtgccccagacagttcttttcctaccctgcgggcccgcacgttttatgaggttgatatcggtgctatgtgtttggtttataatttgatagatgtttgactttaaagatgattgttcttttgtttcattaagttgtaaaatgtcaagaaattctgctgttacgacaaagaaacattttacgctagattaaaatatcctttcatcaatgggattttctagtttcctgccttcagagtatctaatcctttaatgatctggtggtctcctcgtcaatccatcagcaatgcttctctcatagtgtcatagacttgggaaacccaaccagtaggatatttctacaaggtgttcattttgtcacaagctgtagataacagcaagagatgggggtgtattggaattgcaatacattgttcaggtgaataataaaatcaaaaacttttgcaatcttaagcagagataaataaaagatagcaatatgagacacaggtggacgtagagttggcctttttacaggcaaagaggcgaattgtagaattgttagatggcaatagtcattaaaaacatagaaaaatgatgtctttaagtggagaattgtggaaggattgtaacatggaccatccaaatttatggccgtatcaaatggtagctgaaaaaactatatttgagcactggtctctcttggaattagatgtttatatcaaatgagcatctcaaatgttttctgcaaa

SEQ ID NO: 137803 - DNA, 176 bp, Homo Sapiens
tagactacgttttcactttccagagcatgttttatgtccatctgagatatatagaaatgggagagaggtgtagggcaagtgaaatagttaccattttacagatgacttgactgcagaacaagcggttagccccagcgtcttccacatttgaccagagtgaccacggttgcactaca

SEQ ID NO: 137804 - DNA, 564 bp, Homo Sapiens
  misc_feature (429)..(474): n is a, c, g, or t
ttttttaatagtttacatttattatttattctataccaggtgctgtcccaaaccctttacatatattaatctgtgctgattgtatgtacctactcctccttggacacagcatggacataatcagagaaccatgcaaaactcaattgcaaattggatatatggatgggattctttattattacttaaagtttactgttctcataattacaggctacaacttagaggtttgaaactttaagagaaaattctataaagagagctcaaataaacatgaatcagtatgtagaagacatttaaaactttgtaagtagtgccacttagctctgggcaatacttatctgtccttttcaagcacaggccctggagccagagtcaacaacataaaataccacaaacgactctaagacattcatcctacacaagcgagcnnnnnnnnnnnnnnnnnnnnnnnnnnnnnnnnnnnnnnnnnnnnnngttggtccacggggtatacacattttaacaaaagataaaaatctatgtaatccagttaaacatacataagattaggatacatttattaca

SEQ ID NO: 137805 - DNA, 562 bp, Homo Sapiens
  misc_feature (281)..(312): n is a, c, g, or t
ttttttatatggatgggattctttattattacttaaagtttactgttctcataattacaggctacaacttagaggtttgaaactttaagagaaaattctataaagagagctcaaataaacatgaatcagtatgtagaagacatttaaaactttgtaagtagtgccacttagctctgggcaatacttatctgtccttttcaagcacaggccctggagccagagtcaacaacataaaataccacaaacgactctaagacattcatcctacacaagcgagcacnnnnnnnnnnnnnnnnnnnnnnnnnnnnnnnnctttaatattatgttggtccacggggtatacacattttaacaaaagataaaaatctatgtaatccagttaaacatacataagattaggatacatttattacattgaaagttggtgtttataagttatagatatttaatatttgagtttaattgaaaatttttttgaagcatttaaacatttgcttattttcccagtgcaaaagaaagttaatcaagtcaacttacctttatcctaaggagtaagaggaag

SEQ ID NO: 137806 - DNA, 888 bp, Homo Sapiens
tatttgtgttcaaaggggcggcgtgcgaaagtttgcgctgggaccaaagggcgggcatgggcctttcagaggaagccccttcccttccgcaagtggggggtttgcctgaaaagacctgttcttagtttcccttctttaccctcctgcttgacagggagaagaggctccaggagagagagggtaatggagttagtaagagacccctcatgaagtttccttgaggcaaaacccgcaggggtcatcccactcctcttttctcggcagggggtagtgtcaaaagtgctttggttgtcacaagacccagacacctaggttcccagtttggctggcccaagagttcttcatgaggcaaaagaagtggcagctggtgtcctaggtagagagcagccatacagacaccacatgtgttcctcctggctccacacagacgtcgtgtccagcaacagtctgatccttgcggtaagctatacaatgttctactgccccaggaaggggcccctgagggggtccacggtcctgcttactgtgcaactgggccagctgtagaactggcatgttgcacaggggacacactttacgaacctccagccacttaataaggcactttctgtggaaggcgtgcttacaatgggcaaatccccaactcatctcgaggcttgaagtcttctaggcacactgcacagagctcatgtaaattcaattcttttactttctcttttaatataacctgtttgtaggcataaaattctttgtgtgcttgatgtcttagcctaatcaagtagcaacagaagagtaaactaaggatgaagacaaatatagcagtaccaaaaaccacaatatatatttgagaggcagaatatggaatccacatattaggcattccggaaa

SEQ ID NO: 137807 - DNA, 1124 bp, Homo Sapiens
ccccctttttaagccccggaccccccggtggaattccagccatttcctggatttccggtaggcgaatcccttaaagattattgggggacaccagggttaagcagagttacaagcaccacgcatcaataacccataggtatctttcagcccgcaggatgcatggggcaatggcccccaaccagcttttccaatatttccaggggctgtgtaacagactgatgtatgtcaggaagttctctccatttttcatataagatgtccagtgggtatgccactacttcatctttgccgttttgtccaaatagagtctttgggactgctgccaatggcccaaagtcaaatgcaactgctgtctctcctagagatgcggtatacgcccttcctttattgagtactagactttcctcttcggcttctgaaagtattatcacgttagtgggtgtctgcggctcacgtagtgagtaaattctgattacgttgtctgatgttaacagcactacgtggggatccaggatttcacttggataccatgcagcatgctttagagtcagagaggtggaactggtgaaaaatctctccgcaactggagtggtactacaattcactgttgattttccaccttcaaattcagaattcttcccccatcttttaggtaattctaataccataagtccttttattcctataagtgctacatgatgttgtgttgggcttaacaagacttgatagatttcaaacaggggtggatttatgcaaagcaatctctggtactgggacagggcgggctcttcgccgccgccgctggggccccgaaggcgaacgactaagaaggagctgtcttctccgtcccacaggaaaagctctccgccgaggccaaagaccacgtttctcgtcagcaactgcggcggcggcgacgaaggcaacgacgaagaagctggtttctcagcttcggttggactctggtttttcagtccctcccggagccgcaagaacacgacgtggttaggaagccaggtctgccacagctcgccgtcgcccaccggtccctcggcggccgccatctcctcgtgccgaattctccacccaggcctcgctaccttaagaccgttagtagttactgtccg

SEQ ID NO: 137808 - DNA, 447 bp, Homo Sapiens
  misc_feature (433)..(433): n is a, c, g, or t
aattctctgttaggtaaaaaagttatgaggggaggagactgagctgtcatgggcaaggccggccgctcgcctagcctcacaacactcccccacattcttcactatcacagcaaaagtggtgtctacagtcctgcagaaaggcctcagagctttatattgctagaacaatatatccccactcttctggcaatctgggggaagggcagagactatgccttgtatttacaaaggaagaaaccaagaaacacaaaaaggcaagagagattctccttactgcggagtctgccccaagatggcagtgagacagtacttgcttgggttacagaacacaggggccaactctctccctactccacagctacattccagagaatggcattttcggagcacaaagtggtttccagggccaggcaacaaaaggacttatcagacntaacctggaagaga

SEQ ID NO: 137809 - DNA, 726 bp, Homo Sapiens
  misc_feature (15)..(15): n is a, c, g, or t
  misc_feature (27)..(27): n is a, c, g, or t
  misc_feature (54)..(54): n is a, c, g, or t
  misc_feature (79)..(79): n is a, c, g, or t
  misc_feature (113)..(241): n is a, c, g, or t
  misc_feature (252)..(299): n is a, c, g, or t
ctggaaaactcctgncctcccgggttnaaaaatgttctccctgccctaaacccncccaaaataggtgggaactaacagncgcccaaccaaccgcacccggcctaaattttggnnnnnnnnnnnnnnnnnnnnnnnnnnnnnnnnnnnnnnnnnnnnnnnnnnnnnnnnnnnnnnnnnnnnnnnnnnnnnnnnnnnnnnnnnnnnnnnnnnnnnnnnnnnnnnnnnnnnnnnnnnnnnnnnnccccagccccnnnnnnnnnnnnnnnnnnnnnnnnnnnnnnnnnnnnnnnnnnnnnnnntggtaaaggcattggctttctatttgtagcatcaatagaatatttcctgtttacaataaccttatgtcatagtaaatggtaaagggatttaaagcagtggttttcagctgccagaggcctgagagagtttggggacactctgtgtgattgggcagaaggcctgtgggaagtttagctgaggacagggccaggaaaggtgatggacagtgggggtctgtcctggtcaccaggcccctgggtcctgcccacctgcttggagctccccacccatcacacatgatgctgccaagccctctgggtattgtgggcaaataccttaggagagaagctgatgaactttgttccttgaaatgcacagattccttggacgtccctgagagctcagtcatgtaagtcagcttgtttaaccccctcgtttggttcttga

SEQ ID NO: 137810 - DNA, 654 bp, Homo Sapiens
  misc_feature (524)..(524): n is a, c, g, or t
  misc_feature (558)..(558): n is a, c, g, or t
  misc_feature (578)..(578): n is a, c, g, or t
  misc_feature (593)..(593): n is a, c, g, or t
  misc_feature (599)..(599): n is a, c, g, or t
  misc_feature (627)..(627): n is a, c, g, or t
  misc_feature (644)..(644): n is a, c, g, or t
ctagtggacgtaggatattttccctacctaagaatttcactgtcttttaaaaaacaaaaagtaaagtaatgcatttgagcatggccagactattccctaggacaaggaagcagagggaaatgggaggtctaaggatgaggggttaatttatcagtacatgagccaaaaactgcgtcttggattagcctttgacattgatgggtttgggttttgttgttccccttccctcacaccctgcctcgcccccacttttctagttaacttttttcatatccctcttgacattcaaaacagttacttaagattcagttttcccactttttggtaatatatatatttttgtgaattatactttgttgtttttaaaaagaaaatcagttgattaagttaataagttgatgttttctaaggccctttttcctagtgggtgtcatttttgaatgcctcataaattaatgattctgaagcttatgtttcttattctctgtttgcttttgaacatatgtgctcttataaagtggacnttctgaaaaatgaatggtaaaagacactggggtnatctcaggagggggatgggngtttgtccacaaacngtgggntaatcccaatccaatttaaatgtttacnataggcccaaagggggnggttattaaa

SEQ ID NO: 137811 - DNA, 1095 bp, Homo Sapiens
  misc_feature (64)..(72): n is a, c, g, or t
  misc_feature (151)..(151): n is a, c, g, or t
  misc_feature (704)..(745): n is a, c, g, or t
atttagcttaaaatgttttattaagtatatataatattacagggtaatatttacaaagttatgnnnnnnnnnaaataaaaaagtaccttggcaaagattgcagatattcaaagctttaaacagtgataaattgatttaatacatataaaanaaaaaacctttaacggtaacacagctgtaaaacaactttgggtcttcaaatcactgcaaaaaaatgggctacttgacaaataggcacaccttttaattgctatggcaaaaaagctccaagagaggatcttgcacatagcaacactggagttctctttatttagaatggttaatagatatttatacgatgtgggatctaattctcaacaatggctttttgtaaataatgctccatttaataaaaacaaaatgttttcttctctcaccagtcatgataacaacacttttaagatttaagatgttgtcttacagaggagcttagtacaaatgctttctttttttcaaaaagagaaatttatgagaaagctggtcttcaatgatcttaattaagaactgtcaaagctaaaggcagaaaaactgcctggtcactcactgctcatctcttcaaagttacctggattatccctattagtcactgaaaatgacctaacaaaggaccccagcaggtgatggcagttagtaattttaaaatatgacacaagtaaaactgtttnnnnnnnnnnnnnnnnnnnnnnnnnnnnnnnnnnnnnnnnnncggttgcccgacaatcatttctccagtttccaacaacaggtaaattaaggagtatgtgtttccatacatacaccacagatccccatttttgaatacccattttaagacaagagaaacctagaaggttgattacagcttaatttttattactgagatggaggagtaaacttatcgtgttttgagctttgttagtgcaaataacaatttggtggtcacttactaaattgactatagcatcctgaagaaaagaaatatttccaattacgggatagccctgttattttaattctgacattcttacccggccgtaatggccgaattcccgggcatatgtccggtaccgtcgactg

SEQ ID NO: 137812 - DNA, 803 bp, Homo Sapiens
  misc_feature (607)..(607): n is a, c, g, or t
ttcgtatagaggtaataaagtatccacgggatctaatctcacatgcgtttgtaaaatgcctccagtgtaatgtgaacaaaggtgttgcttcgcgtccccaggtcaggaggaccacactttggtaagagtgtaaagatgttgtcttaacagaggagcttagtaccgatgcgggtcctgtgtgtttccaaaacagcagaaatgtaatgaggaaagcctgggtcttcaatggatcttaattaagaactggtcaaagcctaaaggcagaaaaactgcctggtcactcactgctcatctcttcaaagttacctggattatcccctattagtcactgaaaatgaccctaacaaaggaccccagcaggtgatggcagttagtaattttgaaaatatgacacaagtaaaactgtttatgagagaaatgccctcaaccaaattaaatacaatataaaaataaacggttgcccgacaatcattttctccaggtttccaacaacaggtaaattaaggagtatgtgtttccatacatacaccacagatccccatttttgaatacccattttaagacaagagaaacctagaaggttgattacagcttaatttttattacntgagatggaggagtaaacttatcgtgttttgagctttgttagtgcaaataacaatttggtggtcacttactaaattgactatagcatcctgaaaaaagaaatatttccaattacgggatagccctgttattttaattctgacattccccggccgtaatggccgaattcccgggcatatgtccggtcccgtcgactg

SEQ ID NO: 137813 - DNA, 525 bp, Homo Sapiens
  misc_feature (385)..(434): n is a, c, g, or t
gactaatttcacatgctctaaaaaccttcaaaggtgattatttttctcctggaaactccaggtccattctgtttaaatccctaagaatgtcagaattaaaataacagggctatcccgtaattggaaatatttcttttttcaggatgctatagtcaatttagtaagtgaccaccaaattgttatttgcactaacaaagctcaaaacacgataagtttactcctccatctcagtaataaaaattaagctgtaatcaaccttctaggtttctcttgtcttaaaatgggtattcaaaaatggggatctgtggtgtatgtatggaaacacatactccttaatttacctgttgttggaaactggagaaatgattgtcgggcaaccgtttannnnnnnnnnnnnnnnnnnnnnnnnnnnnnnnnnnnnnnnnnnnnnnnnncttgtgtcatattttaaaattactaactgccatcacctgctggggtcctttgttaggtcattttcagtgactaatagggataatccaggta

SEQ ID NO: 137814 - DNA, 1674 bp, Homo Sapiens
  misc_feature (30)..(30): n is a, c, g, or t
  misc_feature (65)..(100): n is a, c, g, or t
  misc_feature (113)..(113): n is a, c, g, or t
  misc_feature (122)..(122): n is a, c, g, or t
tgaaaatctggcttgttttattgtcatttnaaaaaacaattttaagaacacgattatctctgccnnnnnnnnnnnnnnnnnnnnnnnnnnnnnnnnnnnngatcaaggaaaanggggatcanttgaaaaatctgtgaaaacttgccctctgggactcccctgggctctggtgtagattgaggtgcccaacctcaagaccaacctaagcctcccagggcacaccacgtggggctgtggccaccctttcagactcctttctgaatgcttgtggcatctgccccatgattaggaatggacaccctgaccacgtcatagatgcccatttcacactggcatgtggatagtgactataaaacgtcccttcagaacaaaccaagacctgaaggggaagcaggaagggacacccacacactgagtctctgctctcatcctagcttatctggccagctgcccctcttgtcatttcccttctctgcttgaaatggctctttgggagactgggggaggagattgcggaaggggccagggggctgaggacttccactatggtctgatttatacagagcctctggcttcagtcagatcccgaatatcactgggaacagcagtgtgaggggctggaggccccaggaggagggaaggggctacggggctgcatggcagcttctcaaactcagccagaggagaaagctcctccttccaccgggggagcttaggggatgcagcaagggtgtttcccctgcaatctcctcagcctctattaacctttgaatcaccaagaaggagagggcagtccagccgggggtgggatgggggaatggaggggcctcagtcactgtcagagcccactgcagaggacccttttcgtttccgcttggtaggcttcggtttcgtgtcttcctcttctgaagcactgctggagcccgactcttcttcggcattggggggctgtgtggcattctttcgacttcgagggctggacagagctgcttttcgccggctcttgggtggcttggtggaagagtcctcatattcctccgccagggagaagagatcactgaatttcatcttgtgggcttcgtcacagctcgcttggacatgctgcagcgcctggagaattggcgtctggctaaaaaagttctgcttggtgttggtcaggttgagccgcagattgtccaagtgctccaggatctgctccagagtcagctgggccagcttgctgctagagctcctcaggctctgtctcttgcgaggcaggctgttgttcttgatgagcagggacttgatgtgctcggccagcagctcgtcatgtttcatgcaccagtgccgcaggatgctggtggtgaactggtcgtcaggatggcagggccggctcagcaccatcttcaccatctcctcgctgggcttttctcttcggagttgaagcagtaggcaggacagggcctctgggtgctccttgtatttgaggtgctgcaggatggggattatggtctccaggggaatattgtgggccagaaagagctgccaggcacaatactgctcaaaggtctcccagtctaggctctgaatgagtatgttgagaactgagtcttttcgaaacataaccaggttacccatcatcacgtggcagaccagctcctggagctgtgcagagtcaataacagccacgatcat

SEQ ID NO: 137815 - DNA, 583 bp, Homo Sapiens
  misc_feature (408)..(408): n is a, c, g, or t
aaataatccatctaacagccatgagaccactcaagtatttgaggtcatcagctgcgtccatcaagacatgatattgaacatggacaccatctggtctgttggtctgtttttgttggcaaaggactccaaaaggatgcagttgtatgtgtttcagctgaaccacataccatagctcctctcccctcacaaaagggtttctctggggggagaaaagtaactgattatacctctcatgtctcaaactgaaattctgagaagcaaatggtcagttgagggccccattccagatctgccgggacgtcctcagatgtccagagctggcaaaaggtggagcaggcagcagccttgggcaccagcctgtctctttctgttctggatagggccacacacatggctttttgtgataanttccagcccatgccactgaaataacgtttaagaacctgctgcatttcacagaaatagcgtaatggaaatcattatgtaattaaacaaagcatgaagctcattatctttttctttttaacaaaaccttcaatttcacattttagtgtacactgtggtttccagagaaaatatatgg

SEQ ID NO: 137816 - DNA, 448 bp, Homo Sapiens
  misc_feature (14)..(14): n is a, c, g, or t
  misc_feature (28)..(28): n is a, c, g, or t
  misc_feature (72)..(72): n is a, c, g, or t
aagggttacagaanattaggggattaanaaacctttgttatgccatttgggtaccttgttttccattaaaanttgggcctaaatgttaattattagttaaaaagttaaaactacagtccttctttccaggatttcccccagccatgcaacaaataagtgtccctattttctgggaattaatgaatatgacacatagaagatgaatgataaatcccaaaccagaaaggccccaggttgaagaagaaaaaaagctaaaataacaaaatcagtgtggacagatttatctcataatacgctaaatcactgtatacttcaactcagctccatccacgtgtttgctgctgaaatgacaacatagtttactgatttcttagcacctcctttcttaaagctgtaattttgaaaacttatatagtttcttcaggtgccttctagaaacaccatctta

SEQ ID NO: 137817 - DNA, 554 bp, Homo Sapiens
  misc_feature (19)..(19): n is a, c, g, or t
  misc_feature (52)..(52): n is a, c, g, or t
tcccggaagagcctggaangctgagggtgaggaaaaccagtgtgctggctgnaagaggctttgctgtttctccaacagagcagcaggtcgccccttcccttctccctccctccacctcacctccatgggctccactggatgggaaccatgtgcttgttctccccacccctagactgggatctcctggggcagaagaggcttcccaagtggcacagacagagccaggctgactgaatgtgagattcatgaatgaacagtgataccaggcatagccctgccctttagcatcctgagggccacgtggagttttctgcaacactgcccgccgtgttccagcatctgccttccacttgctagggagaggtagaggtgaagtggcccttctttctgtctttggcattcctgtccaccctgcctctagatcttcacttttcatgggcgtaggagaacaggacctctaccctcctcgagtgccgctatagccagcgtgtgctgagcagggcccaggcagtcttgagaaggcgccagcatgctctgcctcctctcactagcag

SEQ ID NO: 137818 - DNA, 591 bp, Homo Sapiens
  misc_feature (66)..(66): n is a, c, g, or t
  misc_feature (72)..(72): n is a, c, g, or t
agagacagattttcatatcctcttggtttttcaagcatcttgtcaagacaagaaaacctataaaanagggantgacgcttaatctgaagggtgctcagggcaagatctatttacttcaaaccattcatctatgcagcctttatgatatatgcatagacaaggcagtcgtgctatagtatctccctgctgcaattcttcaaggcatattgcacattccccagcatctttactcagtacatcctcattataggttattcgtggctttgttaaacacattacaagatgcaaatccatttcatctgaggatacaaattttgagcatacagggcacttaaatcctccaaacatgtgcggcgagaggtgagctggtaaggagccgatcaccaggcgcggcccgccggggctcccgcccaccggccggtcccggccgccgccgccgtcctcagggctgctgtgcaccgagtcctgcgagccgtacgggccgctgctgctgttcgggatgctgaagggggactgcgccgcgcgggcccccgacgccacgctccccacggccccgccgagggagcggctgcgcggggccgccggggctgc

SEQ ID NO: 137819 - DNA, 346 bp, Homo Sapiens
  misc_feature (18)..(18): n is a, c, g, or t
  misc_feature (26)..(26): n is a, c, g, or t
  misc_feature (45)..(46): n is a, c, g, or t
  misc_feature (58)..(58): n is a, c, g, or t
  misc_feature (60)..(60): n is a, c, g, or t
atgttggtcaggttggtntcgaactnccgaccatcaggtgatccnnccgccatcggcntnccaaagtgttgggattacaggcatgagcaccacgccctgccaagaacacactttttcctatagaaatcgcagggagtaagatagccgggcgaggtggggggtacgggtggagaacaaacctgtgggagaatggagatgagagcaattcgtgaatgcagcctgggggaccggttcccatgagagaagctccaaacctcagtggggaaaccttaaagctcttaaaactgtctttcatgtactttattatcatttttttaaaggtgttggggggtagggggatggcctc

SEQ ID NO: 137820 - DNA, 470 bp, Homo Sapiens
  misc_feature (51)..(51): n is a, c, g, or t
  misc_feature (62)..(62): n is a, c, g, or t
  misc_feature (197)..(197): n is a, c, g, or t
  misc_feature (401)..(401): n is a, c, g, or t
  misc_feature (430)..(430): n is a, c, g, or t
  misc_feature (435)..(435): n is a, c, g, or t
  misc_feature (445)..(445): n is a, c, g, or t
  misc_feature (460)..(460): n is a, c, g, or t
ttgtaaatacgaactcaccaaagggccaaatgggtaaccgggccccccccncgagttttttnttccttttttaaatttaataaagtagaaaatgatgtttaactcctcagagttgttgtgaaaaacacagctgactcaaataaaatacaagatacatagatttttcaacacattaaccccccaccaccccaccactnttcccctgtgaggggttggcacatctaacatttttgggtaaaatttccagaagatctatacagtcgagttgttaaaaactggtgtgaaagactaaaataagattaggcatcagtaaatcaaggctgcgggtggggtctggggggcttctctgggagggaaaggccagaccaagggatgtcccaacagggaaggttgggagtctngggggaaagacagatattatccttgaacntgggnccagggctcnttcccaaatttcctnccagcccggg

SEQ ID NO: 137821 - DNA, 398 bp, Homo Sapiens
  misc_feature (43)..(43): n is a, c, g, or t
  misc_feature (54)..(54): n is a, c, g, or t
  misc_feature (62)..(62): n is a, c, g, or t
cccccaggttgaaagaaaagggccttttttggatttaactaantctgtctgcantctattcntcatgcgtaggtttcctactagaacctgtggaggggggacacccaaatttagattgagtcagtccatgctgataagaagcgtgaggaccttgttggacacagagcttctagatctttccacctgtagcctctaccctgttcctgcactttacctgaaactgtgcctctggtctttagaccagctgttggaacatatcactcacccactcctctgttatagcaaagggccagctgggatggtacacgctgtgtaatcagacaccttctcgacaagtacagctgatgtttctcactgttgccttaccattctctgagccatctttgatgttgatttgt

SEQ ID NO: 137822 - DNA, 506 bp, Homo Sapiens
cctggtgcagccagatgttctaacttttgaacaaatgagcgtggtcagtaatgtacaataactcttgagtctgttactttggcctagctaagcccatctggccctcgggcatcctgcaagatgacagacagaagagcaagggcactatcagaaatggaacaggctgccccctactcctcccagcctctaccagtacacagagacagactggagatagagcattcgcagccagttggcatcttggttcttttgtcttctgaaaataaaaataagtgcttgtcttgtctttggaggtcaaagagaaccgcactaatttatttcctcgagggggcttttctggaggagaggatcctcagtcctgtgccaaggtttcacgctgtttggccacacgccaggcctttcttctggatctggtctgcacgtccagagatgatggaggaattgcatcagcatcatatgcacagtgaaagggtggctcttgtccagagaggcccattccgggcctg

SEQ ID NO: 137823 - DNA, 705 bp, Homo Sapiens
aggggcggtggcacgtgcagatgtgcagagggccatgaaggacctgacgctatgcctccactgtgctttcccgaggccatcaaggcccggggcatggagagcaaagaagacatcccctactacttctaccgggacgacgggctcctggtgtgggaagccatcaggacgtgagcgcccgcggggcggtgtcctgggggaggagccgggacccctgcctgactacctggggcgggcctggcccctccactgctagcgctgaatggggacggggtgggggagtcccagcgtccgtgagggggttgccgccgggcaccgctccgcagacctggctgggtcgcccaccccggctgcgccccctgagccaggttcacggccgaggtggtagacatctactacgagggcgaccaggtggtggaggaggacccggagctgcaggacttcgtgaacgatgtctacgtgtacggcatgcggggccgcaagtcctcaggcttccccaagtcggtcaagagccgggagcagctgtcggagtacctgaccgtggtgatcttcaccgcctccgcccagcacgccgcggtcaacttcggccagtacgactggtgctcctggatccccaatgcgcccccaaccatgcgagccccgccaccgactgccaagggcgtggtgaccattgagcagatcgtggacacgctgcccgaccgcggccgc

SEQ ID NO: 137824 - DNA, 929 bp, Homo Sapiens
  misc_feature (163)..(163): n is a, c, g, or t
  misc_feature (283)..(283): n is a, c, g, or t
gctggaccggtccggaattcctggatacagacccctgcacactccagttcctggccgctcccatctgcttgctgtataagaacctggccaacaagattgtccccattgccatccagctcaaccaaatcccggggagatgagaaccctattttcctcccttcgngatgcaaaatacgactggcttttggccaaaatctgggtgcgttccagtgacttccacgtccaccagaccatcacccaccttctgcgaacacatctggtgtctgaggtttttggcattgcnaatgtaccgccagctgcctgctgtgcaccccattttcaagctgctggtggcacacgtgagattcaccattgcaatcaacaccaaggcccgtgagcagctcatctgcgagtgtggcctctttgacaaggccaacgccacagggggcggtgggcacgtgcagatggtgcagagggccatgaaggacctgacctatgcctccctgtgctttcccgaggccatcaaggcccggggcatggagagcaaagaagacatcccctactacttctaccgggacgacgggctcctggtgtgggaagccatcaggacgttcacggccgaggtggtagacatctactacgagggcgaccaggtggtggaggaggacccggagctgcaggacttcgtgaacgatgtctacgtgtacggcatgcggggccgcaagtcctcaggcttccccaagtcggtcaagagccgggagcagctgtcggagtacctgaccgtggtgatcttcaccgcctccgcccagcacgccgcggtcaacttcggccagtacgactggtgctcctggatccccaatgcgcccccaaccatgcgagccccgccaccgactgccaagggcgtggtgaccattgagcagatcgtggacacgctgcccgaccgcggccgc

SEQ ID NO: 137825 - DNA, 598 bp, Homo Sapiens
ttttttttaaacctgcagagtattttatttaagaaaaacaaggaatgtagtgttatgacatagggggaaaaaactatgcaaaacagtcacatggaaagaaagtattttaatttttaaaatccaagtttgcttaatttcttgtgaactgttcaacactgttttaaatatcctgaataactgtgccaacaaaattcatccccagtgtttccacaggagacattaaaattaaagaccaaattatactatttttttcctttaaccaaagtagtctttttctcagtcctttttgtgcaaaaatattacaagagcaattcaaatggaaatgctgaaatgacatgccaacatttcagggcacatttaaaacactcagaataattcttgaaattattatattctaaaatgttactagcagtcacttttagattagttctgtacatctactcacacggatgcaattttcctagacctctgaaaaataaacaggctcattggtctcttttggtgtccacacaataggcaagataggtttacaatagtgtttaaatcaaactaggcatctacaatctcttgactccaccacattcaaaacaaaaatcaa

SEQ ID NO: 137826 - DNA, 1119 bp, Homo Sapiens
  misc_feature (77)..(77): n is a, c, g, or t
gaaatgctataaatagaacaatgtcttttgtttccaaagtccatatactagaatgatgtgaaaataataaaagcganatatttcgtaggcaaagttatcttggggtaaatgctacaactgcaagcgccactggcgagtattctcggggcaaacagaaagaaggttaaatcaaataaaatcattccctaagtcacccaagagcaaagataaatacatagaacaagctgccttaagtcccaatatttataacccacccaccatgtacatctacacgaaccccccaaagctgtggccttaggaatttctgaccaaacaattagcctgagtaaaattcaataaacacttttaattcccccttgagaagcatggttacttctttaattttacattatagtcattgagacagattacgaaacaactttggcagaaagagagttttagcaggaagtaagagaatttcagacattggaaatggataataatttagaaccaatttcaaaatgaggatcagttccaaagtattttctttactcattcaagattgaaacattggctctgtccacacaaaggtttattttacaatttaaaaggtaaattgtaataaatagaaatatataaccaaaaactctggacaaggctggaaccaaggggacccactttgtaatgctttgttattatcattccaagaacccatttggccctgtattcacttggctaatgtggggatggagaaagtatgactttggaatcatatatctatgtgtaggtagtctttaaatacaaaatgaataaatatttaaattatatgataaagaaaaactggggaataagaaagtcctatgtttatcaactaatagtatatttacaatgagtgttttctgcctgacacctaatctttgtctattagagttcctcaatgtgcaatttatagaaggtaacagttcatattgccttaaaggagccctgtttagctcagaatcagcctgtcccagatgctctgctccctgaaaaaccttcacacttgtgtgcataaatatctgagattacaagtaggtgcacatgtgcaacatgtacttatctaaaggggagctaattagcttgataagtctaaaatcaata

SEQ ID NO: 137827 - DNA, 561 bp, Homo Sapiens
  misc_feature (510)..(510): n is a, c, g, or t
  misc_feature (550)..(550): n is a, c, g, or t
ccatgagattcctttcagtaatgtgtgttgtttctcaacccttccttgttttcaggaaagacggtagaagaggctgcggacctatcgttgggttatatgaagtcaagggttaaaggtttaggtggcctcatcgtggttagcaaaacaggagactgggtggcaaagtggacctccacctccatgccctgggcagccgccaaggacggcaagctgcacttcggaattgatcctgacgatactactatcaccgaccttccctaagccgctggaagattgtattccagatgctagcttagaggtcaagtacagtctcctcatgagacatagcctaatcaattagatctagaattggaaaaattgtcccgtctgtcacttgttttgttgccttaataagcatctgaatgtttggttgtgggggcgggttctgaagcgatgaggagaaatgcccgtattagggaggattacttgagccctgggaggttcaaagcttgaggtgagcccatgatttanttccacttgcacttccagcctgggccaacagtagccaggnccctgtattca

SEQ ID NO: 137828 - DNA, 513 bp, Homo Sapiens
  misc_feature (81)..(81): n is a, c, g, or t
  misc_feature (84)..(96): n is a, c, g, or t
  misc_feature (115)..(115): n is a, c, g, or t
  misc_feature (215)..(215): n is a, c, g, or t
  misc_feature (391)..(391): n is a, c, g, or t
  misc_feature (406)..(406): n is a, c, g, or t
  misc_feature (413)..(413): n is a, c, g, or t
  misc_feature (426)..(426): n is a, c, g, or t
  misc_feature (432)..(432): n is a, c, g, or t
  misc_feature (454)..(454): n is a, c, g, or t
  misc_feature (467)..(467): n is a, c, g, or t
  misc_feature (495)..(495): n is a, c, g, or t
agatctatatcctgccggacgtctctggctcggcgtgcccaccggctacctgccaccttccagggagctctgaggcggatngannnnnnnnnnnnngtcacgtcccgctaccctnccccggctggcctttgcgggcgaaccccaggggaaccgcgttgatgctgccttcggatcctccggcgaagacttccaccggatgccccggttgggcggtntgggatcagactggaccaccccgggaccgtgctgtttttgggggtgggttgacgtacagggtggactggcagccccagcattgtaaagggtgcgtgggtatggaaatgtcacctaggatgccctccttcccttcggtctgccttcagcttgccttcgcgttgaaaggacaaatttnccattcggaaacctntttcttntttcccttttttncagcanaaagatggagaaggcaagagangggaggaaacagntcaatagataaccgttgaacttcatttnttggaattcttcagtcat

SEQ ID NO: 137829 - DNA, 363 bp, Homo Sapiens
gtgtgagccatcatgcccagccagtcttttaatttggtcctccaatcagctcaactctgatctaccaattttcactctattattttgtcaaagcttgttttgaatgtgaactcctatatgaagccattcctcaccaaagaatatatgactttatatctaattccaaataaccaacaccagttcactcaaaacgtgttgacctaaagaggtacagaccaggatccttgaagtcaggagtcacgtataagactacacaaccattaagcattacagtgaaggcaagggaaaaacatactataattttattgctagtttgagctcttactagtttttgtaacttccaaatcacttaacctcaacttc

SEQ ID NO: 137830 - DNA, 892 bp, Homo Sapiens
accaaattaattacttctttttattagacagttcaaattaagcttgaagaacaggaagcaatacaactcaactattgaaatacaaatagttgagcttaatttattcaacaaaatttacccaatatatcagtgtacaaagcatgctgctgggctgggcatcaggcgtggcacagcaaacaagacagactgactcaaccctcagggggcttacattctaatgcagaaagcagataatttcagtttggatacataatacaaattatcaaagcaaggcgcaaagtattttaaaaataaggggtttgggaggccaagatctgacctattctgtagaaggactccttaggaaagtaacagttgagccaatctaaggatgctagatattcagtaggtcagtggaaaaaatcagtggttctcactgtggtcagtgggttattggtggtttcataataactggggactactcccagcactgagtggatgcagccagggagaacgatgtcctgcagtgtgtgggttagtgccacacaacgaagaattattctgtaccctgtacgactgtctaatgtcctgctggacatttaggtaggacctacagcttgtccgagagagtaatcatttgttttctctgagacaatctgtaatttgtcttgtcctattatccttaagtaaggtaatttcgctctttcttttccccatatacagattatgtacatagtctgttttgtctttaccctaacactggttttcattctagtgtcccccacccgtctagtttcattttcctgtacttgtttacaggaagtagcctctaatcggctcttaaatccaaacctactcattacaaggaagagtaaacatctgtctgtttcaaacaagcgtagtcatgccctga

SEQ ID NO: 137831 - DNA, 736 bp, Homo Sapiens
  misc_feature (703)..(703): n is a, c, g, or t
caatgggaatacacatggataaaccctgaaatagaaacacggcaccatagtttaactgacacatatatatactgaaggactccagaatgtctctcccacccctaaagtgctgaacactgcagggagctgtaactgagtcaggagctattttaatctcccttgtaaaaaagacgtaaaaatggcaaagaactggacagaatgctagtcaagaatttgtaactattcatggatgagatggaattcacacgtatttttatttcttccaagcaggtacagagactcaaatgtaaccctttgagctctcatgcttgaggatgtgctgctacctggcctttgagctctgtgctggcataaagcccaaggcctgggcagggcagatgatcaaagtagggagaattttaacaccagtcatgggacacagtggggagcacaaacagtagggtttaccaggcaatgctgttgatgttgatagtcctagcaaggctggcagttccaggaggaggaccagcacctccaggacgtatgacttccccccctacccatgggtgatgtgatccttcacataaccattctgctccaaggtctgccttgttctcaagtgctatacgctgattcgcacccatcacaatcacacacgtctcacacagactccagaccctgcagcgcccaactgagtactcactcacgcaaaggtgaggctccnttgcggtgccatctttattattcccagccacaa

SEQ ID NO: 137832 - DNA, 253 bp, Homo Sapiens
  misc_feature (22)..(22): n is a, c, g, or t
tgcaggtgaatattagcctganagttccatgtgaaacagccttatggccagccatggtttcctgagatgccagcgacttgttggttttgggctgccagcgttttcactgagccccactcatcagcctgcaagctacttgaaaggagagtgatgctttagtcattccctatatactcggtgtttagcacagtctttggctcatagaatgaggatcagtaaagaacggatagatgggccgggtgtggtggctcat

SEQ ID NO: 137833 - DNA, 601 bp, Homo Sapiens
acgacttcttcctattgttttctcagcttcttgaagatcagttaatgtcactccctgtgttgatcttctagattgtcttgcttgtctagatcttgcttttctttgggattcagactcttcatccctaacaggagtgaggtatgatctgcgtctctccctgacctctgttgtggaggagacagtgccagcagtagttgtagtcagggttgtggtagaagctgcagcatttacaacagttggagcaacaggaatggtcactgccgtaggaacactgtccttttctttctcagtactatcctcagcccacaaacgatttgagggtactgctttgtgtgcctgctgagggaaggaacccgttgtaatctttgtagtagtgcttgtgctggaaacaggcttttctgaagccagctgcagaggtaactgttggtgttgatgtggtgctggaacactagaactaatcaaatcatcttgtcttctaccaaggagcaacttttatgatacgttgatccttccataactgagctatttttttaagatcatcttcccatttcctcttgtatatgaaccacttgttccgcaaacttgaagatcctctgttttc

SEQ ID NO: 137834 - DNA, 432 bp, Homo Sapiens
tttaataagcattccatgcattttaatggcattttaaaaattggctattcatttatgggttcctcatatggataaatatattgtgcaaacttggattacaacatgtaactcataagtgctttaaaatagaataaagcatccctgacttaaaaggggataaaataaatagtaagtcaagaatcacagatctaaagcatttaaaaaacgtaatatacctatgcatcctattgaaatgctttatattagaattttctttttaatccataaacagggcaaataaatcacagaatctctatattttgagaataaaacagaagaaaagccaactggtgcagccttttaaatgcaaaatgtataataaagtaatgtcaaaatgcaaatgaaactgtacggttttaaattcagtacagtcatttataaacattaattcat

SEQ ID NO: 137835 - DNA, 352 bp, Homo Sapiens
tcccatcaacagtacatgtgaatttcaatttttccacaacctcattagaacttggtattgtcagtgtggtagatactgccagttgtcccaggatctactttccccttcttcctttaataacagatttaatgagtttcacctgggattgcagctgggcatgcccaaccaaatcatagacaaggatgatgtggctgaaagtaatatgcatcacttctggggtcatgaccttagggaagcatgctccttaggaaggtatgcttcccaaacttcgagggggggcccgggtacccaatttcgccctattagttgagtcgttatttacaatttcactgggccgtcgtttttacaacgt

SEQ ID NO: 137836 - DNA, 420 bp, Homo Sapiens
aatctcagacccaaagtgcaattttggcagcctgcatgagaaggagggtgggaggaaaggtggctagaaccaagggtagcagcctgggggcttgagaggaaacccggcacagccccatccctaccctgtctcacgagcagcccgtcctcctcctgactccccttaccccacacaccgagcgccattctcttgctgcctcatctattctggttaggtacttactgagcatcaggtgctaggcaagtggctggggagagacaacgtttaatgactcagtctccgcctgcacagagcctttgagtctagagggagacacagacttactgacaggctgggttgtgtaataagtgctacgggaggaaaagctgagagtgtctgagaatttatgagatgtgtgtctcatcagacttgggcatcaaa

SEQ ID NO: 137837 - DNA, 389 bp, Homo Sapiens
  misc_feature (44)..(44): n is a, c, g, or t
  misc_feature (244)..(265): n is a, c, g, or t
tagaaaaccgtccttgataaaataaagtccgtagaatatttggnactgctgacctggctcttcttcccagtcccattggcccaattgtccatatacatgctttgcaatgtcagaagcagaatccgttaggagaaaacaggaactcttttgtttttccgcttaccaaaatgaggcgcaaatttatcatatccgccgggacattactggacatcttgccgtttgatatacacccagatgtttacgnnnnnnnnnnnnnnnnnnnnnngagcagaagtcttcacgttacagaataaaccacgattttgactggttcgtgatgtgctttctcccccaaaaataaagttattttggagccaaagtgccggtcaggccgaggttctggttcgaag

SEQ ID NO: 137838 - DNA, 379 bp, Homo Sapiens
  misc_feature (33)..(33): n is a, c, g, or t
  misc_feature (52)..(52): n is a, c, g, or t
  misc_feature (60)..(60): n is a, c, g, or t
  misc_feature (150)..(150): n is a, c, g, or t
  misc_feature (263)..(273): n is a, c, g, or t
aaaaacaactttcctactcgacaagatgaaatntttccagcaaatattaaanatatgcanccacccaacataaattatcagttaatacttttccccaaagaaaaaccaatcaatcaagataaaaataaaacaactccctaagtggcaggncatggtggctcagacctgtaatcccaacactttggtaggctgaggaggaaatatagcttgaggccaggagtttgaaaccagcatggccaaacatagcaagaccctgtttatgnnnnnnnnnnnttcaaaattagccaggcattgtgcacatgcctatggtcctagctacttgggaggctgaggcatggaggatcacctgagctcaggagttcaaggatacagcgagtat

SEQ ID NO: 137839 - DNA, 501 bp, Homo Sapiens
  misc_feature (83)..(83): n is a, c, g, or t
  misc_feature (85)..(92): n is a, c, g, or t
  misc_feature (290)..(382): n is a, c, g, or t
  misc_feature (394)..(394): n is a, c, g, or t
  misc_feature (457)..(457): n is a, c, g, or t
  misc_feature (476)..(476): n is a, c, g, or t
acaagtttttcctcatccaattttaataattcctttgagagcggtatcctccattggggattttgccctaatacattaagggngnnnnnnnnttcatttaaggccataatctttcctccttacacttccagttaaaacaactttcctactcgaaatatgaatatttccagaaatattaaaatatgaatcaccaacataaattatcagttaatacttttcccaaagaaaaaccaatcaatcaagataaaaataaaacaactcctaagtggcagggcatggtggctcacacnnnnnnnnnnnnnnnnnnnnnnnnnnnnnnnnnnnnnnnnnnnnnnnnnnnnnnnnnnnnnnnnnnnnnnnnnnnnnnnnnnnnnnnnnnnnnatgaaaaaaaanaattcaaaattagccaggcattgtgcacatgcctatggtcctagctacttgggaggctgaggnaggaggatcacctgagctnaggagttcaaggatacagcgagtat

SEQ ID NO: 137840 - DNA, 384 bp, Homo Sapiens
  misc_feature (197)..(289): n is a, c, g, or t
  misc_feature (293)..(303): n is a, c, g, or t
  misc_feature (363)..(363): n is a, c, g, or t
  misc_feature (374)..(374): n is a, c, g, or t
ggccataatctttccccttaacacttccagtttaaaaacaactttcctactcggaaatatggaatatttccagaaaatattaaaaatatgaatcacccaacataaattatcagttaatacttttccccaaagaaaaaccaatcaatcaagataaaaataaaacaactcctaagtggcagggcatggtggctcacacnnnnnnnnnnnnnnnnnnnnnnnnnnnnnnnnnnnnnnnnnnnnnnnnnnnnnnnnnnnnnnnnnnnnnnnnnnnnnnnnnnnnnnnnnnnnnatgnnnnnnnnnnnttcaaaattagccaggcattgtgcacatgcctatggtcctagctacttgggaggctgagncaggaggatcncctgagctca

SEQ ID NO: 137841 - DNA, 479 bp, Homo Sapiens
  misc_feature (23)..(23): n is a, c, g, or t
  misc_feature (29)..(29): n is a, c, g, or t
  misc_feature (56)..(65): n is a, c, g, or t
  misc_feature (69)..(69): n is a, c, g, or t
  misc_feature (87)..(87): n is a, c, g, or t
  misc_feature (264)..(387): n is a, c, g, or t
  misc_feature (464)..(464): n is a, c, g, or t
aaccttggagagccagtatccancattgnggattttgccctaaaacatttaagagnnnnnnnnnntccntttaaagggcctaatccntccccttacacttccagttaaaacaactttcctactccgaaatatgaatatttcagaaatattaaaatatgaatcacccaacataaattatcagttaatacttttcccaaagaaaaaccaatcaatcaagataaaaataaaacaactcctaagtggcagggcatggtggctcacacnnnnnnnnnnnnnnnnnnnnnnnnnnnnnnnnnnnnnnnnnnnnnnnnnnnnnnnnnnnnnnnnnnnnnnnnnnnnnnnnnnnnnnnnnnnnnnnnnnnnnnnnnnnnnnnnnnnnnnnnnnnnattgtgcacatgcctatggtcctagctacttgggaaggctgaggcacggaggatcacctgagctcaggatgttcaanggatacagcgagtat

SEQ ID NO: 137842 - DNA, 386 bp, Homo Sapiens
  misc_feature (270)..(312): n is a, c, g, or t
  misc_feature (324)..(324): n is a, c, g, or t
  misc_feature (329)..(329): n is a, c, g, or t
  misc_feature (343)..(343): n is a, c, g, or t
  misc_feature (360)..(360): n is a, c, g, or t
aaaaaaaatccatttaagggccataatcctttccccttaacacttccagttaaaaacaaactttcctactcggaaatatggaatatttccagaaatattaaaaatatgaatcacccaacataaattatccagttaatacttttccccaaagaaaaacccaatcaatcaagataaaaataaaacaactccctaagtggcagggcatggtggctcacacctgtaatccccaacactttggtaggctgaggaggaaatatagcttgaggcccnnnnnnnnnnnnnnnnnnnnnnnnnnnnnnnnnnnnnnnnnnnatgaaaaaaaanaattnaaaattagccaggnattgtgcacatgcctanggtcctagctacttgggaggctgagt

SEQ ID NO: 137843 - DNA, 708 bp, Homo Sapiens
  misc_feature (113)..(175): n is a, c, g, or t
  misc_feature (550)..(565): n is a, c, g, or t
gagcctgcctttgtaccctgtttaacttaaagaacagagccacaccggtattatatgtgtatagttatattgcgtttgcagactaaattgtcatgttgtgaaagtttgtgtgnnnnnnnnnnnnnnnnnnnnnnnnnnnnnnnnnnnnnnnnnnnnnnnnnnnnnnnnnnnnnnnctggttttgtatgagagagaggttaaaaaggtttggtttacactgagtatatgttgtcaagtggcaaaagtccacatagctctcctgttttctgtatacgttcacagcctcaaaaaaaataattgaaatggctttaaaaaccaaacaaaacacctccatcctgtgataagtacctcgaatggattcagctttactcctttgtaactcatctttacattttcagcatatttaaacaaaccaacaaaatgaaatactaatagtaaaaaggctgacccatgtggctttgcagtgctgttcgtccagaagcatggcacacgatgcttgtgcatgtggaaacttagcgactgtcaacatacattctcagggatttatccnnnnnnnnnnnnnnnngaatgagagcatttattgtactgtatatatattatagtatatgtctgaatattgaaaatataacattaactaatttataaaaaatattctatgtaatgcaaaatacttgaagctgcagtagcttggttttaaacaaaaacaaa

SEQ ID NO: 137844 - DNA, 655 bp, Homo Sapiens
  misc_feature (631)..(631): n is a, c, g, or t
agtcactttactaaaagatctttgttaactcagtattttaaacatctgtcagcttatgtaggtaaaagtagaagcatgtttgtacactgcttgtagttatagtgacagctttccatgttgagattctcatatcatcttgtatcttaaagtttcatgtgagtttttaccgttaggatgattaagatgtatataggacaaaatgttaagtctttcctctacctacatttgttttcttggctagtaatagtagtagatacttcttaaataaatgttctctcaagatccttaaaacctcttggaaattataaaaatattggcaagaaaagaagaatagttgtttaaatattttttaaaaaacacttgaataagaatcagtagggtataaactagaagtttaaaaatgcttcatagaacgtccagggtttacattacaagattctcacaacaaacctattgtagaggtgagtaaggcatgttactacagaggaaagtttgagagtaaaactgtaaaaaattatatttttgttgtactttctaagagaaagagtattgttatgttctcctaacttctgttgattactactttaagtgatattcatttaaaaccttgcaaatttattttatttatttnaattttctttttgaggtgggagtc

SEQ ID NO: 137845 - DNA, 846 bp, Homo Sapiens
gcccatagatggcagccggcccggcggccggccagcccaaactgtgcccaccaatgccagggcactccaagccaggaggccacttccaaacccggggccgcctaagctaccaggccattccaaattctgaggcccccccaatcccgatgcccacttagattgttgtccacctccaaacccggacatccagtcctagaccagcaaaccactgtttccaactgaaggcataccagcctagcatcaccaaagccccgcctcctaatcctggaggagggattggtggcccaaagcatttgatccaccaaaattacccaggaaagttaaaatggaaggcccattaattggcttccctttgatcctacagtcaggaaggcatgctcttcacctcctgcactaggtattcctgcactgggcattcccgcaccaggcagtcctgcactggttattgctgaaccaggcagtcctgtgctgggcaggcctgcaccgggaagtcctgcactgggcagtcccacaccgggcagtcccgcattgggcattcctggaactgcaggattacctggcacaggcatctttaatcccttttttccttgggcagggggatttttctcaatctctctcatatcttctagggtaactacatgaacaaaagcttctctcccattaagttttttacggtgtaagcgttcagacttacgtgcatcatcttcatttttaaactgaaccatgcctgtcctagaccttgcccattgttatcaccagaacatgtacagcattttcatccactgggattcccctcgtgccgaattcgccacccaggcctcgctaccttagaccgttatagtactg

SEQ ID NO: 137846 - DNA, 531 bp, Homo Sapiens
ttttcttttctgattaatggtctatttattgataccattctattttaacaaagaaaatatttcaaattacaaggtatacaagtcaatactgttttgaagtgaaaaattatttgctttgagagtgtatgcatgtatgtatatatatgataaatgattataacgtgtgtgtcagtgacaatatgtagtctttggttgttagttatatactgtctacctgtgagatgcaaggtaagtgggtcacagactctcaaatttatgaaacacttagatttttcagggaagttacatgaaggaactagggagtttcatgattagataagacgttcgggtgggatctccaccggacagcactctaaatcatcagcagtgtgagcggtgattcaatttgggaaagtgagtataggtttaaattctggccacagacaacctctcctacacaattcactgaacctcccctggaaggaggtttccacatcctgcagaggctaactgggcaccaatcatgcttccactaaccgacttggctgcttc

SEQ ID NO: 137847 - DNA, 625 bp, Homo Sapiens
tttttatgtataaacaggtaccagttttgattttatttaatcatttcatacattaacatacatgacacatcaaaatgagaaatgcacagtttaaccgttcaacagctggccttacttcaaaagaacactatattcatattaaacatttacagtctttccatctaactttacacatgtcctaaatcattttccagcacttctcacatagaagtctagttttgctctttaaaatcaccatctgtatcacccctagtagacgcgagggtttccccaattacatgctgaagagagccagccaccaccccacctaaagacatccaagcagctccagagcctgcctccgaggccaccccttcgccacggcagtctcgattccaagaactgattatctgacactagtgaaccagcactaaaggctgtaggatgtgactacatcacagttccagaaggaaggggaccatggccaagagaagccctaaatgacagaagctcattaaaaccaagtgccccaaacctcctgaaacatcgttagcaaggagctactgctttcctttcttaaacatgttttgggcatgaccacactctggaagtggtgaactgttacacatttggtgtgtgtgtaccc

SEQ ID NO: 137848 - DNA, 641 bp, Homo Sapiens
  misc_feature (412)..(412): n is a, c, g, or t
  misc_feature (459)..(459): n is a, c, g, or t
  misc_feature (486)..(486): n is a, c, g, or t
  misc_feature (491)..(491): n is a, c, g, or t
  misc_feature (505)..(505): n is a, c, g, or t
  misc_feature (510)..(510): n is a, c, g, or t
  misc_feature (519)..(519): n is a, c, g, or t
  misc_feature (526)..(526): n is a, c, g, or t
  misc_feature (556)..(556): n is a, c, g, or t
  misc_feature (561)..(561): n is a, c, g, or t
  misc_feature (583)..(583): n is a, c, g, or t
  misc_feature (601)..(601): n is a, c, g, or t
  misc_feature (613)..(613): n is a, c, g, or t
  misc_feature (626)..(626): n is a, c, g, or t
ttttcctccaaacaggtagttagtaaataaaccatcaaatactggaaacgatgtttattttaagttttcaaagtaccaggggaaaaaaagacgagagatttccactttaagaaagtctattagtcctgtccttatttcaaaaatgttcaattccatgtaatcttttggagtatgatacctaaaggaattttcaatgagacttgagacaggtgcatttccagcttttctcaattgcttggtgtgtacatttccacggaggagcctgtataccaactaattctaactctcaaagtccattgagaacatttctgcatatgaccaaaatgatcaggctaccaaactggccactatgatcattctagctgttctcataagagattaaattcatgaacaaggtgttcagcttgaaatngctttctctgggcctttactttgacctgcccacctacccatttcatnattaatggtttaaccattaacttggtncatgntgtttggtggaaancactngtggaactncttcccntcccaatggttattccagtatggtttcccngtcancatgggtcagggggtaaaaggncatgggctatctcggctncctctcaggaantccaggagaggtnaccagaggccttttg

SEQ ID NO: 137849 - DNA, 614 bp, Homo Sapiens
  misc_feature (15)..(15): n is a, c, g, or t
  misc_feature (39)..(39): n is a, c, g, or t
  misc_feature (580)..(580): n is a, c, g, or t
  misc_feature (590)..(590): n is a, c, g, or t
gggtagagtttaatnccagtttcctttaaaaagccaaantatcctattatccccagatagtgaacaaagaaacccccagaaagggtgttcctgcctgaagtttaccttttattgaacaggcagttggacagacagcattgtaatcaggacattttgagggctcagacttggtggagatgtctttataccctcagatcacagagtctaggaggaaagagatggaaaagactgaaaatcagtgagtccattcccaaaagctctgtattgttttctatagcaaataagacaagctccgaagaattctttgtatatacagatggtgaaggtaggtgattcagaactggggtttattttttccctcatggctttcaacaatcttcctgtcattcgtcagacgggggcatgctggctgcggtggttcctggggtgctgctctcctcacacttccctgtactgcggatgtgtgtatttgtttggcgtatcaggttttcatgacagagcatgcaaggattgttgtaggtttggccatcgtcaccacagacaggctttaaatcctttggacaaagataacctatcctgngcaatactcngtagtctttgcacatctcagaatc

SEQ ID NO: 137850 - DNA, 354 bp, Homo Sapiens
  misc_feature (22)..(22): n is a, c, g, or t
  misc_feature (31)..(31): n is a, c, g, or t
  misc_feature (70)..(70): n is a, c, g, or t
  misc_feature (153)..(154): n is a, c, g, or t
ctggggttgggaaaggctgggnaatggttcnaattgtgcaaggtgaacggaaggtccccccgccgttccnacaaaggaccctgggcaagggtcaagacggctgtgctggctctgggagccgttgctgtgccgctccagcagcccttcctccanngcccctgtggggaccttcccggccacctcccaggtcaggtgagcatccttcaggtcactgcccaccacgaagcaggtgaaggtggctttgtcccggagccacaggttctgcactgcaggggttagcaggtagacgccaagaggctgggtgtggctcggacactctggtgtctttgtctctctctcttcttgttcctcttt

SEQ ID NO: 137851 - DNA, 406 bp, Homo Sapiens
gactgaaagtcttggtgagggcaggaactctgtctaggttgttcatctggcagccagcaaacccaaaataagtattagttgaatgaatagctaaatagatgagccatggggtagcatatctgttttagctactgcttgcctgttatcatcctgggatgctgcttgcttctccgtgatctcttcttgttcttaaattgtcttcagttgtagtactaagtactaatttgatctgtaatgtgatatgtggctgaagtttgctctgtaaaatcaccgtttcctgaggtatattcaatacctttaatttttccataaatctcttcaaggtttgtgtgtgttttcttttaaattatctaactagttggatgtatgcttgaagtgctagacaataaaagtttcaataggctag

SEQ ID NO: 137852 - DNA, 232 bp, Homo Sapiens
ctgcctagctatcttattactttccaagggcttttgaggagtaatttgttctcctggcaatttcggattaaaatcacctgtttcttcataaattgtcatcttcaaggtaacactgagaactggatctctgaaatctcatgttttcgagatgatttttatagctgcagacctgtgggctgattccagactgagagttgaagttttgtgtgcatcatcatgtgccattaaatga

SEQ ID NO: 137853 - DNA, 1116 bp, Homo Sapiens
  misc_feature (998)..(998): n is a, c, g, or t
ggtgcctgctctttctgtttgtgttgctgttgtatttgtgctcctccgctgcgttggtggtttgttgttgtactgtccgtgtttctgtcgacgggatggttccgttctcgcgtgcccgttgcctgcctgcgctgccttgccagtgccgcgtttcttggcgtgaagggctttttgtgttcgccctgcccgtggcccgagtgttggccttgtgggatgcccccatgggatgtatccttcccctccctaggcttggtgcacttactcgcgcgattccactcccagctgcccggccttaggccagggcaacccaacaatccttcttttctttggaaccaaatcagtttccccacatgaacttgagctttgtgtctgcactccactgtacatttcctgtatttttcatcctccagtggtttgataaacttggttcctggctgaaggtgagtcccatcaggcaaattctcatccacaaatgctgccctgagcattggcataacggaggtacagggctgcaaagggagcatcagggtattagactggagcaagctctcaggtcggcctaaaggagacttggggctctggagtccatggattgaattccacaggtgaattttcctatggagtttaagctgctttttaagttccttgacctctgctttacgttgtttcttctcagctcgcaacctttgcttttctgctttaagaaagttcttatcaacctgtttctggagcctgacttgttccacgagcagcaggaagacgaggagtagagtactttgagtgacagaacggttcagaggagcccaccacaggtctccgcaacttcaagcaggacgtggttagtgtcactggccatatggccctgcttcactatcttcacagatattgtaggatgggcataggctacactggtagcggacaccaacaatccttctttggcagttgttgcagcaatatgccagctgaactggttttctggcaaaaacaatgtttcttcntgaagtaggcttgagacttctgagggacagaacccaggatgggttctggaggacagcttttcatgtaatttctgttcagccctcggccgattcacccccagcctcgctacctagccta

SEQ ID NO: 137854 - DNA, 353 bp, Homo Sapiens
  misc_feature (77)..(77): n is a, c, g, or t
cttgaaattgaggcatgagaggggtccggcttgttggttgggagactgccctaaacaagttattagccacgccattnctagacacttcccatcctagaagggaggcgcccaggaagtctgtatataaccaactctagggcagaggctgccagctggtggcccgtgagccagacttgggccccagagatagatttgtttggtttgtggtgttgtaaataattttgaattagttgccaacatttgaaaatcaggacttgccttttctcttgaaaaatcaaaagttcaggcatcattggacccaaattcctgcccgataaaataagctggatttcagtagtcgtagcttctttaaa

SEQ ID NO: 137855 - DNA, 823 bp, Homo Sapiens
  misc_feature (728)..(728): n is a, c, g, or t
  misc_feature (736)..(736): n is a, c, g, or t
  misc_feature (741)..(741): n is a, c, g, or t
  misc_feature (793)..(793): n is a, c, g, or t
caatacagcagacaatggtgtgtacagaaaactcctggttcctgtccctattctggattctctcgatactctgtggcactttccaatttcagactctgatccggacactcttacagggtgacaattctaatctagcctactcctgcctgttcttcatctcctacggattccagatcctgatcctgatcttttcagcattttcagaaaataatgagtcatcaaataatccatcatccatagcttcattcctgagtagcattacctacagctggtatgacagcatcattctgaaaggctacaagcgtcctctgacactcgaggatgtctgggaagttgatgaagagatgaaaaccaagacattagtgagcaagtttgaaacgcacatgaagagagagctgcagaaagccaggcgggcactccagagacggcaggagaagagctcccagcagaactctggagccaggctgcctggcttgaacaagaatcagagtcaaagccaagatgcccttgtcctggtaactttcccttgagtgtctgtgtgagcgcgctgcatgtttcaggcaagggtacatcagcatcatggcgattctgtccttacatttttatagcacttcatacttctcagtgcacttcatattattaatggtattcacaatactgatactaccttagtgatggatacatgggcgtgtaatgtactgttctctttccttttggggtactttttnaaattttnccagnaatgaaacgtgggttttgaaccaaattataccttaggcatttctaggatttngcaccttgggaccaaataggctaagcaggc

SEQ ID NO: 137856 - DNA, 541 bp, Homo Sapiens
  misc_feature (283)..(283): n is a, c, g, or t
  misc_feature (334)..(334): n is a, c, g, or t
  misc_feature (523)..(523): n is a, c, g, or t
tttacatgacaacatgtactttattacatggatcagaaataccacatgtactaatagttgctgtacaatgatacacaacacccaactaagactatttaaaggttttgctgatattgaaaactataaagacacaatgtgagagtaagaaagtgtttcataagatagcataatgccaagacaattcatcgctttaggatattaaatacattccgcatattaaaaacttaatgtattataaagctatgcccattctttaaatgaaaacttgaaggactttactccnattcatttttctttacagggactattgcagtaccattcattgtttaaagcnggatgtttataaccatttttccatactttaaagtggaacttaatggaacgaataccagacctaacattaacaaaattaaagagatttcatattttatttccaccaaaaagatacttaagtctacagttatgtagtaccaaaaaactatgtagagcaaaacaagcatgatacatttcaaacatgacaatntattacgaggcatttttt

SEQ ID NO: 137857 - DNA, 254 bp, Homo Sapiens
tttaacttttaaaatgaaccatttattaaatcagactgttattcttaacagttatgtaagttacatgtatgtttaagtcagagtatttcacatggaaaagtttttaactcctataggcaagcaaaatcatatcacacaatatataagtgggaaggggatactgctaaacattcaaataaggcaagtatataaaaacaataaaacaataatgaaaaaattcaagcattcctttaagagaattcaacactacaagc

SEQ ID NO: 137858 - DNA, 511 bp, Homo Sapiens
  misc_feature (280)..(280): n is a, c, g, or t
  misc_feature (371)..(371): n is a, c, g, or t
  misc_feature (380)..(380): n is a, c, g, or t
  misc_feature (382)..(382): n is a, c, g, or t
  misc_feature (479)..(479): n is a, c, g, or t
ggaacacgcgcgcctcggcaccctgcttcaccagctccaggccgctcaagaagcggctgctccgctcccgggctgcggccagagcctcagcctccggggcgggctcctcgccatcggccggcgtagtagctctagccgccgccatgactgctcggcgcaagagctccaaaccgatcagctgtctctgaaaactggttgcgatgcttcggctcgcttcggaaatccctgggacttcttcggcaatcctgggacttcttcggctacccgcaatgcgtccacncccggacacttccggcctgtaagtggttacgcctcccaacttttcggctctctgaagcctgaggttccctgcaggaagggctcttgtgccnccgcctttncnctcttcggctatctccgtacacgttcggcaacgctcagtaagtggctcttcccgactccttggctctccggaaatcttctggtgactctcgcagccnggctttgggggcccacctctcagttggtcgtc

SEQ ID NO: 137859 - DNA, 756 bp, Homo Sapiens
  misc_feature (687)..(687): n is a, c, g, or t
  misc_feature (722)..(722): n is a, c, g, or t
ccacgcgtccggactagttctagatcgcgatctagaactaggccggtagcggacggtccttgcattggcctccggcaggcgccccccgggggcgggaagctgcctcacagcatggaaccacaggttactctaaatgtgacttttaaaaatgaaattcaaagctttctggtttctgatccagaaaatacaacttgggctgatatcgaagctatggtaaaagtttcatttgatctgaatactattcaaataaaatacctggatgaggaaaatgaagaggtatccatcaacagtcaaggagaatatgaagaagcgcttaagatggcagttaaacagggaaaccaactgcagatgcaagtccacgaagggcaccatgtcgttgatgaagccccacccccagttgtaggagcaaaacgactagctgccagggcagggaagaagccacttgcacattactcttcactggtgagagtcttgggatcagacatgaagaccccagaggatcctgcagtgcagtcgtttccacttgttccatgtgacacagaccagcctcaagacaagcccccagactggttcacaagctacctgggagacgttcagagaacaagttggtttaacggaaacggtttgaggaagctttgaaccggaatttaccatgaaaaagcttgtccttcccggaacccatccttngggttctttgttcccttcaggaagttttcaaatgnctatttcaggaaggaaacctttgttttttgccca

SEQ ID NO: 137860 - DNA, 536 bp, Homo Sapiens
tcagactgtgccttgaaatatattaaagaacaaagcccctagtaatgctcattcctaagccaatcaaaggctctaaaataaaaagtttgttctttctagttttagtgttgtgttgaatttttaggcaatttttcaggtaagctttctaagagaaagagagctggggtgggcatctgtcattctcaggtccccaaatgtgtgggagagggctgtttttcttcctgttacagagtaattttaaagaaatgcagttgtttctgaaaccagcctctagttccatgtcacgaagaccttcagccactgtggttaagaaaatggttagtttgcctgtgtggtctgttgtcctctttcagagtctgcttatattttcctgtttcccacattcttgtttcctaccctcggctacactaatgtatcattttcttgtgttagatctctttactatagcaactaacagtctattatccataattccaaagtccaagaactctgaaaatgaaacccatttggtggcgaaactgccctctcctgatctg

SEQ ID NO: 137861 - DNA, 292 bp, Homo Sapiens
tagtttggcaaacgttctcactgcaaaaatctggcattagtgttctgtttgtctctccaggttcccacttccacttagaatcctgactctcttgccagttcattaagatacatatctgaaatagcattttagctaatctcagctggagtttccaaaggctatctggtttgtctaattcatcactgtataaccctcagtgcactgtgcctagtgatacgctggaaccagcttgtactgggtcatgaaagccaggtctcctgaacaccacattcatataggcactgaaggactt

SEQ ID NO: 137862 - DNA, 538 bp, Homo Sapiens
ttctcttgaaggtgctgccaccccttggcactgtggaactgccaccttgggtctgtgtcacttgtaggtttctctgcctccaggttgcctcaacagcaggaggcacagcagtttcaccatctttgaggtgagggtggggtgccccagctaggaagcaagatcgctgtgctaggtctgaccaaaaccagggggcagtttagttctgggggtaaagccctcagatcccagggtacacttttttcccattcccttcacccaacttgcctgttaccccagtcacctaagcaatcactgggcccagaggagaggagacagacacacactggctcctggacctaaagggtatgagctggagctaaggccagctagagcttccactgtcagccctcactgtcagtcccactgcacaccccctgtgcctgctgggcactgggcactagctagatgctttaggttgcttcagctgatccttcaactctgtgaggtggataccaatattctaatttgcagagtggatgtggccggagggggtaactaa

SEQ ID NO: 137863 - DNA, 975 bp, Homo Sapiens
aactaaaggaaggagccttttgatatgcattcaggaagcagccaacctaatgcaatcaagaagagatagttcctaactgtcagccttgtggctaagtgaggaagagataatttggcaaaccatggagaccccacacaacacacagagctgtaatctagagcaaggagacagacaactcccaaacctacagtcagctccaagagccctagcacctttcatgtgcttttcctgaaagctgatgtgtgccatccataaagatcacagctgggcccaccaagaggaagctgtgcagagataatgcagccctcacagccacttccggagactacacagagattctagtggtttccacttaaaacgctccagtgcattggagaggcatttgccgggcatgcacgcttgtagatttcacatcccatgagtgtggagctactttcttctaccttctgtttgtcagttttagcttttctgactacttccttgatgttaagttgtcacttgccaggttttcccaaaacgtgggtttctcatctccaacaaccctaatctacttagctctctaattactaacttcttactagtctgtgagtcagaaaaccacatgacaaaattgacttagaactgtcacacgataagggaaccaggaactctccaaatagagttcctaactctttcagttctcagaattagtggaaagatcctgcagccatttccagtgcaacatcctagagatctgaagttccctggagaccaactctcagatgatcttgactgggattaacaacggaggacaggacactctcaggacttacaaattacaactgctattacagctcagcatttcaaattcaagataatttcttattcaaatgtggaccaacagataactgaaaattcagtttcatgagacgtaagcagctagatgtaaaggggataaagaggacaaagtcatgcgcttttacattcggaattctg

SEQ ID NO: 137864 - DNA, 1225 bp, Homo Sapiens
  misc_feature (75)..(75): n is a, c, g, or t
  misc_feature (89)..(89): n is a, c, g, or t
  misc_feature (124)..(124): n is a, c, g, or t
  misc_feature (184)..(184): n is a, c, g, or t
  misc_feature (206)..(206): n is a, c, g, or t
  misc_feature (234)..(234): n is a, c, g, or t
  misc_feature (273)..(356): n is a, c, g, or t
  misc_feature (435)..(445): n is a, c, g, or t
  misc_feature (1127)..(1161): n is a, c, g, or t
accgcagtatactctagtatgtttacacaaacagggaaaacaggcccgtgcaatgcatgtcaccaaataccccanactcagagtgaacntctggctggaggtgctccagaacacagcccacccnaccgtgaacatgcccgagaactccacaatatgtccacatgaacaacgggcatgcatgccnacaattccactgtgaactcctnagtccctaattccattccatcacctttnctgggagatacactgaaatgtccaccctttgcaaaatgnnnnnnnnnnnnnnnnnnnnnnnnnnnnnnnnnnnnnnnnnnnnnnnnnnnnnnnnnnnnnnnnnnnnnnnnnnnnnnnnnnnnagcaactccgagacacctcattcaccatgactcgaggtttttctatacgtgggacgaggggcaggttcacactaggctnnnnnnnnnnntcatttcccgtcttcgttggcaggtgcagccccatcttccaagttgtggctttggctgccacaatgtcctctcatttattgaggtgaggactgtggcattttctgcagcacctccaagattttctgtacctttgtgtcaatgttttttatgcctgctaatgtcgtctctaatctatcaatcttgctcctgaccatggtgatgctctgctgaacggaatcccagcctctcttctgtctctcttcgcatgcttgtacggagtttgagacattccaaagctcccttttaaagcccagcagctccttggacatctcagcattcttcaccatgatgaaggctgacaggatgatgcagaggacaaaggccagggccaggaggatgtacaggctcaggatggctctgtacaaccagcaggggacctgggtggagtctgagggcggcctgcactgggctgggacttggctcgtgggtcgtgaatgaccaccctttgcatggtcctgatttttgaaggccaaggtgatattctcatagtctgggtcatgggcaccttgattcttggctgagaccccctgtttcttgtccctgaaggctggtgcttgcatcttgacttcctggtgcttgtagatttcctcccccggccgtaatggccgaattcccgggcatatgtccggtaccgtcgactgnnnnnnnnnnnnnnnnnnnnnnnnnnnnnnnnnnncggccgcttcctcgctcaatgactcgctgcgctcgtcgttcggcttaacgcggtggcgcctata

SEQ ID NO: 137865 - DNA, 454 bp, Homo Sapiens
  misc_feature (382)..(390): n is a, c, g, or t
gagaagaaagctagagagtggaaatatctagtagggcaactgatttatcatttaaggtcgttcttctttataatgatgatgtaggtaacacttttttaaaggaaataattggatattttgtcaaatatttgagtctatcactaaggactggttctgaactatatgatattttaaagtactgctccatttccctccctcagtccttatccttgtggggtactggagttactaaatcccaggattggagtccctacagtacctagacttgtgctgttcaatgtggtagccgttaaatatggtgtttataaaatatttgaaatgtggctagtctgaattgattgcaagtgtaaaatgcatgcctgatttcaaaaacagtttgacnnnnnnnnnctttttcattgtcttaaaaatatttgtatatttatatacaacttgaaataatagcattttgata

SEQ ID NO: 137866 - DNA, 493 bp, Homo Sapiens
ggtaattttactgtttcaggaaaggtggaaagaatggggagtagaggaaagatgaagtaacaagcttttacaaaataagattgttgacctcaaactccactttgcatctcatccttacatagcagttccagaaggcctgggcttccccatgcatgggcataagcccatgagtgactcagtggtcatctgctgaatcatcatttactccgcttttagccacccccacattttctgtcaagactgattttctagatttcaccttaagacgatttgacaaggtcaagatcaatgacagttactgactgtggccattttccttgcctaaggagttttagtagtcagctttggacttgaatgtttcttatgagacaatttgtgacatccatattcacagtgacctttattcaagaaagcagagggaatggaatcacagccgactcaggaaacctgaattctagtctggttaagctttagccaaatcattttgattcaa

SEQ ID NO: 137867 - DNA, 590 bp, Homo Sapiens
atggagggcaggtcttttctccacctcagaaatgccaaccattccaagtcaggggctcccaactaatgatagaccaggcttccctgtaccagtattctccacagaaccagcatgtagagcagcagccacactacaccctcgaaccaactctggaatacagtccttttcccatacctccccagtcccccgcttatgaaccaaacctctttgatggtccagaatcacagttttgcccaaaccaaagcttagtttcccttcttggtgatcaaagggaatctgagaatattgctaatcccatgcagacttcctccagtgttcagcagcaaaatgatgctcacttgcacagcttcagcatgatgcccagcagcgcctgtgaggcacatggtggggcacgagatggcctctgactcttcaaacacttcactgccattctcaaacatgggaaatccaatgaacaccacacagttagggaaatcactttttcagtggcaggtggagcaggaagaaagcaaattggcagatatttcccaagaccagtttctttcaaaggatgcagatggtgacacgttccttcatattgctgttgccca

SEQ ID NO: 137868 - DNA, 287 bp, Homo Sapiens
ttatgtttaaaattaatgactttattgacacaaactttgcaatgaaaagtggtatcctaataggatagtaaggattagtttctgtctcatacatacatgaaaaagtagccagatgcatttttagtcacatggtttaacttctggttgctgtctccgtgaaatccagattgttctggggagggccagatcatgtgccctgcatttccttctcccctgtaagtgagaaagtgtttctatataaaacagagacactttcttaaggtgataaattccaaacaacatgcagc

SEQ ID NO: 137869 - DNA, 127 bp, Homo Sapiens
ctgtttgctttcctttgtggaacctctccatgcacgtcctcctcaaggccatggtttctctaattattccgatgtcttttcttttaatctcttgagcatatgtaacattttggggatgcagataaat

SEQ ID NO: 137870 - DNA, 476 bp, Homo Sapiens
ttcctgctaaaacctttctggttacatactttgaaagtcaaacccgttagagagggtctgacccgttttttcactattcttaggattctctgcctaaactctacaaaacacacacacttcttcttatctccaccaaaggtgctttagaaacatttgctgctttgtcatttgaatgtcagattcaacttcccttcccaggaaggcaggacaaactcagtgtgcttgggttggcaggccagctgccttctgtgaggcagcccattactggaggctcgggggcgactcaggagaagagcaagctggggagcaataccttgctgtaattaagagcgccagcacctcttctccgatgccctccacgtccaccacgagtgccagctcgtatttctgcacagtgttggagcataatgtcaccctgatagcagcaaatccctgggggcgaatggtgccacagtcaggagagatggtgaattctt

SEQ ID NO: 137871 - DNA, 737 bp, Homo Sapiens
  misc_feature (291)..(291): n is a, c, g, or t
  misc_feature (500)..(611): n is a, c, g, or t
caaaaacatcgaaatagaattagacagggaggaggaggccaagagcaagagactcagatggggagacaggaaaactccagatcagttggagaccaaaactggggcagggtgagacagggagccagaatgttggaaatgagagagagccacacagataggtgcggttagggtaaagacaagggatgagaatgtcagcgaggtgggcggtcgcatggaaaaacaggtaaactgaggcagcaccacgctgggtggggaggtagaccctgaacttcaaggaacaggcagtgcgancctgaggtgggtgggatgtgatcgtgatccagtgtgggcatgagcagctcatttctgagcccctgccccactagcccctggccctgggatagcgtctggccaccaccgcgggccaccttgcagaaacgtggctctgaccgcagcctgcaccttcccacccaaccccagtgggctccttatggttttttgtctgtttgttctctgtttcnnnnnnnnnnnnnnnnnnnnnnnnnnnnnnnnnnnnnnnnnnnnnnnnnnnnnnnnnnnnnnnnnnnnnnnnnnnnnnnnnnnnnnnnnnnnnnnnnnnnnnnnnnnnnnnntatggcctcttgagccagcagtgctgctgctgcagcggccaaggttgggcgatgcaaaccccaggcgcagagccgggatctggagaagcagagaagccggcctccgccactgtgcgggagtttccg

SEQ ID NO: 137872 - DNA, 435 bp, Homo Sapiens
aacttaagctctcttcttttcatctctactacaaatccattactctaaacaccatcatattttgcctgggcttctgaagcaatctgatcccggatgctctcctttcctcaccccatggctggtctctttcattgtctactttcattcttcctttcagatatcacactcaacagaatcatcgattcttcagagaagccttcccttcctccctgaataagtcaaaatcctcctattttaaaattttatagcaccattatacctctaacagctcttatcaacattgtaattttacacatattagtgccttccctctagacttcatgaggcagaatcccatcttcagaggccacacaagcactggcacttgctgatgctcaatatatatttatcaagtaatctgatgagtacattttaattgagtaaaaatgcctcaaa

SEQ ID NO: 137873 - DNA, 792 bp, Homo Sapiens
  misc_feature (693)..(722): n is a, c, g, or t
cctatggcccaatggaatgtccatttggattaccggattggtttcacttgatatgtcttcccatctatttcaacttcataggactccataacttcttggatggcctcaccaacatcacacagacggaacatcaattccagcacactttattccagtgttagtagcatcttttacagcttttaataacgtatcatatttgggattaaaagtgacagtaaaagcacagtcaataatcctaccacttatatgtgttccaaagtctattttacagatgtcatcatactgtaatactgttgtgtcaccggcattgggagtataatgggcagcacaattattgagagaacatccagtaggaaatgccaggcctgcatttaatccattctcttttattaacttgcgtgaacagtcttccaacttttcacagatttctatcattgtcatcccaggcttgatccagctcattacgtattttctaacttgtcgatgtgcttctgcagcttctcgaaaatcattccaaatctcttcacttgcctgatctaatgctttcttttcttcacttgtagttctccaagcagctgttcgcccatcttgtgtgggtgggtattcgcattcttgtcctttgggaaatacaccattaggatacaggtcacatattggaactgagggagggtctgtttgaacttttggtcctcnnnnnnnnnnnnnnnnnnnnnnnnnnnnnncagttgctccatctccatcgccatctccatcttcatcatcttcatctctttctttatcttccaatgctcc

SEQ ID NO: 137874 - DNA, 651 bp, Homo Sapiens
  misc_feature (250)..(279): n is a, c, g, or t
caggcttgatccagctcattacgtattttctaacttgtcgatgtgcttctgcagcttctcgaaaatcattccaaatctcttcacttgcctgatctaatgctttcttttcttcacttgtagttctccaagcagctgttcgcccatcttgtgtgggtgggtattcgcattcttgtcctttgggaaatacaccattaggatacaggtcacatattggaactgagggagggtctgtttgaacttttggtcctcnnnnnnnnnnnnnnnnnnnnnnnnnnnnnncagttgctccatctccatcgccatctccatcttcatcatcttcatctctttctttatcttccaatgctgatctttccaactgtcttgctacttcatccactgaggctcctgattctttatcaggttcctgttcccctgctgcagaaggccctttgctcttcttcttctttcgtctttttttcttggctgcttcctcagccgtagaggcagctccttcttccctgtcgtctggatccaggtcgccattcaggtggctcccggaggccgctacctcctccacacccgccatgttgcccgagagagcgcgagggaatgagacagagcggcgagggccccgatccttctccacccgcctacaccagccacgccccc

SEQ ID NO: 137875 - DNA, 635 bp, Homo Sapiens
ccccgagatagtgacaatacaatcagactcttgctaaagtcctgcttggctctgaacacacagattatttcatcactgtatgaggctaaggatcaaccttctaaatcacttgaaaatgaccataaatttcaaaaaatgtattcattttcagccacaaattggccccagtcatcagagtgcttcagcctagccccttcatgccctctcctatgttccttttgaatggtgtaggtggaaaatcccgacggaggcagggtgtgaggcaggtggagggaatcaagagacaaacaccaggtagccacaggtgtgcagaggaaagttagaaacctcaagtctcaacccccagccacctcacagccttcccctctggtatcagtgtgggtggcaagaggtgtgctgatgccccagcgctgccagacttgagtgggaagctagcatgtgccttaacaggacgctctaacccccactggctcttcatcagtgtgacatggagtttggtcctaaaaggcctctactgtttttctgagatatgaaaaggagagtagcagttttctaaagaaagggcagactaatcaacatgtatcagttcaggtcactgcaggtggctctcatgaaaggggagcgcccagcaggct

SEQ ID NO: 137876 - DNA, 388 bp, Homo Sapiens
  misc_feature (20)..(20): n is a, c, g, or t
  misc_feature (45)..(261): n is a, c, g, or t
ccagtggcatgaaccttggnctcaactgcaaaccaaatccctggnnnnnnnnnnnnnnnnnnnnnnnnnnnnnnnnnnnnnnnnnnnnnnnnnnnnnnnnnnnnnnnnnnnnnnnnnnnnnnnnnnnnnnnnnnnnnnnnnnnnnnnnnnnnnnnnnnnnnnnnnnnnnnnnnnnnnnnnnnnnnnnnnnnnnnnnnnnnnnnnnnnnnnnnnnnnnnnnnnnnnnnnnnnnnnnnnnnnnnnnnnnnnnnnnnnnnnnnnatctatgattttaataaggtcatcagtttcctgtttggggtgtctattgtatgtgtcaaaagtgagatgctcttgttctgatagcttcccaacttccagaaactacagtatgcatatattattatgg

SEQ ID NO: 137877 - DNA, 344 bp, Homo Sapiens
  misc_feature (192)..(192): n is a, c, g, or t
  misc_feature (196)..(196): n is a, c, g, or t
  misc_feature (226)..(226): n is a, c, g, or t
cttcttccttcctagacgtggaatacacacggatacagtatctggagatgtagcagctggctcttgaccataatggtgggagtctcactgtaaggacgatggaggaacagaaagatagacgaagtttggggtgctgatgaaattgtggggctgctgtcccctctccccagactccactttttttttttcttncagntttattggttgaagaaactcggccatttgntatttatgatgtaccttggtttggatttagctaattgcatctctgtggtattggttaatatgttcttctgtctctgtttttcctgtcaattgatagctagctcttaaggcctgttcag

SEQ ID NO: 137878 - DNA, 379 bp, Homo Sapiens
  misc_feature (31)..(31): n is a, c, g, or t
  misc_feature (48)..(48): n is a, c, g, or t
  misc_feature (58)..(58): n is a, c, g, or t
  misc_feature (104)..(104): n is a, c, g, or t
  misc_feature (300)..(300): n is a, c, g, or t
ccccactcccccaaacccccacctacttttnctacttgccagctttanttgttgaaanaaactgggccatttggccctttaaggatgtaaccttggtttggaanttagctaaattgccatctctgtggtcattggttaaaccatggttccgtctgtctctgtttttcctgtcaattgaatagctagctcttaaggcctgttcagatttaagtttgccattttgttgatggggtggtaggaataacttgacaggtagtcacagaatacttccatcacaaggcacgtaatatctggttgtgnctttttgtgatgttagcaaccactgatgctcattagggtctccaagaataagatattctaattttttattccttcacgt

SEQ ID NO: 137879 - DNA, 798 bp, Homo Sapiens
cctacttctcttgattcctacatctttattgtccaacatggattctataggaagttttcatccgagcccattctcagttccgtgcccattctaaggttctatacctctggttgacctctaaatccctgctcctcatagtctagttactatgttatactttcttcttattttgtatttttttggggtctagaattttaaagtgctgacacttcctctggctggctttcctgtaacctattattaattgttattattagaagtttgcccaatgatttagattcaaacattaaatttaattctagttaattctcttcccctagatatgacaccaagagatattctcttagtaaaataatactatgtgcgttaaacttctctaagagaggacgaatgtattcctgcggaggagatgcatgtcaggtggtctcttgaataatgtgtatgtcctgcatctctcaccacttacatagtgattaattaaatcactctttcaaactaggccacccaatcccaaaattatatgcaataatttagtttgatttggtttgtttgggtatatatgaccataacttagaaaaattgttcaccaattaaaagtggtgtagacaccagtttctaatacacttttcctggcttctgtaataactcaagtctcagtctgagtgacggtccattgacacttctctgatttcctccaaaaagtaataaataaaggcttacttccacagctagctaaaaactaccctcctgaactaaatttgcctttcagtgaaggttggttaggtaacaaaggcaatg

SEQ ID NO: 137880 - DNA, 941 bp, Homo Sapiens
  misc_feature (225)..(248): n is a, c, g, or t
cggcatattaatgagatcctgagcactgagcatttatggacaatatggccttcgtttgatgcataaaaaggaaattcaacacacacacgttgttaaaaccgtgccagaagatgcgctagagttttctctcattttaattacaatcagtgccagtatctgtattacctgtgaaggcctccaagaaagggtcatggaagcttattgggaataatccctctcaattannnnnnnnnnnnnnnnnnnnnnnntcagatcattgtggtttagaaatagatatttgcatggaaaagttttgtatctcttctgctttcctctccgtgtaagtaaagatttgcaattgtaatgatcacccacgggcctattgacagtggattctggtgccgatcatcttattgggaagcctggggtgggggattttctgatttggtctcttgagtggcgggaggtttactgttccacgggctgttgttccccagcgcgggtgaattgttgaagtcctcctcgtcgtccatgccgattggccgcatcatattgcgtgttttctaatcctagtgattagcctttcgtccgtcgtccccaaactcacctccccatccagagttggctctcctaccacccatcacatcctgtgaaacagcagctgacattatttacagggaaaccttgggagagagaagctcagcttaaaataacagtgggaggagtcggggaatctaggacagacacactcgtgtactgtacaacggggtcaagtctcaatgtcgggggccgagacgcatatttgatttctacaggaaataaacatcgcctcctgatgtgtaacaaccacgcgagtttatgtccttagtgcgcagcctgacactggagaacgagcaatgctagcaatctctgaggaggactggaagtgactcctttcagggcccctcaatgcttctccttaa

SEQ ID NO: 137881 - DNA, 183 bp, Homo Sapiens
ttttaactgaagagtttattatactttcaacttttctgcagatgtaacattttttaaataaaaagttgagaataaaaaaatcacaaaaatagttttgctgaagaaaataccacacattcctttttactataatatttaatataataatatacacttatacattggtattatttacacttcatt

SEQ ID NO: 137882 - DNA, 599 bp, Homo Sapiens
  misc_feature (201)..(226): n is a, c, g, or t
  misc_feature (523)..(523): n is a, c, g, or t
  misc_feature (528)..(528): n is a, c, g, or t
gaaaaatatttttgttggaatttaagtttaatggctaaatatgaagactccttgatataaaatattgtgtttaaaatgtcatgcatgttatactgaaatattctggagatgtctgaagcagttctttaagcagcactgtgtattatggaaaaatgtttgtcttttacctagcatatttgtaaatagacctttaataagaannnnnnnnnnnnnnnnnnnnnnnnnnatatatataccattaaaaggtgggctaatgtggctttccactacagctcttaccagattttttattttcagtgtgatttggctggaatattaataacagttggttgacatgtattcacaattgcatgacttctctttggaggctggtaggttgagtattgttctttttatccatcctttcccctcccctaaatgtcagtcttcctgcttttaggattatatttgaattttcaggggtttatacaccaccactgggaggagttagaaggccactaacttgcagggcagttaacttatnatctnttacaagctacattctattttaaggagcctatttaggggtaacatttaaagatttgcttatcactgtattc

SEQ ID NO: 137883 - DNA, 762 bp, Homo Sapiens
tgagaatgctggtttaccttttatataataagtactgccaatatattaaaaggtggtgctgagcaaaaccattcaataaagatttgtcatttgatacatatggcacaatgtctgctgagaaagctaatcacactgattgatccatgcattgaatgtacgaagagttgaagggaaaggggaaaggatgataaagacaatgtcatgagatgtcagagaaaatactaatttcataatgcagctcaacaatagaaatcaatttcaaaatgaaatatgatgcataaactaagattaaagttagttaatgtggctgggcatagcagatgggactcttagaagaggtggcctccagggtggcagggccattgccctggctcaggctcctgttccctcctgggcccaccaagttcactgggccctcgcagcttccaggcccctcaggcattcagcttcaggtcgctgatgtatttctggacccacttcttattggggtcagcacagatctgccggcctctcttggttaggaggatgacacctggcttggggcactgggggctggtttcagaatagtcaactatgaacttttgtggaatctgccaggaggtatagacgaggcagcagagctctttgttggtaccaacttgtgcacaggagcagagggccatggtgcagacgaggacaaggagggcagctgcaaggcccttcatgatgctgggcaggcaaagaagtggtcagagtgagctggggcttggaaactcacaactc

SEQ ID NO: 137884 - DNA, 931 bp, Homo Sapiens
  misc_feature (274)..(316): n is a, c, g, or t
  misc_feature (455)..(468): n is a, c, g, or t
ggaagacgcgtgtcatagtgcggggcgcacataacggcgggaaagtcgcgcgagataatagccggcgcgggcgacgtggggcgaggcgataccctggccggcgaaggcggggcaggtaccgcggcggggcgtattttccgccatccagggcgcggccggatgcatggcgaagcgctccgccgccagcgaaaggcgtcggggttcgaccgagaaggaacaggcggggaagggcctccctcggggtagaagccccttctcctcatttgtgtgttcnnnnnnnnnnnnnnnnnnnnnnnnnnnnnnnnnnnnnnnnnnncacacaatgataaaccacttttctcttcttgctgtaatttttctttgatttgctctctggggatcaagacaaaacaaaatcattagtcttagatacctgaatttgacctcgcctcatagctaatgtgatcaagagtagnnnnnnnnnnnnnnaaatacaattaagacaaaaggactttatatcagcaggactttagggctgtggttccactgtttttatagtaaaatacactaatggtggggtagaggttggagaaggaggtggaaacatccgttacaaggcaacatgacagacagcaggaccctaactagactttaaggaattaattctattcagacggggggagccctacataattaagtttcacacttataaaattatcactctgaattcagggataagaggcatttggttgtagatacaattccatctgtagatactaactttaaatttaaagaagaaaaacattcattgcatttatattatgtgttgagtttcttacatattcctaaatccatctactaatttttttgttttgatacaatttacagctatggtaagatgattaccacagccctgattcaggtgtggtctttagcttcagaaagtccatcg

SEQ ID NO: 137885 - DNA, 660 bp, Homo Sapiens
atgggtgtggagatggagtatgtatttattttacaaaaataaatcaccatcttcggaccatttgtagactggaacatttcgagcaatgagtgcgccacacggacgagtgccctggtgactccctgatgttcgcgtcacccccagggccaccttggcgcccgcatgagcctcgcttcccactcccggcctccaactcccttccctcgcagccgccattcaccttctgctgtttatttgtctgcagagcgcctggacaccggaaaaggcgattccctgagcgcctggagttggagacaattcctggttcagaatttaaacatctttctaggtaagcgctgctccaaaactcttcgccgcgtgggactttgcaccagggcggttgggaggagttggccctccacggttcctggcaaccgcggcctgttgaaagaggttctggtcaatatttaacttcggaggagtttggagttggattcctttaagcttcttgccctgcgagtgcggggcctcaggcagacaaagagcctaccccaaaaccagcgatgggcaggagaagcggttgcagaaggcaaagatgggttgtggagagtcagagggagtgtgtttgtttcttcctgcaagccccaaacaaaccactacactgaacttcagggcaaaagc

SEQ ID NO: 137886 - DNA, 604 bp, Homo Sapiens
tagatcttaaagtgtttatctgtggtttccgtactgcctatgatacattataagaatttataattaaagtttattaagaggaaagattatgcttatattttaggggaagggggaatattgaactacatttatagtgattttgtttcaggtttttctgaggaattttaaataccctgtgtcctcttaatagtaaaaacagtttggagggtactctgagtttccttacaacctatttgtctctgaatagttttctcttaaaatttgacaaatattaaaaacattgtccttccttctttggttacagtggagtctcttctgttttgccaggaaagttaacatattttttttttcatttttgttcatcatttacaaattagatggtatagattttagcaaatagatctcaagaactggattcaattagcagcttttaaggacataaacattaaagggttagatggaaaagattgttttgactgactggataaatgacagggctgtgtttgatgtgtgtccaggaattggtctggagctggtgcccaacttctcagtccatcttgagaagccaaataaaatacttaacctaggcctcattttgttcaaa

SEQ ID NO: 137887 - DNA, 462 bp, Homo Sapiens
  misc_feature (418)..(418): n is a, c, g, or t
  misc_feature (427)..(427): n is a, c, g, or t
tgtttttggaagtcatcacagaattttatatataatgaaccatattataaatcgtaatacaacaaatatttaagtgccaatggcagaccaggcatcttgcaaaagttacatgctgaaagtctttaactttacaaccagaggttagagaaagggatgcaatttattagacacatttcacatttttcccatgaatcattaaatatttaagcaccataaaattcaagcatttcacatggatgtggcagccagccttggtggtttaaaatgcattatgcaaagtttctagcagataataacagtgacaattgcagagtactgatttttaatgtcaattgtttgttccctgcagaacttactgataatgtccctgcaggaaattgtgatattttctgtgctacagtaacctttgaggggttgnaatggaacnggccttccccaatggccattagggattgggccccc

SEQ ID NO: 137888 - DNA, 913 bp, Homo Sapiens
  misc_feature (23)..(23): n is a, c, g, or t
gaaaaaaatttttaaaagaaaanctgggaatctcccccccaagttaagccccaaaaatggtatataggttccaagtggggctatatggcccaaggaaaccaggttcccttgccgggaggctccataaaatggcaaattattggtccttttttggctttaataaaaaagggccattcccatatttttattgccattattctcccttattaaaaacatactacccacggtagctctcccccatcccccattctttgccttcccagatttttaataggaaaataactgttttagtctggccttggaaagtgaacccaccagcaccaccttcacctactcactcttcaattcaatatgcacatagcaaaagccaacacttcaaatctcttgcccacatcaaaaaaagtagtttcaggagaaaaacattaataccagttgaataaaaataagggcataaaagctatgagagagatagctctgccatctgtctctgggctaaaatcaaggctaactattgccttgcacacagttcagtcatgtatatgaaatccaaaaataaacctacaatctatacaaaaacaacacaggtttgtttttgtagccttgattgctatgtttaaaaacctaacaagttttatatggtatgaattcaacagtctcctttatattctgtacagtggttctttccctctaaccacaagttccattatttcattaatgtacaaatttgaacataattttttgagttcttctttatatataaaaatagtcaaaatattaatttcccctgtaagtatcttccaataaatcttgctgtcttccccgcttttttgtccacagtgcttatgaggaaacttctcgtacaatgatgagttcaactgtattctggaaagtttttagcaaggacactgcttgt

SEQ ID NO: 137889 - DNA, 882 bp, Homo Sapiens
  misc_feature (117)..(125): n is a, c, g, or t
actccctgccctttaagttttaaagtaatcccgcccgccctggccctcccaaagttgctgggaggacaaggtgtgaggcccccgtacttggcgggattcatgatttaaagcaaaggnnnnnnnnngaaataaattattctgctcaatactgtttggcataattgcattgcttttcatcaacactcaaaacagcctcttcaggaagcactgagatgggagtggcaagaactggctgaggcctagctctctaaaacggtgggggaggggggagcgccctgagagaggcattctactaaccccaccccaatcacccctatttttactctttctactttcggaattggaaagaacgacactcgagctaggttccaatatattaactttcaggggcccactgcccatcccaaccctcccctaacaaagtcccctgccggtccctgttccctcagccagctgcaggaacctaccaacggccaggaagctgcctggtggtgtcaactaagaaaagggggagcatctgcgccgtcactgttggggagggggctctattagtggtttgagagcttcacagaagccttccccctcctaaacctccccagcttcgaagggggagaattccaccagcagccccgtcagggacctaagctgggttcagccatgcaagcagcttccaggtggaaccccggccgcgagcttcccagcccttctagagcgggagatggagagcagggtggaggcaggcggcttgcggcgcgcaagtctcctcttccccggccggctcccggctgcgagctctgccagctcagaatttgcaaagaatctgcggtttggccacccacggcagcttcagcttaaccaaagaatgagccccaggcaaagttc

SEQ ID NO: 137890 - DNA, 588 bp, Homo Sapiens
  misc_feature (426)..(426): n is a, c, g, or t
  misc_feature (434)..(434): n is a, c, g, or t
  misc_feature (486)..(486): n is a, c, g, or t
  misc_feature (542)..(542): n is a, c, g, or t
  misc_feature (566)..(566): n is a, c, g, or t
  misc_feature (572)..(572): n is a, c, g, or t
ttgtagggttagtgtgccctctgtcagaaaattgggttttctttactatacctgcaaaattaccaagggttaccccaatattgtctagaggaattaaaaagaacttattctcagttgacaaaagtattactgttatacatagttaattggaaagttggccaactttggtcacctatttttgagtcttggctatgctttgtaattagttacatataccttctgagaccttcagataatcaatgggcctttccccattagaggtaggttcccagcctacaagtatttcctgtgatccatggcaagcctccagagaaaagattcaagctttgcactgcccttttgttgattgtcattgaaaacttactttatttcagaaagtatcaaaaataccaaattggtctttcagagagtatgtaaatctggggnttgccttngggatttcacttgtttaaacaccctcaaactttaaaaggaaggaaaataggntctccagctggtgaaaaatttttgtggccccaaataatatatttaattccaagttntaccagggtaactaagtaatgggngttttnctctcttttattacat

SEQ ID NO: 137891 - DNA, 513 bp, Homo Sapiens
  misc_feature (18)..(18): n is a, c, g, or t
  misc_feature (27)..(27): n is a, c, g, or t
  misc_feature (42)..(42): n is a, c, g, or t
  misc_feature (62)..(62): n is a, c, g, or t
  misc_feature (68)..(68): n is a, c, g, or t
  misc_feature (75)..(75): n is a, c, g, or t
  misc_feature (82)..(82): n is a, c, g, or t
  misc_feature (91)..(91): n is a, c, g, or t
  misc_feature (98)..(98): n is a, c, g, or t
  misc_feature (145)..(145): n is a, c, g, or t
  misc_feature (174)..(174): n is a, c, g, or t
  misc_feature (180)..(180): n is a, c, g, or t
  misc_feature (185)..(185): n is a, c, g, or t
  misc_feature (228)..(228): n is a, c, g, or t
gggggtaggttagggaanccttggaanaccccaacggggccnggtttgcgttcccccagggngcccantcccgcnggaaaanggggaacgngcctacnaattaccggggagggccggacttcctggttaaatccacaaaaaaccnagggaatggtccaaatgccagtaagaaangttccncccanaaaacgaagaagagcccactcctcctaatccttggcttggccnactgacccctgggcaaatcatgtgccttcccaagagcctcaattttcacaattataaaacaagagacacacagctgatctctagggctcttctcaactaaaacatatagaaacctttattcacattgccattcctttagaaataaatcatctctacaaattataaagaggatcgctcacagagaaccagtatcagtaagacagctaatgataatttcctgtgaactgattgataattactttttctgttaatcagccccgacaagacatctaaatttctatttgg

SEQ ID NO: 137892 - DNA, 1814 bp, Homo Sapiens
  misc_feature (32)..(32): n is a, c, g, or t
  misc_feature (50)..(50): n is a, c, g, or t
  misc_feature (127)..(128): n is a, c, g, or t
tttcccagctctttccttgggatctgccagtnaatgattttgcccattanagacgggcaactcgaaaacttagctaacatggcaggtcgaagaacatcttcccctatatgctcagggaatactttanntgggtctctcagggagtctaagaagagctggtagtacttcagtgctgacttattaagattatttattttttttacaatgtgtgaatcaggatcccttagcctgtcagcaatggcaaccttcaaatccatcatatcatagtaagcatgtgcaatttcaaactggatctgtctgttgaccaacagataatactgtggattcaggtctacagttaggggctctagcatggctattctgcgtttatgcatcttgcaccgtctctccatgtcagtttcaaagaatgcaagcaccttaaacagagcactgtggtcttggacaacttcaatatggtcagtgacataaccatcaatctgaaagaactcttttgcctcaaagacatagtgctgacccaataagaaaagttctctggcttcttcaaaatctaaaggtctcaagtagctcactttctcttctactgcagagatggcatcacacagttcaccggttccaaactgcacagcttttttccgaatgctttcctcctcatctagttcttttttccttaaagctctaagttcagactgtttatcaagatcaagctctcctatgttgtcctgcatggagagttgggcattctgcatgagagtcaaacagtatttgatccagcaccttgctatttccccctttctttgatgataaagctctggcacttctccttcagcttcaggagtgtcttctgtggctgagatctttccagtttgaccaaaaatgacattagcagctgataaacagtgcctggcctccataaagcatagcttattgatgtaaaactgtgacaaggtagcagcattgatagcccactctataggatggtaggcattgtgctcaagctggcgttttagtgtactatggcaatagtgagcagccttctcaaacatttccagatgctggtagacttgagctaggtaatataggttatgagtataaaccttttcaaatctttttgatctctcttgttcagtaagtttctcttcttcaggaagaaaacgctcagtaggatcaaggaggaggactcccaacctctttcatatactgattatatagtgcttctgatgactctaggtaagcctgtgcagatttcaatttcttctctttcagaccacaagatacccaggttattctgcgcctggatgcagagagagatgcagtcgtgcgagagccggtacctgcgcagcagccgcaggcatttcaccaggtgctcctcccccgccgacagctcctccgtgtcgatgtggttcaccccgaggtggaactcgatgactgccagcctcaccgctcgctgggcgacgggcccctcgggctccaccacctcagccggcagccccagggcgtggtcaccggcacccgggctgtcctcggcctcaggccgctcatcctcgtcctcaggcgcagggccgagcagcgccttgacctcttccagtagcgcccgggcgctgtatttggacttgtatggttccttctccggatttttatgcagttccacccgcgacagagcgagcgccgcctggaatttctcgcagacctctgcccacggaacgttcgccatagcggcctctactgcctggctttcctcaatgtttgcagtcgggactcccgccttccttctgctttgcgacactttacttacggctctcgacacgttgcggccc

SEQ ID NO: 137893 - DNA, 435 bp, Homo Sapiens
tctatgattatgtaagaaaatattcttcttaggaaatatatactaaagtatgaaagggtaaaagagcctaatgtatgtatccttctctccaatggttcagagagaaaaataaaatttgattccaagcgaggaaaatactaaaaattggtgcatttagaagggcatatgatagctcttctgttcttgcaacttttcaaaagtttaaaataatttcaaaataaaactttttttaaaagctatgtaaaacatgcaaaggtaaacttactgtcttctgtggctgagatctttccagtttgaccaaaaatgacattagcagctgataaacagtgcctggcctccataaagcatagctattggggaaataaacaacagtgaatgcaactatcacacagctttatttgcaactgatacttgcataatttcttttaatatggg

SEQ ID NO: 137894 - DNA, 387 bp, Homo Sapiens
ccaatcaaggtctgccaaaggaaggagtctgcaaatgacatttctcataatcaaacacactcttaatttgtttttatattattcactccattttttgattattataacttttaaaattatgtctagtagttttatcaattgctgagaagagtgttgaagtccaacttacaattgtggatttgttgatttcttctttcagctttattggttttggtttatgcattttaaggctctgctcttggtgtgtacacatgtaaaaccattttgtcttcatagtaaattaatttttaaaaatcattatgtaatgtccctctttgctccagtaattctttgctctgaggtctactgtattagtattaatatagcgacttctacttttaagttaaa

SEQ ID NO: 137895 - DNA, 995 bp, Homo Sapiens
  misc_feature (482)..(484): n is a, c, g, or t
  misc_feature (486)..(486): n is a, c, g, or t
  misc_feature (495)..(495): n is a, c, g, or t
  misc_feature (497)..(501): n is a, c, g, or t
  misc_feature (504)..(511): n is a, c, g, or t
  misc_feature (514)..(517): n is a, c, g, or t
  misc_feature (519)..(519): n is a, c, g, or t
  misc_feature (521)..(539): n is a, c, g, or t
  misc_feature (678)..(691): n is a, c, g, or t
cgaaggacgcccccgtgaaatcccacaagaaaaatccaaaacaaaagaacaatcccccctgcgaaacccacgaggccttacacggcggcgcaatctcttacgccccgcgaggcggaaaccaccgctttttaaagcgccgcaccaacctcccgccccgcccgagttgtaaaacccacactattaccccccgaaaaaaacgttttttcgcccgcccgggggtgcgccccccacaacaacctccctagcggtccctcgtctccaaaggtgtctccccccatacaccttctttctcaccggtccctttggtgctccattcccccaagagtccccacaatgtttcccccgtcatccccccgttccaaaaaaggggggccccccgtcggggggagaaccttgcggcaaagaaaaaaagggcgccccccctgggccaggacacccttgaggaggccctcaccctgggccccccccgagcctctttttcnnncngcccccccntnnnnnccnnnnnnnnttnnnntntnnnnnnnnnnnnnnnnnnnataaaacacatcacaattttattgcttgaagaatacagcatatgaaatcacaagaatgtcaaaatgaaaagtcactaggcttcaaacgtataatacattatcagatgcagtaaaatattaacctgaactctgcatcagnnnnnnnnnnnnnnggtgtggaaaatatctaagttgtttacttaagaaacagatatacttaaaatagaaagtataaggatgttacagtacaaattagaaaagccaacacgtattaacttatcgttctagactagactacctttggtacttaaactttttaaaaaacaatttcttctatctcatccaaatgcacttcatgggtatgacatccatgaagtaacttcaacttaaaacattcagcaaaattaccttttcacttcatgggggaagtatatttaataaatgtataacaatatttcccttttaccggacgcgtgg

SEQ ID NO: 137896 - DNA, 568 bp, Homo Sapiens
  misc_feature (46)..(88): n is a, c, g, or t
  misc_feature (126)..(126): n is a, c, g, or t
tgtaaagagtacttattaatttcatctttatcctgtacttgggtcnnnnnnnnnnnnnnnnnnnnnnnnnnnnnnnnnnnnnnnnnnntaaataaaatttaactgatacgtatatttaatctcaanaaagagctttacatttatacacaatatgtttcattctactagttttaaactttctagagtttggaagtccttttcttcctgtctctttttaaaaatccaaattcttttattcagagtatacaccctctgtcatgggcatctgctgctcttgcctccctggtgaagccgtcctggttttcttgtggaacatcatccttcacatagcaatccatgtgctgtggctgggctgaccatcctccacatcccgaggcaggcgtgtgacccaggcagggccaagtagcaccagcctggcactttcctccaaggaggatacagggatgagcctggcggggggtgtgtgcaacgcagaggacagcaggtcccgcaggggaagagatgaagtgctgatgacgctctgtgagccctgcgtccagccaggcctgtgccacccaggtcttcctct

SEQ ID NO: 137897 - DNA, 711 bp, Homo Sapiens
tttcgagtccctttgttagcacccgcgtaagagcggccagcccaatggcctcggtctctgattatcagtgtaagtgctgagaaacagctcgcctggacaagtggatgggaacccgggacttgccagtcatcctacccactctgtgaaagtcctcgcaggtacacccccagaattcacgatgaaagccacacttttaagttcccagccctgctccatcatttactaggtgtgcaacctcaggcaggctattacagcctcctgtgcctcagtttcccccatctgtcatctggcaatgcctgccttatgggatggggaggattcgtgggtcctatggtcagtaacgatcaatgtgattttaatggtctctcagggggcaacgaatgtagggctttcatctgccctgcttaaagccaagaactggaaactttctggtttgcaggatcaatacctagtcatggggtgcttgctgtctccacaccccaatcacctcctcccgcttttggggagggggagctgggtgaggtcaggaggtggaagcggaggggggctgtgtcctcagatgcctctctggcagggtgctttgggttgggaggcccatttgtaaaatgaagatctaactattgattaccttaaaactatcctcactcactgcaagtaccctctccccgcccccacctgctttagggctcaccctagcccaagtttactcat

SEQ ID NO: 137898 - DNA, 606 bp, Homo Sapiens
catatatgtatatttaatgagacaaaaacttgattcttagttcatagacatacaccaaaatgttcagcacaaatactcaagaaaaatgagatatccaccaaaagaacaagtcttattttctacttccatacttagattttcttcttaaaactttaaacagctcagcatggcaatagaagatgtctgctgaagtgggtccatattgttccaagtgtgcctgcacgtgtgtttacgtgtgtaaatgttttaccaatgtcctttatggtgggtcccctggatgattactttactcccatgttgcttccagctaaattagatttgaatagtattactgcattttaatagaagatataaacctcttttattctgaatactttgctattatgatagtaaaatgaattaataggaattaaattgctaacatggattaaaatagcttttaccattgtagaagttttaaaaaagtcaaacagaaagaaatatttattattataacacacgttactatggagagtatttttaacttccagaactaaaaataatatttggtatttacagaactattttatattcatattgcatctaacccctaattgcttattttct

SEQ ID NO: 137899 - DNA, 766 bp, Homo Sapiens
  misc_feature (233)..(251): n is a, c, g, or t
ttttccaagaaaaattatttttattttaagaaaaaaaagtttctatttagaagtaaataacccagtacgattgtggaaaagatgacatggtagtagcaccctgtcctaccctggtgataacctcaggtatgttacacagcttaaaagcatgtgcaatattacctttctttttaacctaaatcatctaactgatgggcagaaaaggtctcagaatagttgcttttcttgtttgnnnnnnnnnnnnnnnnnnnctggtcggcgtagctttgtggacttttaagtttaagcagctttatctataatgtgggagcatggttctgtagactaccttgctaaacttaggactccttttacaaacacattccagtgctcataaagaactggtagtattagctcagtgtaccctctaaagagtatctcccccaccttgaaagagtgtattctcaagattcttcttgggcagttttgtcccccttaagtataaccactcatagaatcctgcctatctgccctctcactctggttggtggagtgtcaccttagcactctatgaactactcaagttcacagggaactctcagccacaacttgtggctccttctcactaagtgtggtcatggaccactctctttgtaaagcaccataatctaagacagagcaggggctgtggcagcccgtggtaccgtggtcagtcacagcagcttggtgtctaccagccacagagaagaccccactgtatggaggctacaattaaccaaacaggatt

SEQ ID NO: 137900 - DNA, 357 bp, Homo Sapiens
  misc_feature (90)..(90): n is a, c, g, or t
catacgttcaagtctcggtgtctgaaaaaacccctcgcggttggctgaagtttcttcatgaactctgctgatggtgttcccagctgctcnaataactttattccactgcatcaatatggtcagtgccttggaatatcacacaacctttcaccagctctcccatgatgcaacccactgaccagatatcaacgttctctttgtagcccatacccaggatgacttcgggcgccccggtagtcccgtgtcaccacgtaaggggtcatcatgaagttagtgcacgctgtccgggccaggccaaagtcaaggatcttcagggtgcagtctgatttcacaacaatgttgctaggcttcaaatct

SEQ ID NO: 137901 - DNA, 383 bp, Homo Sapiens
  misc_feature (77)..(77): n is a, c, g, or t
atgttgaagtaatgaaaacttggagcttcccgtttttagctttccatgtgaatgcccatgtctctccaagaggtcancctggagctctgtgcaacaagggccaccccacttggattctgtttgttacttgtactgccctgtcagtttttctgcccagcactgaatttttcagtacccaagacttcatccttgatcttctctgctctctctcattcctgctgccttgatgaagtgtgttgcccctaatattttattttacacagtggaatttgtgcccttccagctgcagctgcttttaggtgtggagagaaggacttataaaaaggcgatggacaggcgttcttctttttgaattttagaccaagtggggctcaatattttac

SEQ ID NO: 137902 - DNA, 241 bp, Homo Sapiens
tatacacaatttaaatttgggaaggctccctcaacaaaatcatcttattttcccagtttcaaaaaaaccaagttctgaagtggagattaaagacagggtctctttatttccccagtgcaagtctccctatctatttatttgtgaatgaatgaaattagttaattaatgagcccagggtttcactttgtcaccccaggctggattgcagaagaagtcatcgtggccaagcgtggtggctcat

SEQ ID NO: 137903 - DNA, 557 bp, Homo Sapiens
aactcatatctgttaattctccccaaatcaggggacacaaaggctttattttttattgtgatgagtgggtaatcctaaaataagcaggaaatgcctgtggttaagcctaactcaaggtgagacgaagctggagctgggagctcgaaagtgtcccccagctccctcctcactttgcctgtaacgccacctctgcagaaggtaaagtagaattggtagctgtgtcactggtttgggttgagtcctcggtcagggccctctccagactggcgggaagggcgtggatcagcctctcccggaagtcctggcccatgaagacatagagcatggggttgaggcagctgttgaagaaggccaggggcacttgtcacatgcactgcaataccaatttctttgtgcatgccttgcaattaactcacggattctgacttgggctagtaaggtcaccacctgatatggcgaccagcttaggacaaaggcttgtgctacaaaggacaagacccttataggacgactggacctaatcaagccctggtttgggaacctggtggcattagccc

SEQ ID NO: 137904 - DNA, 417 bp, Homo Sapiens
  misc_feature (295)..(295): n is a, c, g, or t
  misc_feature (350)..(350): n is a, c, g, or t
  misc_feature (363)..(363): n is a, c, g, or t
  misc_feature (372)..(372): n is a, c, g, or t
  misc_feature (387)..(387): n is a, c, g, or t
ttttgagaataacattttgccataaattttatagatatttaccattaatccatttgtagtcctacaacatatagttgattacagttatacattttttgctgagtctttggttcaaagcatgcagttcccaattacaaagacattcctaatgggaataaaacatccactttgtgactgatttaaggttgttttcttaaaggcacaccgcaggccaaaagtgggacacagctttgaataggcaaatttttttcctttttgttgttgttggcttcatcccaataactgtttacccaanttcccgtagggaaagtgttggcccactccccacatcggacctttggggaaggccntaaccattcagcnttgggtgtnctattacaccatttnattttggggaggggttccctcaacaatcca

SEQ ID NO: 137905 - DNA, 1604 bp, Homo Sapiens
  misc_feature (1356)..(1356): n is a, c, g, or t
  misc_feature (1486)..(1486): n is a, c, g, or t
gggacgtcacgtgagagtgggcggagggggtggaggtttgtctccgctgtttcatctctatggctgtcagaggtgggcggctttgaccgagaggctgctggagctcgtgtttggacgcgatgtttcgtctgaactcactttctgctttggcagaactggctgtgggttctcgatggtaccatggaggatcacagcccatccagatccggcgaagactaatgatggtggctttcctgggagcatctgcagtaactgcaagtactggtcttttgtggaagagggcccatgcagaatctccaccatgtgtagacaacctaaaaagtgacatcggtgataaagggaagaataaagatgaaggggatgtttgtaaccatgagaaaaagactgcagatcttgcccctcacccagaagagaaaaagaagaaacgttctggattcagagacagaaaagtgatggaatatgagaataggattcgagcctactccacgccagacaaaatcttccgatattttgccaccttgaaagtcatcagtgagcctggtgaagcagaagtgtttatgacaccagaagattttgtgcgatccataacacccaatgaaaaacaaccagaacacttgggtctggatcaatatataataaaacgctttgatggaaagaaaatttcccaggaacgagaaaaatttgctgatgaaggcagtatattttacacccttggagaatgtgggctcatatccttttcagactacattttcctcacaactgttctttccactcctcagagaaattttgaaattgccttccagatgtttgatttgaatggagatggagaagtagatatggaagaatttgaacaggttcagagcatcattcgctcccaaaaccagtatgggtatgcgccacagagatcgtccaactactggcaacaccctcaagtctggcttgtgttcagccctcacaacctacttttttggagctgatctgaagggaaagctgacaatcaaaaacttcctcgaatttcagcgtaaactgcagcatgatgttctgaagcttgagtttgaacgccatgaccctgtggatgggagaattactgagaggcagtttggtggcatgctacttgcctacagtggggtgcagtccaagaagctgaccgccatgcagaggcagctcaagaagcacttcaaagaaggaaagggtctgacatttcaggaggtggagaacttctttactttcctaaagaacattaatgatgtggacactgcattgagtttttaccatatggctggagcatctcttgataaagtgaccatgcagcaggtggccaggacagtggctaaagtggagctctcagaccacgtngtgtgatgtggtgtttgcactctttgactgtgatggcaatggcgaactgagcaataaggaaatttgtttccatcatgaagcaacggctgatgagaggcctgggaaaagcccaaagacatgggtttcactncgcctcatgcaggccatgtgggaatgttgcacagggaaactgccttgggactttcgcttttacccaaacagttaaaccccacacttgcaagtgggggaccctttccaccccccagtta

SEQ ID NO: 137906 - DNA, 887 bp, Homo Sapiens
  misc_feature (810)..(810): n is a, c, g, or t
taaaaaaaggtagggtttgggaaggggctgaaaccccaagcccagactttgaggggtgttgccaggtaagttggaccgatcttctgtgggcgcataccccatactggtttgggagcgaaatgatgctctgaacctgttcaaattcttccatatctacttctccatctccattcaaatcaaacatcttgaaggcaatttcaaaatttctctgaggagtgggaaagaacagttgtgaggaaaatgtagtctgaaaaggatatgagcccacattctccaagggtgtaaaatatactgccttcatcagcaaatttttctcgttcctgggaaattttctttccatcaaagcgttttattatatattgatccagacccaagtgttctggttgtttttcattgggtgttatggatcgcacaaaatcttctggtgtcataaacacttctgcttcaccaggctcactgatgactttcaaggtggcaaaatatcggaagattttgtctggcgtggagtaggctcgaatcctattctcatattccatcacttttctgtctctgaatccagaacgtttcttctttttctcttctgggtgaggggcaagatctgcagtctttttctcatggttacaaacatccccttcatctttattcttccctttatcaccgatgtcactttttaggttgtctacacatggtggagattctgcatgggccctcttccacaaaagaccagtacttgcagttactgcagatgctcccaggaaagccaccatcattagtcttcgccggatctggatgggctgtgatcctccatgngtaccatcgagaacccacagccagttctgccggacgcgtgggtcgacgatatcgggggaattccggaccggtaccag

SEQ ID NO: 137907 - DNA, 1168 bp, Homo Sapiens
  misc_feature (115)..(124): n is a, c, g, or t
aataggtgtggcacggggtttttaccggcgtggaaaatttttgggagggggagagtgttttttggaatattgtgcaaacgtttttcccctctttcagagattccagactctcacnnnnnnnnnntgtaagggttttgtggaaggggctttgaaacaccccaaaagcccaggggctcttgaaggggtgtgttttccacaattatagtttagaaccgaatttcttctggtggccgccattacccccattcctgggtttgggggaggcggaaatgaatgctttgtgaacccctgtttcaaaatttcttccacatattcttaccttttccccattttcccatttcaaaatcaaaacaatcctggaaagggcaattttcaaaaattttctctgagggagtgggaaagaaaagttgtggaggaaaaatgtagtcggaaaaaggatatgaagcccacatctccaaggggtgtaagatatactgccttcatcagcaaatttttctcgtccgtgggaaattttctctgtctttccatcaaagcgttttattgtatattgatgcagacccaagtgttgtggttgtttttcattgggtgttatggatcgcacaaaatcttctggtgtcataaacacttgtgcttcaccaggctctctgagtgactttcaaggtggcaaaatatcggaagattttgtctggcgtggagtaggctcgaatcctattctcatattccatcacttttctgtctgtgaatccagaacgtttcttctttttctcttctgggtgaggggcaagatctgcagtgtttttctcatggttacaaacatccccttcatctttattcttccctttatcaccgatgtcactttttaggttgtctacacatggtggagattctgcatgggccctcttccacaaaagaccagtacttgcagttactgcagatgctcccaggaaagccaccatcattagtcttcgccggatctggatgggctgtgatcctccatggtaccatcgagaacccacagccagttctgccaaagcagaaagtgagttcagacgaaacatcgcgtccaaacacgagctccagcagcctctcggtcaaagccgcccacctctgacagccatagagatgaaacagcggagacaaaccatcccgggaattccggaccggtccc

SEQ ID NO: 137908 - DNA, 475 bp, Homo Sapiens
  misc_feature (337)..(339): n is a, c, g, or t
tatgttttttggtaattttttatttagatataatgccacgtttatagaaaagttgcaggaatcgtacaaaaaactcccatacaacttttcaccaagattatatacattcccctcatttgttttgtgtatatgctaatacatcacaaacacacaaaatactttttgaattctgattgaattataaactttttgagtacagattgtaagcaaattgaggtctgctgaaatgtttgatcaagactacattccatttcatgcttttacattttctttatttctattatttccccataataagagttcggttccagaaagaaaaatgtatttacattttttnnnccttgtaagtagtgacttaacttcatatatttgtgaggatgtaactatactttctcaaggcctatggcactttccaataataggctgagtggtttattgagtcaaagtcagtcctgtaagatacggggttatcact

SEQ ID NO: 137909 - DNA, 597 bp, Homo Sapiens
  misc_feature (97)..(97): n is a, c, g, or t
aagaaggctcagcaggctgttgccaatagagctttgactgaatctacgcttcccaaaccagttcagaagccacccaaaagtaatgttaacaataacncaggcagtataactccaactgtggaactgaatgggcttgctatgaaaaggggagagcctgccatctacaggccattagatcccaaagcccattccccaaattatagagctaattacaactttcgggtcatgtataatcagaggtatcattgcccagtgcctaagatcttttatgttcagctcactgtaggaaataatgaattttttggggaaggaaagactcgacaagctgctagacacaatgctgcaatgaaagccctccaagcactgcagattgaacctattccagaaagatctccttagaatggtgaatcaggaaaggatatggatgatgacaaagatgcaaataagtctgagatcagcttagtgtttgaaattgctctgaagtgaaatatgcctgttagttttgaggttattaaagaaagtggaccaccacatatgaaaagctttgttactcgagtgtcagtaggagagttctctgcagaaggagaaggaaatagc

SEQ ID NO: 137910 - DNA, 889 bp, Homo Sapiens
tctctcttctttttctttggctttgttaatccaaataggcgggtagtagtcagaggtgtgacgcaggggcctggctctgcctttctggtcctttgtttgtctggctggttgaactcagtatgtgaaaaggccccttatctttgtgtgtccgagagatgctgttcctttttggggacactgaaagttctgagtccaatgaccctgatttggctatggaaggtgcagatggcgaggggggctcctcaggactggggaagaacgatgggatcctcatcagcttggtatgtggatgggaaacctgacacaggtcccgttctgtctgccgctggctgagccgctctgcctcccggcgcagctgcctcctgttccctctcaagctgtttctgggcagcacgcagtcgctccaggtcatactggtatgtgcccttcttctgctggagctcctcccgctccttttccaggtcctgctgcccctgctgcacctcctcctcgcgctgggccaggagggcctcccgctcccgcagctccctctcacgagcttcccactcacgctcgcgcctgcgcttctcctcgaggtactgggcctgctgcttctgcaggttggccaggtcctggcgctgcttctccagggtgcgctgcttctcctgctcaatgagggagctcgggcgggacaagctgcgagtgagcgccctctcgctcagcaccagtttctggtcctcaatgtagctgtcctgctgcagcaccacaccctgggaggcacacagaggggagccctgcaactctggccaggacgacagcgagcttctggatccctcccgaccccacagcagggggcaccaggcactatgacggactagaactctcccctcatttttcaagcccgtctcat

SEQ ID NO: 137911 - DNA, 900 bp, Homo Sapiens
cagtcgacggtaccggacatatgcccgggaattcggccattacggccggggattgattgatcttggaccacgaaagaaaattatactgacagcttccaggtagggggcagttgtagctttctgcagatgttgccaaatatattgggggtggggagcagcaaatgccatgtgttgctttttatgacataaggagggattccacccccatcccaataaaatcggtgctttgacaaaggagggttcccaggcagctaagagaacccagagtagatgatcctctttatctctggtttaacctgtgactaggattctttggtgtaagctcggcttttccacttatcctctaaccggaacaggcttctataatctctttgccttaaaataattatctgcatccctgtgtagagcaatcttaagcagctctccttgtttcttcagggaatgggaattcttttctaagtcgccccatcaaaggtactactggttttttacaacgccggcgtacgtgtatgtagtaaaagtattaacagcattaaaggcgatatttttaaccatgtctatacgatactacttgggggagggcagctaatgaaaccttcaagctctatgcagtccacagacgtgagctctgtagagttcgcagaggtgggtaagtacccagccagacacagcgcaggttgaattcacggccagggatttattcgagttgggcatcaccggacgctgacaggcttccaagtgaaaacccttcctcttggatatgtgcaggtttcccatccagattaccaggctgatgaggatcccatcgttcttccccagtcctgaggagcccccctcgccatctgcaccttccatagccaaatcagggtcattggactcagaacctttagtgtccccaaa

SEQ ID NO: 137912 - DNA, 672 bp, Homo Sapiens
  misc_feature (481)..(482): n is a, c, g, or t
  misc_feature (497)..(497): n is a, c, g, or t
  misc_feature (505)..(505): n is a, c, g, or t
  misc_feature (529)..(529): n is a, c, g, or t
  misc_feature (544)..(544): n is a, c, g, or t
  misc_feature (555)..(555): n is a, c, g, or t
tttaactaggcaaaggctttatctttgttttaaactattttctggctaattaattgccaataaataactgtatataatcaataattaaaaagcagtgtccaagggtcttggaatttatagacttacattttatcatatataaaacaaaaattttaaaagcagttaaaattcttgaaattgtattattttttagaagctgaatcaattcagtttgcctcactgttggaagcttcatcaaaattctgaacaagatcaccacttccccaatagtaagtggtacttttccatccagcttctgccagtttccttaagcttgttgacaccaagctggtttaagacactgggtggcatttctgttagctgctttgtctcagcatgtctggtaatggtcaaagtgttcgctgctagagatgtctgaacgctgggattgttaatgaagatcaccattccttggtttgcagacatacctctttagtatcanngatattgcctatttntactttcnttcaggaaaactgaagattttttntatcatctgttttancagataatgtntgctgtatcatctgagggcagttcctttttaccagtgcacaattgtgcttgaaatctggcaagtttttcatggtttgtgagggctttttcattcttataatgaaaacgaaagtggaa

SEQ ID NO: 137913 - DNA, 640 bp, Homo Sapiens
cagagaaataagcttttaatggcgcaatgttgcatatacgggtaacttgttctttgagaaatataaactcaaactcacaagttgtcatgataacatatgcagtaatatgaccattctacaacagagtcacccacaggtaaaacacatgactgggctttgagctcacaccaatttacacagcatacagttgtgctacaaggagaatttcttcatcatttattctttagttaattgaaacatagtcaggaaaaaatggtgccaattccccccaaacaacacatggatgtttttgcttcttgacccacttagagtcccaaaaggacaaaaaatacatggaccaatattagttcacgaaacatgttttaaagaacagagaatgaggtcttcatcccacctcagtaaggcttgggctgatgaagagagggtgtattcagggtcctctcttgtcatatgtacaagctgacgcttgtttcccaagcatgatagtagtgggtagactgcctttattgttagcccctaatagaatcagtcagcacaatgaagaaattccaaagagggcagtgaagtgacaacagcttcagctcgtcatcgatgttatacagaaacacaaaaggaatccccggcctgtgatgaaggagag

SEQ ID NO: 137914 - DNA, 605 bp, Homo Sapiens
tttgctgtttgttgtgtttatttttgctgaaataattttgtaaatccgatattcattgttgtgtttggccactgaagtctctgtttggttagcttagtggtcagctcgttaatggacagagatatccttaaatgcttccaactggtaagcctcccagcctttgtcaaggggctctgtgtttttgttaggggatgccttcatcacccaggcaggcagtttgcaactctgccttggttttcgctgcctgcttactcagtaagaaccaaaagcacagggccttctcaagtcttctctggcatgcccacagccctgatcgtgtgagtggggttggagattcccaggaatacgatggagcttttcaaagtcccctatgacatctcatggcccagcttttccttttccatttattggtgagcttcttgtctgccctagctgttaatgccacttgaggcggctttgtgaagctaaacaatcgtctataattgtttaggagaaacatccaaaggctttttgcaccagacaaacttgagtcacttcaaataaagacaacccctgtgagagaaagtttccaggtttgccatacaagtcatatataatgacaattt

SEQ ID NO: 137915 - DNA, 444 bp, Homo Sapiens
  misc_feature (244)..(244): n is a, c, g, or t
  misc_feature (251)..(251): n is a, c, g, or t
  misc_feature (347)..(348): n is a, c, g, or t
tatatatgaaggggagtttattaaagagtattgacttacaaaattacaaggtgaagtcccacaataggtctgcaagccaggaagccagtccaagtcccaacacctcaaaaggagggaagccaatattgtagccttcagtctgtggccgaaggccccagagcccatggcaaatcactgatataagtccaagagtccaaaagttgaagaacttggagtctgttattccagggcaggaagcctccangcatggngaggaaagatggaaggccagaaggactcagcagggtctgttctcttccatgcctccctttcacacatcggcagctgattagacagggcccacccannggctgagggtggggtctgcctctcccagttccactgacttcaaatgttaatctcctttggaaacaccctcacaaacacatccaggaacaatacttt

SEQ ID NO: 137916 - DNA, 673 bp, Homo Sapiens
cacatatactgcttttactatgtgtcagggtctggcaggccttgttgtaagcattttacaagtagtaactcatttaatcattaccaccccaaaatgtagatactgttattatccctttacagagtacggaagtagagaggttaaatatcttacccacagtcacccagctagtaagtagtagaaccaggatttgaacctaagcagactagcagaatcggtgttcttaaccactgtactatactatctctcaaacctccattccagctagggaagctcatttgcagattagtactatacaaaacaaaatccttttgtaaaaattaattaggtcctttaataaatatatatatattttatacaggtacatccctttatcatcaaatagcctaaataagaactttaaaaatttgaatagttatctttgctattaagaacactcaattatagtcatagctacaggtgacttttgcaacatgtcatatcaaagaatacttttttgtctatccagagtgtttagtcacaaattaaattagattaatagtgaacttagccctagaactagtattttatatatcatttgttgttctcttacaaataagcatataccactgtctcactggcagtgtactgatttatgatccagtcaaatggatatacttaagagctgccacga

SEQ ID NO: 137917 - DNA, 726 bp, Homo Sapiens
  misc_feature (404)..(417): n is a, c, g, or t
tgcaaagaaaatttttgttgctttatttaacaaaatttatgccaactcctgtatctatatacaaacatgtttcaaaaccagagcagcagacacacaaactgttaacacaggaattacaataatgcttaaaacatgttacacaatgttttgtttctgctcatatagacatttacagatttaaaaattattccaaaggccgagcaacatcacatcttcaacttctgagatggattatatataacatgtcctaaagaaaaagggatggagcttgtgagaaaatatattttgttcagtctagttcaacagacagcaggtggcccttaatgaaggcttacaagatgttctcgactggggatacaaaattgaatataatatagtctatcagagtatactttgggtcaggnnnnnnnnnnnnnnaacttttactgtatttgcctatatcctaaatataacaatctgtcacttctggtccaccaaagtaagaaaacctactttaaaaaataagttgaaaatgattttattggcagtattaacaaaatgtagtgattggaggtccttcaaaattaagaacccacacaaatactcaacacaggtctgcccctactcccttgtattgttagaaatgtgtttatttcataacatgtacctacaggttaagctatcttctaaagctctttagggaggacagctactttttgctttcccatttttgacttccagaaacac

SEQ ID NO: 137918 - DNA, 235 bp, Homo Sapiens
cttctgccgtcgccttctctgcctcttctcatcctttctcgctctgctgctctgcagtgtgacgagtccgaatcctcttcccacccagcccgcgcctttcttcttttgcctgcgctgttctatttctccttcggccgccgccgccactgctgcacacagctggtgtcggtgccgcgcttttacccccttctgtcgtcttctcgcagccgtatagtagtagtaggcggccgctcta

SEQ ID NO: 137919 - DNA, 1399 bp, Homo Sapiens
gcataattgcctggagaatttcttttggccaagcgccctggggagaccttgaaaattttagcccgccaatttatttgggaccattcaaagtttcccttagccgcatttccaaggagaatgcctaccagttcgttccgggggtagtgccaaaacttccaggttaccgttgttcgccgtccaatattatctttggttgcaatatgtagtaagacccttaagagaagggggagatgattggggcagagttggtttacatcatcatcagcacatgtgaagcctgaagattgtaggaagtgtgttgattatgttgccagtgctcccaaatccagcgacggatgaatcaagtgaacgtaatgaaaaacaatcttggcatttgggtgattacgtgcaattttcttcaattcaatttcattgtcacatgtcaggatattcactccaacttttgctgcatactttatctgagacacttgcttgcaaggacttatgtaaataatgttttctggtggtacacccaactcttgcactaaagccatttcatttttactggaacaagcaaatccggttccaagagctgccaaaatctcaagtacagctggagcagagttgcacttcagctgtgtagaatggctttatctgggccactacattctgccattgactgtgtttcttcacaatctttccaagatctcccacaaaaaatgcatttttccctgtcagggtatgttcataaacatagttatcaataacatttccaaggtttgttccttcatccaacaggccaacggagtagtttgcatcatcaataaatcctttcatctcagccgtattccacaaagccgaaagtcataaaccaggaaagacaagagacgggccaccaagcctatgtctgggtccttagaatatgcaacaaaatggacaagttgggagatggaacccccctatcatcagctaggttcccaaggtggctcagcgttgaagtcgaactgctctctatacagcacttctcctaggccctctgggtagttgtatacttggtcagaaagttcgccgtgagataacggcccaaagagtcgggtaaagcgtcttctctttttcggcggaatttttaaagagggatgtggttaccttgagcagaaatacccaaggcggcctgggccataggctgcgggaacgacttgggggtaaaagcgcggcaccgacaccagctgtgtgcagcagtggcggcggcggccgaaggagaaatagaacagcgcaggcaaaagaagaaaggcgcgggctgggtgggaagaggattcggactcgtcacactgcagagcagcagagcgagaaaggatgagaagaggcagagaaggcgacggcagaagaaaaaaggaaaaactgcggccgcgatcctcgtgcc

SEQ ID NO: 137920 - DNA, 831 bp, Homo Sapiens; identical to SEQ ID NO: 15596
  misc_feature (730)..(730): n is a, c, g, or t

SEQ ID NO: 137921 - DNA, 1322 bp, Homo Sapiens
  misc_feature (314)..(334): n is a, c, g, or t
cccagcccacgccctatcttcctatctcccaccagaggtttttggggtttgtgaatcaggaatgaatgatgccctccacaaaaagtgacttttctttcaagggcatgggcggtaagggggaggaaaaacatccctcagcctagcaccctgaagcagtggggtgaggggtcccagagggttcaaatggctcctgttccctttgctgcagagaactgactagttctaaaatggtcttcagtttatttcaccctttctttttattaaatgttaagttcaactgattagtatttagtgtttatatccaatttatcccnnnnnnnnnnnnnnnnnnnnncagcaggtgagaacaaaaacaaaatacccccaaaaataaagcagacccaattccttgccctttctccaaatatgacctttaaaacagatcacttcttggcaaactcctttcttgcttcactaaaaatgctcccctcccacccataagtcctgggtcatgccagcctcctaaatgatgaaatataatatacctgccaagcttcccccacagtggacaggagaaggaaggagtaccattctccaccctgccttaacagtgagttaattcatcacaacaaggcacctttccccaagaggaaggcagaagacacggaaacttgttcctcatgtggctagcagggcttgctggaggaaggatggatgcagggtttgagatcctactgtcaatatagagtctgatcaccaaatccagagatgagatgcatagatggaggtgagctgggaggacatttggagtctagggcttgattgcattggagaaacatgttaggagctctcatgcaggtttcaggggaatggaagggaccatctgagaagaagagaaggtccatccttttcctgaggaacgggaccaagccaggcttcacctgagaatgggtggcagaggtggggctccacgggcagctcggtttgttttgctgggatatatcctctgaaagtgtttatattcttctggagcaggaaagtcttctactggatggaaggaatactttgactcaaaatcatccaagaaagaccggacagtggtgatagaatctctgtggccattcctcaggggcggtggaggaggagggggtggcccagctggcgtccttgagggtggaggtgggggctttcctcggctcgggggttctgacccatgcattcggtatggtggtgggggagggggagcatccctggcaccatttcggatcacaggtggtgggggtggaggagctgctcggacgcgtgggtcgacgatatcccgggaattccggaccggtaccagc

SEQ ID NO: 137922 - DNA, 546 bp, Homo Sapiens
ttaagtatttttagtttctggggagaatcaaaatgtacttataatagaatcagtatgtagtagcttaagaggaccaaggtttcagtaaaactcagcctactgtggttgatcttaacatggttatcaggagtttccttgaatttaatctagcccttatctaaacttcagtttactttaatagaaaagaaaaatggtctggatgtcacttgggcccaaaatcttttggtacattttagtgccctttcttcacccattcagaagtacttctgcagctggaatggtccttcagagaacactcagttcttctagaaaggagacacttaaaatataattgcctctccctcccatccctaactcatacagccagaaagtcaggttgaaggattgtggaggactctgctcttgaacttttctgcacggacagcaggaccaccagtgcatgtgtgactcagtgtggcatttgtctgcagggcatatgtacaccaacccatccctgcctctttttaccagtgcatggatcatttctctctcttctgatctcttcca

SEQ ID NO: 137923 - DNA, 402 bp, Homo Sapiens
ccaatggtcttttattttcaaaggctccactaaaattactttttttagatttctgggctatgggtttttagttgtgaattcaaagataaaagtcaagtagagcactgcatgagaataattcattttacagggcaatcaatcagaatttgcacatttgttatatccgagatgtacagttaggactcaccccttcttccactcacatactctgatttgcacagggctaagtgttacaaagacatggaaaatcttgaactttgttctttcttgggttcagaatctagaaaatggataaacaatgataagagatgacaggtcccttagagaaagttcactataaggcacaaaggggcttggcaaggtaattccaaatcagcagcagggttagaaaggaggagagcc

SEQ ID NO: 137924 - DNA, 1051 bp, Homo Sapiens
  misc_feature (841)..(849): n is a, c, g, or t
  misc_feature (952)..(986): n is a, c, g, or t
aaaagtcaaacatataggtttaataatgtgcaactaatgaagatggcttataaatgaaataccacctacacatttagttccctaaatatattatactattagttattaaagttagatctataagtacaaattttcaatatgtgggaaagtaaatctgtttttaaattaaagagaaattattactctatttcttagaaataaaactatcagaatataattcaagtgtagctgctcatagtcactgaataagtttaaatttgataataaaacatttaagtttcaaccacatgcacctttgctgaagcacatttagctgaaataacttcgattctggtttatttccatcacatatagtacatttttccaacaagagcatgtacattcaatatagaacatttccagcaatagttacagtctttctagtttcctttcacagtatattttagtgcaaagcactgggaaggtaaatgtttttctagctatagaatcattttattaagaccttgtggatctttaacatttttaaaattttataccaaaagtatatagatggacacgggtccctcctaagtacaggtgtgaacctatataaaaacatggtatattttctgctgtaccttttataattataatttgacacaaataactaaaaaataaaatattccctaaaagtacaaaatattgatacacaaaacctgcccaaaatttcataaagatagatgtacttctgtttttcctaaaatcttgattacaaaaatggacaagaattcatcattttctaaattttacagtaggaatcaaatattatctaaagtggtcctttaagatttttcttgggagnnnnnnnnntcagggcttacacccgcatcttccttttgtagcaatatttaaggaaataaaccccggccgtaatggccgaattcccgggcatatgtccggtaccgtcgactgnnnnnnnnnnnnnnnnnnnnnnnnnnnnnnnnnnncgccgcttcctcgctcaatactcgctgcgctcgtcgttcgctatcagcgggcccctatagtgatt

SEQ ID NO: 137925 - DNA, 336 bp, Homo Sapiens
gactaattcttttgcaacttctctcaacaggtacaatcctcacaaacagggagtagttcttagtgagtagttctgctggcagttcattcattacatactccatggcgctgggacatcaatgtgattacagtcctgggcaggcaatcccaggtttactgccttgcctggcagggaatcactgcaaaaggatgccacaagaacaagggccttcattgattcaaaatcccactacgcccaccccactcctaccccacttatcacattacaattttaggctgttcagatgtgcaaaatttgttttaaatgaggtaacaggctgggcacagtggctcacac

SEQ ID NO: 137926 - DNA, 528 bp, Homo Sapiens
  misc_feature (411)..(467): n is a, c, g, or t
aaccagggtaaggagcacttgaagttcacttatgttcttttgcccacactttggtgtatgttggaacttttcactattgtggtttttaaaatcaggcattccagagtttaagtgttgaagagttgaatcctggttctgcccactgtttctgcatgtgtaaaatggggatttgtaattcagattatgtatgacgatatgaggattgtgagaattaaatgaagtagtaaagagcttagcatagtccctgacatgccggaagtgatccatacttgatagctactactattgtttctgttatcgaattataaatacataatccctgtgagcctagttcatttatgatgtaattgattctttgtgaacagcagaacttaaactcatattgctgctacacaagaataagaacgcccnnnnnnnnnnnnnnnnnnnnnnnnnnnnnnnnnnnnnnnnnnnnnnnnnnnnnnnnngttggagctcggttgattcgagcataagacctagctactataactcgatcgacgacatacc

SEQ ID NO: 137927 - DNA, 874 bp, Homo Sapiens
  misc_feature (686)..(686): n is a, c, g, or t
  misc_feature (752)..(752): n is a, c, g, or t
  misc_feature (799)..(799): n is a, c, g, or t
  misc_feature (832)..(832): n is a, c, g, or t
  misc_feature (844)..(844): n is a, c, g, or t
  misc_feature (852)..(852): n is a, c, g, or t
ccggttggggatttaagggggaaacttcatttttaattttttgctattctccttggttgtggagctgtcactagtaaagagtcgtgaacttcttcgaggcagtgcgtttgggggagatgtaatagtggggctcaatacctgaggtgttgtacttgtttgtggaccagaactttgtgtttgtgcaagaattggagttacctctcggctatttccactctgtgagaagacagactttgttccagtttggccgattctggcaacagacttttttgaaggggctccggtggatggcacatcaattacaggaggtgtattagtgtagttttgtaaataggatccatctccaggacttggggtttctaatggcaaaatcccaaaacttggggttaatggactaagagctgctggtcctcctaataaacttcgaccagtttttggtttattttgaacctgtttagataatatggaagttcctgttcccagtgggacagtatcaggtgaaattacagctgaatcaatataagacactggggaatctgtattcaaggagtactttgaattggaagattctaaattccatccgtttcattcgacggtgtcctgggggtgtttccgtaagaacggtctcgggctgtctgtgacattaaactagggacgaggtccaagtgttgtgggcgcaacacttnggacagggcagttgcttaaagctcttctaggagagggtgaatcaaaatgttttgggtcaggatctnggctttttcccccctatttttcacatcatggatttcaaaggggacanccagagggaaaaggattttcaaccgaaggcttntttttttggggncacaattnttgattcccctttggggtaaag

SEQ ID NO: 137928 - DNA, 709 bp, Homo Sapiens
  misc_feature (30)..(30): n is a, c, g, or t
gaccatttgccctcctccctcttcaagggnccttaaaattttaatgccaatatgaacatgaactggcagagatcagcatctcagtacgggcaggacatcatgccctgcactcaaaggccaggataagggtaacagaggccagtgggagcagtgtggattgatcatcacattttttgaggccagcagctgtggcttagctggctttgctggtcgtaatggaggacaaaagtgccttctggtgaaactcagcttccatagtgatggaacctaagggtagcagagtttatggtgaccctgtagtgtatctccagaaatggtgattgtttgaatgcatgtaagacattccctagggactccaagaaatattgattagaggaagatgtggtgctttgaaagggacttggtgttcctacatgaaccaagtgaaggcctagaattggcaacattcagagattaatgttaatataatctcagttgtccctaggacttgaggtgttcagagatatttggaaacatcaggatttcagaatggaggtgaagtcactgaaaattgttggtacattttcatttttgtcatattaaaaattcaacacactgtggaaagagtttttgatggtgatagctaggaaaacattaagccagatattttacacaagtaaatactaaacagcaataaaaacaaatgaactatagcaacacgcaacaatat

SEQ ID NO: 137929 - DNA, 1268 bp, Homo Sapiens
agacccagtgctctcttccagttgtaggtgaaaggctggagaaagggactcccccaccacttttaatccagaaatgccttgtaaagctttatgaatttgtccgcacttttccttcaacactgcaaaaatacctggattctcttccatgatgttgagggcctcaatttctgcagcagctaacaggggaggtaacgaagctgaaaagcagtatccctggccggaaagtcgctgatggtcaattacaaaagacctgccacagcagaaacctccaatagaagcaagtgcattctccatgttggcactgataagatcaatatcatcaatattgattccatagtgttcagtgactcctcggccatgctctcctaggactccaaatgaaaaggctttcctccagggaagattcttgcctttgtatttgtattttaacttaacccattctggaagaggacaaatagttccagtattcatatacaatccttctactacaatgaaacgccgagttacacgagccttgcgaggattcttttgatcttcgatctcttgttcttttagtagtcgctcgaggtcagccatgtcattatgcttaaataacttaatgtcactacgggatgcctgtaatcctttctgaatagcaaagcaggcagctctatctacaaaaacaatgtcccctcttttagagtaagcaggaatagcactggctatggtggcaaatccatatgagtatataatggcttcttctgtcttcataaattttgccaggcggtcttccaaatctaaatgaacatcaaatgtgccataaaatcctctgggtccacaagtccccacgccatacttctttagagatgctaaagctgctgccttaaccctagggttatccaacaatccaagaaaattaaatgaggcgaagtttatacattcttttccattcaccacagttttgtggcttggagggcctgaaacgatgttgtagttgagagcaggatggtcttttgggacaggaggaacaagaggttctggttgccactcttcaatcagttcttctttttccttgactgtaagatcagatcgttcttgtaatttgtaagtcttagagaaaagaagtctgattatccagaggatcagaatcccttccaaaataagatggtaagcaggagcctcgtaaagcgcctgtaccatctccaccagaacccactgctccgtggcggtcgccatagttagccgccggacgcgtggtcgacgatatcccgggaattccggaccggtcc

SEQ ID NO: 137930 - DNA, 490 bp, Homo Sapiens
  misc_feature (98)..(98): n is a, c, g, or t
cccggcctaaacaattatttaataacattttcaggagcaaagaatatacacttaataaaaacaaccataaaatgccggtcttttttgatgactcccangggaattcactgtatttgaaatcatacattcatcaaatatttagttggcctgttcccgggattatccatacacaaggaaatcaatgatccttcatcttcattcaaatgggccataaaatcctctgggtccacaagtccccacgccatacttttttagagatgctaaagctgctgccttaaccctagggttatccaacaatccaagaaaattaaatgaggcgaagtttatacattcttttccattcaccacagttttgtggcttggagggcctgaaacgatgttgtagttgagagcaggatggtcttttgggacaggaggaacaagaggttctggttgccactcttcaatcagttcttctttttccttgactggaagatcagatcgtttctgt

SEQ ID NO: 137931 - DNA, 264 bp, Homo Sapiens
aagatgaacacttttttctgttggccatttggaattctacttctatacactgcttgttgaagagtttaactcatttttctgccaagctatctgtgtcagtcgtctttcgattattctgctggctttctcttttagtgttatagtcacgtccacagctcaaccacttcaaatatcggtgatggcttgctggaaaattcctatattaaacaggttcttataggaaagtgatgttatatattcacaagggatattttgccatagtca

SEQ ID NO: 137932 - DNA, 1893 bp, Homo Sapiens
tgccaatgatgttgagctttattaatggcccctctccagaggctgctcagttgtccccagggaactcctcagagatcctctgccttcccacatatgagcccgaggacacctcgggagcagagaagtgaaagggtttccgggtcagacgctgcactccacgcctgcgtcctcctcgtggctgcagtcatgatggccccagctattcttggtgcagctccacagggtactctccgtgccccgacactgaacattatccagccagatctgcccagtgccagctcccactttgtacagggcccttcctttggagtaacccagcatgcggcagaagacaatggcatcagaattttgccactcgtcatcgcaaattgtcccccaggtaccactgtagtaaacttcagcccggcctcggttactactgccgacaatcctgacggacactgagttttcacctctttcacctttttctccctttactccttgctccccagaagatcctttcactccctggtctcccttctggccagcttgtccaggggctcccttgggcacctgccagccctgggctcccctgttctcccttcacacctgcatggggctggaactcctgattctccttttcttccttgctgtccttgaagtcctgtgtcccctttgccttcctttcaggcctgtggctcctggactcccgtgggctccctggaagtcctgctcgcccaggggagcccagcactgccaggctcacccttggcacctgggtgtcccactgcaccaggagggcccggaacaccctgcagtccaggttgtccttgatctcctttagctccaggaaaaccagccaaacctggtgggcctggcctcccgaagtcacctttactcccctgggctccaggaggccccatgacccctgcatctcctttcatgcccctgtcccctttgcttcctgggagacccaggtctcctttctctcccttagttccagttttccccttttgggccaatgagacccccatcgcctttgctgcccttctctccttggggtcctggggtgccagtggctccttgcttcgctggagcaccctggggtccttggaggcccgcctctcccttgactcccggtgggccttggggtcccgaggggcctgttgctccatctcgtcccatagcccccttggctcccttctcagcaggtggtcccggcgggccaggggcaccaggcatgcccatggcccccttgtgaccttgaagacctggggcgccttgttcacctttgattctgaacatccctgggttctgagtgaagttgtctacccgctgcagcaagtgctcatggctgacgcggacccaggtgagttgggcctgcaggacttgcagcctcgatgcaccctgagccaggtgttctccagggtgtgctgactgcagcaaggagaaggacgggctgtcctcagccgccagagtgtcattgaggaaatacatctccaggacccggagccgcgcctgcagattcagaacttggaccaccagcagcccagcgccagcggtgagcaggatcaggtagatgaccaccacagctagggagaagttcaccccatttctcctcttgggctttggaacattgatttcgaaaggctccattgcaatttggtgaaaagcagcttgttgggtctcactcaagagctcgtcctccttgagaattttcttatttctcattgccaagctttatagatggccaaagtcctggagccagcagaaatgctcccctcaagaggaaccacttggagaaagatccttcccatcgaaccactgcagctggttgtaaacctcgcagcacttccctttggcccccggccgtaatggccgaattcccgggcatatgtccggtaccgtcgactg

SEQ ID NO: 137933 - DNA, 507 bp, Homo Sapiens
tttcaccaggcgatacagactatttgtttattatgaaactaactggtaaagcagagtaaatcccattctatattatagcactacaaacatccttagtcattccttcatttgttcattcattcattcatgcattcagtgagtatttcttaagctcctacagtgtaccaggaggcactctgttcattgtggcattacaaagataaagattaaggcacgtactctgccctcaaggagctcccaatctaattgtgcagagagatgtgaaaatgaagcatgaaactccatcgtgaggagcgccgagaacaaaagtctgctcgaagtgaggcagaagtatggattcattccaccacaggtcccatgggaaaggtatgtggcatttctcctcctcttcagaataatgaatgcttgacatagctttcatcactgtctttcagttccagtgttacaagggggatcgccagcactacagtgagtcgcagtgaacccagaaatgattagccctcgtgc

SEQ ID NO: 137934 - DNA, 1424 bp, Homo Sapiens
  misc_feature (115)..(164): n is a, c, g, or t
  misc_feature (503)..(824): n is a, c, g, or t
  misc_feature (1074)..(1074): n is a, c, g, or t
ttccaggcctatttggtttatttatgaaactaaactggtaaagccaggagtaaatccccctcttatatatagccctccaaaccatccctagtcatccctccatttgttcatcatnnnnnnnnnnnnnnnnnnnnnnnnnnnnnnnnnnnnnnnnnnnnnnnnnngggccactctgttcatgtgggcattccaaagataaagattaagggcacgtactctgcctcaaggagcctcccaatctaattgtgcagagagatgtgaaaatgaagcatgaaactccatcgtgaggagcgccgagaacaaaagtctgctcgaagtgaggcagaagtatggattcattccaccacaggtcccatgggaaaggtatgtggcatttctcctcctcttcagaataatgaatgcttgacatagctttcatcactgtctttcagttccagtgttacaagggggatccccagcactacagtgagtcgcagtgaacccagaaatgattagcattctcnnnnnnnnnnnnnnnnnnnnnnnnnnnnnnnnnnnnnnnnnnnnnnnnnnnnnnnnnnnnnnnnnnnnnnnnnnnnnnnnnnnnnnnnnnnnnnnnnnnnnnnnnnnnnnnnnnnnnnnnnnnnnnnnnnnnnnnnnnnnnnnnnnnnnnnnnnnnnnnnnnnnnnnnnnnnnnnnnnnnnnnnnnnnnnnnnnnnnnnnnnnnnnnnnnnnnnnnnnnnnnnnnnnnnnnnnnnnnnnnnnnnnnnnnnnnnnnnnnnnnnnnnnnnnnnnnnnnnnnnnnnnnnnnnnnnnnnnnnnnnnnnnnnnnnnnnnnnnnnnnncttacaaaggtgtatctctgtcaaactcttccattcacttaaagaaaaccatttatgatgcgtcttaaagaaagcatgcttacatttgccttttattgccagatttctctacttggctttattaaagggcccaaatggcagcggtaggggtgtcggacatgttctaataacatatgctaaacacatagaggggaggcagcttgtcattgcagaggtacctgccactgagcctcacccctttactcacccnacaaatagttaatgaggagctaccccgaactccctacacccccatgccctccgaagctgtctacatgggctgctctgcccttggcatgtgcccttgagggctgatctcacttggccacacatgggtttatgctctaggatttgaaagagagaattcctgctcttcacctttcaagcctaagccttaacatttcaagggctgcttcttcctctggaataacttgctttttattggtcattcatgatttgggtgaaaagatggagtctgtcggacgcgtggtcgacgatatcccgggaattccggacctgtaccagcctgcttttttaaccacttttctatattcacatagc

SEQ ID NO: 137935 - DNA, 714 bp, Homo Sapiens
  misc_feature (85)..(85): n is a, c, g, or t
ggaaaagaagaaaaacacagagcgacagaccatggtcagcccaacgcgacaaaccagaaaaccccacaaaacaaaccacaaaggnagacaagtaacacagggcttaagcagtgtataatatgggggaaggcaagagtgatccagcctaaagagagattgcaacaatgaaagtctggtaacaggatttaagatcaatcattatcaaaatacacacactaaatatacaatgtttcccatggccataatttattatctcaccacaaggcacaatacacagagctttgagggtccaatacagtcatcgtgacagaacgcaccgcagccttggcacatgatcatggctttcaggctgcacgcacactggagcgagatgctttccaccgtgctgctgtcagtgaacatttgcaaggaaagtgatgcactgtggctcgcaccaaagtttgctttgtggctcagctgcaccacacttccagcaaggcctttgggaaaggtgggagagctagaggaataattaaagctggtggaactcagttggagtttagaaagcttcccataaaatgcctgcttgatgctgagttgggaggggagagaagaaggctccagaggctcactgagccccttccctggctctcggggtaatttccagaagggcaagtgcatgacaaagggcatcccttccaagtgacccaccagttccaggggactatgcccagt

SEQ ID NO: 137936 - DNA, 529 bp, Homo Sapiens
  misc_feature (322)..(347): n is a, c, g, or t
  misc_feature (367)..(396): n is a, c, g, or t
tttgctaatgtgtattttaaaatgaaaagtacttcctaactagtcttcctagtcaatgttatggtttcaaaaaatctgatatcctaagacatatctctcactttgaaatgagcatcagttaaaaatagggccaggagtggtggagtatgcctgtagtcctagctacgtgggaaatatgcataattaatgctgaatgcaacagcctctttactcagtcttcttcaccccttaccatccaaacacagtgggaggctaaagcaggaagaccgcttgagcccaggagttcaaggatgcagcatgctatgattgcttctgtgaatannnnnnnnnnnnnnnnnnnnnnnnnncagtgatatccagtcttggnnnnnnnnnnnnnnnnnnnnnnnnnnnnnngggttccacacacagtaaatgactttatcgccaaaaaggcagacattaaacctttgtatatctagacttacattcctttactcatgttgctagatgaaatatacacaggctaaacttaattagaaatattagg

SEQ ID NO: 137937 - DNA, 573 bp, Homo Sapiens
tgagacaaggtcttgctctgttgcacatataagtgcggtggcaggattgtagctcactgtaacctcgaactcctgacctcaaatgatccttctgcctcagcttcctttgggaatagaggtgtaagtcaccatgcctagcccattttctttaaacttataatttatctttcctttttggccctgatttatagtttaacggctatacaggtcccagtccctcattttggccactcatgggcccactaattgggactcaaaggctttctgctcaaaggcatagatgcagaggagcacacttccactaggcatgcatttaccacctggtatctctgaagcagtggcttcccttcaaactctgcgggcaccaccaggacttgaaagatggacatacagcacggtggtatgagggctgtatcctctacctctaccatgctctgcctctaggtcctgctgaagcttctcctggaagtacttgatgctgagctccacagcagcagtccagctgggatggcagcccagtagggtcctcattttgctttaggtaatgtgtatatacatctgtatttctctctt

SEQ ID NO: 137938 - DNA, 409 bp, Homo Sapiens
tttgcaattcttttttagctcattggctatccttagcgtacattatgtatggcccaacacaattcttcttccactgtagcccagggaagccaaaagattggacactcttgttttaaatagactatctttttacccttttatttgttccaactcaggataaatatccaagtatctagagggtctatgtgtgctatctatacaataaaagatagttatataaaaatgaagagttctccataccattatataaacaggaggttttacaggcattagtgatactctgttggactcaatgggtttttttctctcttatagctatgaaagactttatgccagtccaaaatatacaatgttgaaagacaggttttgaaataaatattctccccaattcccaccctctcaccaaccc

SEQ ID NO: 137939 - DNA, 777 bp, Homo Sapiens
gagtcattaatcatgtagtgttccctgtaataatctgatgaattttgtaaaatgttctacacataaacttcttagaattgtcaaggatgtcatgtaaaattattcaaatttttaaacagtaaatctgccttttggccattacatgtgaattcttagataaaaagagctacatcctgtaaacttacactaagtacttagtgaaattctgcattcaacttaacatcccctcttcccacattccacaacgttcattaaaatctaccgattggggtgaccttacacatttcttccactaccaagatttctggttttccttaggtttttaattgtcacccaaataatcaccttaaattcaacttccaactatgattagcacccaagggaaatgttaaagtctatttattttaggtcccctcccccaacctaaatagtaccaaggggctgtcagtagacaaatacaagaagtagcaggctaaaagtttttaactgctttggtagagaacaccaaagtttttggtacaaaataatcttatggttggagaagggcttataaggcaaaattctaaatgcccagctttttattaacaatgattcatccaaagaagcagttaatcttgtgcactcttccctttcaaaaaagaaatgagacttgggttaaaagttctacaggctgagcatggtggctcacacctgtcatccttatactttgggatgccaaggcaggcagatcacttgaggccaggagttttgggaccagcctgggtaacacagagaaac

SEQ ID NO: 137940 - DNA, 688 bp, Homo Sapiens
gaaggccacaaggaccaccccaacaggtaggccatcagcaaggtcctcccccacctcctcctggaaagccccagggaccacctccccaaggggccgcccacaaggccctccacaggggcagtctcctcagtattctaggattcaatgacaggtccgattccagtttattatccatcaaaggctccaactgctacagttctccaaacttcattgtgccaatgaatcctctgaaaacctgttaatattgccctgtcctggaacccgttttctcccaattgttattcagatattcttgtatagagtatcaagaccctgtgaccctgtgttttacagaagctcttgaaggcaattctgattttgagaatcactatcttcaaattacatgtcttaagtagggttgacaatgaggacatagaaccatgttccccctttggctctctctattttctttcctcaaactcagactcccatttaaagttttcacctgaacatgctttgctcagtcctgcctcacatcaggctttcaggtccagtattcctgctaagtggtccttgaactttcagttgtaaaatggtatctcatttttagtatacttacatttaaagtcatacatgcttaagctaacaaaaactaatctcactgaaccgaaatgtacagagctaaatagttagagcctaacctcgtgcc

SEQ ID NO: 137941 - DNA, 496 bp, Homo Sapiens
acaatttcccatttcttttaattttaaatggaaatattaaagtttagtttttttaaaaaagcatcagaattgtaaagatgtgaaatcttgtaagaaaccatttacacaaaattacagtaatgtttaagtccagaatgttctatcctgaatctaagatcgtggctatttcaaaagctatttgttcaacgcatcttacgaacgtggctttaaaaagggtctctgccggccggggcgtctaggcctgcgagcggtgccagcgtcgagcctcgagcctcgggttcgggtcccagcgttctttgtcttgctccggtcttgcgtggcccgctccctgtccctggccttgtctcgtccgctctctgctcggacggtccggtcgcgctccggtcctgcgcgctctcggttcctgtcgtcccggctgcggtcccactccttgcccggtcggcctcgcgctctcggtgcggttgggctcctctcccggtttctgtcccagatccgc

SEQ ID NO: 137942 - DNA, 416 bp, Homo Sapiens
  misc_feature (29)..(29): n is a, c, g, or t
  misc_feature (47)..(47): n is a, c, g, or t
  misc_feature (63)..(63): n is a, c, g, or t
  misc_feature (116)..(116): n is a, c, g, or t
  misc_feature (118)..(118): n is a, c, g, or t
  misc_feature (149)..(149): n is a, c, g, or t
  misc_feature (156)..(156): n is a, c, g, or t
acggaaaaaccactcctgttgatacccangaaagatcctagaattcnaaaacctttagcaggnaggaaagtgaaaaggctgggaacctaacctcgccccaaaatatttagcaagtnantccataaataagataatagaccttgagtctntcggttntcagtggagaactttatatttgattttgcctaatgtgtgaaactgtataaagcatcctctatagtatatgttcctgctgcctggaagcagacacgtcatcaaagtgtgtgtgtgtgcaagagcaaacacattaatttctctttctcagtttgtcataagaggggagtgctatacagaatcttctggctgggtgtggtggctcaaacctgtaatcccagaactttgggagaccaatggctgcagtgagctgtgattgcacc

SEQ ID NO: 137943 - DNA, 903 bp, Homo Sapiens
  misc_feature (34)..(34): n is a, c, g, or t
  misc_feature (66)..(107): n is a, c, g, or t
  misc_feature (301)..(325): n is a, c, g, or t
gcaagtgctaatcgtaaaattaaccctcactaanagggaataagcttgcggccgcatacgcggtcnnnnnnnnnnnnnnnnnnnnnnnnnnnnnnnnnnnnnnnnnnaaagtttgattgcctttattatgaatataaaatgtacatacaatacaatatacatttatacatttacagtttgcatttcctttcatcttttttgagcaaattcaattctgcatgtcccagtttgccgctccttccactgatttgcacttacactcatgacgttctcttcacttgggtactctgtgtactcggtnnnnnnnnnnnnnnnnnnnnnnnnntccagcctgggggtaaaatagctggcttcactgtccttttcacaaaatcactttccttccattgtttcctttcctgtccctacatgccttcccttgcttcattcaaacttctgcattaaaaattcaggaaaaaagagggctgtgataatcagccctctcttaaaaactcttacatgagcgaatgacacataagtaggcacttgaactttgctctttcacctggtttaagaactacctatgggtgggaaggctctgaaagtgttatatacaaatgaagctctgctcaccagatggatgatcatgaaggtctgaatatcagtagcgtggcagtaaataaataaccaggaatacataaaaataaatagggtttcactaaaggaaatttaaacacgtataaccctgtgctttctcaaaacttcataaggtaaatcttcaaaacacgtggaaaaaaagaactaaatttaagggtagggtcccttcctctggggcaggccttcaaatggcaggtgacatttactggataagaggcggtcgtttcgctcaaaatgtttccaacccaaagggcttgtaagaattcc

SEQ ID NO: 137944 - DNA, 1072 bp, Homo Sapiens
  misc_feature (21)..(21): n is a, c, g, or t
  misc_feature (75)..(75): n is a, c, g, or t
  misc_feature (1023)..(1023): n is a, c, g, or t
  misc_feature (1035)..(1035): n is a, c, g, or t
  misc_feature (1062)..(1062): n is a, c, g, or t
tcatggtcaatttctcaatanagtgttagcaaatgtactaggaatgattctggccttctcatccatctccttccntgacttagttctgacgatggcccagctccgtgtttctttaacgagtgcaagttactaagagataccatttaaaccacttcagaataggttgcaacgtgagaaactgcatcctcacttctttgaaaaatatatgccttttagaaagctgaacattagaaaatactgaagagtaaattcaattctaaaagagcctcaatctgtttgtggaacgcctcctaaaacaggcagggcagctttgagaactagctctacataacaactacctgctgttccatgtcaactccaaagacgtcaaaggtgttaacatctttcccctaccccggggttcacctagctcagccacagaacagacccttcttacttcctctcgaattaggttccaattttaagagataatggaacatggcctaaaagggggcaaaatttatttgggggattaaaaaaaagagccagtgtctttcgcataggatcttttacagctggtggggggaagaaagggatgttagtgtgtggagggtggggtggtgcgggatgagcaaaacaggaactccgaatgtacacataacacctgttttgttgttcttgtttatgcctgtcgtgcatctattacacttcttcctttaaaggccttaagggtattttagcttctcactctgcttgaacctgccttaagggtattttaatttttcactctgcttggacctccgtccttcggggacgcaaggattcagggagcttcctttcctggctgcgagggatcttcctgagcagagctctccgggttccccggctcgcgggtcccggcgaagggcaggtgggtgcggccgtgcgggtgctgggggtgcggcaggagggtcgcggcggcggcgcccgccttctcgggagggggcgacaaccctcgtgctggattcgccacccaggcctcgctaccttaggaccgtatggggngcgggtgtggtnttccatagaggggtgggtaagaaaatnaataaagggg

SEQ ID NO: 137945 - DNA, 982 bp, Homo Sapiens
  misc_feature (42)..(76): n is a, c, g, or t
aacgaccgagcgcagcggagtttatgagcgaggaagcggcgnnnnnnnnnnnnnnnnnnnnnnnnnnnnnnnnnnncagtcgacggtaccggacatatgcccgggaattcggccattacggccggggaaacagggtaaatggatttttatacatattataacctgttcctggttatatatggaaatacaaatagaggagctctcacttgacagtagaatccaggttttaatgaaaatgacatccaaggcctaggtatctgaacacaacaaggtctaaagggcacttgtcacattaagcaattccaagtcatattttaaattacttcctttcattcctaatattgccccttgctcttcttgtttttatgtattgggtatattttattttcctctcattcccatttttccttcaaatatttctgcagctctctccttcctgcttcctccttgctgtggtggctgggatgcttcttccatgattttttgaatctagactgggctgttctctgtgttaaaccaatcagttgcgaccttctcttaacaggtgtgtatggaaatatgtttcattaagaaggaaaaatcttactttttaagaaatatgtatttttattcctttcatgtcatagcagaaaaaaatctttttaaataccttttttctttatgggtaggtgagagggtgggaattggggagaatattatttcaaaacctgtctttcaagcatgtatatttggactggcataagtctttcatagctatcagagagaaaaaacccattgagtccaacagagtatcactatgctgtaaaacctcctgttctataatggtctggagaactcttcattccatataactatcctgcatggatagatagcccaattaccctcagaaactggcacatcatcctgagtggaacaataagggtacagcaagcactcacaacaagagtgccatcttggttactgggcaccgcaaagcatgctg

SEQ ID NO: 137946 - DNA, 870 bp, Homo Sapiens
  misc_feature (82)..(90): n is a, c, g, or t
gagtattttttgagctcacgtaaatatgatcttaggtgtttaacagcgagattggttctgaacagttgatatttacaaaggnnnnnnnnncccctgaaaagagacaatcgctaaccacaagacccaaaaatgatagcttgtagatttttaaaccgagaaaatccaattagtcaggagaatcttaatttagcaataaaacactggcttgcactcaagaaatttttcacttccagtttctactgccttctagttaaagtctaactgaacacaggaagaaaaattaaaaatccagttgccaggttacagtgcacaggaaatcaatactgaacaaaggccacccaccatcagatactcaagttatagcaattaacaatatagcatatgttcactacgacaatttgttttgcaggctaaagatggacaattttattttggagattcgttcctacacagctgaatgacaggaagatttttaccaaaatcagagacgcaagtttctggacaacttcctaattatatacaagacattagacaggaaaaacaacaacttccaacatctctaaaataaataaaacattttactttttctctatttttaatcggtcgaacgacaatgattcaaaaagaaaatgcgaagtagcaccctctggcaaggttagttaagcggaaaatcttaagtgggggaaggtcctaaaaatcccagccttctccaagataggtccgaaattaagagcttttatgtaaattatgagacaaacttttgtaacttaggatttaaagaaatgtaactacgaaatcgctgaagagcaaatgagtaaatcaaatgagaaaacacactcccaagcctttaagacacccagcataaatctc

SEQ ID NO: 137947 - DNA, 602 bp, Homo Sapiens
  misc_feature (127)..(198): n is a, c, g, or t
gaaacagggtctcactctgcgcccaggctagagtgcagtggtgccatgatcctacaaccttgatgtatatattttaggcaaacactgctcacagaaagcccatattctcctattccacctccacagnnnnnnnnnnnnnnnnnnnnnnnnnnnnnnnnnnnnnnnnnnnnnnnnnnnnnnnnnnnnnnnnnnnnnnnncgatggatggatagaggctgctgggtccttaggaaagagagcagatgagatttattttttatttttgtccctatcccctctttggtcctttggaggaattttagtcaggatgggtctggtgcaaccaggtgatccaagggttacaggcacagaggaaagtaactggagctccctttgggtaccacagtaaacactggtggatggaatgccattgtcttatcttctgagaagtagcaggaggcttccagattcttgtgtttcatcaactggctccaatcattaagctaaatactcagcttatgcaatgcacttgcccagctgatttagaagtggcaccttcgcaatcagtctggagcatttgtgtggtcactgtattccaacattcactacaattagggactgcc

SEQ ID NO: 137948 - DNA, 660 bp, Homo Sapiens
tgggtgtcatctacaacaagggatttttgcacaagaatttttatatctttggctatctaagcccagctgtggtagttggattttcggcagcactaggatacagatattatggcacaaccaaagtatgttggcttagcaccgaaaacaactttatttggagttttataggaccagcatgcctaatcattcttgttaatctcttggcttttggagtcatcatatacaaagtttttcgtcacactgcagggttgaaaccagaagttagttgctttgagaacataaggtcttgtgcaagaggaggcctcgctcttctgttccttctcggcaccacctggatctttggggttctccatgttgtgcacgcatcagtggttacagcttacctcttcacagtcagcaatgctttccaggggatgttcatttttttattcctgtgtgttttatctagaaagattcaagaagaatattacagattgttcaaaaatgtcccctgttgttttggatgtttaaggtaaacatagagaatggtggataattacaactgcacaaaaataaaaattccaagctgtggatgaccaatgtataaaaatgactcatcaaattatccaattattaactactagacaaaaagtattttaaatcagtttttctgtttatgct

SEQ ID NO: 137949 - DNA, 375 bp, Homo Sapiens
cctcccaaagtgctgggatttttggctaggctttggcacaagccaccaggtgcctggcctagccaacatcttttaaatttcccctgttccttgggtcaggaactaccaatggagaaaataggtcctgttcttggcatgcagaaacctggagaactcagaaacaccgttaccacttcttatttgtctaaactcagagttcctttttcaatgactcactaaaatgtccagggtttagttttccccaagtaatgaccctttttccaagagttctaactctctggtcaatatgtttcagataagtcattttgtaacagaggacagatttcataaagctaccccagtgtcatctctttctctcacagttagttcatcagt

SEQ ID NO: 137950 - DNA, 521 bp, Homo Sapiens
tcaggggtgacaagctggtttctgaaggtgaaaggctgaagctcaggggctatagggacaattgattcaggggtcttgacagaggacctatttgtccggcccctagtggcctgatatgtgggctcaggggtgacaggttggtctgtggaggtggaaggctggagctcaggggctgtggggacaactgtttcaggggtcttgacagaggatctattttttcttcccctagtggtctgagatgtgggctcagaggtgacaggctggtctgtggaggtggaaggctgtagctcaggggctgtggggacaactgtttcaggggtcttgacagaggatctatttgtcctgctcctagtggcctgagatgtgggcttgggagtgactggctgggctgtggaggtggaagggtggggctcaggggcagcagaggtagctggaaagggtgtcattctggaggacttccgagttctaattttaggctttgggtggaaaggctccagctctgaggacaagggagcctctgg

SEQ ID NO: 137951 - DNA, 419 bp, Homo Sapiens
  misc_feature (68)..(68): n is a, c, g, or t
ttatatctcaataaagctgttccaaaaaaactttcaaaggtgctctccctctaaagactaagtacccncagggggctccttctgttaatgcccacctcaccctgggtacctctggttcaggaattcatcttctaaagaccatggctcttctcctttctccaacttggagatcaccttgggtttagtaatgcaatatcctgtaaacaaaataattgacatggaccagattcacaggcttttggatttccaaagggaaaaaaagatatggcagcaaagcattaactgagggtgttcatttgaaatttttaatgggaaagtaatgacatgttgcttttgtttctgtaaaggtttcaactacttcaaaccttttaatccaaagccctttaatctctataaagggtccatgtgttttgatactt

SEQ ID NO: 137952 - DNA, 1446 bp, Homo Sapiens
tgtaggggagtgagtttccatctctggacatatctaacagaggctggattcccacctacaaaagaagctgaagaggggatttctgccttgggaggtggcagaaagaggaaagagattggaccggatgatttttaaagttccttccaactttgaagatttggggtttgctgtttcactccagaagccgattatacagacgtattcataaaccacacatttgaaatattaacaacccaccatgcaaaactgcagatgtacacacaattccaaaggcggaccatatctgggaggggttaaagtataattctggaagttagtctgagaatcacaagactatccaaaattcactctcttcaaagcacaaagatgtttaatgtctgctcttgggagaggtgggtgggagcctccttatctttcttctcttagacagaatgctccaccctgagatggtcttggggaaaaagtaaagggtaggtactaacatatttggaaggaacttaaaaagctaatagtttccaagcactcaaattattttttaaaatctggagtctctctgagctcagagttctgaaatcgttgggagatggaatcttttgtgatactgttccacgttcggctggtaagtgcttttatagctaaagggggaagtgtcaaggtcagggagaaggcattagtgcagatgaggtcttggcaggaaacagagaagagtctcggttcatggttccatcaggctcctgagcaacttaaaacagtctgctccaaaaacggagcagagtcattggtaaatgtgagtgtgaagaaagggtgagtgttaagccaaaaaaggaactttcccatcagagaagctgccgtagcagtctagccaccaaagatgagttcaaagatggcagatttattggcccaatttgtcaccctgtgaaaaatacggttattactcaaaatatgtcattgtgcgatttgctttttctcccattcgaatgctcaagtttattacacacttgaccaccgggtgtaagatgtccatactctgccctccacaaaagatgcggaactcccaaatccagcagagatagttggtgagggttccttaagggaaacaaatttgcagggcagccaatcacagcatatgctgctcaaatcaataaagtcactcatcccaacagagaagaggaggcgccatgccgagttcagcagctttcatcctgatgcagtcattatctggttggtaccacgccaaagggcctgtccatctttagaaatggaaatgccaggtgttaagaattatgaggtttctgaggttttggggattagcagaagaaggaactaatgtcactgtcctcctggtactctggaacaatccggacgctgggttcgacgatatcccgggaattccggaccggtaccagcctgcttttttgtacccagcttgttctatagttcacatgg

SEQ ID NO: 137953 - DNA, 457 bp, Homo Sapiens
aaatatgtaagaatgatagcaggcaggaagaataaggtaaaatgagacaatttctaaaagttatacaaatacaagtgaattcctgcacatctgtttaaaaaagcaaactgtgcatgtggaaattgagggagactttgcttacctgcatttagtacagataagaacctggaagtttcacctgactaaaaggtcaacctgagccaactgtattatgtaaaagtacattccccattcaaaaactagaacgaaacaaaactcagctaatccatgggtcactattggcaatataactttagtaccaaggccattaaaaatcctgctgtactctacttgtaaattatatgatctatgaagtatacttttaaattttggccataacatatttcagggcactgacaagccacaacaagctgagagttgaatgaggacaggaaagatctagagaccctgtactaaa

SEQ ID NO: 137954 - DNA, 389 bp, Homo Sapiens
  misc_feature (48)..(107): n is a, c, g, or t
ttaatttttagttgagacacggtttcaccatgttagccaggatggtcnnnnnnnnnnnnnnnnnnnnnnnnnnnnnnnnnnnnnnnnnnnnnnnnnnnnnnnnnnnnatgagccactgcacccggcccaatactagtaaaattttagattcccaactagaaatacccggatgactttctgctcaggttttacaaatgcatactagaggacaatccaagtaaccattactcacgtggatgtaagtggccataacttggcatacgggaactcagtgatgtagtgcaataagtggggatcaatcatacagttagggagactgaccaagcttcaaggctggccttcatggggacaatcagcatgatgtcagtgatgatggaggccagagggca

SEQ ID NO: 137955 - DNA, 580 bp, Homo Sapiens
ttctgccctggtcactgcagacccacagtcacagactcgttctaacagtggattcacccacacgttccctaggctcatcattacagcctctgctgagttacaggcaacccgcaccttcacacaccttttgcctaactgacctatttattatttccatcatataactcatgcttttctcaatctaggtcttcattaatttctgttctcaggcctagaatgtccttttatccattgtcccatgactaacttccatacagactcaaagactcagcccacacacgccttgctccttaaattttcccctgatccttgacactggaaataattgaattctcatagcacttctgtttatacacagtctatctagacttgagggcaggatctagacttgagggcagtgccttcaatccctcatatgtggtcagcagtcaagcaggtgatggatagacaaatgaataagtggagatttttattgtcattagttatacgtaagttaatgaaactaggaatagctttctttttctttcattgacaaatctctttcagatctctagctcatttctctccctaatacttcttt

SEQ ID NO: 137956 - DNA, 2337 bp, Homo Sapiens
  misc_feature (30)..(30): n is a, c, g, or t
  misc_feature (106)..(106): n is a, c, g, or t
  misc_feature (208)..(208): n is a, c, g, or t
  misc_feature (244)..(244): n is a, c, g, or t
  misc_feature (312)..(312): n is a, c, g, or t
  misc_feature (316)..(597): n is a, c, g, or t
  misc_feature (1150)..(1150): n is a, c, g, or t
  misc_feature (1395)..(1395): n is a, c, g, or t
  misc_feature (1415)..(1415): n is a, c, g, or t
  misc_feature (1603)..(1603): n is a, c, g, or t
gccgtcccagtttcgcatcggagtttagtnaaaccagtgcctgtgttcgcaactgttttagttcctgagctggacgcacttatgacacactgggtttggaccgccntcgttccaacagccatgccttttcttcttgaggagagaatctgatcccgggagaacagacgcctgtgcctagttgggctgcgggcgggacgcagaaccaccngagaccagatcttttccggtctcaggtctgaagatntctaggaaaataacattgccaaggcctccatgtgggaaaggaggggttctgggtaattgtctcttttntctnnnnnnnnnnnnnnnnnnnnnnnnnnnnnnnnnnnnnnnnnnnnnnnnnnnnnnnnnnnnnnnnnnnnnnnnnnnnnnnnnnnnnnnnnnnnnnnnnnnnnnnnnnnnnnnnnnnnnnnnnnnnnnnnnnnnnnnnnnnnnnnnnnnnnnnnnnnnnnnnnnnnnnnnnnnnnnnnnnnnnnnnnnnnnnnnnnnnnnnnnnnnnnnnnnnnnnnnnnnnnnnnnnnnnnnnnnnnnnnnnnnnnnnnnnnnnnnnnnnnnnnnnnnnnnnnnnnnnnnnnncattgtgaattgattgggtccctgtaagtcacagagcctgtcctgagtcccttcatctgaatgagggtgaaaagactgagttttctgtcccgggtgacaaggacagaatctgtcttgtgaaacaaccagaagaaaattcccctaagaaagccgtctagcggggcagtggacacaacactattctatatcagacaattaaatgtgagggatgaagggtgaaccccaactggtgcgtaataacacttaggattaaaatgaaaatatgcaagttccagtgactttcaaatctggcaacaaatcctaagattcccaccccctcctgcaacaatgattcaaaaatacaatatttttttcctctccctcttcctccatccataattaccagctgattgttctcaatgttcttcataaaacccacaccccagcatcagccctggcgccaatgtatacaagaattttgctttcgttctgcgctgtggccactttgaacaggggagccaagaaaacccacttggagctggagtcctgtgggcgttgggggctcccccagggnaagcagagggagagctcgcttgcctttgagccgtgggccttggggagtgtgagtggggtggcccagggaggaacgggaacagggaggagacggggacaagggacggtttgctcccggtctggctggtccccgcctccctcacggctactcttctgccgaggatgatgtagggctctcgtcatctgacattggggcaaacgagcacttgatgttcatgcgggaatacagcatggacgcaatctcanctttgccttgcgtccaaggnccaccatcagagctgtgctcccatcgcgatctgtgagtgagatgtcacagctgggcacggccagcagcagccccgcgatctccttgtggccgtgctcacaggcgcacatgagggccgtggagccgtcatcatcttgcacgttgacatctgcctcacaggccagcagggctttgacaacgtccacccgncccgtggctgacggccagcatcagggccgtctgtcctgcctggctggctttggcattgatgttgccaagccggaagagctgaaggacagtctcgatgtcgtcctgggtcttcagggtggccagggcggtgagcataatagggctgtagccagcacggttctgtttgtccaccttgcagacaccgctgtcgagcagctgctgcaccacggggaagttggcatgagacacggagtagtgcagggctgtgttgccgttgctgtcggcgatgttgaccacgtagtccagcagccgcgcagacatggcccggaacgtgaccaggtgccgccgcaccagctcggggtgtgcgtcgctgcggcaggccaggcgcagccactcctgcagcactgtggtgtaggccactttcagctcccgctctgtgagggcgttgggattgtccaggtacttttccagggccaagcaggctgagatgaggtcagggcttagctccatcctgatctcctcctccgtgtttgatcctgatgccccctcagcagtgggtatgtgctgagattctcgagacagctgacactcctgccggctggtcttggccgctgccgtccctgcaggcctgagctggggggcttcggccacactcggaaccctctccctcggctctggggcctcgttctctgtgctgtcgttgtctgagatgttctctgctgcctcgtgccgaattcgccacccaggcctcgctc

SEQ ID NO: 137957 - DNA, 393 bp, Homo Sapiens
ttttgaaagaaccaataatagatttattcagagaagggtgagattacaacaggttggattattccatcaggttttttcttaatatttttcataaatgcaaatgtaatgaaaaatctgaccagagattcataatgcacatttttaggaggaagacacaaaatagtccctttcagtttctagactaaagccatagaggttgaggctggccctaccatgatcgtggctgtggcggtggcatattctccacctccccaacactctccaatattgggacatcgagcttcctcacatactgtatggagatttaaattccgcaaagtatttttcagtttattgtaatttttccccatgggagatctctgtctttagccatggaggtagtcttaacctttc

SEQ ID NO: 137958 - DNA, 982 bp, Homo Sapiens
  misc_feature (609)..(609): n is a, c, g, or t
  misc_feature (644)..(644): n is a, c, g, or t
  misc_feature (662)..(662): n is a, c, g, or t
  misc_feature (666)..(666): n is a, c, g, or t
  misc_feature (685)..(687): n is a, c, g, or t
  misc_feature (694)..(859): n is a, c, g, or t
  misc_feature (891)..(891): n is a, c, g, or t
taatgtgaaaaattaaactgattctttattcacaaatttataataccactctactgcagtctttgactccaagatattttaaatcatatttggtcgctgaggaagacataagttatagtatgcatccttgttccaaaaatctgggcccttccatccgcaccagcccttttccaaaataacttgcaggtcttcagcaccggtataatgtggatctagaatcagaaactttatctgccctgtaatctcattccatgcaactcctagtattgtgtgggccaaaactcctcccccgatcataactggagttccttcactttggaaatgattagccagttcccgtccttgagaggcaatttctgaaccttggctgacaaacaggatttttgacgttataccgatcaattggtttagtaccagctgcacctcaatagatccaatccattgccgcgatccgacaaatgttgctggtttgtccccggcatcgactagagcctgctgaatttctctgtgtgttggaatggacctctctggatttagcaatctctaaaattgtattcacttgattcttaataaaaaagcttaaatgcagataggatgtcaccctgtttnaaatttctagtggctgctctggtcatcagtttaantaaaattccttagcatgnacangaaggtcttcactacttannnaataagnnnnnnnnnnnnnnnnnnnnnnnnnnnnnnnnnnnnnnnnnnnnnnnnnnnnnnnnnnnnnnnnnnnnnnnnnnnnnnnnnnnnnnnnnnnnnnnnnnnnnnnnnnnnnnnnnnnnnnnnnnnnnnnnnnnnnnnnnnnnnnnnnnnnnnnnnnnnnnnnnnnnnnaggctgaaaggagatcacttgacccagagganaggtgcatgagcgaatgtgcactgatgagcgaatgtgtatgatcctctgcgatcttggctcgaggcatcctaatgatcgataatcgatcag

SEQ ID NO: 137959 - DNA, 475 bp, Homo Sapiens
gatggtcctaaagtaatcggctcagctaaaaacacacttatgacagttgggcatgtcagctgaggagagacccttactagcctgtgtttcctacaaaaacaaaaacacagttcttttatgaaagtagacaagttgatggtatatttgggctaaataaaatacaatgttgacatatgttgaaatattctatagttgttacacatgttggctgaggtggttgtactgatccagacacatggctgatactttgagtgggaacatagccagtgtggttttaaaatattatgtccctctgaggagggattacagatgattttttgctttctacttacacctttttataggtttcttacaaaaatattgcgcatgcagtcttcttacaattagggaaaaaacccaagacatgctctaaggtgagatgagtggggggaagaaatctgtatacagtcagccctctgtatccaaggcttctgaa

SEQ ID NO: 137960 - DNA, 573 bp, Homo Sapiens
tttatctttttctcgtggttccttccgtttacgttcactattcccagattgtcttccacttgatggagaggcttgtgctggctggccctgctgagcctgtgtagaagcagcagcagcagcagctgctgcttgttcctgttcctgatagtattgagaagcccgtctgtcctcttcctcttggagtttctttgctagttccaaatcactgattccttccgggatttgttcccaattgatctcttggctctgctgttcttgttgtagagataatgccataagataatcctgatctatctgatcttgttgtcctttgtatacagtttcaggatctgaaggaggtcgaagatgaaattctgagtcacagaaatttccatcaccatctacgttgtgtaggctttcccaaacaactttctcttcagtaagaaacccctggtccgttaccaacaaatacagttgacccttgtatttggtcatggtgctaaaatgattattccgaaagaacacacaaagttctccttcctgaaccgttgaagttagttcacataatccatggtatgtcagttgagtggctcc

SEQ ID NO: 137961 - DNA, 555 bp, Homo Sapiens
  misc_feature (466)..(466): n is a, c, g, or t
  misc_feature (480)..(480): n is a, c, g, or t
  misc_feature (544)..(544): n is a, c, g, or t
attagaaaaagaaacagatttagcaaacagaagtctaagttgttttagtggacatttaagttcagaacaattcacaaaatggtaaaatgtgtttcttcaattctttattttatgtcaacaatttctcagctagtctacagaaaaaacagttcattcaaaatacatcttatcattcccttttcactgtttgatattctgccccttcattctcttatgttccactttctgtaatggagctcattaccgaggtggtaggggactagtttcaaaggcaacacgagtcacagaaatatcaagccagtgggtttccttcaggggcattcatatacttctcgtgttaggaaaggaaaatctttccttggggtgcagtggatatcactcctgaggaaacccaatttacttttcccaaatatctggccaatactatttttggacaggacctatttcacataggggaaacataggnatatcccatatggntaccataattttacccctattatccaccggtcccttaggccataaaccgggaaacctggatttnaaatacttttt

SEQ ID NO: 137962 - DNA, 242 bp, Homo Sapiens
  misc_feature (116)..(116): n is a, c, g, or t
  misc_feature (201)..(201): n is a, c, g, or t
ttttctggtcagggttcacatttaattagctcaacaacagaaaatcttttgttttcgtagtttttggatttcaaaaaatggataagagactgtaatctgttttctgcgtttgcagntcttcatactgtgatggaaataatggttatgttacaacagaacttcagtctaacagtttctcatcttttaataccatttatgggnaaatacatatatataacttacttggcaattttaaattacaa

SEQ ID NO: 137963 - DNA, 322 bp, Homo Sapiens
  misc_feature (59)..(59): n is a, c, g, or t
cttttggccctgtggaatttccaaacccaaaggagagtgaaaataccgggaataatagnctgtttcacttatttccacagcacatttatataaagtttgattaagagagatctgtccaggcaatttagtaacatatcccaaatgtgcaatatgtacctacgaactatgcttatttctaaaagtgactggaggcaacttacaattcaaatggctcaggcgcaataagccaaaaaacctttaacatgcactgaaattacctgttttcctgactactaggtggagattgatagtatatatctttgtttcccggaactcaccaatg

SEQ ID NO: 137964 - DNA, 697 bp, Homo Sapiens
aaaagttataattctacaatcccaagggagtagaggttatagtcattgaatgactgcttgataccatgttcctcttcgtacttcgattactttttaacacctgtgggtatgtataaacgattacacttgtttgcctcctccacctcgcactgccactggctggctgttctgaacaaatgcacctcctccacgaattgcacttgggtgagttggagaagctgctggatgttgcccgggacgaataggtttagcaatctgtgcagaatgccctcttctggccatattctttgacctgactgcttcctttatgcgatctacttcttgctgatagcgtttgcgatcacgagatgcattttctttagcttctttcagtgctgattccaaagctttcactctctcagctgtagcttgaagtcgcttttccaacttaggaagttcacagcggagatctgcattatcacgtaccaactgtttgtgcactttagtgagctgttcaagattattttcaagaaaggagattttttgcttctgagcagcgctgctccggtgtcatcagaatcaatctcagcactcttattaactctggtagccaggtcctgaacacagagtttgcgcaggttgtgtaaagtctgaagttcttttgccactatctcttccaaacccgtcaagtcttgtcttgcttgttctcgtctatctt

SEQ ID NO: 137965 - DNA, 1011 bp, Homo Sapiens
atggacccttcatttgtttgttcattcctttattccttccttcattcattcagcatttattcagcagcatttatattaaccgtgtgccaggcgtgttgtagaagcttgggcccaaaaatggataagacacagtgtatgtactcactgagctcacatattagtgtaagtaggcagatattttttaaatgataagtaatgtatcatttaaagtatatcaagtcatgatatactttgaaaaataaaaacataaagaggacagagatgacaggtgaggcagggggtggggtagtgagagaatgagtgggccgtttgtagactggatagtcaaggaagacctttgacatctaaatggaaacctgagtgaagtaagagtgcaagctgtacaattaatttgggaaaagagagttccaggccaagagaaccatgaggctccaaggtcatattgcccctggtatatgggaaccgaaagtagagggagcaatagggaaaagtttaggagatgaaattggagaggaggccagaaggtaggtcctgctgggccctgtggtaaggactttgaacctcaaataaaaagccaagaaggtataatgttaaaccatagatctgtgaaggcatttttataaggaactaaagtaacagtctaactctaagaacattaaacataattcgggagcatatatagaatatgtacttctatcctaagttaatattttactgtgtttcttctctgtatatagatttatgtggtccagggcatatatggctatcatcattatatgcaggatcgcatagatgacaatggctggggctgtgcttatcgatctctgcagactatctgctcttggttcaaacatcagggatacacagagaggtccattccaacacacagagaaattcagcaggtacagaacataccgttttaaattataatcaactgtatgtttcattagcccttaatataccattgataatttttgttacctcatggtgcagacttatttctgttttgaa

SEQ ID NO: 137966 - DNA, 530 bp, Homo Sapiens
  misc_feature (307)..(370): n is a, c, g, or t
ttttcagttgtttgtttcctttaattaacatctaaatagattatacatcttctataattataatatggaaatgtatatgagcaaaatatataaattttttggtgactgcttagggaagaatgatgtcagtgaagttcatccaaggtcttaagcagcagcatctatgcagccagggcgtggtcagcgtttggggacagaggtaaatatccgcaatccatgcatctctttgatttcttcttttagtgcctgattaaccatctggtgctgctggacagttctcttgtgcttaaattcttctgattcaatnnnnnnnnnnnnnnnnnnnnnnnnnnnnnnnnnnnnnnnnnnnnnnnnnnnnnnnnnnnnnnnnctcctgaaatgtcagtgactttgatcactgtagctcaaggaaacttttctttgagaatttgggtcactttgagctccctttcattctgggacggcaaatatcctatggacatagcggatcccgcagagcagaggtcgtgccgcggctgggcttcatgcca

SEQ ID NO: 137967 - DNA, 952 bp, Homo Sapiens
  misc_feature (393)..(408): n is a, c, g, or t
ctacgggacaatagagtgggcggcacaggggagaccggggggggcggcttaaaactttagggatctagtggggagagaacctgcgcttgttgtgaggcgtgactcctttgtataatattgtctcttccgcaggggagagagggacgccgcctgccggggggagcgccccctctccttgggggggtttgtgtgtcaagacgaaacccgtttttcgggttttgcaccacaccaccggggccgcgcgttgttgcattacacgggcaggggacgagactctcccaagactccccgtaggtgttaatcagggccccgggggagtcttttcccgtggcgcgggagaacaccctcctacatggagaccgcattgttttccaacatttgacccttgaactnnnnnnnnnnnnnnnncgcccaaggcggaaaggggtcttgggaaacgttttcttgcgggggggccgagggcggcccgaccaggtagtggtggggcggtgccgggggtacgtggcggggttgtttgtttcctttaattaacatctaaatagattatacatcttctataattataatatggaaatgtatatgagcaaaatatataaattttttggtgactgcttagggaagaatgatgtcagtgaagttcatccaaggtcttaagcagcagcatctatgcagccagggcgtggtcagcgtttggggacagaggtaaatatccgcaatccatgcatctctttgatttcttcttttagtgcctgaaatgtcagtgacttttatagctgtagctcgtggaaacttttctttgagaatttgggtcactctgagctccccctcagtctgagtggcaaacatccgatggtgaagtggaagcccgcggatcccgcggaggagaggcgctgccgcggccgggctccatgcagccatgcccggccgacgtgacccgccgcccgaggtcccc

SEQ ID NO: 137968 - DNA, 546 bp, Homo Sapiens
cgccagttgtttgtttcctttaattaacatctaaatagattatacatcttctataattataatatggaaatgtatatgagcaaaatatataaattttttggtgactgcttagggaagaatgatgtcagtgaagttcatccaaggtcttaagcagcagcatctatgcagccagggcgtggtcagcgtttggggacagaggtaaatatccgcaatccatgcatctctttgatttcttcttttagtgcctgattaaccatctggtgctgctggacagttctcttctccttaaattcttctgattcaattttaatttcatacatcgccccacaacctcctgaaatgtcagtgacttttatagctgtagctcgtggaaacttttctttgagaatttgggtcactctgagctccccctcagtctgagtggcaaacatccgatggtgaagtggaagcccgcggatcccgcggaggagaggcgctgccgcggccgggctccatgcagccatgcccggccgacgtgacccgccgcccgaggtcactgtatgcccc

SEQ ID NO: 137969 - DNA, 1180 bp, Homo Sapiens
cctggagctgtttattctactgcgagtaacaaaacctaggtcgttccatgttctcatgtacagggatataagcctccgcaatataaaatacaatgtacaggaatctctatcaagtaaactaaagaaacacacttgatttttacatttgggtatttaaattagaaaaatttgctttatatgttaaacaaacaaaaccttctcatcgtactagatgttggaacgtgacacctactttaatgtaatttaacctatggacacttggctttcaacaccaaacatctcaaactgatacattctcaatgttttcttaacttaaaaaatctgtgctataaagtgaaaaatctgtagtgacgtacaatggaataacagactccaaagaacaagtgaagttctttaattttacatctgtaaaagtttatgaaaatataaaaaattatcaaagtgtatttgtacaaataaattagccagatttttttacttcacacttcagaagtactcgaaaaatacacgacaagcaagagactgtttcacagtgaacagcttcctgtctcatttgcagttcttgagctagtgatcactagttcccgtctcagactttacacaagtcttgttccacgttcaaggacaaacttttacatgtatcgtctgacaaataccagtttggggccgagcgtacttttcccgggatacagaagaactgctcagaaggcgaaactggaccaacaaaactcctgattattcaaatcaaggactcctccctgcccccaaagtacacttaattggtttgttactttttttaggctggtaaaacttaacatttttcaataaattgttatttaaaatgcaacaattatactaggacagatgttgctttaaatcatgttttggaaaaaattgataaggtgatatataaaatctgagcacgctaagaaatgtgtttctgtttcccagttgaaaattgtaattccaattttatgacaaagaaagatgcatttgtaaggtttgtgtttctcaagactccagatacagctactaagacttctcccgtagccgcagggtggacgcctgcaggtcacgcccacaccggcctccgggcggcggctaagcggacgcgtggtcgacgatactccctgggataatccggccggtaccagcctgcttttttacgcctggtatatac

SEQ ID NO: 137970 - DNA, 270 bp, Homo Sapiens
aatattggactttccaattttgaaattatggataaagtcctaaattttctatagtggcttcttttctgtctgcatattttgttaaaattgtggatctaaaagccatatcctgtctttggtggtggcctggtaggaatggcttgtcctagttcttcaaaggtaagattgaccaaagcaagttctcattggtggtctgtgtttacatcttccgtgtcaagatattttaaagcatgaaaataaagccattcttgccctttttcgtgtgtttga

SEQ ID NO: 137971 - DNA, 346 bp, Homo Sapiens
  misc_feature (34)..(34): n is a, c, g, or t
cctaaggtaaaaataagtcaaaccttccagcccntccagatttcgggatgtgataccatacacataaacgttgtgtcctgaaacagtgctgaaactaatcccatgataagaaaactttatttttagatcctgtttgaccccatttattaattatttgatagacatgagatactttgctgccatatttttaggttagtggctagatttagtagaactagagtaggaaaggaaatcaatctgatgttgaaccttagtgtcagctacagagatggctatattgagattaccacgttgaaagattgccggatagcctctgtgtctaatatgaagccattaattttgtttt

SEQ ID NO: 137972 - DNA, 539 bp, Homo Sapiens
  misc_feature (524)..(524): n is a, c, g, or t
ggccaccgtctgcccatgctgcagggccccccagccatccaccccacagcagtcatatggattctgactgaggtagatggtccgcagacctctcgagagctgctcagacacagccttctggggaagggctgtgagcgagtttctacggagatccagggtctccagggccaggctgcccccaaaccttgggaaggtggtcaagcaattccccgacagatctaagtccctgagattcccaaacccagagaagtccaacgccataaagctggagtggaggcccatgttcctgagagacaggacctgtaacatgggggcaacatcctgggagtggggcgaggctcccattcagaaccccccagttgcttgagaggtctaagtaggtcagggaggtcccttggaatggggcagtctggcaatgcccccgggccacagccctccagagacaggctcctttaaagatgccatatttccttgaaattccacacagcttagggggggcccacccggttcccgagggcagcttngcagggggacaaagt

SEQ ID NO: 137973 - DNA, 339 bp, Homo Sapiens
  misc_feature (304)..(304): n is a, c, g, or t
tcataagcgaaccaaaggaggacgaagagttctcattaaaaatgtatatgtattgaagatggtggttttatgttttagaacaggaatgaggaaccttcagacctcgggcaagctctctccccctttttagtttaatttcatcaaatgcaaagaggtgatcccccttgtactgacagttgtacaaaatgtgtcacggctttaaaaatcatccgtggtattttaacacgaattaggaaaatccgtggtattttaagtgttaatgttgcttcgaccaagtgtagggccgggcgcggtggcttcatgnctgttatttccccaggcactttggggagggccgag

SEQ ID NO: 137974 - DNA, 368 bp, Homo Sapiens
gcacttccggatttgaatggcttgggttccactgagtccagtcctggttttgttttgtgtggtcaaaagcccgtggtgtggttgaaatggtgctggagataaaattttcatcatcatcaatgcctgatccagaaaaactgaggtgtctgtctctttcatatttcattttcttcatttggctcccagcctgctgagatggtatttgaagacgtcccagccatttgtgttgttgtgtgaagatgattctttgactttgatggtagaaacaaccatgaaacccaatcccaggtttcttgcctcttggttgctgtctcagttgctgtagcactagtgctcatcaaagtgacgaagggggatgaacacgggtg

SEQ ID NO: 137975 - DNA, 352 bp, Homo Sapiens
taatacaacacatcctgaaggggatgccctgtttccatgtgtgtattttactctgacacaaaccgatcactctcaggcttgaacaagctcggtgaagacctccaccagatacaaaaccaaaaaggccgagacagctgcaaaggtttctatttccctagagatgggagtttcatggaaggctaaggatcaccacagcaaccagactacaaaaacagtcgtgggcttcagcaccgtaactctggtaaagcaatttgtgctctgtgaaaggctggggcacagaagttgaagaatgatcaaagtaaacactgctcctcaggcaccattttgttgtgctgatttcaagacactgagt

SEQ ID NO: 137976 - DNA, 837 bp, Homo Sapiens
gtgttttcaaaccgtatttatttgtgtatttttccatctatatctatccccttaactcaaggttttatttttgacaaaaatatacaagattccaccaccataaccccacattattgctccaagtgatagagtcagcagcaggctaatagcaggctcgaaatgggtctttggtgtttggagaccagattagaatgcccaaagcagttagtatgtgcccaagcaaaaacctggaaaaatatttatttctgcttttcagacttgtattggcctttgatttgtgccgagtacaggatgacattaaaaacacaggctcttgttgccctttgacattctacatagcccttccacagtccgcttctaaggaaacagttcttttcctatacttttactacctacacccagaagcaggacatctgtttttaaattcgaaatttcagaattattttttcaaatattaatttttctatgtaattctgaaactcccccctcaccaattatggcttggattttgaaagctgactttggccgggcacggtggctcatgctcttttaaataaacatttgccttgcaactttctattttgtttaaaatgctaccattttttcgtaagataagagttatgtttcaacctaaatttccaaattactttgtgaatttcatgaagattttctatacttgatacttaggaggttaaaaatgctgttagagtctcattaagtcttaagtaaatggaaattatagaataattttcctagatttcaatgtcaattctatattgcttctgttatttccaagcagactgacatgattgaatcctaaagaaacctgatttgagc

SEQ ID NO: 137977 - DNA, 253 bp, Homo Sapiens
ttttatggttgcattgagaactttaatggtaagccgatttttcatgtttgccagtaagctcctgtgaggggttgagacggcggaacgttaagagtgcagtgttcctcccctccttgcctctagaggcatgctgacttccttcctggtcacagagccctggcaaagccaaggcaaagccagagctcagaacctagagacttccttttgacaaagcagcgcctcagaagctcttctaggctttagttggggaagc

SEQ ID NO: 137978 - DNA, 539 bp, Homo Sapiens
  misc_feature (398)..(398): n is a, c, g, or t
  misc_feature (455)..(455): n is a, c, g, or t
  misc_feature (461)..(461): n is a, c, g, or t
  misc_feature (472)..(472): n is a, c, g, or t
  misc_feature (494)..(494): n is a, c, g, or t
  misc_feature (500)..(500): n is a, c, g, or t
cagtcgacggtaccggacatatgcccgggaattcggccattacggccggggatttttgttgcaaatttaaatatactaagtttttttgtagactaattgattttctcttttctccccttaggttgagaaatggagtgaagttttgtaaagtacaaaactttcctgagattttgtgcatccaccttaaaagattcagacatgaactaatgttttccaccaaaatcagtacccatgtttcatttccgctagaaggcttggatcttcagccatttcttgctaaggatagtccagctcaaattgtgacatatgatcttctgtcagtcatttgccatcatgggaactggcaagtagtgggacactattattaggccttacttgccgaaacaatcttaaataantcttctgggtatggaattttgatggatccaggagtgttcactggaagttttcaggantcttantgttaccaaantggcaggaggttttacgtttcnttttcntttaggggaggaggcagccgaggagggccaccaaaagga

SEQ ID NO: 137979 - DNA, 439 bp, Homo Sapiens
agtttggtttatatattttattgacatggttactcaatgtccacatcattccatctgcatcgtcttcctacaaacagtttttcttctactattcggttatttctcctttttttgtttcctatttcagaatcaaatttattttacttgcaaagtcagtggaatatggtttggaaccagtagggcctctaacttaagcccagaacctgtcaaagagaagtgcagtatcattgctaagacttgaacagtttatctctcagaatcttcagttcctttgaatttctcagctcttagtgtaatctgttttatgtgtttgttgtagacttccattatggatagatttccaaaataatttgggtaatcaactggtattttagcattctggtaactaacatgtttaaaaatctaaggctctttttcatgcaaaggagactgatttttg

SEQ ID NO: 137980 - DNA, 367 bp, Homo Sapiens
actttttccatcctattacataatcagctcggaatagatacaaataattcggcagaagagcaatctggaagagacctccaactgcttttccttgttgaagcccctttgtgtgccaggtagtaatttccaaggcataaggtttttctctgaaggttgtattcaactaggaaagacacaaacattctcctaacttccacccaaaagcacacatacctttctttgttaaaatcataaatggaaaaacagaaacacaaggaagcatgagaaaggtgactttgaaattaatgttaaagtctgaatgacaacctagaaccttcttattttgggccccaaagcctctcagtgtgggaactccaatactataaag

SEQ ID NO: 137981 - DNA, 390 bp, Homo Sapiens
gggaggatacctatcaaaatgccaaagctgcagggacacgaagacggttgaaaattcaacctatgtatactagatccttccagtttgatggtttggtcattcttcttcatgattataccatggagaattttctgtgacaagggtggtcatggaagtaagtgagtgatcccctggtttctcattccttaaagcagtggttcgcaaagtatggcacaagaccagcagcatcagcagcctttgggaacttgttagaaacgaaaattctcaatcccatcccagatctgctgaatcagaaactctaatgagaggacccggcaatccacgttttaataagccctcctggtgattctgatgcacactaaattcaactgttttaaagggaaagccctt

SEQ ID NO: 137982 - DNA, 711 bp, Homo Sapiens
  misc_feature (23)..(23): n is a, c, g, or t
  misc_feature (33)..(33): n is a, c, g, or t
  misc_feature (68)..(68): n is a, c, g, or t
  misc_feature (79)..(79): n is a, c, g, or t
  misc_feature (98)..(98): n is a, c, g, or t
  misc_feature (111)..(111): n is a, c, g, or t
  misc_feature (153)..(153): n is a, c, g, or t
  misc_feature (161)..(161): n is a, c, g, or t
gagaaggccatagtaataaaatnatcttatgancactgttccccaaaggccaaagcctgaagatattnccccttataanccaatcagccttatatttnaataagtcctgantcaacctgactacggatatatggggccaccagggtgcatggntgcatgtntgctcagcctagccctggaagtgagcactgccggccacagatcctgggaaaggtggtagtaacccagaagatgtagccttgaagggaggatacctatcaaaatgccaaagctgcagggacacgaagacggttgaaaattcaacctatgtatactagatccttccagtttgatggtttggtcattcttcttcatgattataccatggagaattttctgtgacaagggtggtcatggaagtaagtgagtgatcccctggtttctcattccttaaagcagtggttcgcaaagtatggcacaagaccagcagcatcagcagcctttgggaacttgttagaaacgaaaattctcaatcccatcccagatctgctgaatcagaaactctaatgagaggacccggcaatccacgtttttactacctggcacacaaaggggcttcaacaaggaaaagcagttggaggtctcttccagattgctcttctgccgaattatttgtatctattccgagctgattatgtaataggatgaccattctgatgttggagcgggcgc

SEQ ID NO: 137983 - DNA, 318 bp, Homo Sapiens
  misc_feature (275)..(275): n is a, c, g, or t
  misc_feature (297)..(297): n is a, c, g, or t
  misc_feature (308)..(308): n is a, c, g, or t
acaaagcatggtagtaaattaaggaaattattctagaataagtcattaaatgcagagaagagatcaaaagagtagaggcatcttttacagttgcactgcttacagcaatgataggtaacaagtcatactgttcctaagaagtttctaaaggcatccacagagaatgggaaaaatgctctgaacgatcgttggaatgatctattgggcaaaattttctttgttcatgtggccaccgtttaaggcattccatatttgctagtgggtattaatgggcnttacattgttgacaggaaccanttactttggcntatgtgggcc

SEQ ID NO: 137984 - DNA, 269 bp, Homo Sapiens
aaaattttcattcatatgaaaaatttcattaatatggtggggagttggagggatgctctcctgtgcagaatacggaaggttgtgtccagcatgtccctctggaggggctacaccatcagctagcgacatttctaggcccaccactgcagcagctctagctcacgatgtctcctaaagctcacccaacaagctcagagtaagttttgggggcgtgggtgacatgccagaacgggctggctaaggtgacaactcaagcaaagaccagacag

SEQ ID NO: 137985 - DNA, 410 bp, Homo Sapiens
acttgttctaagctagtccagtatcattttgtttacggtcccataactgactggccatcatgagtatggtctaaccaggtggaatagtgtgaagtggacctagtaccttttcggtgctgacacctgcctcacatgaaacaaaattttagatagaacttccaaaaatgttttaagcgatacagggacttatttgaaaggataaaactcctttgcatatatgagctatatgatacgtttgttttataaaaagtcttattcctttataatcactttgaagtacagaattcaaaattaggatatttgggtgttgccctagaagagcttacaatttagtttatgttctttgcacaatgattcataataaaatgactctccttgaagaaatgttgttcttagcttatttctgtgaa

SEQ ID NO: 137986 - DNA, 543 bp, Homo Sapiens
actgttctgtcccagaggaaaaggccccaatacacttcacaattgaaaaacttgaactaaatgaaaaaatggtcaagctgaaaagagagaagaattctcgagaccagaattttgtgatactggaattccccgttgaggaacaggaccgcgttttatccttccgatgtcaagctaggatcatttctgggatccatatgcagacctcagaatctaccaagagtgaactggtcaccgtgacggaatccttctctacacccaagttccacatcagccccaccggaatgatcatggaaggagctcagctcatcattaagtgcaccattcaagtgactcacctggcccaggagtttccagaaatcataattcagaaggacaaggcgattgttggccactacagacatggcaacaaggctgtgtactccgtcatggccatggtggagcacagtggcaactacacgtgcaaagtggagtccagcgcatattcagggtcgcagcatcttggcaacatacaggactatttcccagccgaactggcatcttcct

SEQ ID NO: 137987 - DNA, 408 bp, Homo Sapiens
aattcaattggcttctctccaaaacccatagcccctggccccaggttcaggcccccaaacatccatcacctgtattatgaacaacatccctctaactggtctcctacctccagtaactccttctccaacccttgtttcacagaacaaccagtgtgagtacaaacaaggcacctcacgacacccctttcctcactccactgaaaccccctcaatggctctccttgcagaggagattaaaccaagaggagatccacgttatttctagtcagctgtccgtgtcccctccatatcaaatcatgccaatgagtccagttgtctcctgttttgggtgtttctacatcgttttccatgtctaagatgccctgttcttcctgggcaaactcctactcactccagatccagatcaaa

SEQ ID NO: 137988 - DNA, 628 bp, Homo Sapiens
  misc_feature (78)..(86): n is a, c, g, or t
  misc_feature (513)..(562): n is a, c, g, or t
tttatcttgtttctgcgttttaattttatatatgctaaaactctacagtatattggctattatttttgctttaagtannnnnnnnnagtttgattaaacataagaatagtttaaccttcatcttaaacatatccagagatctttattcctttgtatccaaatttctgtctttgtggtattattatattgtatctaaagactttccaataactctttttttggtagcacaaggctgctgataatgaattctctcagcttttgtttgtttgaaaaagttgttttgtcttaatttttcaaagatacttacttccagggacatagaattctgggttggcagttccccaccccccagcccttaaagaggttactcgagtgtggcttgcatggtttctaatgagacattggctgaacttgcctctgttcctttgcatactatatgtcatttttctctgtctgccaccaatatttgctttggttttcagcagtttgaaaatgatgtgcctgagtgtggtnnnnnnnnnnnnnnnnnnnnnnnnnnnnnnnnnnnnnnnnnnnnnnnnnncgctgagcttcttggatctttgacttgatctctatttatgtttaagaaattcttagccagctatca

SEQ ID NO: 137989 - DNA, 994 bp, Homo Sapiens
ttttttctctcttggatgtatcaaaatctcattgaggcattctaaaccaaagaaacctctgaatttgaaacagggttagtagggacttttatacccagctgggcatcccagaagcctggactctcaggactgtggctagattttgcccatgatctgtagattatgctcttgcaccggagacttgaaagttatgagtttgcattcaaacaaagaaccaccagataaaacagatgttctctaaaactgaggaaaaaaagtttagagatatacactgtatagagaaagaaagctttttgctggattgttctccttgttaaggaaatgtttaaaactagtactcccgggcacctgtgattgcattttataggattctatttagtaatatgatgtctattttacattcagccccaacctacgtcactgaaatagaataggaaatagcagccactatctgagagtacccagttctaggaaagtttggtgcctcctcaagaagtcactatttccatagtcctcaatcatgaatagggcttgtttttgtgataatgtaactattaaacagcaagaaatgcctataacttcagagccttctcatttctatatcttttatcctcttcccagggctttctgatttaaggcaataatgctacactataagtagccttttgtgaaaataccttaattgaggtcacttaagattagatttcagtctgaaagtctacagtttacggagcaaaaggtggagcctaaagaaaccactggcaggtgttttagtcagtggtgtggaaagataatgtttcttgtttcaacccagggcatttttacccatcatgcagtgaggagaaaatacatagttctgaaaaagaacccacactaggtagccctaattttctatctcttcactctaaaaaggatggaaacaagccctactgttccataaccattcccagggatcggctaaggtacattgctgactgctatagactcagtgtgc

SEQ ID NO: 137990 - DNA, 1014 bp, Homo Sapiens
  misc_feature (400)..(455): n is a, c, g, or t
ttctagctggcaatccttttattcaagttgaaagcacttgtaactttacatacggataaaataaattatatagaaacagaaattccaaattaaataacaaaagtacaaggataaaaagcattagctaaaatttttttaatggtaaatactacctttatttaaaaaagttatacatgctagaaaaaagcataaatgatatatgtaaacaattgtttactcaatactttttttccttgaaaaaggtgcaaatgatctttaaatgtaaacacaaagttgccaaacatttttgtagttggggaaagggagaaggaggttattccttttaaatgcagttagtcttattcaaagatttttcttgcaaaatatattgaaaaaaatttgtctatgaatacaatgaggnnnnnnnnnnnnnnnnnnnnnnnnnnnnnnnnnnnnnnnnnnnnnnnnnnnnnnnncagaaagtgcaatttgagagaagtagtaacaatgaccttatagaatgaagataatgatacattgtttgtataaaagaaccaagatattaataaaatgcctcaaattgattttacactctttaatgtgtgctattacattaactgaataattcattcccttggaggctgttattaaaggtaagcctcagcttaaccaggcctgagcatcaagaataaattgcataacagaattcactgctgggagaagacatttctccctgctggtccttggtagcaataaggaaacaggaaggacagttgctttagtcagtaacatttttgagcaaaaactgttgcagagctgcatgtgattctcttggattctcaagacagcatatgagacttatatattgtttttataagaggcactgagcagagctctagatctagcagaaactctatgagaatattatgaaaaaaagactaaataaacaagttcatatagaaagaaacaagacataaaattacactgatgaaaactgtagtgtctgagtcctggtttttattgatttagtatccc

SEQ ID NO: 137991 - DNA, 658 bp, Homo Sapiens
gaaaatggattctctaaatgacttgtttagttggttaccctcagggctaagttcattttttcgttctggtcttcaagtaattgttattataatcataagtacagtttccattttcctagttatcaaattactcatgattcgtgtttcagcttgcttgtgatcaatgactaaaactagaataataattgcttaaaaagttgccttaattgaaaataagtcacacaaccagaatcagaccactaagttatactttccttctgttgttcataattaggctttggcttctttcggcttatgaattaaacatttcccctctctgtggggcatgactctctaggaatgagacttcctagtgatgtgagatataactactctctaacaaatgcttcttccgtaatgctttcttcaaagatcttgaagaaaaggggaaaatgtgaaagaaaaggaatagtctgtctatttggggcttctaaaagcttaggttttgtggaagattgactttggagaccaagtcacagagcatgacctcttaatcttgactttttattatagattaatttcctttcttattttcttgtacctgactcagatggtacctgagatacaagactccttgactgagtctatataagtctccttgactgattcttgactgaga

SEQ ID NO: 137992 - DNA, 973 bp, Homo Sapiens
aaaccggagaggaagccagcttggtcttgctctctgcctcgtcccaatccccggctcttaccaaatgcagatccgttggctgaatgccttttagtcttgcatacatgcatctcataccgcacagacccaaatttctacaacttgtccaggtgcagtctcctcagaactacaaagcaagaaaagatcacctttgggctcaggaactcacagtcgttctccctctcccggaaggcacaatgaccaggacagtaccgagctttgcagccatattgaactcaccatcaactcagcacattcaactcaatcagtcaaaatcgtcttttcctgctggtaaataacactgaaattgtgggaagatgggatggtaagaacaaagtctgtctctggaagcacgggcgctgtctctgaagacaaattgatcgtaacacaagcagacccggtggaacgacctccatgctgaaccctcagctccccctgcatttggaccatggcctgatggaagataaagagactgatctcagagtggtacagatctacaaccacgtgaagaattggatttatattcatctgactccagaaagttcctgagattcctctgcttcatcatctttcccatgccctttaaaacacgttatcaaatagcaacaggtggtgcaataactagacaaatgattctcagcctttttctttgtcattagcactcccggaaggagacgtgttggacacttttccttgtcaccaccccatgaaccttccataccacaggtatactgtgtattcggttatgtatcatctgtacatctgtttctaaaacacagaaacagtaagagccccccatccaagaatccattttaatcctcttgggtgtgatgtcaccccccaaaaatgcatatgctctggagtcagtcacaaacacattacgaatgcatgatcacttaagaatgttaccaaagtttataaatttgagatgata

SEQ ID NO: 137993 - DNA, 422 bp, Homo Sapiens
tacaggcgttagccactgtgcctggcagatgagaacattttataaccgtcctcctgggaattttggaataatatcatcaataactacaaaaacaagaaacatttattaagtgcttattatctgttccaagagctttggatatatattaattcatgggtcctgtgaggaggtaatgttatcaccctcccccttcataggtggggagactgaagcttaggaagatagaataggctgttgcttaaagccacccagcctgtaggtgatggagctgagatttaaagctggacagttaggaatcccctacctctgatacccgcttcccccatgtcatgcatcaagccaaactatggacggtctctccaaggggtgtataaacaatcttggctgtgtccaacacccctgaattactgacttcacttcaa

SEQ ID NO: 137994 - DNA, 239 bp, Homo Sapiens
gtatccagccttcattatcaggttgattaatatttgctccatttttctaccaggaacttcaccatatcaacattgtcatcaatgcaagcctggttcagggcagtgagtccgtccacattggcgtaattgaatgtcggcgccccggtcagcagctttgagacctcgtccgtgtcgccgcttgaacaagcagccaggaagacgcgccatcgtcgaacgaagggggatgacacggatcctct

SEQ ID NO: 137995 - DNA, 474 bp, Homo Sapiens
gttgttttctgaactagaagaggaaaaaaatggcaatttttgagtgccaagtcagaaagtgtgtattaccttgtaaagaaaaaaattacaaagcaggggtttagagttatttatataaatgttgagattttgcactattttttaatataaatatgtcagtgcttgcttgatggaaacttctcttgtgtctgttgagactttaagggagaaatgtcggaatttcagagtcgcctgacggcagagggtgagcccccgtggagtctgcagagaggccttggccaggagcggcgggctttcccgaggggccactgtccctgcagagtggatgcttctgcctagtgacaggttatcaccacgttatatattccctaccgaaggagacaccttttcccccctgacccagaacagcctttaaatcacaagcaaaataggaaagttaaccacggaggcaccgagttccaggtagtggttttg

SEQ ID NO: 137996 - DNA, 502 bp, Homo Sapiens
tgtatatgtgattttaaaaatgtgatgtttttataatactgcatttattctgatcattagatcttatactctcatgccaatttttaaatttgtttttggcaacggggacctttttacaagtgttttatgtaaaacctgacataaagtatgaaacctgtgcttcttgggttgaagtgaggatgggaaatccagatgtcaactcctccaccactactaccagcttagcttgtctatctcctgtaacatcaccagaggacccgcaggagcctcacagtgaatggtgttcaaccacggccttatggaccagatagtgttctcttaatttagaggttgcttcactctgatgctgttcttggaatgtgctgcagaggcactatgagatattaatagtttaacaaggcttttttaatttcttcctatggtaaagctcttaggcgggtcttagagctgctgtatgaactatactcatttctgcataggtctgatcagtactctatttggc

SEQ ID NO: 137997 - DNA, 1314 bp, Homo Sapiens
  misc_feature (576)..(813): n is a, c, g, or t
  misc_feature (831)..(864): n is a, c, g, or t
  misc_feature (904)..(943): n is a, c, g, or t
  misc_feature (1160)..(1206): n is a, c, g, or t
aataggagaaaaggcatgcaaatttattacatacatgcacaggagtcccacaaaatgtgagactctagtaagggccagactgatgaagtctaaatagcatttgagctccaaaaactggggcctgaggtttctgggaggaggtggcagcagacgctaggaggttgaggggaggaaatgcatggcaaacaaaggctgtcttgtcatgcagataaaacctctcaagcagcccagtcctcagaagagatggtatcaccttcagtatcctttccctgtgagttaattgtccatgttttatgagatgctagggaaagggctcaagacaatggcattccttctgcaggaacttcccttagaaacaaaagagaacatcagagaaggcccctccctgcgcttcaggagggttttgggagggaaaaggagtgagcgatggtcagatactttagttcaaagcattcagcctcccacagcttcatactttggggtatcattttctgagccccaccaccaatttcctaggataggatttttaaaatttaactcaataaatgcaggggtgggccaagcgccgtggcccannnnnnnnnnnnnnnnnnnnnnnnnnnnnnnnnnnnnnnnnnnnnnnnnnnnnnnnnnnnnnnnnnnnnnnnnnnnnnnnnnnnnnnnnnnnnnnnnnnnnnnnnnnnnnnnnnnnnnnnnnnnnnnnnnnnnnnnnnnnnnnnnnnnnnnnnnnnnnnnnnnnnnnnnnnnnnnnnnnnnnnnnnnnnnnnnnnnnnnnnnnnnnnnnnnnnnnnnnnnnnnnnnnnnnnnnnnnnncagtgagactccatctcnnnnnnnnnnnnnnnnnnnnnnnnnnnnnnnnnngcaggggtggcacatagtatgacttttttcccaaattttnnnnnnnnnnnnnnnnnnnnnnnnnnnnnnnnnnnnnnnnttacccttattttgaagtcctttattgtgtaagattttctacagaatagaatctatttctggctcttcattctttccatgaggtgtagattatttttacaccaatgtcgtatttttcttgctactttgtaatatgttctaatattacatattagagcaaaggaattaaataccgctcacaaaaaaggaaagagaaaaaaccccatacggttattgtnnnnnnnnnnnnnnnnnnnnnnnnnnnnnnnnnnnnnnnnnnnnnnnctaagggccacaggagaatgctgggggggtgcagaactgatcttcatttgtgggtcgttacataactctcatttgccaaactctaagtaagcccaaagcaaatgaaac

SEQ ID NO: 137998 - DNA, 734 bp, Homo Sapiens
ctcggctctaccttgtctccaccctggtggctttacagaagacagcaggagacagggtggagacagcagttgtcttaaagggaggagtggtggtctgaatgtctacctcttctgcccccctccccattgcatcctggagtcccttgcctggctccttcctgagaccctctggtggtgtctggacacatagctctctctggacaggtaacatgcacaagtaattagaatccagagttgagttcagagttatggattgggctgcaggatagtgccagggtctgtgccttcccatgtgaaactgatggaggaaggctgagtcagaagtggggagatccgaggcccacaaagcagaagcgctacttccactccaaaaaggccctggtgcttgacaacttcctggattgcccactgttgcagccccagtgtggacaggcagggagatgcaggctccagttcatgtaggctctgatcaagacaagaacagcaaaggccacagaggcacagatgcttgtcccatgtcacacaataaaggggtcagcacttgatcacaggccttatgacttccagctgggtgtgctcttaccattaagcctcacttctctagcttgggggacaggttggagggaggatctagagggtgaggtaaggtgaagtcaggtagctgaggctcacttctgcagcctggaaactctgctctggggccagtgacacacctagcgctctatggccatact

SEQ ID NO: 137999 - DNA, 593 bp, Homo Sapiens
gtttgtctgtttgcttgagatagggtctctctgtgtctgccaggctatagcgcagtgaagcgatcatagctcactgcagcctcgaactcctggggtcaagcaatcctcccacttaagcttctcgagtagctgggcaacctgttattcttgagggcaataatcaacagtgaatgggagggaggaaaggcaagcagggaggcagagactgtctgcttctactgcagcctgaggagggaagataatgaatcatccctctcgtaagctagagatgaaaggagggaggttcttaaaaccctaatgaggctcagcacacaaagaccccaagccttcctgccctcacagtcctggtttgtgaggcttcaaaaagcaggggagggagccctgaagcaagaaaatagcttgaccatccaaaactgtcttctttgtcttccacgggtccacaggcaaagacccacaccaccacagccacaacgaggaaacacggaagccagcgttctacaaacatccacggagcatctcccacgtgcagccgttctcatcatacatgcctcacttaattttccacactgggccaggcacagtggctcatgtct

SEQ ID NO: 138000 - DNA, 835 bp, Homo Sapiens
gggtattacaatcaaagcataaccccggcaaaataatactggaataagacgctggttgctgaagtgcttgcatttttccaccctcaggtgcctattacttgagactgtgaggtgtttttctggaatgtaactggtattgaggttaatgtaccagttttagaaggtgatgcatctgttgtagaacactacctggtatttctgttgttttaattgaactctgagtttcaggtcttgggtttggaactttgtaatgttgaaacagcatttggaagtgtaacacttgttactgttacgtttgaaatgatggagtccattcttcctgacatcagtggttgtggctttcaatccttcatctttacttgttaaaaaagtagctgttgacatcagagacattttaagtaattcattggtgattgttcctttaggagttgttccagttgttggtgtgacaacatttttctgtaatgattctgtgtttggtgttgttatagatggttttgttgtagtaacacaagtgaattattagctgcctctaaaacacctgtgctgttactgctgcaaatactgggcagacgaaaaagaatggtcacttgaagcagttccatggtgcccgtagatggtgtcaatatcttctttctccagaagcaggcagggacaattccctcccagcctggcagggccttattagcaaatggaaaaggtgtagtgaatgtgaatagccactgcccattcctacttattttgggggctctgataaagaacgggaggaaatacacacactcccccccggccgtaatggccgaattcccgggcatatgtccggtaccgtcgactg

SEQ ID NO: 138001 - DNA, 1183 bp, Homo Sapiens
  misc_feature (94)..(130): n is a, c, g, or t
  misc_feature (195)..(203): n is a, c, g, or t
ggggggaaacaccaaaaaaacgtttttttggggtttaccaatttttcacaggccaggccagggtttatgtggaaaaggtcgggggaatattgannnnnnnnnnnnnnnnnnnnnnnnnnnnnnnnnnnnncacacccctttggtgcacataagaaaggctggaaggattttaaagcgtaatttaattgcccttannnnnnnnnagaggaaattccttcaagctggtccagttcttgggtttttttccttgttgcagaggtgctccacccagaattcatgaggaaatttgtcttaaacggtaagaaagctttcacgctcttctttatcaggatggaggttgatcatttccattttctgggtgtgcccggatctgccttccagcacattcggtacaaacccaccagaacaaatactgaaagtgttattacaaatcaaagcaataaccaccggcaaaataatactggaataagaccggctggttgctgaagtgcttgcattttttccaccctcagtgcctattacttgagactgtgaggtgttttctggaattgtaactggtattgaggttaatgtaccagttttagaaggtgatgcatctggttgtagaacactacctggtatttctgttgttttaattgaactctgagtttcagtcttgggtttggaactttgtaatgttgaaacagcatttggaagtgtaacacttgttactgttacgtttgaaatgatggagtcattcttcctgacatcagtggttgtggctttcaatccttcatctttacttgttaaaaaagtagctgttgacatcagagacattttaagtaattcattggtgattgttcctttaggagttgttccagttgttggtgtgacaacatttttctgtaatgattctgtgtttggtgttgttatagatggttttgttgtagtaacaagtgaattattagctgcctctaaaacacctgtgctgttactgctgcaaatactgggcagaagaaaaagaatggtcacttgaagcagttccatggtgcccgtagatggtgtcaatatcttctttctccagaagcaggcagggacaattccctcccagcctggcagggccttattagcaaatggaaaaggtgtagtgaatccccggccgtaatggccgaattcccgggcatatgtccggtaccgtcgactg

SEQ ID NO: 138002 - DNA, 1214 bp, Homo Sapiens
  misc_feature (1093)..(1109): n is a, c, g, or t
gcaagtatgagacattttattttctaattgaaactgtattaagacatttacttggaatcacattattcccttaattttttcacagagaatattccatttactgtttagtttgtggtcttgtggacatgttctaagtaatatatttgttagcatggtagtttcagttgggcaaaacttactgccaataagacttgaatttaatttgtcacgtatttccaatggcaaccaatgatcaggtgcttcaatattacaaatttcaattcttccattctttatgtctatgaatactttaatttccaagtgtgactgttcatataacacatgaaaggaagtatttatactaaactttggagttttgccatatatccactcccaagtttgcagttctttggctttgctatttattccaggaaacagtgtctcatccgttgggtttattaggtgaatgtgattatcaatttgatgataggcagcatactctgtagcaacagcattcattagtacttcacaggtcagagtgggatccttttccaaaagatttttcactaaggaagggtatgctagcagtggcattgctcttgatcccttggtaagggctctttagcaaagaagacaggaacgtccccatcagtactacataataaagtgcaatggtgataggcagtagtccggccgatcttagaagctgttcctgagattttaaactgtccatcaagtaaaaggtcaaatcttttggtagcctgcacatccagctggggttggacagcattcagagctctcacaattaatttcagattttccattctatcatacttttttttggttgtaaagaaagtcaaattgatattacccatatcatggtagactgttcctcctccacttcttctccgagccagttttataccttcttctctcattagattcaggttacattcctgccaaggattttgatgcctaccaattacaacagagggagaattctgccaaaagaatagaattggtttgccttctagattcatatggtcatggatccagtcttccacagccagattttgatagacatcattggaaattgactgtaaaatgagcccannnnnnnnnnnnnnnnnaaagccagctgctgggacctggcagttacaaagtaactggaagcaattcttcattgaaaatgggatcagcatgctgcggcttccggtcgtacccacggcctcccc

SEQ ID NO: 138003 - DNA, 377 bp, Homo Sapiens
  misc_feature (61)..(237): n is a, c, g, or t
ggctggcgtgcaatggcacaatcatggctcactccaatctcaccctgccaagctcaagcannnnnnnnnnnnnnnnnnnnnnnnnnnnnnnnnnnnnnnnnnnnnnnnnnnnnnnnnnnnnnnnnnnnnnnnnnnnnnnnnnnnnnnnnnnnnnnnnnnnnnnnnnnnnnnnnnnnnnnnnnnnnnnnnnnnnnnnnnnnnnnnnnnnnnnnnnnnnnnnnnnnnnnnnnnnnnnnntgagcaccatgcctgggccctggctatgagaatctgggaagcactccaaccacaagtaaatagttcatccacacctggatactccaaaatcactgcaccctggatacactgactgtctgcccagcaaggagagtgagcga

SEQ ID NO: 138004 - DNA, 1458 bp, Homo Sapiens
  misc_feature (125)..(167): n is a, c, g, or t
  misc_feature (233)..(286): n is a, c, g, or t
tgagctactgcacccggcctgctttctttttagtgaaaaggatctgtgggagcttttattcccatggctgccttcctcaagtcaacctctttccccggaaatggcatcatctctggactgttgtnnnnnnnnnnnnnnnnnnnnnnnnnnnnnnnnnnnnnnnnnnnaccatgcccggctgatttttgtatttttagtagagacagggtttcactatatgggccaggcagatnnnnnnnnnnnnnnnnnnnnnnnnnnnnnnnnnnnnnnnnnnnnnnnnnnnnnnaccgtggcctctgaaagtgctgggattacaggcatgagccaccgcgcccggccccgttgtttcccttctaagaaacgcagtggtctctgaagcctgcaggggcaggccagccctgcactgaacgcctgttcttgccaggtggcagaaggttgctgctcatttgagcagtacctgtcacccctcctcccactgctgcggctgttaactcatcttcaggtctcacaccttctgcacataaataagctatttttaaaagttattatttttttactctttcttttctttggagagggtaccaaaggatagctgttctgtttaagtagggacctctcatggcctacaggctttgacatctgagaatcaaactggagaacattccgaagccgttcttataagtgtctccatctctacctgggctgaaatggaatgtgcaaatgtagcccagcctggtccttgggtgttgccagttgattgatgactgggagccaaagtggcatctcctttgacctaaacgggcgatgatgaaataaaactcaacagcctttctctcatcttgcattgtgagatgcgaaatagagcgtgtctctctgcctctcattttaggctgaggccgtccaaagcggccatgccccatgtttccactagatggcgctgacacttcaggcatcaaccctcatgggcctctcagccttgcaaaggcagccacttaaagtcggtgtcctgtgtggggcaccaagctgagctgcagacacccagtaggggcgaggcacatgcgtcccattttaagaggcttgtatttatgagctctttgcttcctccctcccactaactttaaagaattgctctccatctcctttggcaaagttcctttgccctttgtcttatttttgtgaaacctccaaggtatttccagtccatttgcatccaatctggcatctttacggagagcggtctcatatgctattgttgttaacgtggactagtatttatgtgttgagaacactggctgtttgtcaggaaaagtgtggccaaaacaaagagtaacggccggccctggaaatggatcagcaaaacccatttcccccgtgcactcattctgagcttccttccttcatttctgtcattactgctgagaactggactgtgcccagctgacctttcccttccttgcc

SEQ ID NO: 138005 - DNA, 1107 bp, Homo Sapiens
ggcccctttaaaacagcataggaaaaaacaaataaccagagatgacgatcgaggctctccacacgtgctgggtttccgtaggacatgctgctatggaaacgcggtgcagcagccccccagaggcgacgcggcgcgcatgcgaggtcgagcgatccaggcagctactcgggctccatggcctcctccggccgcagtggatgcatgcgtgcgggggagccgggggcgggggcccagcaactttccacgcagggactgcctctcacaagagcacttcctcctcccccacggggggcgggtcggtgccctggaggttgtcttcgctgccttgcttcgtgagcaagtttccaggcgctgacagtgagcgttcctcccgccggttgccctcgaatgggttcccaaaggagcgtttacgtatcatggtcttcaccaggatcttgatttccggcaccacgatcctcgactcggggttcttgtccagcatacgggtgatcaggtccttcaagtcctcagctatgtcgggctggtctggaaattccagggcctgactcttgatcttactgtgtaaacacatgatccgctcgtccatgaatgggcactggccaaagacaaagcagtatagtgtcacacccatggcccaaacatccaaggccttcccagagaagatcttgcaggtctcagagagcgactcgggtgccatgaaggcgggcgtgcccacggtgttggagaggagcgcgtcactgcccttgaattcattgctcacaccaaagtcagcgatcttgatgtgcccatcttctccgaccaggaggttggaaggtttgatgtcacggtggatgatcttctggtagtgtaagtactcgatgcctttgatcagatcctggaagtagaaacgggcctggtcttcagagagtggtttgagggtgggcacttccatcacgggcccttggttgaccagttcgaacaccatgtacagatggtcctcattggggtcatccaggacctccaccagcttcaccacattggggtggtccagcttcttgaggatggcaatttcctggtacaccctcgtgccgattcagccacccagcctcgctacctagagcgtaggtt

SEQ ID NO: 138006 - DNA, 936 bp, Homo Sapiens
cctctgttatccaagtagaaattctgggggtttttaaatacagcatatttctcctctttctccaaaaatagtattttattttctgtgtctcttgtccagtctgataagacttcaacaacattttcatggtcttcaaaaaacctctcaatttgtagttccgggtagatttcataaagacaccagtctacattgcagtcacaatgagttttctcgaaaaggttgtccagaacatctcgggccagctgccgctcatccaccatcagtgactttgtgctgttatcattcatgtgcaccttgacgacgagcttcttaaccttggcctccttcagtttttccagcgccagcttaattttatcagccttggcttgggcttcttcctcttcctgagagagaggttcaggaggtggtggtggcagtggaaggtctaacacaggatcggctggtggaggtggtaagtcatcctcatattggctgataccagtggcagcaacatttgttccataaccaagagaggctgcaccactgaaaattgatgcttgtagagatgctgaatgatgttgattctgcaaggactctttctgtgcctggattgtcctctgctcagcctcacttatgtctgctaccagatctgccatgagagcatctaaatcttggtcttccagtgcatttaaggactcatttaaatctttaaaccccacactgtagttaaattcagctctgggtggattagggtcaggaggagggagagtgtcaactcctaaactctgagtcagaagatccatctctcccagcaaagtgctgaacatttggtctatgtcttcacttgactcacccatctcgactgctctgcggggcgctgacggggcgcgggaaggcggcgagactccggccgggaaagcgacgcgcggtgcagactgccgcacccgggctccaggt

SEQ ID NO: 138007 - DNA, 346 bp, Homo Sapiens
  misc_feature (200)..(200): n is a, c, g, or t
cagctttctctgctactttggggaatttagaaggaaatcagtacttggcaacctggtatttttagctgccaggccaaaactccagacataaaccccttccctttaattgaatgatgtttatatataaaggaatagatctccccaagaaagaaccccagaacactggttccattccagtgtgggggctgcttgggcagagntgacacctgtgcattagatgcaatagacacttcaattcctggcaaaaatgtcggccaacttaggtgctcctttaccaacttgcgggaggcccaggcttcacaccatgggtcccacaggcttcaaggtttaggattctattgtggag

SEQ ID NO: 138008 - DNA, 643 bp, Homo Sapiens
tatatgcatttttacacaggtaaaaacagatcctgggatgttaaataacttgtccaaagtcacaaagctagtcagtggcgtaactaggatgtgaaggtagcacatcattgggattgagagcaggctctggaaccagattgtctcagttaaatgcccaataaattttaacactttttattattagttacgtatgtttcattccctcatttatttggcttatgacatatgaattatccccatttatctgagggaacaggcttggatggcaagagtcctctttgcctgatcaaatacgttctgtgacccaccccatgctaactccctattagagccagtgtccttcaaaacatgcttgctccacttagctggtctggaagccatccttcctgccaaagaggtcttttatgcttctctctgctgctatcaccccctcctccatagcctactattctttcttacacaaaatacacgcattcctgttataaaagatttgaatacacagcaaatagagtccttactgatggaaattgacattgggaccatttgtttactattataaacaatgctgcaatgaacctaatagtatgtatgtcttataaaaatacatttctggccaggcacaggggctcatgcctggctaatt

SEQ ID NO: 138009 - DNA, 451 bp, Homo Sapiens
  misc_feature (379)..(379): n is a, c, g, or t
tctgaatgagaagtgagaaggtttttatactctggggatgcaaccgtacatgttcgaatcgtttgaaatcccgacaatgttagaccaatcttaagtgttctgtaagttatttccgtttaagatatatattaagacagaaatctaagtagaactgcattgactaaccagtccctctggatcggtggtgaacactgaagcatgctttaacctctaagactgtctaacacgcgtttcattcaatgtctccacagactgggtagcaaaaaaatcaccttttagttttagtttttaatctaaagatgttagacagatgctgagtgtgcgttttctcaaccgcttcaacattgtaagcgatgtatgctttggttgacaggaagtnccttttccaggcaggtcccgttgccacctcctgctcactcagtcccgggctctgccgagtggtcctgggaat

SEQ ID NO: 138010 - DNA, 407 bp, Homo Sapiens
tttttttgtttacatctatttttatgaaatttatttccaaattgaagaggcagtgtatataaaggtaacagagcttgtgataatttacagaaatgtttgctacaacatgcacattatgaagtatttcaaacatatacatattaggtttcatgctgaataaataatccccccaaattaatttttatttttacataaaaatataatattgcactcttaacaagaccagttattctgcatattttctttttagataaatgatgaaattcggtttttaaaaaaagatgagtagcaaccctattctaataggggactaatttaaagttctcagtaaaaaaatgaaagctagacaatagctgcaattttttgttaacaaagcaaatcacttcaacgggaataggagtaatctc

SEQ ID NO: 138011 - DNA, 587 bp, Homo Sapiens
  misc_feature (365)..(365): n is a, c, g, or t
cttggtgattatccttaaattttaacacacatttaagcatatatttttctatgaatatctggtattagtcaacatctctatactctccctggatagttacctattgatttgacacaattccaaattagtctactttcactttccccatatcctatccccccattccaaagccactatgttaagatcatttgagattttagttttagtttagttctattaattattttttccattgtgctatcaacaactttttagatttaacttataattttacaagtttgtttaacactttcttgttacttatcgaccactttcttagcttcatttttttctttcgctagaaattctcgagtgtatctgcttanagagggtctgtggttggtaatctttccagtccttgcatgtcagtgattttattttgcccttcaactttaatgctagtttggctcagcatacaatagttttcttgcagctgttctcttttcagcagttgaaaaccagtgaatacccctaaatagctgtcatttttgttctggggctgcttttcctttgatttcagtttaacaaatttgttgagttcccattat

SEQ ID NO: 138012 - DNA, 452 bp, Homo Sapiens
tttattacagatttattgaggtgtaattgacatacaacaaactgcacatacttaaagtgcacaatttgatacacagtcttttaaacagcatgaaaagtgcctgataacttaaaaatgaaaaaaatttcaatttacacatattattttaaaatagtacattctaatttttatgagacatagatatgtatttataaaaaggtagatggaaagagaagaaattaacttaattctaagagccaaatttactcagaaggtttagaaacaccaaaattaacagccagttttcttgattttcttcttgaagaagagattggtgttgacttatggtgagatatactatggccttgagaggcagttttaacttgaaaagaatatgcatgttgagcaatcggagaggactttaaagaaactgttgagctcttccgtggactttacttgacaatgttggaaga

SEQ ID NO: 138013 - DNA, 466 bp, Homo Sapiens
tttaaatgataacggctaccatttatttctaagtacccactccataagaagtcctacatacatagttttctcacttaattctgtgaggaatcgattatgctcgtgttaccagtaaggaatccaaggcccagagaagttaaatcacttgtgcaaagtcacatagctagcaagcagcagaactgaggcccgtacccatgtctgtctggctcaaggcatatactgattgactgtaacatcatttgccttcaaggatttgccaaaaacccttgtccccagatcttaagtaaatttagaatgctgagtcagattggggatgcaggaatcaaagaataattgggttatataatgctatgattttatgctaatcttggcactaaagagagattgtctcgcagtctggaagactgtaactgcctatctggtctctagccactgggcctccagtctggcctccctccaatccatt

SEQ ID NO: 138014 - DNA, 411 bp, Homo Sapiens
cgcgtgaccaccatgtccagccagagaatctgtaatcacctatcattcatgccctgaattatcttctccctgctactgcccactgtcctcacctatcattttcctaaaagcctcataaagcagatcaccttgtcacacttgcagactgaggctactcactatggaattctaccttagctacctggaaagctctagtctgtaaagtttcaaagtgttcccaagtgtggtcaatcatctgtaacttatcagacccataagaccctgtttccctgtggggactgattcctccactgttccaatattcttcctgaccaaggtctgagcacagagcacagactgaataactttttcaaagaaaacatcaaagccagtaggaaacagaggtacaaataggaagagcagtgacttttt

SEQ ID NO: 138015 - DNA, 680 bp, Homo Sapiens
ttttttgattttcatcctctgctttattagttgtgatttaggaaatagaatggccctgtttacacagctgtaacatgtcagggcctgtagtacattattggcttgaggcctccgagttgccgtccattctcagcagaatcaatctgaacttgaaaacattccctctaggaaacatgcacatatctactagcataaagcacttcttgcacaactgaaaacagtattcacttgaggtaagttgcaagttcaccttccaaaaatcagccctgacttgtcattgctctcagcatgttcacgatgggagcagagggctacaaatgcctctttaactaggtacccagcatcggcgaatgtgctacactttgctgctagtcagatctcagactctgcaagtgggagtagctggctgtttaacatgcgttcagagcactgccaatctaaaatggctgctcagtaatactttaattgcagtttcatggaaacaaattgctatttaactgcaataagcacttctgtgacttggctgcactaacaataggtgagtcttagtaacaaagctataagtaacattaacttgtaaatggcctttttccaatggcctcttgaaggggtcataggtgggacagcacccaggatagaattccctggtgaagggtgaaggggtctttggggtgaagggt

SEQ ID NO: 138016 - DNA, 1246 bp, Homo Sapiens
gtttatatttgtaggcacaatttattttaaaatccacacaagaaacccagaaatgcagcattatcttcagacatcacattctagctctgtttaaataccacatatgctaaaaaccgacgccaggacattctctaaatgagttacaaatcagtttctggaaaggaagtgctccatgaaaagcttatagcaagataactcaggctttcaggtggagtatggcacgtgaattagccttacagtaattgtgtacatagtatgtttagtcattattgaatcaaaagtttcaggaagtaccttttttaatgcatacgctgagagaaccgtcaatatgcctttgttcctgctgagggatctgccattctggaggtacaaatactgcagatagaatatcaccgcaggactacgtcaagttcagagtgttcaggatcatttctatataaaactacaattagctgaactatggcaaaggtccttgaacataaagcctttcttcatttcattgcatcttaataggtagaatgccactaccgtagatgctgcttatatgtattttattcacatataagttatgatttttctaactaccctctgtagctataaatttttcccttcctgaaaatctctcttccacacctgttctgcttgtccctttgttccctaaagcctgtattttttctttaaggggatctattttcctttgaaacaattgctggaaagccagcctcagaaaggtaataggaatgtttttcctgtattttgaaacaaaaaattttccataggaatatccattcaattatacaacagaaatcaataggaaattagggcatggtcaacaggggtttgcttgaaaacctgtattctatgaaatgtggaatcctgccatggtgccacgcaggtgtaacaaggtgaggacaatgcattcctaggagttttccagcttcttgcagggtgaggaccatccacactggcacttgctctggcttttactcctcagacacctgtggccctgcaggagcatcctgtaagccttccaactcacgtcgctttcaagagattctttctttccttccccggaatcttcaggattggaatccttttgagagatacctacttcagcctctggttgctcttcattaacacagttagaattgacatcaagtttgccgtggttttcctcttgtctcttttctttggcagcctccaactgttgcttttcgtaaatgtccttcagattcttacagatttt

SEQ ID NO: 138017 - DNA, 579 bp, Homo Sapiens
  misc_feature (174)..(190): n is a, c, g, or t
tttattttagagacaggatgccattatgttgcctagtttggaatgcagtgtctatttagaggcgtgatcatggcatactatagcctcggctcaaaggaccctggtctcaaaggaccctgccaccttagcctcctgagtagctgggacaagtgtgcgccaccacacctggctaannnnnnnnnnnnnnnnnagagatagtgtctcgctatgttgcccacgctggtctggaattcctggactcaaggcctcttcctgccctcagacttccaaagtgttaggattacagggtgagtcaccacgcccagccagtgtgaattttctaatgctgagtaagttgtgatccagaagtaaatgtatctgcaagctgatttaaattgtagattttctcttcattgcatattttctgatgttgaataaagtctgagtattaactaaagtttttgcttcttaaatatgtaagaattgtcctcaaaatctctattcttgagcacagtagtaaaaatatttttacatacattgtatttcaagggttctgcataagcaaccttgttttattgtgacaatttatttgggaattgt

SEQ ID NO: 138018 - DNA, 815 bp, Homo Sapiens
gagtttctagctgaaaacagagctgaagtcattgtaaaaaagacacattataattttccatatgctacttctctagatttttcaaaaaatcccctttcatcacaaaaatccttctgcagaccataaacacataaagatcttttagacattcattccactactgttccttcttagaagcattatattttcgatcacattttaaaacatcactaacattgcaacaacagatatcaaaaggtaataaaacatactgtaaaaaaattacgtgttttgtttgaaatatggcatttattttacaatgcacatattaggtcgaattgtaacaagcattattttccctactcttctagagtatgcacacaggttactctgaatgcaatgcaataagccttttccaccagctttaactcaccttctgtaccaaagggcaaacctaccactatggcttgtgatggcttacaaagaaaaactgaagcatagccttaagaaaaatgctgcaagatgtgtctatgaagagcactgcagtgagttgttagggcaaggggcacatggccttacataggctgtcccaggcaatgcccagcctcatcctgtaaggaagtcggaagtctccgctttggaaactagttagctcacactcttttcgggtttgttttcttctgggcactcctagttttaatgttcttcttgggactggctggtttgggagcaggagtctttcccttttgtttgggggggttactacgactggtgcgccgggctgttttcttcttgtcctgaactgttctccgctgttcctgcagcctctcttccca

SEQ ID NO: 138019 - DNA, 471 bp, Homo Sapiens
  misc_feature (81)..(133): n is a, c, g, or t
agcatgtgccagcatgctgagctaattttttgtgtgtatttcttttagacacagggtttcaccatgttgcccaggatggtnnnnnnnnnnnnnnnnnnnnnnnnnnnnnnnnnnnnnnnnnnnnnnnnnnnnngtttgagccaccgtgaccagcccatttttttcttcaagaggaaaaatatcaaatttatgttagttctttcagtaaatatcaccaactgcaatgaagggaatccatctgtctctgggttttttgtatatgaaaacaaaatttatcatgtgttaggtttaattattttttataagctttaactgaaaacaaaacagtctgcttggctacaataataatatgctgaaattaatattccaaaaggaagtctgtggttgtttttagtggccttctgaaaaatgtggaatagcttatgaccccacctaaatgtttgccacaaatcgcatacagtaccatgttac

SEQ ID NO: 138020 - DNA, 504 bp, Homo Sapiens
  misc_feature (70)..(179): n is a, c, g, or t
accttctgggttcaagcaattatcttcctcagcctgggattacaggaacccaccaccatgcccacctaannnnnnnnnnnnnnnnnnnnnnnnnnnnnnnnnnnnnnnnnnnnnnnnnnnnnnnnnnnnnnnnnnnnnnnnnnnnnnnnnnnnnnnnnnnnnnnnnnnnnnnnnnnnnnatgagccaccttgcctggcctcaatattgtttttaataatttctgctttacttgcagttaatcatatcaggccgtctaccatacccagttgtgtcagcaagaagatctgtacaatgataagtaacacatggctcccagggctaacatattcctaacacttatataaacactttttcagaaatttgacaatattttataattaaacaatatcttattttacaagaaaagatatggtatcacaatactctgagcaaagagttaatttgcttctcaaatttcctagataatgaagtagtcctaaaatatttaactcagtattggtaat

SEQ ID NO: 138021 - DNA, 669 bp, Homo Sapiens
caatctgtttgggactttgagggctggggtgggaaggtagtggaatggaatagataaacagccagtcaagagctgtggggaggttgacagaattggggtgcaggtacatgtaggatacacagaagctttgtgtctgtggaggctgtatgagtctgtgggtgagcagcatgtctaagtgggtggaaacatgtatagctaaaggcaggaactcttcccatacagctaaacccttgttcaagcaatttaaataaacaagaacattttaaaaaattaaaaccccactaaaacaatccttgtggagcagttttcttgagtgcttaagtagagaccagattcaaaaaaggattaagagaatgtcgcataaccaagctgcagaaactgaaaccgagcggggtgtgaggggagatggcttggaggtggggccctcccatagcaatttcagcaagcctttctagtcatcccttaagctttgtttcccttcagcccatacctgtgcgtactgtaaacaactcacacatggttgtaactagccagggcccagaactggttaggcagcttttctcccaaggccacagtgaagaatcagtctcagccaaaacacaggagtcctggaaagaagacttgaactccctcttttctggcaggagaatggggaaagggaggctaaac

SEQ ID NO: 138022 - DNA, 787 bp, Homo Sapiens
agcctgtttcatcgcacttctggaagtcctcagctcctgttgatgtaaggttccgattcaccgtggaagctggttccgttctgcccaggggcctgcgcagagatgccacgttactcttgcctggcatgcctcctacatagatgtggagagtcaaattcagagtggactgctttggacaagttagtgatgattttggggttcccaccatccacggacaaagagagactctgatccaaggcaagtagttccacaatgtggaagtttccatcattgattgtctccacactgtaaatggcagaagctggatgagagccggtgtcatagctggcacgaacacgcccccgatagagttctaccgcgatatggtctttgtcacccttatacaggaggattccgctgtcttcatctgtggcaatctgaagtgttatgttcgtctgaggccgaaccttggctgaaggaatctgaagataagactctttgtttataaaattcacactaaccaatttttcacacttttctccctgatagccaggcaaacactgacatattggctcatttattctgacgatacactgagctccattctgacaatcaaaattatcacaggggctggtacgagggaggaccatgggtggagaaaactcacagaacaagccactgtaaccttcggggcatatgcacgtatagccgttcactgcatctgtgcagtgggctccgtttttacacttgttgtcttggcagtcgtcaaaatcgatgttcacagtgtgtgcacctacctcgtgccgat

SEQ ID NO: 138023 - DNA, 763 bp, Homo Sapiens
ttgtaacagccgtacagtaggaataaggtttggaaatctgcctggaaacctgatttcctcatccccagccttgtttcccaacataaccactgctctgtgcccctgccctctctgccaggctttctccccgatgccgtccagctctgatcctgagtgtcatttcttcatcggcttccaggctgtccttgctagctggtttgaactcacgcatcaacgtctcaaatttgagaatgcggaggagaaaagaagtgttgcgagaaggaggtgcggccttcagttgaggtctattaggaaaagattccaaataagacaagggcggggggcggcagtcgggagagcccccaggaagccctgtagatgcccccaccccagcccatggagttgctatggttaagcagcctgagccgtacagttgaaaaggggcggtggggcccatctccaaatagcacagccagttcagccgtctgtcctcaacccaggagagctgggaaagccagtggactcctgcacctggttcttgtcactcctggcgtttgtgtacagatcaccacttctctttttggttcattgttgaggagtcgttttccggacggctccatcacagcattgagctatcaagctgctgttttccacagttggtggtcacagccagggaagttgctgtcttgatttgttacattgtcagtaatccccaaggaaccaatggatgtcagtaggagtttctgttaaatgtctccttgatggggactcagtactgtgtaaa

SEQ ID NO: 138024 - DNA, 439 bp, Homo Sapiens
aatttttgattgaagaaacatctctaaaaataccatttgagtgcaagataaaaaggaaatagcaattcaaggcacaaagctaagtacatgcaacaatatagatgatttgggggtgggacagtacagaattcagaactgatagaagttatcagctccatatttcagaaagacctaatgtcttccttctgcttatactgttctgacagaattttaattttggcagagatcactctcgatgttatgatgtactgattcagaggtcccaaatcagtaacctgatcctaggataggtcctcaaaggtccaactgccactagggtgtccccttcttggatccattcttcatgctgcctggggttgggggccatggcctaaggcactcaaggtcaaagggattagttgggcaatatcctacattgtccaaccaaaggcttttgaag

SEQ ID NO: 138025 - DNA, 544 bp, Homo Sapiens
tttaactttatcttgttttgattgaagaaacatctctaaaaataccatctgagtgcaagataaaaaggaaatagcaattcaaggcacaaagctaagtacatgcaacaatatagatgatttgggggtgggacagtacagaattcagaactgatagaagttatcagctccatatttcagaaagacctaatgtcttccttctgcttatactgttctgacagaattttaattttggcagagatcactctcgatgttatgatgtactgattcagaggtcccaaatcagtaacctgatcctagatagatcctcaaaggtcaactgccactaggtgtccccttcttgatcattcttcatgctgcctggattggggcatggctaagcactcaagtcaaaggattagttggcaatatcctacattgtcaacaaagctttgaagaaaaacagagacagaaactggtatttactaagtacctaggtgataaattattttcatagacattaccctataaaacagacaactctcctgtcccaaatccaaacagatct

SEQ ID NO: 138026 - DNA, 683 bp, Homo Sapiens
  misc_feature (127)..(145): n is a, c, g, or t
gaggccctgggtctcctgacctcatcctcactctgtccttggttttcccacgtaccaggaaggaaacttggtttcattataggcaacttgtgaaggtaccttttaagagcctttcatctggctgagnnnnnnnnnnnnnnnnnnngcagctttcatatagaaagtaaatcagtcagactttgacgaagttccatccataaacatatgtctttattctctttctgtacatatgggcaatgataaagcttaaagatgcatgtcctaagaaatatgcaaaaacaatgaatttacataaataatttatacttcagaaaattaaagttgaaaaatattttccacattattagagttcacagtatttaaatcaagctttcccacttatactccagactatattgtcttagcagagagtgataaaatctaatcaggaataaaatgatcaagtttctgtttttattcagtgcacgagtagacgctatttcagtatcaggccgcgccaagtgtcgaggctgcagcctctcatcctgacccttcccctcctgagtggctgtgacccagcagaggtcactggcgtgggaatggttacagcgtcaccaaaccactccacggtggacacattcaaccgagcggtaacatctggtggtctgatgcctcatttccaagtaatactttttatagccctg

SEQ ID NO: 138027 - DNA, 453 bp, Homo Sapiens
cccaccacaactgccaaatcaaatgatggttctccccttacaactttttctaaatctgattatctggtatttaatgctattagtaactgcagaaaatccctcatgttcgatgagtacaagtggtagcttctggattctgaggagttggccctttgaggaaggaagaaactactattgtggcctttccttttcacccctttcaagctcctgacttggaaaatgtgtatgggcctgaaaatatgggtttgaagatagcagcttacaacccagaccttcttggttagaagagggaagcctccaacttgttctgtgtagataaatggagattattctttctctggagttaagaaaaacaaagccagaaagagaaaagctagaattaccttatagaagagagctagattcaggtttctagctaaaagaactcagtcctgactcagtagaaggcatttt

SEQ ID NO: 138028 - DNA, 625 bp, Homo Sapiens
ttaagagaggacatcaaagagctttttcttgacctagctctcatgtctcaaggctcatctgttttgaatttctcctatcccatctgtgaggcggctctgcccaagttttctttctgtggaagaaggaaaggagagcagatttactatgctgggcctgtcaataatcctgaatttactattcctcagggagaataccaggttttgctggaactgtacactgaaaaacggtccaccgtggcctgtgccaatgctactattcatgtgctcctgactgtggcctgtagcaaaaatcacagccagctgcatctcgtgggacctccaagctcctctgactgaacctactgtgggaggagaagcagctgatgacagagagaggctctacaaagaagcgcccccaaagagtgcagctgctaattttagtcccaggaccagacatccccagactccacagatgtaatgaagtccccgaatgtatctgtttctaaggagcctcttggcagtccttaagcagtcttgagggtccatcctttttctctaattggtcgcctcccaccagactcacctgcttttcaactttttaggagtgcttcctcacagttaccaagaataaagaaagctggccacc

SEQ ID NO: 138029 - DNA, 533 bp, Homo Sapiens
  misc_feature (54)..(54): n is a, c, g, or t
  misc_feature (271)..(271): n is a, c, g, or t
actcatccccagttgaggtgacacccactgctccctccaagcctgttgtaactnctgtcctgcccctgtgacaatgtcagcctaggttgggcctttcaagagagctgaaaataggatcttaatgggaaatctcccagtgttggccaaataaaacccgaaacagaaggtatctctgtttgattccaaaccagtttccccacaaagcgaggccaactctggcctgagttcccccacctgcccacacccttatgttctctggaaattcccactnaaaagccagagctccctgtttagacattttaatatggatgttttctgtttttagatactattcctgttagcttattcataccatttcacctacacatatgaaaaaaatatttcaggactagaatgatatacaaaattatttcaacgagacataaattatcgggggactagtgccatctagtgccatggcccctctaagtgaggatggcagggggtggaaaagagacacaaggactccaattgctaccccactcaattggggt

SEQ ID NO: 138030 - DNA, 1415 bp, Homo Sapiens
gattccgcctttttgttgccttttcccttcccttcgtcgttgtttttgtcgacgtgcgatcccttctccaagggacccggtccagaataattgatatgcttaatgcttgctttgttgtccttgattataaattagtccccaacatcaggaaacttaaaatcaagggtgattaatataactcctaagattggaagttgtcaaattacatcacccacagtacgaattttaaaaggctatttttaaatacaagattccatcttcactaaactgccccttagatcactaagataatttagcatcaaaatcagcttagataatcatacgttacaaagctgccaccagcagcttattagttctaaagctttccaaaaaacctcagccaacttgacactttgatctcacatgtcaaaaaaagtggtcaaggttgatcagttagcttttaacagaagaatttgctcctgatggagtggcagctataatcatatggtatttttagaacagtgatacaatgaaaaataatatcataattatgtatttataaagtgttgattttctacaaactagaggttagcaatgattgctagaacaaataattacatttctaaaagaaataaaaaatgcatggagataatatcaatcaaatgagttaatgaaaaatcatgatcctattatcttaatgaatgcagtatagtgttataaatgcccttgcacttacatcttcatcacatagtatgaatgacaaatagaaagaccaaagaactgataaattactctccccctaacagtctgatatgtgaatcctatgtccctttctgacttattacaaatgcctttcattagtgagttcatgtattctaataatccatccaaaaatattcataattataggaagacaataacattgccattttcacagtcatgttatagtatttttagagtattgagtacagtagttatttattaaaagtaacacgaaagcaggaataaaatacttatatgtacaaagtagcatggtatgatttctacctaatatttaataatacacgtgcaacttttccctgcattaacatagtggtaaacaataaatactaacagtaggtaatataagaacaccgagaaaagtaggaaagtcttcatggataaaaattcttggcccggaaaactttaaacattaaggaaagtcatgcctatcagcgagcccacctcctgggctgtcagattcactgctcacaaattctcctcctaaaattccttttcctaggaacgctcctgtaaatggagtaatggaatttttaaatgtgagagaacaggagagccccggggttctttttgattccatcaaattattgcatgtcagctggacatcactttactgggacagacgtctggtacagtccagcagcaggtatggaagt

SEQ ID NO: 138031 - DNA, 1519 bp, Homo Sapiens
ccaggaggaaacatgtaggaccaaccgtgttcacgtcgcttgagccatcacgttccgctggcctagaaggtatttagcaatgggagacttcccaagccaaggtggcccactagtgcctgggggtccaaaggaaataatgtcttctcaaggccttttgaaggcaccaacgtgtaacctgagatgtcctacctccatgagtacaatctgggggaaaagggaattagtacaagttccatttgtagaaggttatcttggttcagtttcaaaggccttgttctcactggagccacagaaaatcagtggattctactcaagggacagtctaaattctattctgtgtactcctggccctggccatactccaatccagaccaccgggctcagcgacaggctcagctgactacccagccagccaggcacaagttccacaccgttgctagacttgttcttctaatgattggtatgtatgtgtctaactggataaggtgtggcatggagatgggtagaggtgggatgaggagtggagaggtgtctaccaagaatggctgacactctcagaaatgtttgtccttgctctcttaatggaaaatctgctccatgtggtaaccccacatcccagcccctagtaccacagtcctgttgggccagggcgttcatgaccctttctgtgaaaagccatattatcaccaccccaaatttttccttaaatatctttaactgaaggggtcagcctcttgactgcaaagaccctaagccggttacacagctaactcccactggccctgatttgtgaaattgctgctgcctgattggcacaggagtcgaaggtgttcagctcccctcctccgtggaacgagactctgatttgagtttcacaaattctcgggccacctcgtcattgctcctctgagataaaatccggagaatggtcaggcctgtctcatccatatggatcttccggcccaaggggcaccagcaggcacagctgcccttggctgtgacatccctcagaggcatcacagccagccctagcacgcgatcttcccgggcaaagcagtaatccttcacgcatatctgcaactcataggactcgggcccctcctcatttcccaggaggaagtggaatgtctcattgtacttgggggcccagttgttgcttttggatttggttgtgaacttcctcttcttatcactttggtgtgggccaaccatagtcacctccacgaaaggccggaacatacccgctgtctgccacttgaggtcattggcagccaccactttcactgtgaccttgtgctccccagtaccagggtgtgtaaacaagtccacctgaatagagacttctcccacaggatcgtccacaccagacccttgggtggtctgcgagcgcacaaaggtcttgatgagagtgtcagtagtctgtgtgtacagagacagggcatagcgtagagactgcagatctgggctcttctccaggaaggttttcttcagcccattgcctcctgcatggaagtattgc

SEQ ID NO: 138032 - DNA, 858 bp, Homo Sapiens
tttacagataaatttgtttttaataaaggagttaattttctttcaatcctatataaaacaatagcaattaaaaacttcatttctgaaagtaaaatatttacatatgaacaagtaactgtgcaaaatttacatgaaaaaatggaaagacagggatttcctaaaagacaaaataaaaggtgtaacagttctcaggtgttgataaaaaatactgatcagcgttcagttcacacgcgctcgaattaaagtctaatgtgagaattcacacggagaaagccagagtatttacagtcataaaagtactatcaatagacaatttcatacaataacctctgaaaatagaaagaaccaattagtatatttgtaataaaaaaataggtacaaagaaggggctttgctctggacgtctgtaaagtcggcccaaggcttgcatacagtctcttagcaaaataattatagtttacatagccatttctatgtcatgtgccaaaagttatgtacaattactgacaaaatacaccaaccatttttcaacacttgattcacaccgagaaacagtcttttgatgattcttctcaactttgattttatttaatctaggttttcacttttagctaaaaaacacagtgcaagtaaaatatatttatgctgaaaaggttttcatctcttttaactttacagctttacaaactatagcaaataaaatgcatttgtacagatgctgaccacacattcagaaggagccacctttgctgggctcggcctctaccaagcagaaatgcgattacactctgaggtgggggtgcaacgatgaattgtgtattcctccaggattctcagcggagtggaggggaaggaggg

SEQ ID NO: 138033 - DNA, 451 bp, Homo Sapiens
acctgttttatttcagggttaccatccattgacccatcaggcagctccccatcttcctcttctgctcctctggcaagtttttccggcataccaggaacaagggttttcctgcaagggccagctcctgttgggactcctagtttcaacagacaacatttttctccccatccttggacaagcgcctcaaactcatgtaggaatcctggaggaactcttcccaaagagttttgaataagttattaaatcatttatttcagttacaacaccatgttgtaactttagtaaactaagtggtatacagatgcccaaggtttgttctgtggtcatgtgaaaaaattgtcagtcatttttagcatagaaaacttgagaattattctttcaagccaaaaatgttttacagtagaacttggatcaagaaaagaggtactaggctgggtgcagtggctgacac

SEQ ID NO: 138034 - DNA, 442 bp, Homo Sapiens
ttttgtaaatgatgactcaatctatctcccaagcaccaatcctgaagggaatgctgaatctgaatgcccccataggtggaacttcaaactctcaatgttcaaaacaacatcgctttttcttcacaaaatcttcattatgtatttgatggaaccaatatccttgaaataacataaattccaagctttaggtacctttgacgtataggggataaaagaaagggaacagtcaatcagatgctaagttctcttagttttacttttcttgtttctctccagtgcaaatagcaagcaatacacatagcaagtgctgaataagtgcttttggaatgtgtattctaatttctgaacctttccttatgcttccaaaaatgctgagagacgttcaagcttttggtagagagaagagatgaactgttgacttggatgtggggggacatttgag

SEQ ID NO: 138035 - DNA, 353 bp, Homo Sapiens
tttttttaaaaagcataaaagatattctttttattcctgtaattttataaaacactacataaaagctggcgagttttaaagagggaaaaactgcattgaaaagtataaagtctcacaagggcaaagtccatctggggcaacagttccaacatcacggacctctcaggaggagaactggtctcatgagatgctccgtacacccctacccacatacccttcctgtcaaaacttagaccaagcatgccacatctgacaagtcaacttcaaacaattcgtggtgcttttctttcaggctagaaatcatctgtagctattagaaccattcagcaaagcaatatggctttaatgggtac

SEQ ID NO: 138036 - DNA, 257 bp, Homo Sapiens
atgagccccatcttttatatttttgtgatcacatatataaacagagtcctgctcacttaacatgtactaaatgaaggatcgtgccattcctctgctcaaaatcctcccaagaactcccgtctccaaataaaatgcgaagtcattaacacaggcaataaggcactacaatgatttgctccttctcctacctatgacctctctgaattaaactcctgctacttttccctagatcattttgacccaacatgctggatcaa

SEQ ID NO: 138037 - DNA, 651 bp, Homo Sapiens
  misc_feature (122)..(170): n is a, c, g, or t
gactttttatacaagtctttatttacaacttgtttaacaactgtacactttttgcagccttgaaaacatttttgtacttgaatgggaaaatatagtttgaccaaatcttaactttattcttnnnnnnnnnnnnnnnnnnnnnnnnnnnnnnnnnnnnnnnnnnnnnnnnnattaataccgtaacaagttggcagtcgtaaaattaaaatgagtaaatgatatcaaaaggaaatacaagatttcaaaaacactaaaaatccatcttctggtggtttcctggactttatgtttttgtgattttagttgaaatttcttactgaggctctgtaacaagtcattcacctcagaaaaacagccagaaaacccaccaatctcaacacatagtaaatggttggaaaactcagtaaacaggtggaaaaatgcttggacatcattatgtacaacactgctaaatctgtatttcatttttgaagtgagaagttccaagtctgatgtggacattgtttttggattataatgacaaagaatgaaattctgaaaaatgtaaattcaatactcaatcagaaataagaatatacctagcaatatcctttttgcaaagactaaaatgcaaggtggattactacaatgtcaaatatgaaactaacaaca

SEQ ID NO: 138038 - DNA, 694 bp, Homo Sapiens
  misc_feature (519)..(538): n is a, c, g, or t
acaataaatctgacaaaatatgcaatatgccctatgtagtgaaaactaactattgctgaggaaattaatcaagaactaagtaggtggagagacacatacacagtgttcagtggaagacttaatgttgttaagatgccagttctccccaagtggatgtatacattcagcacaatctcattgtaaatccctgatgtcttttatcatagagatggacaaactgatcctaaagttcatatgggaatgcaaaatatcaagaaaaaccacaaggatgttagaatagaaaggaaatgtgggatggttaacaccacctaatttcagatctattacaaagcctcagaaatcaggacaggattgtatttccttaatggtaaacaaatagatgcatggtacaatagtgtccgcacatagacccacatatttatggacaactggtttttgacagatttagaaaggtaattctgtggagaatggacaaccttttcaacaaatgattctagaacaattgtatgtccatatgcnnnnnnnnnnnnnnnnnnnngttcatctgtacctgacagaatacacaaaatgagtcagaaccctaaatacaaagtacgaaactataaaatttctagaagagaaaacggggaagtctttgtaaccttgaaataggcaaagcttccttaatatgatactagagcacagtctaccaatg

SEQ ID NO: 138039 - DNA, 990 bp, Homo Sapiens
ttttttaatgagaaattcacttacaaaaaaccaactggctcaagtgaatgggatcaaacccaacttgttataaggtcattagtatcaagaattcagatacagagtctattctaacataactgtttttaaaaaatttttgaacttcaaaaatttccagtcactaaataaaatgcattcaatttaagcccagattgcttcccaagccaaacattctttatttaacacttcagtccgctttctgagatttcttggtacctgctctttagcatcttctttaaccttagctcatttcaaatttttccatatgtgctatctgtgcttaacatttatgcatgtgatgttcatatatacagtggagtccacactgtgggttacctggcatcataatatagagctcggcaagctatgtgtacattatgtattgccagtacagtgatttaatatgtaatatcatcattattaaataactatgatttatcaaatagatattacatattatcacataatatatcaaatatatacagatgctattatgattaataagtttactaaaatggaagtcttttctcactgtgtattgtctgaatcaacagacactaaaaagatgtgcagtgtgtcaaatattagaagtggttggttcttattctcaaacagactgtgggaagcactatgacagattttctttccactgttaaatgcaatggaggttttacttggcaacagggccattgattcatcaggtccatgtatttgaacacatttactccaactaatttaatgatgtaaattctaggcatttacctatcttcatccagaaattagctacctgatctaggactaaaacacagcttgaaatataaaagctagtgcgcacatgggctctggtggctaggttacacatcgggtccaaataaagctgcgtggacggaaggcttggagtggcacgaagaacttagcaatgactactaagcagtctgatattcaggcaga

SEQ ID NO: 138040 - DNA, 861 bp, Homo Sapiens
  misc_feature (326)..(375): n is a, c, g, or t
tagcagtcctttaaagtgactagaacgtttcattacactgccttgcaatccaaacagtggcaattttttccttcatctgtgagtgaatgtgtgaacgtgtgtatgtaaatgtatgtgtgtatatattaaaaaatgtatatagatgtctgagtgttgtctggagacctatacgtatggttaaaaagatttatgttaatgtatgtgctccaaaacctttcgtgtatgcattcacattgagtgtggctcattttctttccccgaacgccatgactgttcagaagcacaatactatctcctgaaagagataagagacattccctagattnnnnnnnnnnnnnnnnnnnnnnnnnnnnnnnnnnnnnnnnnnnnnnnnnntattttatggtttccaagcttgatatcctttaaaattattttcattgatggaactggagttgttggaaaaacatagatttaaaatgatttttgatagctgacattgtgatgttgatgtatcacatcagtaataggaccagctttgaatttctgacattggtgtggggatacagtctgtaaatgtttattgagaacatcttgcacacaatttgaattatgtagaatgtcaatcaagtttttgtatatttaaaagttggacatcaattttttcccctgatttcatcaagttatctctgccaagtgctcttgataatttcttcagatttttggaaaaaaacactatataaatgcaatccatgctttttttaaagaacaacattgccagagtatgcttgttctaacaatatagatatataaaccttaaaaataataaaatatctcacccaagacttaaaggaagaattctctgaagggataaagattact

SEQ ID NO: 138041 - DNA, 435 bp, Homo Sapiens
cttctgttcagacccagctgggtttcaggcttaattcattgctctatggtgggatcaccacagctgctgtggggcctttacaaatgcaaaaaagctgtcagtgtttgtttcatcagctgcataagtgatgaggcctagttgaggaatccattccagtgcgcagtgtgcaggctgtagctattattgtttacagaattagtgtgttggagctttaaaatagttggcacatcgtctgccctttaaaagcacaagactaaggaatgagaccagttggttgtccttgtaatgttggccggatccagcccagcccttgtcttttaacagctactgctccgggctgtgctgtgggacttgactactctttggaggaagtgggggtgcttgctgagttcttgtctctgtagttctgcatcccaaacttaggtttgcattaaa

SEQ ID NO: 138042 - DNA, 1163 bp, Homo Sapiens
gtttctattcaaagtgaaagtgaaaagaagtttctatggaaatatgtaaacagaaatgatgcacagtctgcatattttattggtttattgatcagcttggataaaaagtttgcttggatggatggaagcaaagtggattacgtgtcttgggccacaggtgaacccaattttgcaaatgaagatgaaaactgtgtgaccatgtattcaaattcagggttttggaatgacattaactgtggctatccaaacgccttcatttgccagcgacataacagtagtatcaatgctaccacagttatgcctaccatgccctcggtcccatcagggtgcaaggaaggttggaatttctacagcaacaagtgtttcaaaatctttggatttatggaagaagaaagaaaaaattggcaagaggcacgaaaagcttgtataggctttggagggaatctggtctccatacaaaatgaaaaagagcaagcatttcttacctatcacatgaaggactccactttcagtgcctggactgggctgaatgatgtcaattcagaacacacgttcctttggacggatggacgaggagtccattacacaaactgggggaaaggttaccctggtggaagaagaagcagtctttcttatgaagatgctgactgtgttgttattattggaggtgcatcaaatgaagcatgaaaatggatggatgatacctgcgacagtaaacgaggctacatatgccagacacgatccgacccttccttgactaatcctccagcaacgattcaaacagatggctttgttaaatatggcaaaagcagctattcactcatgagacaaaaatttcaatggcatgaagcggagacatactgcaagcttcacaattcccttatagccagcattctggatccctacagtaatgcatttgcgtggctgcagatggaaacatctaatgaacgtgtgtggatcgccctgaacagtaacttgactgataatcaatacacttggactgataagtggagggtgaggtacactaactgggctgctgatgagcccaaattgaaatcagcatgtgtttatctggatctttgatggctactgggaaggacagcacatttgccaatggaaagttttttacttttctctgttaaaagtccagatggaatccctgg

SEQ ID NO: 138043 - DNA, 989 bp, Homo Sapiens
  misc_feature (870)..(904): n is a, c, g, or t
tgatgtactccggccccgtggaagacggtttagaaggtccattttccttgtgtcagcctttgtgtaagtaaattccatggagtaggtttagcaatcaataatttttggtctttttaacaatatatcctttgtaggaagaacagtgaatattactccaaaaccccagaagacgcatgtaaagctacacaatcattccgttcaccagagggatctcgctgtgttccagttgacaaaggagaccggactgttatttatccacagccacgtcccttcaacatttctgaacaatcctatgcaaaaattggttttacttttaagtggctcaacccgatatgacagaaaactggattctgcagcactttcaatggaaaccagagaggaacccattcgaagacattccagagaagcttggccccagtttcttgtatatgaggactcaatatagtaacagtgaccatggaaaggaatccatgctgtgtgatctgactccgggcatctgccaggcagttgtgggggttcagtagcagggatttcatctgatcttttacagagaaagtaaaaactttcattgcaatgtgctgtcttccagtagccatcaagatccagataaacacatgctgatttcaatttgggctcatcagcagcccagttagtgtacctcaccctccacttatcagtccaagtgtattgattatcagtcaagttactgttcagggcgatccacacacgttcattagatgtttccatctgcagccacgcaaatgcattactgtagggatccagaatgctggctataagggaattgtgaagcttgcagtacccggccgtaatggccgaattcccgggcatatgtccggtaccgtcgactgnnnnnnnnnnnnnnnnnnnnnnnnnnnnnnnnnnncggccgcttcctcgctcactacttcgctgcgctcgtcgttcgctgcgagcgagctagcgccctatagtgagtcgatacagtgttt

SEQ ID NO: 138044 - DNA, 1663 bp, Homo Sapiens
ttttttattaaaaatagaccttgtctttaatgtttatttcacattatctaagtacatccagttatgcaaatttacagttttatttcacatccttgtattcctgatatacatataacaggacaaagaacacatttgcaacactcagcctgtaaaactctcttgggggaaacaagattctcagctgccttattcttctgcacatgtacaaataaagttctaaataattggagtggaaataaaaacttgtaaaagagaaaactgactacatttttatgccacttgaggatatttgtacctgacttttcaaatggtcttctacttgctgagttacaatttaataggtaacacattttgggagctcccttaaaatatgccaagaagcttcattgtttctagagtgcttaaaatccacatgaagctgacatcagctacccatcactaatgcttagatgtggtgctgtggtgctgtgcatttatctaaaatattttaaaaggtagtaatcagcattgttatccctcttttatgaaaatatcttgccaggctagaaaacaagcaattatttcttcaattaggcaaaggaaaaaaggacagaccagtacaattcagtactcattttaaagaaaacaatcacattgaactaaaaattttaaattgtcagttacaattttatgaaattcaaatatctcagaatcgcattgaggtactagatgaccgagtgttcattctgttcaatattgcccacgagatctttcatatcactagttcctgggcttgactgactgttaaaatacagagtgttttcaaaggcgccctcttgaggtaggtgcacatgtcttttcttataaaagaaataggcggcaaggccagcacccgttaaaatcaggaggatcacagatgatgactactccggccacgttggaagacggtttagaagggtccatcttccttgtgtcagcttttgttgtaagtaattcatgagtaggtttagcatcaataatttttggtcttttacaaatatatcctttgtaggaagaacagtgaatattactccaaacccagaagacgcatgtaaagctacacaatcattccgttcaccagagggatctcctgtgttccagttgacaaaggagaccggactgttatttatccacagccacgtcccttcaacatttctgaacaatcctatccaaaaattggttttacttttaagtggctcaacccgatatgacagaaaactggattctgcagcactttcaatggaaaccagagaggaacccattcgaagacattccagagaagcttggccccagtttcttgtatatgaggactcaatatagtaacagtgaccatggaaaggaatccatgctgtgtgatctgactccgggcatctgccaggcagttgtgggggttcagtagcagggatttcatctgatcttttacagagaaagtaaaaactttcattgcaatgtgctgtcttccagctcagccatcaagaatccagataaaacacactgctgactttcaaatttgcgcgctcattcacgcagcccagcattagatgtacctcaccctccaacttatcagtccaagtgtattgattatcagtcaagttcccggccgtaatggccgaattcccgggcatatgtccggtaccgtcgactg

SEQ ID NO: 138045 - DNA, 418 bp, Homo Sapiens
  misc_feature (51)..(51): n is a, c, g, or t
  misc_feature (64)..(64): n is a, c, g, or t
  misc_feature (291)..(291): n is a, c, g, or t
ccctagggggaaagtggtccacctccccacctgcccttaattggccccccnaatatttggatgncccctcctcccctccagatgccccaaagaataaaattttaaaatcctaaaacttcaaagggtggtgaaggtttttaaattcctgaatagaaagtacatattactttttaagcacaagaaaatggaacatgatgagccctctgtttaaaaattatggtattcactgggtgtttttcaaagctgtgtgtgtggtctggtgttgacaggagagaacatacaatttcaaanttagctagtgcttgtcagctgttgctgatagctgttggaaggttttgggaaagacaggggcacggtgatattttgcaagcttgcctattaaggacatttgctggaaatgacttcatgattcctatcc

SEQ ID NO: 138046 - DNA, 1663 bp, Homo Sapiens
  misc_feature (561)..(561): n is a, c, g, or t
ctcaaacttcccggtgtacagcatgaggagccgcacgaagttcagccgccgcaagcaaggagggtcaccaggctcgtggctgaggagctgagcactctgtccagaggactttaaaagcagcttcagctcaaacagcaccagtgctacatggacagcactggcagcgcagccgctccatgcggaaaagaaaggcaactgctgcttcaaactgcgctgtcaggaacaggacttggaagtagaggaagggttgctggttcaccgtaaagtgggactcgccatagtcttccaacaactgcttctggaactgtgagagagtgagcctgtcttgtggggagctggtgccatcgtcgtcaaaacacacttggttcaacttcagccacaggtaatcctcagttttgtccgccacttcactctggttgtcggtgacgtcacatctgccaatgatacagtacacggcccgcttgtagggatctgtattgttcctgagggcctacggtaatgcagccggagcttgttttccgtagctggggacaatcttctgtccttgctgttcatgtactncctggaaccaggttttaaaactctccccagctggtgctgggctcgattaactacctgtgaagcggcaagcaggtctccacagcgcatgcagtagtaaattagcgcccacacaggatggccttccacctctccatcctgtagtccaggcaagggagctggcagtttaatgttcaggaaacttcgaaccaattggtaagtcccaggcaccccgcccagctgggcctgatgcaaatttccaaagacagtcacaagggtgtaattcttataactctgctcaaggtacgccaaggcctgcctgacaaactccatgcgcacttccacgctgctgcggttcttcagggcatccgttgccggtgtcaacaacacgtctgtcatttgttttaccatggtccacatgtcggaaatgctcttatcatccagctctgcgacggaagcacaaaggtccaccaggttaggctgcaggtgtccatttacaattttctcattatagatataaatttgccgcgcataggccatctcgatgttatccagagagcttcgaccagggggtcccacatcactgatgtagcttggctcgctttcttgagtaaagtcaagggcgtcttctcctgatgccagcagtgtgtgcagaattcgctgtttcacttgctcccactcaaccaacattgactcccgatggtactcctcagccatgccgaaggtcctcttccgggactcttcgatggcagacagcagggcattgtccttctcattcttcaggaagccctgaatgtcagtgtccttcacaggctcaagaggctcaaaggtggtggctgcactcagactctccaatcgctgggagatgtgggatatgtcaagtccccgagacccgaggagaactgacgccttgacatctgccgtctcctgggacgtgcgtgttagggtacgggaacgcaggcgctctcccgcctgctggatctcctgtaagttccgttccacatggggaagctctgagatgccctcagtctcagcagcaagctgttcagcttgctgaaggagctcaccaaacccctcagtatccattggagatgcagatccttgtgctacagccgtctccgccgct

SEQ ID NO: 138047 - DNA, 914 bp, Homo Sapiens
  misc_feature (460)..(523): n is a, c, g, or t
cgccgggagcccgttcggttgcgggtgtctctggccctgcggtcagccctgggaacgtcccggagagctagattcctagaggcccgattccgctagcccggaacagacaaagccagcgctcccgcccgctccccgacttaggatccgatgccggcagcgtcctggggcccccgtagcggggctggaccatgagcctgctggacggcctcgcttcctcgccgcgggctccgctgcagtccagcaaggccaggatgaaaaagctcccgaagaagagccagaatgagaagtaccggctgaagtacctgcggctgcgcaaagcggccaaggccacggtgtttgtgagtctgacccacgttcagccggtcccctcctggagactccctcacaaaatctttccccaagctgttcccccttcccagtgtgacagtattaatacagtgttggcttttccgtatacgtnnnnnnnnnnnnnnnnnnnnnnnnnnnnnnnnnnnnnnnnnnnnnnnnnnnnnnnnnnnnnnnntgagctagtaactgtcttgcagaataatgaatattaaatgagtaaagaaaagtgcttggtgcgtaaaagacataccaataaattttagtcatcgttgttactgcaggactctaggaaatgtgtttgattctcgagatacagccctgagaattaggcattatttgtaaaatgagaacactgaagcccagagagatgatttgcccaagggtactggtgtcagaagccctgactccaacttagataaacttgacttccggttttatgacttccagtacaacagactattttctgagcacctcaaatccccattaactgaccctttggcccaagaggtacatgaacctgtcagtaatttcccccctctaacctttgagtgttccaagtgtttctt

SEQ ID NO: 138048 - DNA, 998 bp, Homo Sapiens
  misc_feature (51)..(130): n is a, c, g, or t
gttatgtcgtgccggcgaatagttagcgcgttccgcgtcgcggagatcgannnnnnnnnnnnnnnnnnnnnnnnnnnnnnnnnnnnnnnnnnnnnnnnnnnnnnnnnnnnnnnnnnnnnnnnnnnnnnnncccccctcgccccggaagccaggcccaccgccggcctcggtttgggccgggggtgtggccgcttctggtgggggcccctccagtcgggcataattcaagggcggcaatagcccccggggtagatcgccctctcatcatgaaagccaggtcggtcggtgatgatctgccagttggttgttctctttgcctttgtcttttttctccttcttagttttcttcccaaatggttcctcagccccagtgctgggccctgaaataggcccagctccctgtatagttcccacagagctggccacaccataagtcaggggcaaactggaactgtgggaaggagctgcagcctgtacttccccttcagttagagcctgaagctggaggagcttctttagcaagtaccttctttcttcttttgctttaagaaatttttcctcaagacgagcaatttcatcacaaatagcagcattttcaaacaccgtggccttggccgctttgcgcagccgcaggtacttcagccggtacttctcattctggctcttcttcgggagctttttcatcctggccttgctggactgcagcggagcccgcggcgaggaagcgaggccgtccagcaggctcatggtccagccccgctacgggggccccaggacgctgccggcatcggatcctaagtcggggagcgggcgggagcgctggctttgtctgttccgggctagcggaatcgggcctctaggaatctagctctccgggacgttcccagggctgaccgcagggccagagacacccgcaaccgaacgggctcccggcgcctcccagcacttccgtgcggacgcgtgggtcgacgatatcccgggaattccggaccggtacc

SEQ ID NO: 138049 - DNA, 424 bp, Homo Sapiens
tctgacaaaattcttccaaacatcacgaataggcattttcacatttaaaattagtttttttcattataatgtctataaagcattcatagaaaaaaacctattctacttgttccaactaagagtttctctgaatatcttacatgttaagcctacctccattttcacataatcccaccagaaacatccctacacagccttacattctaccccagaacatcagctatgaaagcagctgcctttcctctcagtcctttgagaatatccaggggagtctggaagatggttgcaaatgcagtgctcctcccctccttccccgctcagaggcactgactggaggaggtgtgctgagctgcctgaacacaagaggtgaggtgagcagcaagagcacaacgtccccttcacagccagatgctgggatagtgcc

SEQ ID NO: 138050 - DNA, 490 bp, Homo Sapiens
tgaatccatatgcattccctctttgacctttattcatataatttccaaatgccaaaaccacctccagcaactgcttgagggcaccactcctaaacacctcttctgagccagaacgaattgcttccactttaggtttcacttctgccacacgctctgcaaacttctttttgaagtacagcgattgcaacctttgctgatagtgattaattcggctcatctcaaaaaggaacctatcagccttggccatccgatccagttcgtgtttatgttcctccaataggtcaatgtcacttttttcaggaacaaatttcaagagctgttccaacatgtccttgggcagatcttcctgttcgtccattgttagaattgcccgtttgatttcgtcattggataatttcaacctcgatagaaggatgttgcaattctgagctctccgaccatcaatcaccgaaagctctttaactttaagtttggaactcagagtgtcatc

SEQ ID NO: 138051 - DNA, 914 bp, Homo Sapiens
  misc_feature (803)..(837): n is a, c, g, or t
gaaatctgtaaagatagatattaaagataagatctgtaaagattgatatattgaatcccaccaggcaagcctgaggcagcaactaatgtgttaatggcttaaaaaatgattccaatgtttgcatgcccttcaggcctggggcgtttattagtgcaggccaaagggctcttgggatttcttttgccttgatgagatacggcagaaacaacctgggggtttgaagagtggggctgcaaaaaggatttctgcaactccaatgcaaaatgatagtccatgtgttctggcatatcccataccggtaccagggagccacacttctcacagggcacttggtcctcagcagctagaagacttggatttggggttgctttctgagtcacctccagcacagatttggaagctgaagaggcgtgcatgctttggctgttgtgggccaaatccatctctgcaggagttgctttagaggattcttctagcttcgacaccccttcacaaacagggacacaccctggatactctgttggtaaagagtttggtaatgctttacagttggaccatgggttttgttggggggaagaaactgaagaattattaagctgtttctgctttagaagcagacttttctgcttaaagaagggctcagttcctgtactttgactggtttgaaaaggtaatgagggcttggatggtgaattgctcatgggagcctgagtgggagcagtaagagatgaaagcgaagcttctttaactttcccggccgtaatggccgaattcccgggcatatgtccggtaccgtcgactgnnnnnnnnnnnnnnnnnnnnnnnnnnnnnnnnnnncgccgcttcctcgctcactactcctgcgctcgtcttcgctgcaacgagtaccctatagtatcttcagttttgtgtgc

SEQ ID NO: 138052 - DNA, 1356 bp, Homo Sapiens
  misc_feature (1216)..(1250): n is a, c, g, or t
  misc_feature (1253)..(1284): n is a, c, g, or t
gatttccatgcactttaatgaggtccagcactcaggaggattagcgcccaccaccatctgcctgggcaggggagggccggagggcccggtagcaggcgtcaggcttaggacagggaagggggctcaggatggggaagggtcctcaggacaggggaaggggctcagaagagagcatggggcttaggacaggaaggggcactcaggacggggcagggaaggtgtggggggcagtcgccacctgggtaggaagcagtggtgttttggacagcaggggttggtcctccagtgacccaggtggacaccccaggcctgactcacggctttttggggacatagtggtggatccagtccaagtagtaggtgacacgggtgtagatgccaggccggttgggctgggcacagccctcgccccagctgaccacgcccgcctgcagccaggtgccattcaccttgcacaccaggggccctccggagtcgccctggcatgagtccctccgggtgttcccggcacacagcatgtcgtcacggacgatgcggacgtcgtctcccgtgtaggcgccaaggtggtattttgcgtcacaaatgtggttttccattatggggaccttcacctgcttcagaggaaatggcggtgggaggcgctcatcattgtccacatcgccccagccagtgacccagcacggcatccccggggggaaggtctctgaggcagggggcagggtgaccgtgtggacgtggctggagacgttcaccggctcctccagctccagcagggcgatgtccgctccgatctgggcggtgtagaactgtgggtgcacgatgatcctgctgaccggcagcagctggtcctggtagtagaggtgctgctcccgcagttgcaccctgagggcggccagatccttgacgtccggtcccacgcagtgcgctgcggtcagcacccactgggggtggatgagggagcccccgcagaagtgcatccagtatgggccgtggactctcaggctcacctgccagggccacttgctcctgggggcctcctgacccccaacgatgcccactcgctgcagggcctggcctggggcaggggccgcgtaggcgcggctcgccaggacgggcagcgccagcagcagcagattcagcatcctggccgctccctgttccttctcccggccgtaatggccgaattcccgggcatatgtccggtaccgtcgactgnnnnnnnnnnnnnnnnnnnnnnnnnnnnnnnnnnncgnnnnnnnnnnnnnnnnnnnnnnnnnnnnnnnntttccgttttccgggcttgaaaaaacaggccgccatgcggcccccatatgatggttagtatacagtcttgcg

SEQ ID NO: 138053 - DNA, 900 bp, Homo Sapiens
  misc_feature (848)..(848): n is a, c, g, or t
  misc_feature (860)..(860): n is a, c, g, or t
  misc_feature (867)..(867): n is a, c, g, or t
gcattctgctggtcgactctaagatccccattaggtcgcgttctgcgtcactaaactttgtttaccattatggggacctttcacctgcttcagagtaaatggcggtgggaggcgctcatcattgtccacatcgccccagccagtgacccagcacggcatccccggggggaacgtctctgaggcaaggggcacggtgatcgtgtggacgtggctggagacgttcaccggcttctccagctccatcagggcgatctccgctcagactctgggcggatgatagaactgtgcggtgcatgactgatcctgctgaccggcagcagctggtcctggtagtagaggtgctgctcccgcagttgcaccctgagggtggccagatccttgacgtccggtcccaggcagtgcgccgcggtcagcacccactgggggtggatgagggagcccccacagaagtgcatccagtatcggtcgcggactctcaggctcacctgccagggccacttgctcctgggggcctcctgacccccgacgatacccgcttgctgcagggcctggactggggcaggggccgcgtaggccgggctcgccaggacgggcagcgccagcagcagcaggctcagcatctggggagcaaggaggagcatcgtgggcctggccgggcctcacagggcagggctgggggctacagattgtggggtgaagaatggagctgggacggggggaccggggtgggtccaggcctgcgggcctgggtcttggtgctctgagtctgaggctgggccactctgctccaggtgacgctgatgtcagggtctctgagagggggcacttccctggggggaaagcccgtngcgtgcaaccgncgtaggnttacggcttctgtttgtaataatacaatacccc

SEQ ID NO: 138054 - DNA, 1119 bp, Homo Sapiens
agggtagagtctgtaccacggtctcgcgacttcatcgtggtccatctgtcaatccacgcatgggggttccgtccgccgcagcccaaacagttagactgtacggggaggggagtaggacagggcttacccggggtcaccgccagggacccatgctgggttaccacgccacgttcctgtctccgcagggcgttcgatccctagagggaggagcctgtccaaacggacgctaacggcctacctccccctcaggtgctcttacagcctgttccaagtgtggcttaatccgtctccaccaccagatctttctccgtggattcctctgctaagaccgctgccatgccagtgacggtaacccgcaccaccatcacaaccaccacgacgtcatcttcgggcctggggtcccccatgatcgtggggtcccctcgggccctgacacagcccctgggtctccttcgcctgctgcagctggtgtctacctgcgtggccttctcgctggtggctagcgtgggcgcctggacggggtccatgggcaactggtccatgttcacctggtgcttctgcttctccgtgaccctgatcatcctcatcgtggagctgtgcgggctccaggcccgcttccccctgtcttggcgcaacttccccatcaccttcgcctgctatgcggccctcttctgcctctcggcctccatcatctaccccaccacctatgtccagttcctgtcccacggccgttcgcgggaccacgccatcgccgccaccttcttctcctgcatcgcgtgtgtggcttacgccaccgaagtggcctggacccgggccggcccggcgagatcactggctatatggccaccgtacccgggctgctgcggtgctggagaccttcgtttgcctgcatcatcttcgcgttcatcagcgaccccaaacctgtaccacgcacccagccggccctggcaggtggtgcgtggcggtgtacgccaatcttgctttcatcctagcggcatcgccatcctgctgaacctgggggagtgcaccaagagtgctacccaatcacgttccccagattccctgtcggggctggccttgctgtctggtctcctcttggcaccgccctgttctttggcc

SEQ ID NO: 138055 - DNA, 1311 bp, Homo Sapiens
gaagggtccccaggacaggggaaggggctcagaagagagcagggggcttaggacaggaaggggcactcaggacggggcagggaagaagtactccataaagaaaactcgggcaagaagaacaaagaggttggagagggaacgggagcctcttgggagagtcttagaccttgacaaaaaccaggtgggcagagtgcaccaggtcagccacatacgccagtaggttgatggccgtcaggatggccacagccagtcggcggtcccaggcacacacgtagtaggcatggctgcggctgcagcttacatctctcgagcgccgaggctggccgccatacttctcatcgaactggtagaggggccagagaacaagggcggtggcatagaggaggacagacagcaaggccagccccgacaggaagctggggaaggggatgggtagcacgttggtgcactcccccaggttcagcaggatggcgatggccgctaggatgaagcagatggcgtacaccgccacgcaccactccagggccggctggtgctggtacaggttggggtcgctgatgaacgcgaagatgatgcaggcaacgaaggtctccagcaccttcagcagcccgggtacggtggccatatagccagtgatctcgccgggccgggcccgggtccaggccacttcggtggcgtaagccacacacgcgatgcaggagaagaaggtggcggcgatggcgtggtcccgcgaacggccgtgggacaggaactggacataggtggtggggtagatgatggaggccgagaggcagaagagggccgcatagcaggcgaaggtgatggggaagttgcgccaagacagggggaagcgggcctggagcccgcacagctccacgatgaggatgatcagggtcacggagaagcagaagcaccaggtgaacatggaccagttgcccatggaccccgtccaggcgcccacgctagccaccagcgagaaggccacgcaggtagacaccagctgcagcaggcgaaggagacccaggggctgtgtcagggcccgaggggaccccacgatcatgggggaccccaggcccgaagatgacgtcgtggtggttgtgatggtggtgcgggttaccgtcactggcatggcagcggtcttagcagaggaatccacggagaaagatctggtggtggagacggattaagccacacttggaacaggctgtaagagcacctcaggcagccagtggcgactgcggctgaagcaaagacgacagcggcagatctttctccgcgatcgaagtgtgggggagtcctacagagtcaatc

SEQ ID NO: 138056 - DNA, 128 bp, Homo Sapiens
ataccctgcccagcctgtcagggcatttttaagctcctcttggtacaagatatgttactgtccattttccgacactgaaattagggcagtttctgacttaagttttcttgtagtgttgccttgctgtg

SEQ ID NO: 138057 - DNA, 858 bp, Homo Sapiens
tttggtggttttcttaaaaaagcctttgagttgcaggtcaggtgagttggttctggaagtaccggaagttctgttggtatgagagagacttgtctacaggcaggtaaacccaagtttgccaaacaaaggcagtaaccccagcgaccagctgctgctgctgcacggtgaggaggaggaggacaccatggacacgagtggaggctggatgggacaacgcagtggacatctgctaatgctctaacacggggttggtgtcacttctgagaagagcgaggtgagtggggatgctatacaagagggctgtacaaactgggcactggataggtagttcctttggtggtcaaggtggctctacctgtccttgagctctcgtgtcactcgcttggtgatccgtccacacatcaggccaatcaggaacaatatacagatgctcccactgatcacagagagaatgtagttcttagatggagacgtcattacttgcatggcaagatcagagaagccatctgctggggccacctttgctgcgtaactccacatctcaatccggtcattgaggcgctttttgcactcgggctgtaacctcacccgcttatcctccagtgcttccatgagacaggacatttgacgcccgcggccaggggtgatggctgcgcagtggtgtttaatgtccagggcacaagcagtatgaagtaccgggtcaacaaagatgtctgctttgctttccttcagcatgtttagcacttcctttttacacaattctgttttgatcttgagcaggttgaccttgaggcactcctccacctgacctgtctgctcttgggctgctggttcttcatcccggagaattccggaccg

SEQ ID NO: 138058 - DNA, 552 bp, Homo Sapiens
aaagatggctactaaaatcggaggagaaagccaaacacctagatctacgggtgaatttgagtaagcaaggtaatttctagcactctggaaaggctctggaactgaaggttccaggtatttccttcaatggaatgaatggctgatggttggtctaagaagtcagagctttagattccctcccccatgctgcgggtcaacagcctgacagaaggttcagtctatggaggagtttggattggaaacaccagtcacaaggacagaatgaagcctgaatgaaagtctctattctgactggtgacccctggttcccttttccatgtgctctgagaatattgcaagcagggatagatatggcactccttcactccctcactgccactcctctcatccctacccaccagtttgttagattcctctctaaggaagtgtattatccaagagaaatgacaataggtgttgacagttgaggatcccctaatgaaagagccatgtctgtgtctaatcactacaggcatatcgctacctggatgtctttgttcagcctgctatatg

SEQ ID NO: 138059 - DNA, 660 bp, Homo Sapiens
cataaagctgcattaacctcatacaggcactagaataacaggatcagcttgtgcattttaagattgtagcactgtgccgatgactttgaagatgcgtttatctgtgttaaatgaaatgttatgctgccctaacagaatcggagttgatgctgcttcctgtcctgacccctgtgggtctgtgttccctgataattttacacaacactgaggcgggaagaacgtaaattccaggaatgcatttatggttaatctgttgttgaggtttagtcagacagccagtgttttataaaccaagcctcccatgaaattgggctggaggaagagggatctaatagagcagataattaccacttgctctccattaactcagcccttgtgcccgggacacttttccttttggccagcaaaattggagtggctttgtcatgtttacagggagcctgcctgttggctattagagagggacagaaagaatctgcatatagaaaccctgaaagaatacacactaggcaactaataaaaatggtcgggaacctgagcagcatagtgagaccctttctctaaaacaatttttaaaaacttagccaggcatggaggcacacactaggtcccagctactccggaggctgaagtgggaggatcccttgaacctaggagttt

SEQ ID NO: 138060 - DNA, 1949 bp, Homo Sapiens
  misc_feature (11)..(11): n is a, c, g, or t
  misc_feature (830)..(864): n is a, c, g, or t
  misc_feature (1105)..(1113): n is a, c, g, or t
  misc_feature (1843)..(1877): n is a, c, g, or t
tctattttttnatcagtcatttattaacaccaaacattatactttaacttttccccattacacagtacaataagcctgtcaagatttccaggaagtaatcatcagtacctactgtgcttccagcagccaaagctaagctggctgggtaccagaaatcaacaccttcaggagaatggcatcacaagattgcatggactcatattaactattacaaggggcactggaaaaaaaggtcatttgctcatttacaaaatcctaattgaactaaagctctgtaattatagccatgggtatcagaccagctttttcggcacatccctatcacatcgctgcctgctgatgttttacactgcctataaagtctcataattttaaaagggaatgaaacagaatgccacaggtgaccgacctctgctcctgctacttgggagtcacgttgtcttggcttcgtcctggctcaaggttactagtctcttgctgctttgggccaaatctcttatctctttacatttcctcctctcaggctgagtcaaaagtaagtcacatgtataacaaaactgtcttaaaataccactgtttttcagccaagagaattacggatgcaatttaaagtctaaatgtattaattggaaaaattaaattagagcaactcaaggttttcctgtaattaccaaatgaaactgattgaaaaactgttccttctaattctgcttttccaacaaaagttcatcgcactagcaggataaacattcaaaatacataatagaacatatcctaattaagcaccagagttgtgtcagagccaagtatatacacacacacacgtatannnnnnnnnnnnnnnnnnnnnnnnnnnnnnnnnnnagtttattactggttaagtaaatgctctaattagcaaaaatcatgagaaatatatacagtgatataatgcggttaaattttagttctctgtgttaactacttactgttaattagtactcaattagaattaactctgggattttgagggcagataaatcagtaattagcctttatcccagaaagaatagtggtagcttcaaaagcttcaacagagctaatgatgtaatttattcaggacagnnnnnnnnntatgtagccaacattcttgcaagaattactttcttatggaatttaagatttcctcaaatattttcttttctatatagcgttttgttcttgtgtagttatctgcttaggatacagacaggatattgagactatttcagaaagtagacacacctaaaaacatttgacaaattaaaaaaattttgcataaaacaggttaccctttcctgctgactatacttaagaaataccaaagtagcatacaaaatgcttctaaactttcaaaatatctgaataaaaacaagatcctacttttaactgagatagatttataattcttacttacaagataaaaaaaatttcctaaaatttatttttaaatttcacataacctgctataattcgctgtaaaaaatggatgtcacatagaattttaaatatacaattgtttttgataactacctttcatacattttatttaaactgtagcattagctcaagatgaaactttttaaaagaaaccataggcttttgtccactcaaagattcaagcccagattctgaacaagtaaatgtgatgaaatttatgaaaaactatactgtacagtcaaacagtgatggtgcctcagtaaataacttcagtaaaatatccagtgctccaaatagctgagccatctttctaaggttcactctgcttctctcccccggccgtaatggccgaattcccgggcatatgtccggtaccgtcgactgnnnnnnnnnnnnnnnnnnnnnnnnnnnnnnnnnnncgccgcttcctcgctcacatgactcgctgcgctcgtcgttcggccacaaagagagcccctatatgacgatca

SEQ ID NO: 138061 - DNA, 464 bp, Homo Sapiens
tggtagccactttcccatgcagctaccaaaccataactcacaggcccgggcagtggacacagcctttggaatggaagatgggtctgcaatgacttgggactgctggtatattggtagcatttgccaatttccatggtgtaaatagtcacatcatgactgatttcaaactaccaacattctgtcaacagtctccagaatttctgaaaatttaatgaacatctttgagaaccagtatggaccagctccagcataccactgcctagggccaaatgatgaaatggaacctctaccaaactgggaggcaggagttctgggtccaggaacagttttactggaactgaattcattgggtaatccctcatatttcctactctgggcctgagtttctccagctgtcaaaagatgaatatagtatttgctctgcctgcctcaaaggcattgggatgtcaagagccaatagcatg

SEQ ID NO: 138062 - DNA, 161 bp, Homo Sapiens
ccccaccatccttatccaaaagcagccatccctagtaaatgtttgcactaaaaatacaggacacacttatttatgactttccaaacagcttattaaataaataaataacactgagctttatttaaaggttccagccaggtgcagtggctcatgcctataag

SEQ ID NO: 138063 - DNA, 478 bp, Homo Sapiens
ggaaaacatggggctgaaaacagccctggaagtctggattcttagtggaagttgaaacagtctaaaacaaagtctctggctgtcctcagtttgcacttaagaagcagaacactcaacactgaaaagcaggatggcaagcaaaggtcttatatggcctccacactccggatggagacagtggggatcaggatgggctagtggctagagtctagtagaaatagaaaggggttcccaagagactccaggccccaacattgagcttttattgtgacttccagggctgtgtcccaaatgaccctttctgagaccctccacaaccagcctccagggaagcctgtgaaccagggagaagaaggctcactctactgagccactgccaagctttggagtcagcgtaactgagccccatcatcggcatcaatgttttatagctgtgggaactcaggcaagtcattcagcctctcagattcctcatcta

SEQ ID NO: 138064 - DNA, 334 bp, Homo Sapiens
  misc_feature (238)..(238): n is a, c, g, or t
  misc_feature (248)..(248): n is a, c, g, or t
  misc_feature (286)..(286): n is a, c, g, or t
  misc_feature (295)..(295): n is a, c, g, or t
  misc_feature (322)..(322): n is a, c, g, or t
tgcagcaattttttttattgcaaaggaactagacattacattaacctgatgaagatgtaaccgatgcatgaagcataactggtgcaacattttttaaaaatcacaaatgaaaaagaaaattcattttcaaaagaaaatattgtatccaagtcagcttaatctctgaacaccataatataactcttaatgttgattctaaacatccaggggtaaagtttactttaaactgaataaaagnaaggaaaggnttctttccggaacttcccccaacaggttcccttgggcntacccatcnggggccatccacacccccttaaagggnaattggtccatc

SEQ ID NO: 138065 - DNA, 1029 bp, Homo Sapiens
  misc_feature (470)..(472): n is a, c, g, or t
  misc_feature (474)..(474): n is a, c, g, or t
  misc_feature (476)..(476): n is a, c, g, or t
gattcattctcgccgggcggatggctccgagaatagtcggttgggtgcgccactctgttgtcggtggtcttgggcgcgccaggggatatgtcaaggggactacaggggcgcaagagtaaggagagggtggaagttcgggggacgtggtgaaagggcgttgttagtcacggtgcgaacatgtagcggaacgcggtacggcgggtaggcgtgatttcagggggctgcggtggtgtcgatggggggggtggcgaggagggaccgtgagaaaaggcgcttcgggagtcgtccggaacggctcgttgccctccgggggtttttagttggggagagtccaagccttagtccaggaccaggatttgcctaggaagcgggtagggccgtggtcacttccctggggggcccgcgcgccaagcgaatggtttaagaaagcttttcggggggccgagggggccgccagggtgtttgttttnnntngngggttttttttcctcctatttttgccactcccatatacaccaatgtcggtccgggggctcagcacctgtaacaatgtatggctagaattcttcttaagaaacgtccgcccagtccgttctctccatgcccgtgctgctgctacctgtgattccacttgcggcagtgcttcaagacgcacaggaatagggcgtcctttcgcagacaagctctcaagctgctccaaataagcgtaattgctgccactctgaatagcttccactttagcggtccattctcgagccttttgtaaggcttctttcaaggacaacacattgggtagaaaggctggaatgttcttggcttcattcacaatgctttctaaacttgccacactgtgcctcaggtcttgcctgtaggcagaccttagccttttcttcccatcgttcagagactgtaaggagctcctgtagttcagccattgctttctccacagcatggtggggtggcaagctcaccccagagtctatcagcttctcatgacatccaaagtgacttggtgcggatctcgaaagg

SEQ ID NO: 138066 - DNA, 734 bp, Homo Sapiens
  misc_feature (196)..(279): n is a, c, g, or t
  misc_feature (304)..(317): n is a, c, g, or t
  misc_feature (350)..(359): n is a, c, g, or t
agtgctgacaaaataaaatactcatttttgcataaaaaggttcctaatccttttgcagaataagttttgtttactctttataccaaaattcagtgaaggcattctacaagttttgagttagcattacattttaatatttacctattgctacattgtataattgagtttgaaataaaacccagcttatgacaatgcnnnnnnnnnnnnnnnnnnnnnnnnnnnnnnnnnnnnnnnnnnnnnnnnnnnnnnnnnnnnnnnnnnnnnnnnnnnnnnnnnnnngaaagtgaacatgcgtcaaacctgnnnnnnnnnnnnnncctggtcctgactagccgcttggattaataacnnnnnnnnnncgccctggtggcaaccgacccggtgaagaacaagtccaggatggagttctggaggtccttactgagatctatcaaccggagtccatgcgaggctccaaaacaaataacgccggggggctgacactcatcttctgaactgtatgcacatgggttaccacgtaggtgccgaaaatggaatattcatccccaaacccggccgaatgaaacctggaatcgtgtagagagtctcctacacccttgcttgcccttgcggaataatattctcccccctggaagaaaaacaccgcggatatagacaattgtccccatatgggcccttgggcgccaaatggaaaaccgggagggggcctccagccccgggaattcggccggcgg

SEQ ID NO: 138067 - DNA, 915 bp, Homo Sapiens
agcaggaagttcctggactgctcggacgagagcgatgaaaaggcctgcagtgatgagttgactgtgtacaaagtacagaatcttcagtggacagctgacttctctggggatgtgactttgacctggatgaggcccaaaaaaatgccctctgcttcttgtgtatataatgtctactacagggtggttggagagagcatatggaagactctggagacccacagcaataagacaaactctgtattaaaagtcttgaaaccagataccacgtatcaggttaaagtacaggttcagtgtctcagcaaggcacacaaccccaatgactttgtgaccctgaggaccccagagggattgccagatgcccctcgaaatctccagctgtcactccccagggaagcagaaggtgtgattgtaggccactgggctcctcccatccacacccatggcctcatccgtgagtacattgtagaatacagcaggagtggttccaagatgtgggcctcccagagggctgctagtaactttacatgaaatcaagaacttattggtcaacactctatacaccgtcaggagtggctgcggtgactagtcgtggaataggaaactggagcgattctaaatccattaccaccataaaaggaaaagtgatcccaccaccagatatccacattgacagctatggtgaaaattatctaagcttcaccctgaccatggagagtgatatcaaggtgaatggctatgtggtgaaccttttctgggcatttgacacccacaagcaagagaggagaactttgaaacttcgaagaagcatattgtcacacaaagttggcaatctgacagctcatacatcctatgagatttctgcctgggccaagacttgacttgggggggatagccctcctggcattttgaacatgc

SEQ ID NO: 138068 - DNA, 958 bp, Homo Sapiens
  misc_feature (23)..(23): n is a, c, g, or t
ggagaagggcactttcctatgtncttgcaagaaagatgaatgcacttcacatgctggatattaaagagcacaatggacaggatatccacagagtgcctttcaggtggcagtggctgccaatcagcatctcattgtgcaggatctggtgaacatcggggcacaggtgaacaccacagactgctggggaagaacacctctgcatgtgtgtgctgagaagggccactcccaggtgcttcaggcgattcagaagggagcagtgggaagtaatcagtttgtggatcttgaggcaactaactatgatggcctgactccccttcactgtgcagtcatagcccacaatgctgtggtccatgaactccagagaaatcaacagcctcattcacctgaagttcaggagcttttactgaagaataagagtctggttgataccattaagtgcctaattcaaatgggagcagcggtggaagcgaaggatcgcaaaagtggccgcacagccctgcatttggcagctgaagaagcaaatctggaactcattcgcctctttttggagcggcccagttgcctgtcttttgtgaatgcaaaggcttacaatggcaacactgccctccatgttgctgccagcctgcagtatcggttgacacaattagatgctgtccgcctgttgatgaggaagggagcagacccaagtactcggaacttggagaacgaacagccagtgcatttggttcccgatggccctgtgggagaacagatccgacgtatcctgaagggaaagtccattcagcagagagctccaccgtattagctccattagcttggagcctggctagcaacactcactgtcagttaggcagtcctgatgtatctgtacatagaccatttgccttatattggcaaatgtaagttgtttctatgaaacaaacatatttagttcactattatatagtgggttatatta

SEQ ID NO: 138069 - DNA, 544 bp, Homo Sapiens
ctgtgggtttttccctcagtcatagtttagtttcatattccttgttatgataacattgtatgtttaaaatatcttttttcctctggatatccacagagtgcctttcaggtggcagtggctgccaatcagcatctcattgtgcaggatctggtgaacatcggggcacaggtgaacaccacagactgctggggaagaacacctctgcatgtgtgtgctgagaagggccactcccaggtgcttcaggtaagaggcagcaaaccaggcttccatcattgcaaggccagagagatagagttggatattagtagtcggatataggttgcctgttgcaatggtttattttgagttaacttattcatttcttggggattctaataggtatatgcgcagcttatgtagctaacagatgtctgtttttaaaatctgcaggcgattcagaagggagcagtgggaagtaatcagtttgtggatcttgaggcaactaactatgatggtaagcgactgaaactttattagattcagagccacgaagggggatggaccc

SEQ ID NO: 138070 - DNA, 582 bp, Homo Sapiens
atagcattaccttcccctcagaaatcacttccacagattgctgtaaccaggaaaatatattttattagtagcataacaatttgtctgggtcttttaacttattgtgaagaacagttctttttccatccaccactgaccagtttttttcagatgagggcctgttaccatgctctcaaagataattatttttctaggtaagtcccattgggaataattcttatgaccttgtagataagcaaagagacttaattgacaagcagacacttaacaatttatgatcactgctcaaaatgctttttgagcataatctttggcaggttcattcattagatgatggcattgctgacaaaaggatattgtggtggtttaggttagagccatttaggttcattcttttcttccacctcagctatacagatgttttctgtgcttcttgggcaatccagtaagagcccatggatgggttggtacagttcagcccacatttggaaaaaaattttaggcagttttaaaatatcttttaaaaaattgcagctcatagtaagagatacattttacattataacctaatatatatgcaaa

SEQ ID NO: 138071 - DNA, 923 bp, Homo Sapiens
ggtaaggctcccatggttccagcctgccagtctcatcctgtggcccaggtcctccattcagactgccatactggttatgcagtaatattattcagtccaccagtggctccagccagtccttgcagagtccccgagagagttcaaggagttcatggctgcaccagcagtggattggtgtttgaacagccacgggactcgtgagtgctcccaagggcgctgctcgtgtagagagagggtttgcattggttgctggttggctgaggtctgggccgcagctgcagcagcagccagcgtcgccaggttctgcaactgtaaagcattcatgcctgccatttgttgaatgcagctgaacgcacccaggttgctggaggaggtggcctgctgcaggagcgccagatactgtggggtcagtccgcccggccctgtccaggttcccccaggtggcagtgttgacgctgctgcatctgctgagctagctgctgctggaggcgcctttgctctttgtccttctgagtgtcagcaaacttcaccacgataggtgaagagcagccctcgactcagcccatcaggtccccggaggatccggcattcttctatctggccaaatggagagaacatcaccctgatgtcgttctcattacatttcttcgaaaccattcctatgaacaattttctgtcttccacagcgttggacttttcactatctgcaggtttcatctgaatgggatgatgcatctttactctgcggagggttctgactccggtcccggaggacgttgatctggtagacggctccgtaaggctcaaaaagttctttcagctccttttccgaccatgaccgggggatctgtccgacaaacatcttaatggcatctgggtctggttggtctgagtgatccaaagctccgttcatcatccggaaa

SEQ ID NO: 138072 - DNA, 1009 bp, Homo Sapiens
ggtttgccattgggtgctgggtgggtgagggttctggggcccgcagttggcaggcggcagcccagggtcggcccaggtttttgcaactgtaaaggcatttcatggcctgccatttgtttgaatgccgctgaacgcacccccggttgcctggaggaggtgccctgctgcaggagcgccagatactgtgggggtcagtccgcccagccctgtcaggttccccccaggtggcagtgttgagctgctgcatctgctgagcgagctgctgctggaggcgcctttgctctttgtccttctgagtgtcagcaaacttcaccacgataggtgaagagcagccctccatggtctgagactgatgcatggctttgattgcattctgtgccattgcccttgtagaaaatgtgacaaacgcacagcctcgactcagcccatcaggtccccggaggatccggcattcttctatctggccaaatggagagaacatcaccctgatgtcgttctcattacatttcttcgaaaccattcctatgaacaattttctgtcttccacagcgttggacttttcactatctgcaggtttcatctgaatgggatgatgcatcccaggtaaagttttaatattgtgcagtgcattctgggcctcaagtgcagcttttcttgtataaaatgttacgaaacaacaacctttactctgcggagggttctgactccggtcccggaggacgttgatctggtagacggctccgtaaggctcaaaaagttctttcagctccttttccgaccatgaccgggggatctgtccgacaaacatcttaatggcatctgggtctggttggtctgagtgatccaaagctccgttcatcttgttggctgtgccgttacttggtagactcccagctaactctgtggccgtctctctgatgggccggatcactcctttgtgtagctctgtagaccagcacgttgcagcaccaactcgctcacagatcccgggaattccggaccggtccac

SEQ ID NO: 138073 - DNA, 437 bp, Homo Sapiens
  misc_feature (272)..(281): n is a, c, g, or t
ttgagttcactcatttctccttcctttccttattgatcatgggattctgttgtagcagaaagatctgtttgtgttttcgtttatggatattgttttcagtgacagatcataaaatgcaactggaaaaacagtgtagacccaggtcacacagagcacaaggaagttcagaggaattcagtttccaattaaggaataaactctaaaggcccttttgaaggagtgtgatggggaatttggcattctgtaatgttaaatctcttgcttgcagcacnnnnnnnnnnaagctacaatcctgtttcatagagtaagcaaaatttttaaatattgaaaacctaggaagtaatttagttatctgacattaggttttgagtaactatttagtatatctgcataatcagctgcctcatgcctgtttccccatgctacccttttccttc

SEQ ID NO: 138074 - DNA, 909 bp, Homo Sapiens
ctatcaacatcttgattttggtataatctgggttttcatccgtcatgctctcctgagcacgttcatgtaactcttccacatcatctagcagattctttacttgccgagcttggctgatgacacacggaagactaaaaggttgttggacaaaggccttcaattcttccactgtcagtttggtccgagtcctcccactatctgggctctgtctgtgtttctgctttttgctcagaagcagctgagccacagaagcacaggtctcagcttcttttacagcatccctgagttttcgaaagagatcattctctgggtatttcctatcctcagcatcttccagcattactcgcaattcaatcaaatcttttttgtggttgaagttagcagacaatgcttctgtaacacgactgccccaagtgtcataggactgtgccctgacttttacaccatatagcagagaagggaggtcttctaatgggtagcgatatctaagacatttcttctgcatggggcaggggcacagatcagttggatggtagagacatacaagccgctcaggattacaggaacatgtgagagcagagagaaaacatgtggttctgcatgctgaacactgccgctcatcatcaggaacaagttcaaacacttcttcttctgacatcaggacacccatctgtacaacagactctcttaatcgtgtttcttcttcagtcatgagagtcaattctttgcagaccatggcagccagccccacatctaagcattctggatctgctgccatcttgaaaattagttcctcgtgtgaaaagacacagtggcgccttaggcgtcggtaatgatttacacattgacgtccaatgggcaaccagtcagcagtacagaagttcacagcttcagcaaagttgtagccct

SEQ ID NO: 138075 - DNA, 833 bp, Homo Sapiens
  misc_feature (792)..(792): n is a, c, g, or t
aaatgacttttgttttgttttatttttcatggggctttgtctgtttcttgccatgagtagcaaaccagtgtacaaaaatgtcacagacgagagcaacaagcgactaggttttcctgagcccaaatcagctcactctatatacacaaaaggagggctgcctccctgtcactgactctacccgccacaaagcgggcaggatgggcagtggggggagctccttcccagcctggggccttgccaaggagcccacaagggcctgcaggagaccctccataatcagcgtcagtgtcttgtctaacagcatcacacatggtccttttttcctcctcccctacctccccttcagtagaaaccagtaagaaaatcctcttcaggaggggacagaggactctgggtcaacatctacaaatccaaggaagtctttttggcagagggaaaaatggcccttctgccactccctgagccacctagcttacccccagggcactgccctgccccaataccagtgcacagagacctgctgacaacttgctctctgtggggagctgtgcccacttcataggacactgaattaccaatgatcacaaatataaaaacctcaacagaggctacagcaaaaggggtgatctgacagctagactgaggtactgtacggtaaagttcgccgatcaccctggttagcccggcgaccctgcaagcagcttctatgaatgcgatgaagtttgaggagagagagagaaagagattgctgacttggggagactgagtctgtggcttcagaaccctgcaatncttcacaggctgacagaggaacatgttactgttgtgcctct

SEQ ID NO: 138076 - DNA, 478 bp, Homo Sapiens
  misc_feature (133)..(133): n is a, c, g, or t
tttttttgcatgtaacctacttgtgttctctgagcttcctggatctgtgtctgacattaattcggggaaattctaagtcattattactttaaacatggtttgtgttcctttgtctttttcttctctttctggnactctcactgtgcatgttataggttttgtagatgtcccgcagttcttggatattctgctctttccccccacactccctcggtcttttttccctctttgcttcctcaagttttggaagtttctagtgacatattctcaagcgcagagattccttcctcagctgtgtcctaggttgctaatgagcccatcaaaggcattcttcatttctgttaccgtgtttttcagctctagcatttctttttggattctttcttaggaatttccaccctctctggattacattaccccatctggttcttacatttgtcggacttttttccaagagagcacctcgcgcggaaattcc

SEQ ID NO: 138077 - DNA, 1372 bp, Homo Sapiens
  misc_feature (114)..(130): n is a, c, g, or t
gtaggaaggaactggtttcggggagccctgggcggggcggctgtggggaggaaggtgacgtgcaggtgaccagaggctctgcactgctcctaggacagctcatctgtaatcagnnnnnnnnnnnnnnnnntacagaacgctgactcctccgtgagacagatcggggaccttagcactttaatccctcccttctgagcgctcggtgtgcacttttagactatagctgtttcattgacgtgtcactctccatccagtgtccttgatgtggcttttagagacttagcagaaaattcgacacaagcaggaacttgatttttttaagaaaaaatattaccatttttgagggacatttttggacaagtagggggaagagagggcttctgttgttttgttttgttttgttaactaaacctgaagtattaattccacaaagacactgtccctcaggaccactcaggtacagctctgccagggacagagtcctgctagtgggaggtctcaggtggggcggtgtgttctgtgccatgaggcagcgacaggtccagatggatgtcgtcaccaccttcctcagctctcatcacctggtcgtacgccaggcccacctcttcccagcaagggacgccaaagaactgcagtttttattctgagtcttaatttaacttttcatcatcttttcctattttggagaattttttgtaattacaagcaattatctttaaacattgtgcaaagccagtatctcacaaggcatggatttctgtggaatttatttttattcgaataacccatatttaatctccaggctgcgcaacatctacactttctgtttggcaacaaagacgtctctctcttgctaatctcacagagtgaaccctgcgggaggggcaccgctccgttcctcaacatttgtgcacagaatctgaggcgcggtatcagctccagcttgagaaagactcgccctatccccatcttgtcgcatgttataataaacgacatactctagtgcatgcgggctctcttcttccttttaaccataccccgtccgcccacccacgacagggcggtcctgtccaccacccgctctattcgacagactcatcctcggtccgtcatcccccaaccctcctcagagcagagctattatactagtacactcctctcggatcaaaccactcggtcgtattgcgggctcctcctcaatttgctgtgcgaacagacacgggactattccttgatacccctagccgacgcacacacaactacatgaagtacgcaccagccacagctaatccaacggcatctgtcagcatcacctagaaccgtctacgtatgctagcagtgataaagactccctcgtatatcacgactcgta

SEQ ID NO: 138078 - DNA, 865 bp, Homo Sapiens
  misc_feature (139)..(216): n is a, c, g, or t
ggggagaatccaagccctagtcatggccaggatttccttggaaacaggtatgcccatgttcccttaccttctggggccggcgcgccaaagcgaatggtttagaaaactttttcgaggggcgaggcggccaagcaagggnnnnnnnnnnnnnnnnnnnnnnnnnnnnnnnnnnnnnnnnnnnnnnnnnnnnnnnnnnnnnnnnnnnnnnnnnnnnnntaagaacaaagttttgggcaaactagtaatttatttacaattgtaatttataaacagtaacacaaacatctttacattaatattatgaaaaatgtcccatggctgaaatgggtgaaaaatgagacttcagtacatttctaaaggggtgccaagaaaagggaaaaaatgcaattacaacagttttaggggagagttatatcaagtaatgcacctaggtgcaatttcatgcagatgtcttcaaccactcaaactgtttttattagatattagaataaaatttcccaaattatgttgccttttattcacttgatttccataagtaaatcaaaatgactggctgttaacagggtacatctaaatatttctcccatcaaccccttagagataatcccttacattttaggacatgtcagattgtgggtattgcaacttcccaaatggattttacaaaatactattccatggccctaaatgtgttcctggacttctcttaccaaatgtgtctaatatggaccattataaattaaatgaagaacgctgcaaaatacagcagagcaattttcagtacattaagacaatgtgtccaaaactaatttcaaaccactggaacttcaatgagaggacaaaaccaaaagaagagaaagaattc

SEQ ID NO: 138079 - DNA, 391 bp, Homo Sapiens
  misc_feature (39)..(39): n is a, c, g, or t
  misc_feature (380)..(380): n is a, c, g, or t
aaataggaaactaaaagtctgttacatttatttctaacngttgattgaaaaaaatagattatattctattgccagatcttgaatataccttatctcttaataatcccacaggaatcctaaaaaacagatactatcaatctctactttacagttgaaaaaactgtggcagaaaggttaaatgacttgccccacgtggatttcaggcctgtctgacagagcttcttgaccctgtatgtcttctcggccctgtatgtctatcaagaatgttgtacttttaaatgctatttacataggatgaagattctgcaaactttttcttaaaggcccatatatttaaatatttcagggccttctggggcccataggagttttctgttgcnaacccactcta

SEQ ID NO: 138080 - DNA, 638 bp, Homo Sapiens
  misc_feature (350)..(358): n is a, c, g, or t
aaaatggcagaagaaaaaatttttttaaaaagtttactgtccacagattgattataataatttacactttcttagacctgctatttaagcagccccatgagcaaatgaaaggtctccagttagtattcagtcaggaggtatatgtccatgtttctcttggttgtcttaatttctttttatataattttcttttatattaactttccaaagcatccaaaactttcatgatctgctgttttatggctttagttgcatcccctgcatttggaatcaaatacctttcgattgccaagatttctattcctgaagcactgctatttccatacttgaaggtaatgagttcaggatgnnnnnnnnnggatgtaattttaactacagaattcagcgcttgtcgagactgtatataagccaatcctttccgtgaaacaatctcccttaaacagtacatatgtgttgcagtaaccaacagatgactgggaaacatgtgtccactttcttttacttctttacaaggaaaatgatgtttgacatctggtttgtttatccaagtctgaatgtttacaacctcttttctatcatcatctgacattgaagaactgtcaatttcatctgtgtcgtactcttcttcatccccaatg

SEQ ID NO: 138081 - DNA, 470 bp, Homo Sapiens
  misc_feature (439)..(439): n is a, c, g, or t
cccagaaaatcactgacccaatatatattcacatatatttacattcttttcttatttgttgtttaggcagggagaagagccaaagaaaattaacacataataacaactgtaaattatggattgttgctaattgctaccacagtggtaataagtgatatgcagacacagcatgcatccttatttttataaaaatcaatgtagttatttttgctcccatttttcaaatgaggaagcaatctttgaattaacttggccaatgttacagtatgtatttcaatatagaccatgggatttatccactaggactatactgctacccccaaagcccaggactgggggaatccccatttaaggggcttttattcttattgctggattaatataattttcatctgggcctgctgctgagggtgtggcttaccctggggccaatggggcntaaccttggtccaggggacctatggccggga

SEQ ID NO: 138082 - DNA, 243 bp, Homo Sapiens
tcggtgaggccctaataagaaagtaagaatagacgtaaaccattgttttcatcatcctttaagacagggatttcaaactcaagaaccaggcagctacctatttaaatgagtcaagtgggccctaatgtaagacaatgtgatgggtaaggattgattctgagggaacaggagcaggcatgccctctctaacagaggccgtcagttctgctgtacctgaaatgtgggcccattgttgctggcgat

SEQ ID NO: 138083 - DNA, 457 bp, Homo Sapiens
tttatgattgctggggccacgtgggcatcctctttattggtgcttccaaggtgctggtgcagagcccttggctgaagggcctggactgtgggggagggtggcagccccagagacagcaggggagaggaagcgttctggcataaaaaagagttcctgggtaaggctcctgtttccgagcattcgggcagcaaggggagtggcgcacacttctcagccgaagacactcttggtgggtccggctttgggcttctcaaagacagtctcggtacctgtgcgggtgcggctgaacaccgacggggcggccgagccagcttgctcacactctcgcatgacctggtaggtcttggacttgatttcctggttcttggtcaggtttcctcgggcccccttcaggtcctcctccttcacagggggggcgcttcttcttgataggggcttcctgagcaccagcctggga

SEQ ID NO: 138084 - DNA, 250 bp, Homo Sapiens
  misc_feature (48)..(48): n is a, c, g, or t
  misc_feature (50)..(50): n is a, c, g, or t
atagcggctccggccggccagccccggctcatttaaaggcaccagcgncngttaccgggggatgggggagtccgagacagaatgacttctttatcctgctgactctggaaagcccggcgccttgtgatccattgcaaaccgagagttacctcgtgtttagaacacggatccactcccaagttcagtgggtgtatgtgaggggtgtggcaggtaggacgaaggactctcttccttcttgattcggtctgca

SEQ ID NO: 138085 - DNA, 1152 bp, Homo Sapiens
  misc_feature (632)..(672): n is a, c, g, or t
  misc_feature (1030)..(1064): n is a, c, g, or t
  misc_feature (1069)..(1112): n is a, c, g, or t
tttttttgacaagaatactggagatttgagtcaatttttgtggtcttctgatagctaagtgccatcaggttagaagcaccaacccattttcacacagatgattgattaatgtttagagtttatttgggaaagctacgaactagctgcccatcttaaacagctgtacaataacttgaataaaaaattatgtaagaaaaaatgagcaagcgtagttcactaaatataaaggaaattgttaaaaccagacagtaatagctataaaaggcacaacttcccttttctgatatacacttgtaaactttttttcaggtttccatgcataaatcaaaaatgctatcctaactatacaggggggggatacaccaacagaaagtctagaaaatttcatccagccaactgtgaaaaaaagtatgaagagaaagttcatcacacagactttgggcactggtggtttaggtgccatccttctttgactgtggagattacgtccacatattaaggtttctaatttctgggatatattaactaataaatttcaccatctactctcccatcactgaaaagtgatgacgactcaactgcttctgttgccaagtcttggccctctataaaccacatgtagtgcgtatttnnnnnnnnnnnnnnnnnnnnnnnnnnnnnnnnnnnnnnnnnaacctctacaggacaaactgatagtttatacaataaaagctattaattcgactttctttaaggcaaccattcttattaaggcagtcacttttgatgaaacagaagttttttgatatttccgtttgaatattttggtatctgattggtgatgatttcagctaacatctcggggaattcaatactcatggtcttatccaaaatgtttggaagcaatagttaaggagattttcaaccacttcatgcatagaatccaagagtcttgtcagttgataaaaccgctgccagttctggctggagtttccttccccccggccgtaatggccgaattcccgggcatatgtccggtaccgtcgactgnnnnnnnnnnnnnnnnnnnnnnnnnnnnnnnnnnnccggnnnnnnnnnnnnnnnnnnnnnnnnnnnnnnnnnnnnnnnnnnnnatgaggccggacgccctatagtgatcgtaccaaaagtctt

SEQ ID NO: 138086 - DNA, 669 bp, Homo Sapiens
acaggacaaactgatagtttatacaataaaagctattaattcgactttctttaaggcaaccattcttattaaggcagtcacttttgatgaaacagaagttttttgatatttccgtttgaatattttggtatctgattggtgatgatttcagctaacatctcggggaattcaatactcatggtcttatccaaaaatgtttggaagcaatagttaaggagattttcaaccacttcatgcatagaatccaagagttttgtcagttgataaaaccgctgccagttctggctggagtttccttccctcttgacaatggcttttcctagctctttgatgtaggtcattctaatttcatcaaatagctcttggctcttcagaccgtccttaggaactgaagagagaagcagtaaggttttcatacagagatactcttcataagatacctgaagcctgtgtaactcagaggaaacatacagcatgtgtttacattggtcgtacatgcagggtagagtcattctctgctcattaataatcagatcaggagcaaaacacagcaggtttgcacttgattgtctatatgatctccaccccagagcaaatgccataagaaacatccaggagtactgcagtagggtcattggtcatccaggtgtaagtcctgaaacctggtat

SEQ ID NO: 138087 - DNA, 476 bp, Homo Sapiens
  misc_feature (45)..(45): n is a, c, g, or t
  misc_feature (410)..(410): n is a, c, g, or t
  misc_feature (422)..(422): n is a, c, g, or t
  misc_feature (453)..(453): n is a, c, g, or t
tttaagcagtgttttgtagttttcaggatatgggtgtgaacccanaaagtctctgagacagatctcaatcaatttagaaagattattttcccaagattaaggacacacccatgacacagcttcagaagatcctcacgacacgtgtccaaggtggctggggcacagcttggttttatacattttagggagacatgagacatcatcaatatgtgtaaggtatacattggttcggtccagaaaggtgggacaactcaaagtggggtaaaggacttctggggtcatagggtaagtaaggagacaaatgtttgcattcttttgagtctctgatcagccagcctttcacccaaaaacacaatctacatgtgggggtggccctaggagtaggcccgccactttctacccttagtttnggctttaggtgnaaccaatagggtcagaggggagggaatcagncatgggccttttgtctccatgtt

SEQ ID NO: 138088 - DNA, 729 bp, Homo Sapiens
gtcagttgtgtcctgggctgtgtccgtaagaactgtctcaggctgtctgtgagatagactactgattaggtacttgtgttgtgcaagatttgggcagacacttgctaaagttctgtaaaagatgtgaattttaatgtttggtcaggatctgccttttcacctagttgtcacatcatgattcaaatgggagaccagaggaaaggatttaaactaaggctcttttggtaacattctgatcctttggcaagccgatctgtcttgcaatatacatgtcccgacgatggaagggtaaagcgagctgaatcaccaaactcagtaacgataatatcatcgtggcttttctgcttattaaacactccacccgataagatttgttccccttctgcaagcttgctgagatcaacacaacattttgcaagcaggtatttgcattgcggtgtagtacaactgtgtcctttcaagagtctatatgttttatatgcctttcctgagcggtaataacaggttgccagtaagaacaaggcttcttctgagtgtacttctgcataaaggcgttctgcgagggaaaccgcatctcggtaggcatagtggtttagtgcttgccatatagcagcctggacgggttcctgcagcaccgtcatcctcgaggctcaggcccactttctgcagtgcctcaggcccgacctgtagcggctccggcccggccagctcctgctcatttaaactcac

SEQ ID NO: 138089 - DNA, 2423 bp, Homo Sapiens
  misc_feature (31)..(31): n is a, c, g, or t
  misc_feature (53)..(53): n is a, c, g, or t
  misc_feature (55)..(55): n is a, c, g, or t
  misc_feature (71)..(72): n is a, c, g, or t
  misc_feature (97)..(97): n is a, c, g, or t
cggcgacacacacgcctatctcccctctcgnctcctcgccctctccctcgctntncgctctctcattctgnncccaaaaccggagagtcagtttctntctatctcctcgcgcctacaccgccgccacgacgccctatcactcctcccgctcttctccacacaagcaggtggggtcgtcgagttggcggcggacgtggggcgaatagggtccctcttgtccgcggtcgcggctaccacagccccggtacaatctagctagtacatacgcgccgttctcccacccgccgatttctattcccccggctgcaccgttccgctgggactgtgtctcacgtaagccgtgtacatacgggtgccgcgccgcgctgaaccgactatcggttaccaacgtgctctctgcgcctctctcatcgcaacagctcccgtggccgtgcagcatcatccgcgtcgcttctttttcttacggctcgtcccgcgaatctccgcggtatcagcttccgacctgtttgcgcacttcttttccccatctcgccgtgcctcccgtcgggccctcattccatttcgggcctagtgttttcgtcccctcgtctgagtggcaagacacctcctccccggccctcacgcctgagattctttgcgggcccgaagggccccagcaggtccaagtctactgtgtccacatcacaaccctcgcgtcttgggtggggctgtccccagcatccccgcagctcatttcgggcagcaggggtataagccttgctctccagtgtcttctgccttcgtccgggcagtgcaggttgggccatgtataaatattcttgaaggcccatgggcgagcctggctgtcccccgttcctctggaagtgacatgtgagtgtttctggtccaataaataaaggcggcgtgagcactgtgccagctgcctcctggcctggtggtgaggctggaggtggggcacagcctgaccgtggctatggcgccagcacttccgccactgcagcccgcacctagaattcatcatcagagctgagcaagagagtcttctcgttgtcgcgggcgccactgaggctgtgggagcgggagaggccgtgggcgccaccacgccaggtgggcccaggctccagggtggactgctgcgtgtactgctggtaggcaggtgagaagttgtggatggcgtcctgcacgatgtcgtgcgggttcatggtctccttgaggctgctggagatgctcttcatgggggcacagcggccttgtgcgtccagcctcttgtcagcatagaccttgtaggtgaaggcgtgccgcagggccagggctgcaaagaacatctccacacagatgatgaagtcctggtagccggcagccacggtgccctcgcccaccgacacgcgggccgagtggattttggggatggccccacacttctccaggatggccaggagcatgccttgccagaaggaaagaaagatgacggacttgaccatgaagaacttgaggacggggctgtaggggctgagcagctcccgggtggcgaagtagaagaggaagagggcgtagagggccaggctgacggagatgttgtagatgatggtcacgtagaggtagccactggtgacgtcaaagtccccatcccggtacttgccgaaggcctggaggaccacagtgctgaccgccatgagtggcttcaccacacagaactgcagggtggcctgtttgcagaacctcagaaatccgatggaataagtctttccccagaggcagcaggtgccatacatacagctggactcaatgggttttcctctgatctccgacatgatggaactttctcctcctaggtactcatagcacaggctcaggaaattatagatgaccaaggcctcatagcagtcgcggacggtgccgaagtacacgtagtactggtcgttggtgaagaagaggaggctgagccaggagtcaaaggcgtagatgggcacgatgaagaggatgcgcacgatgtagcgctgctcgttggggcagctgtagcagcgcaggtgcatgtagatctggtggcatgtgatgagcagggccgtccacacgaagaagccagagatggcctgagcggcagttgtcatcaggaacacaggctgctccatggcagtggggctgccctcggggatcacggagacgctgggcgaggctgctgcggtcgtgggcgacgctggatccggggccagcacatcccccctcactgtcatggtgcctggcagcaggaggctccctgagggaaacctttgcagaaagtgacaagctagcctcaggagcccatggcggtggcggcgtctgcggacgatgcgcggcagccggactctgcgggcggggcgggcggcgccgcagccccggagtctccgccgccgccggcgcgtcccgatcccgggaattccggaccg

SEQ ID NO: 138090 - DNA, 572 bp, Homo Sapiens
  misc_feature (49)..(49): n is a, c, g, or t
  misc_feature (108)..(108): n is a, c, g, or t
  misc_feature (158)..(158): n is a, c, g, or t
gcagcggggccaactgcaagggtgtccactgctgggctcagacttcagnggggttgtgagcaccagacacccaggaaggtcatggctgtgcggccactctggctgccnccttccctgagccaaggcaccagcctgcgccaacactcctcccacacacnccggggagcacccgctgcttactcaaagtccccatcccggtacttgccgaaggcctggaggaccacagtgctgaccgccatgagtggcttcaccacacagaactgcagggtggcctgtttgcagaacctcagaaatccgatggaataagtctttccccagaggcagcaggtgccatacatacagctggactcaatgggttttcctctgatctccgacatgatggaactttctcctcctaggtactcatagcacaggctcaggaaattatagatgaccaaggctgcgaagagagtgtccaggagaaaccagtcaaatcagcagaatgggtccgcagatgctgggattctaaacagcaatggaggtgaaagagccacagctgtgtgtggcaacagggaggaggctatcagcgcgtt

SEQ ID NO: 138091 - DNA, 277 bp, Homo Sapiens
  misc_feature (14)..(14): n is a, c, g, or t
aatgctgataagcnaattaggtacaactctgagccaggtctcgatgagtcccaaagtgtgttttataatatcatgctgtctcttgatcattacaaaatttcatttgtttacaggagcacaaatggcctatttatgccttttctctcagcatctagcaaaacatctcaacttttattacaccaactttgggagtctggatgatgtttaaatcttctcattcatttgcctaaatcaatagagctattgatcctcaacggtgggcaaggaactttcttaa

SEQ ID NO: 138092 - DNA, 441 bp, Homo Sapiens
  misc_feature (38)..(38): n is a, c, g, or t
  misc_feature (44)..(44): n is a, c, g, or t
  misc_feature (61)..(61): n is a, c, g, or t
  misc_feature (89)..(89): n is a, c, g, or t
aacctgaacccttcccccctccctgaaatgggctttgnaccccnagcaagagggtccctgngcgtggaaatggttaacagcgtcacccnaaaccaactcccacggtggaacacattccaaccgagcggtaacatctggtggtctgatgccctcatttcccaagtaatactttttatagccctgaaaatggaaaccttggcatctaaacaaacagagctgaacatgtgaacactaggacaaggcactgtactatggggtttggtttctttatgggaaaggtgtttgcatagattgctagctatttagtgtgcaggaaaacagagcccccagcgtgcatggctttgtgaggggtgaagctgcatggtgctccctcagccccaagagagcgcagtctctcattctccagcctccagccttgtgggctgtctcgctggtgctgtc

SEQ ID NO: 138093 - DNA, 468 bp, Homo Sapiens
tttgtttaaaggcaatctaacagattggaaccctgataagatcatgcctgtgcagccctgcacaggcacgaggagactgtgatcaagtctgttactcgttacagtactgtgaacgtcaacaagaagaattgctgcatggaaaacactgaatataggcagaacaatctctcgcttacgatactgtgtgttgcaaataatgcctagaccagagcaatgcaggcgctatgattcatcacaggcaagatcaacaaaggaattgttaggacaaagaagaggctgcatgcagacctcccctgtcaaaacacctcgcagctcattggcttcatacagcctgccaaatgcaagggaagcagagagagggatggtgggtaggaagagaaaacttttttgcctgacaagcaacagccctcttccccacaaagcaggacagttccttataactaagagtaagttcacttaaacatgatt

SEQ ID NO: 138094 - DNA, 397 bp, Homo Sapiens
acatggccgcaaaatccatcccatctgccatgtctccaaggaacataattccccacatgaggatcctaggagggaaagtgtccacggaacgaaacagatgggcttcccttgccctaagactagcctaatggagcttttaggcaatttgcatactagctgtcagtgacacaggtgtgtgtcaagacttgagagaagctaaaagaaaccttatatagggtatactttcatgctgattcatgcttgccttcattgtgaatgctaataggtgatatttgttagaaggccagcagttcagtggtggcactttgttttttccttctaagttacaggctgcaggtagttcagtgtgggttcaagtcagaataatttacattccaatagaaggctaatactgaac

SEQ ID NO: 138095 - DNA, 437 bp, Homo Sapiens
  misc_feature (25)..(25): n is a, c, g, or t
  misc_feature (74)..(74): n is a, c, g, or t
  misc_feature (87)..(87): n is a, c, g, or t
  misc_feature (115)..(115): n is a, c, g, or t
  misc_feature (143)..(236): n is a, c, g, or t
aggccaaccaagaagtaatctgggnactaacagggcaataacaccaaccaaaacctgggctaaatttttttccntcctttgggtaantgatgaaagtttcgccaatggttgcccnaagactgggtcttaaaactccctggacnnnnnnnnnnnnnnnnnnnnnnnnnnnnnnnnnnnnnnnnnnnnnnnnnnnnnnnnnnnnnnnnnnnnnnnnnnnnnnnnnnnnnnnnnnnnnnattttccttgaggttattgaggacatacccagtgccagcacatagaatagattaagcagctcccaccttactcatgctcagtccctatagtatatttataccctcattattctctcccacatcgcacatgtgatttcctcaataaaagtgtacttaatattcaggtttctgctacagctggagtgctcctagctcacgccc

SEQ ID NO: 138096 - DNA, 890 bp, Homo Sapiens
ttcactacaatgtcatgacaactgcagcaatttgtgttactttccaagatgacaatttgacattaattaagggaaaaaataaaaaggtgagctagatgacttaaaatgcatctcttttttgaaaaagctgtagctggcaagtcaaagtttattttatgtgtgtaaattcccagttgagcatttttttcatttggattagcgtgagaggaaaaatgtgaaatgtctcaaatcaaatgcttccttctaaagattagacattgcccaaccctgcccccgcccccaatcaatcagtgacagaagagaccgccatcagccaactagctttttttaaatggctgatatattcatctctaaaggccctcaaagcactgtaaaacttttaaaactttagcctttatgtcagattagagaaaccaaacaacgtgacggtacatgtgatgaaaagctctgggtttatttttctcccgcttatgaacatgtatttttatttgccgaatgaaaatcgtggtgtgttgctttgatgaatggaatttcaggctctccctgtgcacagccggtgggcaaaggtcaccttaaatgactttttctccctatctgtctgttaatccccagaccggttgcattttccagttgcttcctgggtgtctgtacatagtttgtctttgtataggagtgagtgtggtgaccgtcaatcccctaatctcccaggttctaatttaacagatgatggctgtatgaggaaaacgatgtaaatagagaatacaaattaaactggatctctgtggcctaggttttgtacatacagaaactgcatggtatttaaattattgtttgtctcctgatgatgtatgcagtttctttaaaaccaaaccaaattattgtaaaaaaaa

SEQ ID NO: 138097 - DNA, 437 bp, Homo Sapiens
  misc_feature (26)..(26): n is a, c, g, or t
taccatattttaaaaaggaatccccncccttataaccaggggttttaccagacacctccccataatttaataaatccattattttttaccttttggggttccaccctagatccatatgagttgatggtgataccttcctagaacaaaattattcatagtgcgttttttgtaatttatgattgttaagtaagcttgacttataaattgacattgtaattgtgtacataattggatatatgtgttaaaatttaacatttagatttacttaattgtagaaaatacaaatgtaaaacttacacatggaaagaactgtatgcagttgactttactatgtaaattggagggaaacaaagttttagatccattttctttcaaaattttctttattgtaaagtatgcaaaatatatattcataccatttattaaatcagaatgtt

SEQ ID NO: 138098 - DNA, 519 bp, Homo Sapiens
acagatcagatcagaatcagtatgttgtttatgatacagatcaaattaactaatgattcttccagttttcttcttcctgattatttcctccagacacaaaatagggtcaaggagaaaagttcttttctaccattaaacttttgagctgcctgtgtttgggattcaaagtattttgggtgcttattgcttaactgggctgaagattatctcatgtgacaccatagatctcttgttttggaattgccattactttctagaacaggcattctgtacagctgccaacatgccctgaatcctcttgcttcatattacggtgatactgctttgtcagggtagaattcagcctcacagggctggagtaagtctctgctgacctcatgccacagtacaacatgttcaaatctgggagaaacctgagggttattcggcatattcctcctcctcctctctcacaagcatggagccctcactctcctcggaaaccgtatgttgtatatgtgtgtgtatctatcacttaaa

SEQ ID NO: 138099 - DNA, 393 bp, Homo Sapiens
  misc_feature (316)..(316): n is a, c, g, or t
  misc_feature (326)..(326): n is a, c, g, or t
  misc_feature (343)..(343): n is a, c, g, or t
  misc_feature (360)..(360): n is a, c, g, or t
  misc_feature (374)..(374): n is a, c, g, or t
gtatcatccattttatttaacaaagtggagcctcatctgaagcatttcctcaccaggcttgaagagggcctttttccattcattataggctgaatgtctctctccccgagatgcatactggatacttctccatctgagttcctccaggagcttcactcttgtgctttgttcttgcttcattgtgctccatgccatttctctcaactcttgctctctctttttctttctgaactgagtctttttttcctcctgctgttgccacaggaagtaaccggctcccccaagaagcagcagcaagacaggcagggtccctgcnaggggcggcngatccacctctgggcgntcctgaaggaagggggnctgcgatgggaaangctgggctgtcttttccag

SEQ ID NO: 138100 - DNA, 268 bp, Homo Sapiens
tttttttgcccaacaaaaagaatttattggtgtctgataacagagaaatgaatcaaacaattgcatattcttttggggaggtttgtcaataacacgttaaaaggagaaaggtacaaaaatatttacaatatgactacaactcttacaacaacaaaaaatcctatacggaggggagaagtgacaaaatactccacggaggggagaaagtgacaaaatactccagtgtgaaggaacttggtttagatgataggaaagtgattccttcttt

SEQ ID NO: 138101 - DNA, 447 bp, Homo Sapiens
  misc_feature (32)..(32): n is a, c, g, or t
  misc_feature (84)..(84): n is a, c, g, or t
atagagggacattatgagcgccttcttttttnttccaagtaagtttaccagtctgcaatatgcaaattaaaatgagatttctgnctcaggggtattcctctaaactgccagttctttcttccattcagtgaccaaactaacagcaacgccggggcacttgaccacagtgatccacagttctttacaactgatagtggccatttctgacatttgcactaacctgaacaacagaaactggggaggagagctcctttctcatcacagtagcaatggccttgtctccaaaatttgtttcaagtgggggtagaggagtatagaaaaaggatgagggtgaatttgtcagctgccttttaggaacagctgtgttattttttcttaacaagcctggagtgggggaggaccatataacttcactgtggatatagtttaggaaagggcttttttgat

SEQ ID NO: 138102 - DNA, 866 bp, Homo Sapiens
tgttaaatcgaaatcggttttttcccaacgcttcctcctttacacggcaagtaaagctcactgcctggattgcctctatctggcaacctttgccagtgaagagattcagagaaataatacaccatcaatcagaaaaaggagggcgacaaagggaaaataattaaggctgtaccctcatttgtgcattcccgtgcaaggtggccttgacttcgccacagcgggtaacagttgacttccacttgtcttgctgcagttgatggttacatgaccagtttcaccacacctatagcacttcactttggtgcagtctttttgaatgtgtccgaattctccacaagaatagcatttctgctcatctgcatggtcgcagtcacgagccagatggcctggtttgccacagttgtagcagcattgctctcgctctctcttgggctccttgcagtccttggcaatgtggccacctctaccgcagttatagcaggcatcctcctgaagatcacaatccttggcaagatgaccagactcaccacagcgataacaaatatctggaagagacgaggaaacaaactggaaacctctgccacggcttctcattccacgaccacggcctccaccagtaggacattcccgggcccagtggccagatcgtccacacttgaagcactcattgctgctcatggctgcagtcagatcttccgcgtcggagcgggcccgcagcggcggagactcggacgcaggcctggggaagacggctcgcaaggtagaggctgtttattttgagggtccttgcctgcgccacacgcgggtctgcacacccccggccgtaatggccgaattcccgggcatatgtccggtaccgtcgactg

SEQ ID NO: 138103 - DNA, 942 bp, Homo Sapiens
  misc_feature (831)..(865): n is a, c, g, or t
ttttttccccccttaacacccattaatctttgttacccccactcactgtagttctatgtaggcctgatacagatgttacttgatgttatttaatagctactgaggtcagaccaatcccagaccatcattatactaaaattaaagttaatttatggaagttcatagacacttccagaattggttttacctcctacatgggaacatgtttcaaggaacccaggacgggctttactggtctgactcaactcttcccattcatcaatccctattcaccagtggcacggaaagggggttctttaacaaagcattatacatgacacctctaccgaactaaacataaactttttttgtagttaaatgcagaaagtcggtttttttccacccctttcctccttttacacggcaagtaaagctcactggcctgggagttgcctctatctgccaacctttggccagtgaagaggattcagagaaaataatacaaccatcaatcagaaaaaggaggggcgacaaaggaaaataattaggctgtagcctcaattgtgcattcccgtgcaaggtgccctgactcgccacagcggtaacagttgacttcacttgtcttgctgcagttgatggctacatgaccagtttcaccacacctatagcacttcactttggtgcagtctttttgaatgtgtccgaattctccacaagaatagcatttctgctcatctgcatggtcgcagtcacgagccagatggcctggtttgccacagttgtagcagcattgctctcgctcccggccgtaatggccgaattcccgggcatatgtccggtaccgtcgactgnnnnnnnnnnnnnnnnnnnnnnnnnnnnnnnnnnncggccgcttcctcgctcactactcgctgcgctcgtcgttcggctcgacgagtaacgcccatatgagtcatacgtctt

SEQ ID NO: 138104 - DNA, 1007 bp, Homo Sapiens
  misc_feature (78)..(78): n is a, c, g, or t
  misc_feature (888)..(922): n is a, c, g, or t
ttttccaaccccttttcctccttttaccaggggccaagtaaagctcaactgggcctggggaatttgcctttattctgnccaaccctttggcccagtgaagaggatttcagagaaaattaattgcacccatcattcagaaaaagggaggggcggacaagggaaaataattagggctgtagcctcaattgtgcattcccgtgcaaggtgccctgactcgccacagcggtaacagttgacttcacttgtcttgctgcagttgatggctacatgaccagtttcaccacacctatagcacttcactttggtgcagtctttttgaatgtgtccgaattctccacaagaatagcatttctgctcatctgcatggtcgcagtcacgagccagatggcctggtttgccacagttgtagcagcattgctctcgctctctcttgggctccttgcagtccttggcaatgtggccacctctaccgcagttatagcaggcttcatcctcctgaagatcacaatccttggcaagatgaccagactcaccacagcgataacaaatatctggaagagacgaggaaacaaactggaaacctctatccgaggtaaaaccacctctgccacggcttctcattccacgaccacggcctccaccagtaggacattcccgggcccagtggccagatcgtccacacttgaagcactcattgctgctcatggctgcagtcagatcttccgcgtcggagcgggcccgcagcggcggagactcggacgcaggcctggggaagacggctcgcaaggtagaggctgtttattttgagggtccttgcctgcgccacacgcgggtctccccggccgtaatggccgaattcccgggcatatgtccggtaccgtcgactgnnnnnnnnnnnnnnnnnnnnnnnnnnnnnnnnnnncggccgcttcctcgctcactacttcgctgcgctcgtcgttcggctgcagcgagctagcgccctatagcagatataccaaagtctt

SEQ ID NO: 138105 - DNA, 818 bp, Homo Sapiens
aagtaaaggctcacctggccctgggagtttgcttctatctgcccaccctttggccagtgaagaggattccgggaaaattaattcaaccatcaatcagaaaaaggaggggcgacaaaggaaaataattaggctgtagcctcaattgtgcattcccgtgcaaggtgccctgactcgccacagcggtaacagttgacttcacttgtcttgctgcagttgatggctacatgaccagtttcaccacacctatagcacttcactttggtgcagtctttttgaatgtgtccgaattctccacaagaatagcatttctgctcatctgcatggtcgcagtcacgagccagatggcctggtttgccacagttgtagcagcattgctctcgctctctcttgggctccttgcagtccttggcaatgtggccacctctaccgcagttatagcaggcatcctcctgaagatcacaatccttggcaagatgaccagactcaccacagcgataacaaatatctggaagagacgaggaaacaaactggaaacctctatccgaggtaaaaccacctctgccacggcttctcattccacgaccacggcctccaccagtaggacattcccgggcccagtggccagatcgtccacacttgaagcactcattgctgctcatggctgcagtcagatcttccgcgtcggagcgggcccgcagcggcggagactcggacgcaggcctggggaagacggctcgcaaggtagaggctgtttattttgagggtcccggacgcgtgggtcgacgatatcccgggaattccggaccgtaccagcctgc

SEQ ID NO: 138106 - DNA, 829 bp, Homo Sapiens
cccccccctttccttccttttaccccgggcaagttaaagcttcctgggccttgggagtttgcctcttttttgccaccttttggccagtgaaggagggtttcggagaaaattaattcacccatcaatcagaaaaaggagggggcgccaaaggaaaataattagggtgtagcctcaattgtgcattcccgtgcaaggtgccctgactcgccacagcgggtaacagttgacttcacttgtcttgctgcagttgatggctacatgaccagtttcaccacacctatagcacttcactttggtgcagtctttttgaatgtgtccgaattctccacaagaatagcatttctgctcatctgcatggtcgcagtcacgagccagatggcctggtttgccacagttgtagcagcattgctctcgctctctcttgggctccttgcagtccttggcaatgtggccacctctaccgcagttatagcaggcttcatcctcctgaagatcacaatccttggcaagatgaccagactcaccacagcgataacaaatatctggactatccgaggtaacaaactggaaaccacctctgccacggcttctcattccacgaccacggcctccaccagtaggacattcccgggcccagtggccagatcgtccacacttgaagcactcattgctgctcatggctgcagtcagatcttccgcgtcggagcgggcccgcagcggcggagactcggacgcaggcctggggaagacggctcgcaaggtagaggctgtttattttgagggtccggacgcgtgggtcgacgatatcccgggaattccggaccggtcc

SEQ ID NO: 138107 - DNA, 880 bp, Homo Sapiens
tccaacccctttccctcctttttcccagggcaagtaaaaacctccccggccctggggagttgcctctaatctggccaaccttttggccagtgaagaggatttcgggggaaaataatccagcccatcaatcagaaaaaaggagggggcgacaaaaggagaataattagggctgtagcctcaattgtgcattcccgtgcaaggtgccctgactcgccacagcggtaacagttgacttcacttgtcttgctgcagttgatggctacatgaccagtttcaccacacctatagcacttcactttggtgcagtctttttgaatgtgtccgaattctccacaagaatagcatttctgctcatctgcatggtcgcagtcacgagccagatggcctggtttgccacagttgtagcagcattgctctcgctctctcttgggctccttgcagtccttggcaatgtggccacctctaccgcagttatagcaggcatcctcctgaagatcacaatccttggcaagatgaccagactcaccacagcgataacaaatatctggaagagacgaggaaacaaactggaaacctctatccgaggtaaaaccacctctgccacggcttctcattccacgaccacggcctccaccagtaggacattcccgggcccagtggccagatcgtccacacttgaagcactcattgctgctcatggctgcagtcagatcttccgcgtcggagcgggcccgcagcggcggagactcggacgcaggcctggggaagacggctcgcaaggtagaggctgtttattttgagggtccttgcctagttctagatcgcgagcgggcgcccggacgcgtggtcgacgatatcccgggaattccggaccggtacc

SEQ ID NO: 138108 - DNA, 989 bp, Homo Sapiens
ccttatccccccagtggcacggaaaagggggtttctttaaccaagccatttatccataccacctctacccaaattaaacataactttttttgtagttaaatgcagaaagtcggtttttttccccccctttccttcttttacacgggcaagtaaagctcactggcctgggagttgcctctatctgccaacctttggccagtgaagaggattcagagaaaataatacaaccatcaatcagaaaaaggaggggcgacaaaggaaaataattaggctgtagcctcaattgtgcattcccgtgcaaggtgccctgactcgccacagcggtaacagttgacttcacttgtcttgctgcagttgatggctacatgaccagtttcaccacacctatagcacttcactttggtgcagtctttttgaatgtgtccgaattctccacaagaatagcatttctgctcatctgcatggtcgcagtcacgagccagatggcctggtttgccacagttgtagcagcattgctctcgctctctcttgggctccttgcagtccttggcaatgtggccacctctaccgcagttatagcaggcatcctcctgaagatcacaatccttggcaagatgaccagactcaccacagcgataacaaatatctggaagagacgaggaaacaaactggaaacctctgccacggcttctcattccacgaccacggcctccaccagtaggacattcccgggcccagtggccagatcgtccacacttgaagcactcattgctgctcatggctgcagtcagatcttccgcgtcggagcgggcccgcagcggcggagactcggacgcaggcctggggaagacggctcgcaaggtagaggctgtttattttgagggtccttgcctgcgccacacgcgggtctgcacacggccccacatacgccgctgcgcacggccccaccctcgtgccgattagaccacccaggcctcgctacctagctc

SEQ ID NO: 138109 - DNA, 853 bp, Homo Sapiens
tgtgtgtccaccctttcctcctgttacacggcaagtaaagctcacttgcctgggagtgcctctatctgccaacctgtggccagtgaagaggattcagagacatatccaaccatcgatcagcaaaggacgggcgaccaaggcacataattaggctgtacctcattgtgcattcccgtgcaaggtgtcctgactcgccacagcggtaacacgttgacttcacttgtcctctgcagttgatggctacatgaccaggttcaccacacctatagcacttcactttggtgcagtcttttttgaatgtgtccgaattctccacaagaatagcatttctgctcatctgcatggtcgcagtcacgagccagatggcctggtttgccacagttgtagcagcattgctctcgctctctcttgggctccttgcagtccttggcaatgtggccacctctaccgcagttatagcaggcatcctcctgaagatcacaatccttggcaagatgaccagactcaccacagcgataacaaatatctggaagagacgaggaaacaaactggaaacctctatccgaggtagaaccacctctgccacggcttctcattccacgaccacggcctccaccagtaggacattcccgggcccagtggccagatcgtccacacttgaagcactcattgctgctcatggctgcagtcagatcttccgcgtcggagcgggcccgcagcggcggagactcggacgcaggcctggggaagacggctcgcaaggtagaggctgtttattttgagggtccttgcctgcgccacacgcgggtctgcacacggccccacatacgccgctgcgcacggccctcgtgcc

SEQ ID NO: 138110 - DNA, 865 bp, Homo Sapiens
taaggctaggtacgaggctgggtgtgtaatcggcacgaggaaacagcctctaccttgcgagccgtcttccccaggcctgcgtccgagtctccgccgctgcgggcccgctccgacgcggaagatctgactgcagccatgagcagcaatgagtgcttcaagtgtggacgatctggccactgggcccgggaatgtcctactggtggaggccgtggtcgtggaatgagaagccgtggcagagatatttgttatcgctgtggtgagtctggtcatcttgccaaggattgtgatcttcagggaggatgcctgctataactgcggtagaggtggccacattgccaaggactgcaaggagcccaagagagagcgagagcaatgctgctacaactgtggcaaaccaggccatctggctcgtgactgcggccatgcagatgagcagaaatgctattcttgtggaggaattcggacacattcaaaaagactgcaccaaagtgaagtggtataggtgtggtgaaactggtcatgtagccatcaactgcagcaagacaagtgaagtcaactgttaccggtggtgggggaagtcagggcaccttgcacgggaatgcacaattgaggctacaggcgtaattattttccctttgtcgcccctcctttttctgattgatggttgtattattttctctgaatcctcttcactggggcaaggttgtggcgatagagggaagtcccagggcagtgagctttacttgccgggtaaaaggaggaaggggtggagaaaaacgagttctgcgtttactacaaaaaaagttatgttagtttggagaggtgtatgtatatgtttgtgtaagaaccctttcgtgcactggtg

SEQ ID NO: 138111 - DNA, 1187 bp, Homo Sapiens
  misc_feature (45)..(45): n is a, c, g, or t
gcaagggtttaatctttttgggtttaaacttccccacttccaaancgggaagggttttaagggtaggggcccggataccaggatgttacttgaatgttaatttaaatagctactgaaggtccagacaattccaagccccattcattatactaaaattaaagttatttatggaagttcatagacacttcccagaattgtttttacctcctacatgggaacatatcaagggaacccagggcgggcttactggtctgactcaactcttcccattcatcaatccctattcaccagtggcacggaaagggggttctttaacaaagcattatacataacacctctaccaaactaaacataaactttttttgtagttaaatgcagaaagtcggtttttttccacccctttcctccttttacacggcaagtaaagctcactggcctgggagttgcctctatctgccaacctttggccagtgaagaggattcagagaaaataatacaaccatcaatcagaaaaaggaggggcgacaaaggaaaataattaggctgtagcctcaattgtgcattcccgtgcaaggtgccctgactcgccacagcggtaacagttgacttcacttgtcttgctgcagttgatggctacatgaccagtttcaccacacctatagcacttcactttggtgcagtctttttgaatgtgtccgaattctccacaagaatagcatttctgctcatctgcatggtcgcagtcacgagccagatggcctggtttgccacagttgtagcagcattgctctcgctctctcttgggctccttgcagtccttggcaatgtggccacctctaccgcagttatagcaggcatcctcctgaagatcacaatccttggcaagatgaccagactcaccacagcgataacaaatatctggaagagacgaggaaacaaactggaaacctctgccacggcttctcattccacgaccacggcctccaccagtaggacattcccgggcccagtggccagatcgtccacacttgaagcactcattgctgctcatggctgcagtcagatcttccgcgtcggagcgggcccgcagcggcggagactcgacgcagcctggggaagacggctcgcaggtagagctgtttcctcggtgccgaattaacacccaggcctcgtacctagcctatgtt

SEQ ID NO: 138112 - DNA, 804 bp, Homo Sapiens
cccttcccccttaccggcaataacttcactgcctgggattgccttatctccaccgttggccagtgaagagattcagaagaaataatcaccatcaatcagaaaaagagggcgagcaaggaaaataatttagctgtagcctcaattgtgcattcccgtgcaaggtgccctgactcgccacagcggtaacagttgacttcacttgtcttgctgcagttgatggctacatgaccagtttcaccacacctatagcacttcactttggtgcagtctttttgaatgtgtccgaattctccacaagaatagcatttctgctcatctgcatggtcgcagtcacgagccagatggcctggtttgccacagttgtagcagcattgctctcgctctctcttgggctccttgcagtccttggcaatgtggccacctctaccgcagttatagcaggcttcatcctcctgaagatcacaatccttggcaagatgaccagactcaccacagcgataacaaatatctggaagagacgaggaaacaaactggaaacctctatccgaggtaaaaccacctctgccacggcttctcattccacgaccacggcctccaccagtaggacattcccgggcccagtggccagatcgtccacacttgaagcactcattgctgctcatggctgcagtcagatcttccgcgtcggagcgggcccgcagcggcggagactcggaccgcaggcctggggaagacggctcgcaaggtagaggctgtttattttgaggtcgtgcctgcccacaccggtctcacctctccgattta

SEQ ID NO: 138113 - DNA, 815 bp, Homo Sapiens
ccacccccttttccccctttttccccggccagataaaagttccactggccctggaagtttgcctttatttttcccaaccttttgccacgggaaggggatttcggggaaaaattattccacccatcaattcagaaaaagggaggggcggccaaggaaaaataattaggctgtagcctcaattgtgcattcccgtgcaaggtgccctacctcgccacagcggtaacagttgacttcccttgtcttgctgcaggtgatggttacatgaccagtttcaccacacctatagcacttcactttggtgcagtctttttgaatgtgtccgaattctccacaagaatagcatttctgctcatctgcatggtcgcagtcccgagccagatggcctggtttgccacagttgtagcagcattgctctcgctctcttttgggctccttgcagtccttggcaatgtggccacctctaccgcagttatagcaggcatcctcttgaagatcacaatccttggcaagatgaccagactcaccacagcgataacaaatgtctggaagagacgaggaaacaaactggaaacctctgccacggcttctcattccacgaccacggcctccaccagtaggacattcccgggcccagtggccagatcgtccacacttgaagcactcattgctgctcatggctgcagtcagatcttccgcgtcggagcgggcccgcagcggcggagactcggacgcaggcctggggaagacggctcgcaaggtagaggctgtttattttgagggtccttgcctgcgccacacgcgggtctgcacacccc

SEQ ID NO: 138114 - DNA, 1388 bp, Homo Sapiens
cagtcctccacattcccctctttaatatggtattttgcactatatacattaatgaaaatttgaaacaaacaaaaagaactttagtcaaactccccttcctcctccagctttattggaatagtttaaaattacatttctattttctaggacttcagttgctctttccatctgacttttaaaaactgattacagcaaatgaaacacagttgtctaagtgatatagtatacaaaaataacatcttgatttctgtgaaaatgcatttctctgcaattcctgaatagctccaaattatgctaactctgagcattgatgtttactctgggttttagatttagtctttgaaaataatgtgttctaaacctttgccatcaccatctatgtgtccaacatcaacactgtgatgaagttgttcctgtttaggcttttattccgatttctctcgaacagccattaacacgcatgtttatctttttgtttactcccactcaactgtatgttctatgtagggcctgatacagatgttacttgatgttatttaatagctactgaggtcagacaatccaagaccatcattatactaaaattaaagttatttatggaagttcatagacacttccagaattggttttacctcctacatgggaacatgttcaaggaacccaggacgggcttactggtctgactcaactcttcccattcatcaatccctattcaccagtggcacggaaagggggttctttaacaaagcattatacataacacctctaccaaactaaacataaactttttttgtagttaaatgcagaaagtcggtttttttccacccctttcctccttttacacggcaagtaaagctcactggcctgggagttgcctctatctgccaacctttggccagtgaagaggattcagagaaaataatacaaccatcaatcagaaaaaggaggggcgacaaaggaaaataattaggctgtagcctcaattgtgcattcccgtgcaaggtgccctgactcgccacagcggtaacagttgacttcacttgtcttgctgcagttgatggctacatgaccagtttcaccacacctatagcacttcactttggtgcagtctttttgaatgtgtccgaattctccacaagaatagcatttctgctcatctgcatggtcgcagtcacgagccagatggcctggtttgccacagttgtagcagcattgctctcgctctctcttgggctccttgcagtccttggcaatgtggccacctctaccgcagttatagcaggcatcctcctgaagatcacaatccttggcaagatgagccagactcaccacagcataacaaatatctctaacgatcgagacataggtaccgagctcgattcgatcat

SEQ ID NO: 138115 - DNA, 985 bp, Homo Sapiens
  misc_feature (38)..(38): n is a, c, g, or t
  misc_feature (44)..(45): n is a, c, g, or t
  misc_feature (64)..(65): n is a, c, g, or t
  misc_feature (108)..(108): n is a, c, g, or t
  misc_feature (124)..(124): n is a, c, g, or t
  misc_feature (135)..(135): n is a, c, g, or t
  misc_feature (148)..(148): n is a, c, g, or t
  misc_feature (189)..(190): n is a, c, g, or t
  misc_feature (204)..(205): n is a, c, g, or t
  misc_feature (297)..(297): n is a, c, g, or t
  misc_feature (422)..(422): n is a, c, g, or t
  misc_feature (446)..(446): n is a, c, g, or t
  misc_feature (462)..(462): n is a, c, g, or t
  misc_feature (544)..(544): n is a, c, g, or t
  misc_feature (585)..(585): n is a, c, g, or t
  misc_feature (620)..(620): n is a, c, g, or t
  misc_feature (654)..(654): n is a, c, g, or t
gcgcatccgcgggttagttagctgaggctggttgtganagaaanngctctcgctctccgcgtgnncctaccacaaatcaccggagggcggggaacaagcaatataganaaaattatgcgccagnccctccgctgncggggcgtttttntttcgatgaacgttatgtaactgaatgtggtggggggtgcnncccacatataaaanngcgcggggcgcacataacgagcggtagggaagggggtagcaaacggcccgagcgttgtgggacaagtgtacagataggggcggggcaacaanaacatggaatactaagcttccggcactggacggcttccagatagcatgggtagggaagggtgtctttatggtggcgcggtttattcaaggcggctgagaagactgccgcctgccgtccggcacgnggcgcggctaccgcagccgacagncaccgccccgcgccgnacacaaggcaaatgattctagggtacggcggccgtggccaagtgctcacggggaggagggggctcatcgaatacccatgccnttcccggcccacaaagcgaaggaggcccacgtcggcatcgncgtgcccacgctgcgtcatgttgatgcaccacatncactcagagatgccggtggagcaattcccacatnctatcttcaaggcacatggtgtccggcaatgtttagcactgtggtttgccaggccttttcacagacactaccattgaagtgggttgaatgcaggttgcagccttcagtccccgaagtactgggttctgataaaattccacagaatccagcatcactgggctcagacggcatccactgtagtaaagtatttgtaaatggggacatatcttcccagcaccagtaggacacattgatcttccgaaggccgacccatggggttaaggtgagcttggacatgctctgagatgactgcattattcgcagctgcttaaggacaaattctccttgtgga

SEQ ID NO: 138116 - DNA, 496 bp, Homo Sapiens
  misc_feature (446)..(446): n is a, c, g, or t
  misc_feature (482)..(482): n is a, c, g, or t
aacctcagtgattggctctgtgggctccatgtagaagccactattactgggactgtgctcagagacccctctcccagctattcctactctctccccgactccgagagcatgcttaatcttgcttctgcttctcatttctgtagcctgatcagcgccgcaccagccgggaagagggtgattgctggggctcgtgcctgcatccctctcctcccagggcctgcccacagctcgggccctctgtgagatccgtctttggcctcctccagaatcgagctggccctctcctggggatgtgtaatggtccccctgcttacccgcaaaagacaagtctttacagaatcaaatgcaattttaaatctgagagctcgctttgagtgactgggttttgtgattgcctctgaagcctatgtatgcccatggaggactaacaaactctgaggttttcnaaatcagaggcgaaaaatcagtgaataaaccatatnttgccattacccct

SEQ ID NO: 138117 - DNA, 329 bp, Homo Sapiens
  misc_feature (21)..(21): n is a, c, g, or t
aagatgaattttcctcaagtngcccagttttaggaggtggacatagccacaaacatccaaatgcacaggcagaggaaaccaagctacttcacacatggaaagatggcagaaaccctctaagtcccatagtttgcacactgctgcagtgtacagtgcagaggactggaatggatataatgtctgcaaaacaaaaacatgtctagtgagccatctactaatctcaaccactggtctaactcatgacagtctcaaaatgaatatttaagaaaaaagtagtggcatctaaaaatatagacgttttgcaactgactcagggagagctctttctt

SEQ ID NO: 138118 - DNA, 372 bp, Homo Sapiens
ttttaacagagttgaaatgtttggatttattgtagcattactatcaggaatacacattgattatggtattgctatcaagaatacatataaatacatgcctgaagctataagtgagataagagatattccagggttagtcaaaagttaatctttgagttcccagaagtctggatgaaaatgagatgagactgcaaattttgttgttaggcagtcaccatttatgacccttggcagggagggcaggaatggtggttatattgtgaactgaatgaaaactgagaactaatcagcatcatgtgggcctgaagcatttattgctaccagtgattagttgtaagaccttcggactatgtaactgtaatgaactataat

SEQ ID NO: 138119 - DNA, 305 bp, Homo Sapiens
  misc_feature (41)..(41): n is a, c, g, or t
  misc_feature (236)..(236): n is a, c, g, or t
  misc_feature (239)..(239): n is a, c, g, or t
ggccccccctcgaaggaaacccgccggcccagacgcccccnccccgggcccgcaggtccagcctccctaccttggccaaagttgaggtcttgtcgtgtgagcgtggtcatccttcccgctacctgagtgttggggcaagggcagagggtagttccagagacccaggagcccagaacccgctcgcttccaccgtctcttcccttcccacagtctgtgggaactggggaaggacctcnccnttcgcacaggctcagggcagctggaagaacctccacccccacgctggcgtccgtgcttgggggcat

SEQ ID NO: 138120 - DNA, 433 bp, Homo Sapiens
  misc_feature (299)..(299): n is a, c, g, or t
  misc_feature (352)..(352): n is a, c, g, or t
  misc_feature (413)..(413): n is a, c, g, or t
tttaaattgaaattttattgttatgatttcttacattgttaagtttataatagtttacattatgatcagtacctaaaattatattctctgggccttaggttcatttttaaaactaaaaacaaacagcccttacaatgtaattgtaatgaacacgtaagtatttttcttgtaaaatcaagtacagtaacagctaaagaattgtgtcacctgggtcatcctgggtccttactgtttccagtatcttctgtatttaccttgcacattctcagttttcttcatatgggtgcccattgggttgntaaactttctggaatcttttcattttgacaacctatcctacccatggacttgnattggtttggtttacaggattcaaggatttggaaatcatttttatctcaagcttggggaangaactggttatactacccgg

SEQ ID NO: 138121 - DNA, 527 bp, Homo Sapiens
ttttaatagggcacaaggtattttacaggtcctcatcattctgcttggtattctgttggtgtaacttttgtgtgtgataaattctgctccagagacttatcctctaagctctccaatgtgtctttttagctggagctaatgtgtaggaaggccatttttaaagcaaatcaaaacattaaaaggtttaacatctgttaatcgggtgttttatctagaggacataaaagatatttacaatcctctagcttaccgacttaacgctttcctttatactgggatatttatattgtgtaggaaattgaaacccattatcacaatcagtgggaattattccactttcttctaagacaagcaggaaaatgttttccttttaggttagaatttcatgattagtaaagtgtatcaataggcaatgcggagaggcgaattgaactcaattattatcttaatttctgctttcaacaaagcatactgataaagttcttgataccatttatgtttcatgaatttccatttttagctccttc

SEQ ID NO: 138122 - DNA, 883 bp, Homo Sapiens
  misc_feature (12)..(12): n is a, c, g, or t
attgaggaaaangtccaaaaccattgttgttcctcccatttcctccttaaagacacatatggagttttccagcaagaatggaggtaatgatttaagttattgcccaccttatggttacttatttgcaacttctgaataacaacacttatgaaaagatgatgagaaaataagatgagaaatttctatgcttcgatgccttttagtgatacctggatactgtgtattccacaaccctaagaatgtggtcatgaggcccgatagcccaccgttcttggttggtggtataggacacatacaactttccatttttcttgtaattgggatggaatgcgaggcttagcagtcctctgttcatctcctccctgcagtcaaatgaaaaacacaaagaattgtaaagttaattatgttctttattgtgtttcaactggaaccccaaaagagtctctttctttcttttggataatctttgcccaacctcctttcttgttcttccttgcctactgcacaaaaaaggattataaaacatttcactttgtggaactctttaagggttagaacaagacaattgtcttgtgtggttatctatgtacaagagtcttacaccacttttgtcaagtgatttgtgtatgtaatcttgggccgctaggaggacaagtttaagtgctgtgaagaattctttcccgggttactaggttgcttgtagttcatagaagacaaataaaaaggttcataatcaacagtcacttctaatccaagtctccaaaacctgaaacacagtgtgggctgccaactcccactgtcttggcatatgtttagaaaacagcttaaattgcttgtgtaatatgtaaacctttgctttacctggaggcatctacatcagttg

SEQ ID NO: 138123 - DNA, 415 bp, Homo Sapiens
  misc_feature (279)..(279): n is a, c, g, or t
  misc_feature (312)..(312): n is a, c, g, or t
  misc_feature (318)..(318): n is a, c, g, or t
  misc_feature (353)..(353): n is a, c, g, or t
ccccaaagtgcctgggaattaacaggtgggacccaccaacaccccagttagcctatttcctttttatttgtatttttgctgacatgtttaaatgcttaggctagggaaaacttgaagaacttttttaatgctcatacacaaaggcatacatgttttggtgaatttatgatcttcactttcagtataacacccaactaggacatgcaaaggcaaggacagaaatttttcagttttcaaaaagtgaaaccagatctttccctcgtgcccgattcctgcagncccggggatcccctaggttctaggagccggccnccaccnggtgggagcttccagctttttgttcccctttagtnaggggttaatttcgagcttggggtaaatcatgggcaaagctttttcccgtgtgaaatgttat

SEQ ID NO: 138124 - DNA, 256 bp, Homo Sapiens
atagttggaggatatgagaaattctttctttctggatgtgtggatataaggcctgaaactgctgtgattatctgctattgtgagggaagaaaccagctgaagataaagccaacacatcagcaagaccaggtctgaaagcatggtaccctgatcaaacaatacctaaagttcattctactgctagacttttcagctgtgacaaaagtcatttctttttactctgtaggcaagtttgaattgggttttctattataat

SEQ ID NO: 138125 - DNA, 388 bp, Homo Sapiens
  misc_feature (41)..(41): n is a, c, g, or t
  misc_feature (57)..(57): n is a, c, g, or t
tgcttgtaacagtgcctgcatagagtaagaatgaaataatngttagctattttttantggttacatttaaaatagattttgctggtagtgaaatatgaatgataaaatcatctcctcagctgttttccttgcataagtaccttaaaataatgtatttgcaatttccttctgaatccttgaataaaagacaccagataatcagaagatgttactgacattagtaggcatttgaagttcactctgatgggatcagtctatttacaacaaattgctatagagagtaaaaagcgccaacattttcctgtagtttttgaatgacagcatctttgttcatgcatgttgctttgctgcatttccacttcatcaattttttggctttgtctttgca

SEQ ID NO: 138126 - DNA, 358 bp, Homo Sapiens
  misc_feature (19)..(19): n is a, c, g, or t
  misc_feature (47)..(47): n is a, c, g, or t
  misc_feature (56)..(56): n is a, c, g, or t
  misc_feature (61)..(61): n is a, c, g, or t
  misc_feature (72)..(72): n is a, c, g, or t
  misc_feature (85)..(85): n is a, c, g, or t
tccaaaaaacctaacgggnaaaatgtgggccgccttttaactcctcnaatagcaanttggntggtaaaatangactggacccccnccagaagtggaacttccaaatgccctacctaatgtccagtaaacatccttcctgaattatcctggtgtccttttatttcaaggattccagaaggaaattgcaaatacattattttaaggtacttatgcaaggaaaaccagctgaggagatgattttatcattcatatttcactaccagcaaaatctattttaaatgtaacaataaaaaatagctaacattatttcattcttactctatgcaggcactgttacaagcatctatgacaggtacta

SEQ ID NO: 138127 - DNA, 269 bp, Homo Sapiens
  misc_feature (160)..(160): n is a, c, g, or t
  misc_feature (205)..(205): n is a, c, g, or t
  misc_feature (216)..(216): n is a, c, g, or t
  misc_feature (241)..(241): n is a, c, g, or t
caaaatcccagcagcctcttgtgattaaaaacactcaacaaatgagggataagaggaaactcccctgaacataataaaagccagacatgaaaagcccacggtagacaccatacttagtggtgaaagcttttcctctaagatcaagacaatgctcatttcnccattcctattcaacacagtactaggagttctagcctgagctagnaaaagaaaagncatctaagttggaaagtaagaagtnaaatcctatatgttcacaaatgatatgg

SEQ ID NO: 138128 - DNA, 313 bp, Homo Sapiens
  misc_feature (154)..(154): n is a, c, g, or t
  misc_feature (199)..(199): n is a, c, g, or t
accagaatcctttggtatagccaagccttttggttaccgcctcatgaagaatatgcttcccgcattgtcctagtcccagttgtattctcacaggtgttatgtgcaggacacaatccaaatcataaacctgggctcatgcccaacacatttctgnttaattaggggagaggggacccaccacacacccacacatgccagnggtccctcctcacagaggagagggcctgtgtctgtagaaggttaaagctgacaacatgtgaaacatcccagaattatgactcttcccaagtttaaaatacattctcctcatgag

SEQ ID NO: 138129 - DNA, 269 bp, Homo Sapiens
  misc_feature (245)..(245): n is a, c, g, or t
gttgtgctagttttttggcttacctccttacaaggtcatactgctaaaaccctcactctggcatgactaatctgacacatagtttgcctttgttctccagaggtctaatgaacagctccctgtacaccaccagggtacagtctacactctttgagctggccttgagccccttggccatctgaggctgcctcccttgttcctattttaggttcctggcatgcccggggaggcaagtggatttgggntccacaaacaggcctgtttggtta

SEQ ID NO: 138130 - DNA, 289 bp, Homo Sapiens
  misc_feature (161)..(171): n is a, c, g, or t
  misc_feature (273)..(273): n is a, c, g, or t
gaggaggtgcgagcagcttgttcacaaggtatattttgcaggagtttccccttacaagatcttatttgcttgagagtagcgttaaggatttctgtgccaacagttagctggatctctggggttgaatcgttatcaccaatctatagttaaaataagcattnnnnnnnnnnngaagtctactttcaaagttttcccgaagtgccagtctgaagcagctacctttaaaagctgttcttgaataataggttgctatatcctagtctgtaatcttgnctaatgaatgaggaag

SEQ ID NO: 138131 - DNA, 353 bp, Homo Sapiens
  misc_feature (45)..(46): n is a, c, g, or t
  misc_feature (236)..(236): n is a, c, g, or t
atcccctttttccctttttccttaaggtcccatacgaaccctaannacaaaaagacttgtttaaaatatctggttcctttaaaagaattcaattaatattgacccctcctccccgggttttctcatgaaggtgagcgaatggcagccagctgttctgagcttgcataatcctgcctttcctccaacaccatcacgaagtcgttcttgctgatgcttccatcacccctgtctaaaanccgcaaaggcttcccggaggaaagcctcacgttctacggaccaatcgtgcagtctaagggcccacagtgggatttgggatttttggctcctgggctggctagtttattagcgattct

SEQ ID NO: 138132 - DNA, 1059 bp, Homo Sapiens
  misc_feature (1002)..(1002): n is a, c, g, or t
taactgttcaaataatgtttgtttaattgacgggttttaagctcgataacttagctaagccctttgcacagtctaagcctaatttggaatgctttcagtcttacccaggccaataaaattttcttgcctcatctgaatttcctgcaaatgtgattaattaataagaatcatcaagattaattaataagaaattgatagcaggatgagtaacaggcccagacagtcccacagatcacaccttccaccctccatttccgcttagcttctcttgaatctattgggcatgattgcctctgtgggggctacagccagcatgggtgactgttcatgacctaccctctcttgcagtctgactgtggacaaatgccgagtccttaagagatggtgaagtaggcatagtagatagtaaaggtagacttacagtatacatttgcattctcaaacaaaattaaaaagccttaaagtgcacaagaagattgcacaattgaaaagtgcagagtatactcaaaactgtcatcctactgttttctcagtcttccctgcaatactattccctcctcagacatcctcagctccctctcaccccaagtatgccattgtctttgtaattcttattaaaatactaaagcaaaaattcatcgtagaacaattcatgtccacaaaggtttgcctcagttgctcatgccctgtatgcatttcctctggttttattattcaaattaagaaaatacttaaaaattttttggtaacagcttgcatgcaaccccctaagtgtacccctataaccctttggcttttttcagagaaagacttcagccaaattgtccctttcactcctctgagggcagctctgggaaactctcctgaccaccttctccctccttcacgtcatctttgtgtgacagcaggacatccgggtttggagcatcctccaccacccactgacactcatgaatacgggctaccttgatctcctctgcattcacactggccgtggcctgngccgcgctgctttgccctcccatctcttcttgttcctcagaaacctggctctcactg

SEQ ID NO: 138133 - DNA, 470 bp, Homo Sapiens
  misc_feature (386)..(386): n is a, c, g, or t
  misc_feature (438)..(438): n is a, c, g, or t
gtttgtttgtttaattttaatttcttcctaccaagtcaaacttggatacttggatttagtttcagtagattgcagaaaattctgtgccttgttttttgtttgtttgttgcgttcctttcttttccccctttgtgcacatttatttcctccctctaccccaatttcggattttttccaaaatctcccattttggaatttgcctgctgggattccttagactcttttccttccccttttctgttctagttttttacttttgtttatttttatggtaactgctttctgttccaaattcagtttcataaaaggagaaccagcacagcttaggatttcatagttcaggaatttagtgttatccataatggcattcttctctgttgttcgtnaaagatttggggtggaacaaacaatggaaaactcttttggctgctggcccangttttcaaatacctaggaggcagttgaaggac

SEQ ID NO: 138134 - DNA, 1058 bp, Homo Sapiens
  misc_feature (901)..(901): n is a, c, g, or t
  misc_feature (1035)..(1035): n is a, c, g, or t
  misc_feature (1045)..(1045): n is a, c, g, or t
tggttttcctgaccgcccactttcatggcgcccaggctgtgtgccttttgatactgcaacgcagagcagctgcagggatgctaataaaatgcaggatttggacactgagcaaggcacttcaggtggcaagacagctccttcttcagcagcaacagcagcagcaagttagtggattaaaatctcccaagaggaatgacaaacaaccagctcttcaggttcccgtgtcagtggctatgatgacacctcaagttatcactccccagcaaatgcagcagatcctccagcaacaagtgctgagccctcagcagctccaggttctcctccagcagcagcaggccctcatgcttcaacagcagcttcaagagttttataaaaaacaacaggaacagttgcagcttcaacttttacaacaacaacatgctggaaaacagcctaaagagcaacagcaggtggctacccagcagttggcttttcagcagcagcttttacagatgcagcagttacagcagcagcacctcctgtctttgcagcgccaaggccttctgacaattcagcccgggcagcctgcccttccccttcaacctcttgctcaaggcatgattccaacagaactgcagcagctctggaaagaagtgacaagtgctcatactgcagaagaaaccacaggcaacaatcacagcagtttggatctgaccacgacatgtgtctcctcctctgcaccttccaagacctccttaataatgaacccacatgcctctaccaatggacagctctcagtccacactcccaaaagggaaagtttgtcccatgaggagcacccccatagccaccctctctatggacatggtgtatgcaagtggccagggtgtgaagcagtgtgcgaagatttccaattcatttnttaaaacattcttcaacagtgaggcatgcgctgggacggttaggaagttacagcccaatgttaggagttacaaatggcaggtttgttacagcagtttaggagcttacagtttggcaaaaggacaaaggaacgcntggcaagccntggatggacccac

SEQ ID NO: 138135 - DNA, 374 bp, Homo Sapiens
  misc_feature (12)..(12): n is a, c, g, or t
  misc_feature (28)..(28): n is a, c, g, or t
  misc_feature (51)..(51): n is a, c, g, or t
  misc_feature (95)..(95): n is a, c, g, or t
  misc_feature (289)..(289): n is a, c, g, or t
cctcccccaaantgctggggattaacgngccctgaagcccacagcggcccnaaccccggaaaagctgtttccttaaatcctgccccggaggaaantcccccagcccccccaactttcccacatacttccacatagataacactgtaacaactttgaaactaagagggagagaattaagttttcaaatttgaaattgagaagcctttgaagagtggcagcgttctagaaagttccatgattgaacaagtgaagcaaaaaactaggatagactcaactgaccatctgaacnccaggaattaatagccagtgctttgggcaatctgctggagccatggtacgcaccagttgtacaagttatttcattttaattttgt

SEQ ID NO: 138136 - DNA, 384 bp, Homo Sapiens
aacttttttacattgaaggtaacactacagcgaacatcctgtgcactcactgttatgccaggtgggagtatttctgtgaatacataactgaaagtggcattgctgcgttggagggcatgtacactttaaattgcccctggtgactaccacattgcccgccacaaggcagcgccagtttttcaggccgcccattggcacatgagcctgcctgtctccttgtatctcggcccacacaggactgtccttgttaatttttgccaattcaatcaattttcaaagcttatccattttaatttacatgcctctggattgctaatgaggctttagcatcctttcatcagtttaatggctgttcatcaactgacatttatggtttttaagaac

SEQ ID NO: 138137 - DNA, 534 bp, Homo Sapiens
gttttgtaaagacaggatcatgctatgttgcccagggtggtctcaaactcctggcctcagggaatcctccagcctggatcacaggattgagcaccacatttctcaatcatttctaagagtctccaatacaacgttgaaaataaaatgtattactttcttcctcaacatgattttcccacattaacctgttgctttccccaaatctgaaacagcattgtactctagtcctatactcacatggtttctcacaggatgggatgaaacctgtaacctatttctatgtcgtcacactactcatttttctcatttaccgaactctaaaaaataagggtctctcccgggtgatgtcttccattcccaagatttcaaatgctttctaatcctgagcacttccaaaggtacatccctaacccagacacctgccctaagtttcaggctgtgtattcaacttacctagttcacaggtgtctgcatagtgttaagtctaatcctgcttccccgcactgtctgccaccacctctcatttgacgtact

SEQ ID NO: 138138 - DNA, 739 bp, Homo Sapiens
  misc_feature (270)..(280): n is a, c, g, or t
ctctttttcttctgcttccttcttgttttaggataaacacttttatgacaccacaggaactagaaaaagcacacggaatttaaggaagaacatattttaatggttgaaacctgtctttatgaggcgattatgatagcaaaaaatattataatgaataacaatgcatagtctacgctttgtaatatttcatacaataattcctttatcatttacatctcttaatgctagaaaagcattctgaagatgccaagcgtaagttgcaactgagtnnnnnnnnnnngcaaaatttactcaatttccagaagaggtgcagaacagagaatgaaggtccttaaaatataaaccgctagtgtgctaaaatgatgtccatttgcaggatcagtgacaaaatatttaagcccataaagaaaagagttatacctgctgtatgaaggtattcatagagaaatatgagtcataagccaattatttataaatgtctttcaaaatatttggtgcacatgaaatgcagtatactgatggtcctggagactgttgcagttgaatagggcagctactgggatgatggtgtttcccccggatgaggatgacaggaatgcagggcctaggatttgttgagcatgtacactcttcttctgaattggccacccagaaaccattattgaatcagaacacacaaattggtttgtgcttgagccaggtttattttattgttttcgatctgcatgcacaatatgaa

SEQ ID NO: 138139 - DNA, 441 bp, Homo Sapiens
  misc_feature (389)..(389): n is a, c, g, or t
tttaggtttaaaccagttttaattggatttccctcacttgcaacaaggaagacctgaataatattgcttctgtctgtatgtccaaatactttcatttttcaagaagcaatgttataccaacgtcagaacaaaggaacactttatgctgatccttgcagtttccattattagagacccaaaggaatcagaccaggagatcgttttgctttaaactagtagaatctgacctaaggcaaatatcacttgagaaaaaggagaaaacacatttcttccttcaacagcgtcatctccattcttggcagagagagatgtgaatgaccaacagccatgccattgcatagtttcatctttcatggtaattttttcatatttgaagccaaacatttggngccaaagcctgataacccagcgagtcaagtgctcatggtcactattgcttgt

SEQ ID NO: 138140 - DNA, 449 bp, Homo Sapiens
ttttgtttggacttatttatttaatttatgagtgcttttttatttataagctgatttggttgacacaacatataacaataagtgtacatacaaataaacacatctagacatgtatacacacacacaaacgaagatccaatagcttttaccttggaactctagccatgagatatcaatacaagctcacaggttttacatggttacactttgtttgctccaataggtaatccagtgaaggctgtgaaccaaacatttttaaagcagttccggtggcagtttgatttttaaaggccaaacctcctcagactccaaagacactggagccaaatagcaccaaaggagagcaccatatgctgaccaggcctgacccttcttaggacagcagcaccaaagcctggatacatgcaacgtcatcctgctttccccattcaacagcaaactccagattc

SEQ ID NO: 138141 - DNA, 892 bp, Homo Sapiens
  misc_feature (780)..(814): n is a, c, g, or t
gaactttatattttatcaattttattgaaatattccaaggatcccaaccccatttaaaaataaaaattgtaaagcactccattcaataaaagcacataagtccccctcaataattagtatgacaattcacgatacagctcttactctgggagagtttattttaccctttattccaaaaggcacaaagtcatctgaggcctcagatattaaccccactgcatgttaatgacacaccactgaggtgcagctcaatgtaattattaaagcttataacacacttccccaagaatttatagattctttctataaataataatttaaaaaatactgcaccttaagaccaatacaggcttaacaaaagacctgaaatttctgcaagggcagttttgtttcttgatagaagtacaacttttgaaagtctattcccagcaaaagaaacactagacccagcttggccaaagaaacaaaataaaacaagtgatttctaacacgctaaaagagtacattttcatcagctccaaagaaagcagtcctggtcattcagaaggctcctatgatcccaccagtctgcagtcattagaaatatatgctttacaggccacaggctgctctggatttggtttcagacaccagtgaccagaagaagccagttttgcgtgtgaggggtgtgggcccccgctgccttgggcctgctcaccggggtggatggacccccgccgggtcacagcccccggccgtaatggccgaattcccgggcatatgtccggtaccgtcgactgnnnnnnnnnnnnnnnnnnnnnnnnnnnnnnnnnnncgccgcttcctcgctcactgactcgtgcgctcgtcgttcgctatgacgagtagcgccctatagtgatctatacattct

SEQ ID NO: 138142 - DNA, 1414 bp, Homo Sapiens
  misc_feature (394)..(394): n is a, c, g, or t
actttgaaagtctattcccagcaaaagaaacactagacccagcttggccaaagaaacaaaataaaacaagtgatttctaacacgctaaaagagtacattttcatcagctccaaagaaagcagtcctggtcattcagaaggctcctatgatcccaccagtctgcagtcattagaaatatatgctttacaggccacaggctgctctggatttggtttcagacaccagtgaccagaagaagccagttttgcgtgtgaggggtgtgggcccccgctgccttgggcctgctcaccggggtggatggacccccgccgggtcacagcctgctgtcacgtctggactgttggcctcttctgcatctgggctgttgggctctcctgctctctgtccctcagtncacgtgcattgtctggctgtcgcggtgctggctgcactctcatttgtgaggataaccccttccttcttcttttctcccaatacctccagccccatcatcctgagataatgaagccgttcattcttggggcacaaaaagttcgaatggaggcctttccccgccatccgcataagacgatgggacactgcagagcgtctggattcgcagaatctggttcatacttcagcacgatgcttccctttgccaggtcctttgcttgactgtaggtctcactgctgagttttctaaaaaagggattttcctgggtcaacagtatcttaacatcttccattgatacagtaataattcttgagttaataaatggatacaatgtatatattccctcctgtgccagccggaaagcacagtcaaactcttcaccgctgttatttctacaccagactttgatcgccgttttaataaccttcatcttctccactgttattcagcagcacattccgcaactccttagaaaccatgtagagctgccttttcttcccttctgttagtccgagttaacaaattcatccttgggaatgaaggatccaaagcataaaatttctcaataggtggaaataatgggtcatcttcaggaataaatacaaatggatcttctttaaatccaaataacttcattttctttgatggaggaggaccacacacgccatctttcttactgccattattctctaaatcctcagttgcatgagctatttctgtgtcaccagttcctgtgaatgacggactttccagcttagagggatctgtgggtttcccttctgtgagatctgcagggctcagctgtgtgctttctctggtctctgcagatttaccctgaagctttggctgacgtttattccacggcattgaagattttttcaccaatactgccacaaaaaaccctccagtattctgatgatggggtaatatcctaaggcatcgctccaggtgcatggcctgcagcttttctgggtccttcgg

SEQ ID NO: 138143 - DNA, 1033 bp, Homo Sapiens
  misc_feature (83)..(117): n is a, c, g, or t
caaatgtataactcactatagggcgctcagctccgtcgcagccgaacgacgagcgcagcgagtagtgagcgaggaagcggcgnnnnnnnnnnnnnnnnnnnnnnnnnnnnnnnnnnncagtcgacggtaccggacatatgcccgggaattcggccattacggccgggggccaaagaaagctccttcaaactggttgctacgtccttttgacatggcccatcattctttaaacacattttacatctggcacaataacgtgctacatacccatcttgtatttttcctgccccatctttgaaatcagccattctcaaggggttccttcttaatctggctgttgttgtgttggaactcctggtaccatcttagaaccttaaggagacaagcgaaccaagccaataagctttccatgatgctgcttagagttaaacagagcccaggtactaagttatgtcatggagacagtgaactaacctctggactgcttgctacatgagacaattgattttcttattttctatgtagggtggtacatttcctcattttgagatatttcttcaacatatagcttttcattagtggggatttgtcaattataaccaaaaacaatgtgacggatacccaagatgtttcatgttgtagcttgggtgaattacacatttctgaagccattacacttcctagtttatttggatttaagttgacaaataaaaattgcatatgtttatggtctataacatgggtgtttcgatatatgtatacatcgtgggaatggttaaatcaagctaagatatccattacctcacatagtatattctgtggtgagaaacattttaaaaatatgtcttagcaatttccaagtcaagcctgtcccatggagacacaatgcataggtgtacatgaggcacttgactcgctcggctatcagcccttgggttcaaatgttcgggttcaactctggaccacacgtccttgaaagcgtcgaactatgcatggcatggcgggtgggcattcacatttctctctgcagaag

SEQ ID NO: 138144 - DNA, 476 bp, Homo Sapiens
ggaacagaatagagaacccagaagtaaactcaaatacttacagccaactgatcttcaacaaaggaaacaaaaacgtaagcggggaatagacacccttttccaacaaatggtgctgggataattggctagccagatgtaggagaatgaaattggatcctcatctctcatcttatacaaaaatcaactcaagatggattaaggacttaaatctaagacctgaaactattaaaattctagatgataacaattggaaaaattccttctagacattggcttaggcaaggatttcgtggccaagaacccaaaagcaaatgcaataaaaacaaagataaatagttggggcttaattaaactaaagagcttttgcatggcacaaggaacagtcagcagagtaaacagacaacccacagaggagaaaatcttgacaatctatatatctgtaaaaggactaataaccagaatctactatgtatctc

SEQ ID NO: 138145 - DNA, 761 bp, Homo Sapiens
  misc_feature (340)..(340): n is a, c, g, or t
gaccagaaggaaggctttcttgtcctgtcttctctgatgttttgcctgaaaattgactgacagtagacagattaataggagaaaaaggcttgaaaaagtgtgatgttacgtatatgtaaacatgacagtcctgaaaatgtgaggattcaaagaaaggcccagatgcttgaggcttcaataccctcttgatagggtagaaagaaatggggggaacataggagattgtgagggatggtgaatgattttcagaggaaaatggatgagcccaaaggacaatggcctaaggcaaaagttcatctgagctctgagggaggtgacaggaagttggggggcaggttcnttcactgtcagcaaagattatcttatcatgcacgataaaggctcccaggtagacttttggaggtgccctcagaagaatagataaaaatcctgtttgggcatggtgatgacttttagtttcttctccagtggttaacctttcctggttatttgatgagattcctgaggagggggtcttaagacaattgcatttcttttggaaataagtttccttagtcagataagaaaatttcagaaacagcctccctctgcactggggttgtgggaagagaaacaagagaaggttagaaagttaaggcagctattaaggccttccaatttttcttacttcaaagtgctcagcatgccaaaaactcatgcgttgtggtattgttctctgtgccccaacaaagtttatatcctggaaaattcccttcccttcc

SEQ ID NO: 138146 - DNA, 372 bp, Homo Sapiens
ttaggtaagtaggcagaaatgattagtagtctttgttcgcagcccttgattgtcagtgcctacagtcatttcagcaagccattgaatatattggatatttgaattctataacttcttttattaaatagaatatttttataaagataatttttcatgcctccactatttggttatcttgaggtatctcttacagaaaagggaggataaatgcttaattcttctccattatttactaggtttcacataatgaattgtttcgctaatatccttcaaaagtagccaatgaagctgggcatgctaggatgggcctgtaatcgtagctgctcctgaggctaagatggtacgaacctgtgagcctgggaggtcgaggct

SEQ ID NO: 138147 - DNA, 600 bp, Homo Sapiens
  misc_feature (245)..(259): n is a, c, g, or t
ttttctttcaggatcttttattaacgtatagaaaatgtgtttaaaaaaggaactatacagaggctaaaagcaaccaggactaaaaatactagttaacaatggttaacaagcagagattccagtctttgagctacagtgccatgaaaggatcagagaagttggtttttcctctcccttcctctgtacatttttatttttattttagctaattaaagtgtgcatcgtctgaggagtatgtactccannnnnnnnnnnnnnncttccttccagtctttcttttaagtaagcgctttttcaagctcattgtagctacaaagtcaataaattggtctttgttatttttacctgaaaaggctgttaaaggttaaaatgacaaactcaaattcaaagggattggaggatttggtgtttatgatttctcagaacaacaatctagagaccaccagggtgggtttcagctgctcggagccccagttaatgaccccctcagtgtcacagtgatttgcttagggtacttgggcatccccatgggcctgagggagtattcgaggttggaatcattaggatgtgtgtgtttgtgcatgtgcacctcgtggtatg

SEQ ID NO: 138148 - DNA, 398 bp, Homo Sapiens
  misc_feature (289)..(289): n is a, c, g, or t
  misc_feature (345)..(345): n is a, c, g, or t
cttccttggaggagggtttttagtaacaagaatgccacagtttagaaatcatcttcaaatctcattgcactggaggaggcccaagaaagtgatccccaaattacatttcaaatcaaatgccttgggagggttagggggttatcatcaagacaaagatgggacctcaatgttgtgtggggtccctgggcttcccctcccagcctgcttcaccacagggaaatcacaccgtattatgcaagaggatcaagtcaggaacacgggagtcattcctgacacctcttttatcccnaccccatccaaactatttcccagccctgtcccttcctcttcatctccacagtcacnacctctctctccccatcccaagtcatccagcccttctccctgcactcatgaaa

SEQ ID NO: 138149 - DNA, 1129 bp, Homo Sapiens
ggggcccagtcttttgaaaatttaatggctacaaaatatggtccagtagtctatgcagcatatttaaaaatggagcacagtgacgagaatattcaattctggatggcatgtgaaacctataagaaaattgcctcacggtggagcagaatttctagggcaaagaagctttataagatttacatccagccacagtcccctagagagattaacattgacagttcgacaagagagactatcatcaggaacattcaggaacccactgaaacatgttttgaagaagctcagaaaatagtctatatgcatatggaaagggattcctaccccagatttctaaagtcagaaatgtaccaaaaacttttgaaaactatgcagtccaacaacagtttctgactacaactcaaaagtttaaatagaaaacagtatattgaaagtggtgggtttgatctttttatttagaaacccacaaaatcagaaacacagtacaaataaaacagaaatcaaactataagttgacttttagttcctaaaaagaaacatatttcaaaagcaatggaatctagaattcttataacatgaataacaaaatgtacagcaagcctatgtagttccattaatatataaggaaaaggaaggtctttcttcatgataccagcattataaagtttttactgtagtagtcaattaatgggatatttccttgttaataaaaattttgtgtcataatttacaaattagttctttaaaaattgttgttatatgaattgtgtttctagcatgaatgttctatagagtactcttaaataacttgaatttatagacaaatgctactcacagtacaatcaattgtattataccatgagaaaatcaaaaaggtgttcttcagagacattttatctataaaattttcctactattatgttcattaacaaacttctttatcacatgtatcttctacatgtaaaacatttctgatgattttttaacaaaaaatatatgaatttcttcatttgctcttgcatctacattgctataaggatataaaatgtggtttctatattttgagatgttttttccttacaatgtgaactcatcgtgatcttggaaatcaataaagtccaatatcaactaa

SEQ ID NO: 138150 - DNA, 800 bp, Homo Sapiens
  misc_feature (97)..(97): n is a, c, g, or t
gccccccttttccaatattactgtttttctatttaaaccttttgagtgtgtaattcagaaacctgttgttgggcctgcatagttttcaaaaagtttnttggtaccatttctgactttggaaatctgggggtaggaatccctttcccatatgcatatagactattttttgagcttcttccaaaacatgtttcagtgggttcctgaatgttcttgatgatagtctctcttgtcgaactgtcaatgttaatctctctaggggactgtggctggatgtaaatcttataaagcttctttgccctagaaattctgctccaccgtgaggcaattttcttataggtttcacatgccatccagaattgaatattctcgtcactgtgctccatttttaaatatgctgcatagactactggaccatattttgtagccattaaattttcaaaagactgggcccactgtaatacttcctccaaagtaaggtttgaagggggcctcttagattcatctctgcacatcttacaaatccaacaattccgcctgctcatttttcaagcttcaaataaacaatgatcatttttttctcatgttggtggtataatatgtggaaacattccattgacaaatatatcctgtcgagcagtccaccatgctaaatttgatctcctctttgttatgatccgtttgaaatcaggttctgaaattttgtgagacacccagcattttatttttcccagagtaaaaggattttactgtctctataattaccttcgatggcactctggcctcagtatgaatgttctccc

SEQ ID NO: 138151 - DNA, 638 bp, Homo Sapiens
  misc_feature (511)..(511): n is a, c, g, or t
tttaaataaaactgtagtttggcttcatacctttaattcctctttcagcatgactacttcttctctaagatcatcccgttcactccttacggaatcaaagaactctttctgcctctctaatgcctgagtgtgcagcagagccaagagaaagaagaagatttgcacagatgagcaagttacttcggaagcaggaaccagaaggaggcttctaccatctaaaacactagtggactctagacattaaagagactctgcctaaagatactaacaaaatccaagtattaagcttttcgcttagtatatataatccaagaaatgttactgttcatactccatgaaagacatgcgcatcttgaagcacacggacacagcacggggccccagaggttactatatttgcatcactttctagctttgtctgcgtgttcacagctggcgttagagcctccttctggttcctgatttccgaagtaacttggctcatctgtgcaaatcttcttctttctcttgntctgctgcacactcaggcattagagaggcagaaagagttctttgattccgtaaggagtgaacgggatgatcttagagaagaagtagtcatgctgaaagaggaattaaaggtatgaagccaaactatt

SEQ ID NO: 138152 - DNA, 761 bp, Homo Sapiens
tttttttcacaagttatattttattttaacacgagattaacatatagttacaaggtcaatacaagcctccagtggaagctctttatttggtttaattccatctccagagacaaacaggcaactctaggacctttacagtggcgatcggcctcacacagcaaaatgcctccaaagtttagaattagtgcaacacacatacgaacgttttaaaggtgctcaacatcaggttaaaatagaattctggacctttttaaaaagtttttggatgatataagcacaggaggcagagccaataagaaacatgaaaccaatatttctggaaaaacacttagcatgaacgtcactttttgacgtcgtgtaaactttcttctgcaatgacggatgttaccaaaaggcattgagacctttgcgctgcgctggttagacaagccgcaggcttatctccacggtgagcaggataaaaacccccaaggaacagcccatgacaaccttctgtgcctttttatactttcccatcctacaaagtaaaaactggtaaaggacaagttcctccctttcattgcgtatctaagaactttcagtgcaggttctttaaaaattagtcatcttacaacacaacagtattctagcacggtggcgaagtgacaggcggcagatacgtggaggaaggagacgttcacgtggaactaccacattctactctatgtgaccttgctccagaaaatccagaacttgatttcaccagcaaggatacccagagt

SEQ ID NO: 138153 - DNA, 1848 bp, Homo Sapiens
  misc_feature (437)..(463): n is a, c, g, or t
cacttaagggtgggaaaatggttttgcccccaatactcctggtttcccttggagggtagataaacaccatgggttcccaaattcgggcaattcatttttcaggttgcttgctggtatccatggggtttaaggaaaatgtgtacaggtatgaaaaaacttggaaaatatttcatggaagaaaaaatgtcttagggaaaaaaaatagcctatttttcatgcaaattatgtacagtctccactgtgtaaattttcaaggcaaggtttgtttccctgtaaaacagatcaatgttctatgagagaatgttcttgtcttagtgcatttcttttctcctcctgcgttgcattattttgctctagtctttatttttgtgtgcaaatgacatgccagttaaaatgaaaactatctcacatgtagaaaaagaaagtctggattttannnnnnnnnnnnnnnnnnnnnnnnnnntaaatgacaccatctgattcaagtaaaaaatgacttaaacactagtaataaaaaaagacaaaacacatttcatgaagaatacaaagataaatgtctgctgagtgttttagttcagatgtttcagaatgctgctgtatgtttgatgaggaatttgaggggaagatttcatagcagaaggtgttaatgtggcctgtattgacttaagtggtgacccaactggactgtgaaactgtgggatgcctatggactcgagctgcttgttaaagaggaactccccactgttgttcagaaatccttcctcatgtcctctctccccaagcttcccatcctctactggctcagtttctagcatttcagtatcttctttcctgctaaagaacttgtccaagtaactagtgtaagtgttttccttctcaacttgttcatccttccttacctcacaaaactgatttatgaaaaaacagtcctccccaccactcacaaactggctgtcccaagaagactggtacaaggcttctaattgagccagatttgccattcctttttcctgtttttcttggcttactgactttgatatcaaacttttcaattctagttgggacactgagctattcaagtcatttaatttatcaacaacatcagtaggctcatgctgggaactaagctgaatagttcctgcaataaaggaatcaaaatcaaatccctgattcttttccctttcttttccagccagttgctgtgatgcttcctctagcgctatctgggctttaaccaatccattcctttcacattttgatttgcctttcttatcagatttttctttgctttgttctttccaattggaaagatctataataagcttgggttcatagtaatggttaacttcactctctctccaaactaagttatctaaatatgatgatgacctcgttttgtagttacaagtatggctacactccagatcacaatatttgttttcatgatgatctgagtattgccaacaaggctcagtagagtaattggtatcaaaagcaggatcctccagatacttttcccgatctccatccaaatattttcggggatcaacttgtacttcttcttcatcagtgacatcggacagagctcttggatcaagctgaacttcatcaatatcaaagttgttatgtacaggccaatcatgctctgaaaactgacaatcatgatacctttcccagttataaatgtgactgtgagtttcatccataagcaaaatatcatcaacttcatcttcaatatgaaaaggatggcttgaaattggctcatccgcacgcgtgggttcgacgatatcccgggattccggaccggtacagcctgcttgttgtaccaactgttctatatgttcacaa

SEQ ID NO: 138154 - DNA, 483 bp, Homo Sapiens
  misc_feature (319)..(339): n is a, c, g, or t
ttttttaaggtttgaacatcaaattttaatcttgaaaccttttatccagtcctcaaattattaacatgaaaaggagtgataaattgcaattttatcattaccatatcactgtgtaacaagcccttgttacaaaatctccctctactgtctgcaaaaaaccaatagaaaacccatacattatattacctaatgatctattaacagatgaaattttaaccaactttataccaggaaactatgaacagaggtacttcaaatcacatagcttaaaatatggagaaaagacaggtaaaaaaattatcttaacctgtagtagtcnnnnnnnnnnnnnnnnnnnnnataaaatacactaatttcccaaaataaagaatattatgacacattggtgtcaacttacacagatgaaagctgatgccagctttttcctaactaaagttcatttcaccaaacctttatatattacatgaatatccaagtaaagta

SEQ ID NO: 138155 - DNA, 378 bp, Homo Sapiens
  misc_feature (220)..(247): n is a, c, g, or t
  misc_feature (274)..(274): n is a, c, g, or t
  misc_feature (297)..(297): n is a, c, g, or t
  misc_feature (320)..(320): n is a, c, g, or t
gagtcactcataattaattgccaaaaaagcattttatacattgagttggggggtagtggatcttagtgtggtgttgcatggaggggcgagattttatatttataatcaacacgtgggttaacatgtttttttgaaatccaagcaatacacaggaaatttaagtagaataaaaattgcagcccatttttgaaatgtcagcatgtgctgtgttcagttcagnnnnnnnnnnnnnnnnnnnnnnnnnnnnaactaattaagttggttatcagtggtnggtttttcaaaatgtacttgttnctaattaaggttgtaccaatggnactaaaatccgtgggcctttctcttaggataaattgtggggggggaagggtttaggaa

SEQ ID NO: 138156 - DNA, 311 bp, Homo Sapiens
  misc_feature (151)..(151): n is a, c, g, or t
  misc_feature (180)..(180): n is a, c, g, or t
acaaacaacattctcagtggactaaccactaactgtgtaattttgtcactacaggtcttgctccatacttttgcttcatgcagtgggttcaacaatatccatgttcgttccaaacagggcaactaactgttcttcataggtagcgatgttnccttttcataatttccatgcaaggtcccnagaagcctttcaaatgcttgcacatccattgctaaacattttgacagtcccaatgtcgtgggcagaagctgctcgaggtttgttagttaccagggcaagctctccaaagtactgtccccgcgagcatcgag

SEQ ID NO: 138157 - DNA, 839 bp, Homo Sapiens
cttctttgagttttccatgtactttataaggctctgtttgaattcctgtactcttttcatctgatcccacaggtccacatttagacctctgtattaggctgtacaacccattggtatagtgatcaccattttttctccatcaacagatcctcaatacagtccattagttccttcacttggtcatcctgattgctcccttcagcacggttattaaaggcacagattcgcccaccacatgctgccaccagcttgcttagggctttgttatctgagtcgtgcatgtaatccatcagggagccaccattgaggtcttccttgtgggtaaagaggacaattgtgtgtcccatggcatcctctccaaagatctccttcaccctctgtgcagcctgctggtcctgtgaggtatagcggcccagctgagtcaccaggagcagcacatggggtcctggtgcagacagcaagtagcacctctgcacctctttgtacagagcttcacagtggtccttccaagaaaacatatctggtgtgtcaataatgacaatctctctatttccccagcttccctgacttttgctgcaagtcttagtcaaggtctgggaacccagcttcgattcaaatgcttgcttcctgaggatgctgttccctgcagcacttttgccagttcctgttttgcccaccaggatgattctcagctcagatctgctggcacattggccctttgcatgtggtccccagtgactgtgttcattttggtccattggtgttcctgatttactgttcaaagaaacagttggctccctgttcagtcctgttgtcttatagctcagctccaagagccc

SEQ ID NO: 138158 - DNA, 142 bp, Homo Sapiens
gtgaacactaacctaaacaccaaccttattaagtagttttgcactagaagaaaggaaggaattaaagaaggataaagttgctttaaaaatgagataaactattcattgatttcttgataagagatgtgttctggccttcttt

SEQ ID NO: 138159 - DNA, 489 bp, Homo Sapiens
gtccaaggttttaaggggaatggttcctcacagaagagaggagcaggaaagaattgtcacctttagtctaccagaaatggagatttttaataacaagtttattccaaatacattccagttccccttgtgaatacttttttgactcacagggtatttcaaagtttattacttggttttcagacatttgaggcttttctggatatcaatttgttgttggtttctaatttaatttcaagtgttcagacaacatcctttgtatactatttcaggcttgaaccttttctcaatccatcgacatacagtctatcttggcactgccaagtaccatttgggtcaggattttgtcatttagatccgtatttttcctatatttttatctggttgttccgtcagttactgagagagcagtattaattcaccagctataattttggattgtcagtttcctgcttttgttctgttgtttttgattcacatactttgaggctc

SEQ ID NO: 138160 - DNA, 1256 bp, Homo Sapiens
agccgtcagctccacccacttcaactcaggcccagcagaaagagtccatccaggccgtccgccgcagcctcccggtgttcccatttcgagaggagctcctggctgctattgcaaatcaccaagtcctcatcattgaaggcgagacaggctcagggaagaccaccccgatcccgcagtatctctttgaggagggttatacaaacaagggtatgaagattgcctgcacccaaccccggagagtggctgccatgagtgtggccgcccgagtggcccgggagatgggtgtgaagcttgggaatgaggttggctacagcatccgctttgaggactgcacatcagagcgaactgtcctccgctacatgacagatgggatgcttctccgggagttcctctctgagcctgacctggcgagttacagcgtggtgatggtggatgaggcacacgaaaggaccctacacacagacattctctttggattgatcaaggatgttgctcgcttccgacctgagctcaaggtcctggtggcttcagccacaatggacactgcccgtttttccaccttctttgatgacgcccctgtgtttcgaatccccggacgcaggtttcctgtggacatcttctacaccaaggctccagaggctgactacttggaagcttgtgtagtatctgtgtgcagatccatgtgacccagccccctggggatatcctggtgttcctgacaggacaggaggagattgaggctgcctgtgagatgctccaggatcgctgccgccgcctgggctccaaaatccgggagctcctggtgctgcccatttatgccaatctgccctctgacatgcaggcccgtatcttccagcccacaccacctggggcacgaaaggtggttgtggcaacgaacattgctgagacatcactcaccattgagggcatcatttatgtgctggatccagggttctgtaagcagaagagctacaacccccgcacaggcatggaatcgctcactgtcacaccctgagcaaggctcagcaatcaggagctggaaggcaggtcgggtggtgagggaagtgttgcgctgtatacggctggctattagaccgagttggggaaccacaggcctgagatccagaggacaggtgggcatggtgttgggtcagagatagggatcctgaactaatgcttgtttcgggcccccttgaaaagcggtgtggggacggttttcggggccacactgggggcccgtggccaaggaagcgggg

SEQ ID NO: 138161 - DNA, 1250 bp, Homo Sapiens
  misc_feature (11)..(11): n is a, c, g, or t
tattttatttnattttattttgctaatagcaacatcaacagacttcctgtggttagaggattataaaaacaagagttccttggagctgcatttgcaccacttgtgtaagatgctgtagaaccctggcgtatgctggggctggcccttcctgcagaggctctaaacagagactagccagaaactaagaaagtcaaggctgatcactggaatagggaggcaggggaacatcacagatgagtagctgaagtaggaaccgagagcttctggctttgaggcccttccccctcatccaggggccccatcctcttgctggtcaataggcagggcctcccaggattcggattctcttctcacactgcttctttgccacagtcagttggttgatgtacctcttcatgttcctggccctcaggagatcagctttcattgccgcagtttctttacctttgtgcctcttcagttggggaaagctgctaattgtagtcgcctggattatttccactacaatttgataccttagttgcttcaagaactccacatcagagttgctgttaatgagcttgatgaagtcctcgtaagagggggcataggtgtaggctctcttgtgatgctcattcatttgctctctgtacgccagctgggcaagcagcatttggttaatgtaatctggattactcagtaactccactaccggcttcaagacttttgttgtgagaatttctgcaagcattatacgtaagctgagagactgcacatcctttgaggggaggagacaaaacaccagcacccgagaacacgtttgtagaaatcttacttcatcatctgagttcctcaagcatgcgtgcaacacaaaaggtcttggctgttcttcatgtctggcattggcagctttcaggtcacagaaatgagtgagtaaagtcctcacaacatcattgcagacaactttaaccacatccacgtgactcagtctgtggtgcagctgtctggcaatttcccaaaagtcttccaagagcagatggtaaagttgtccctcatctctgctgaggtttccataccaggacagaatgtaatctctataactgtagtcgaacacttctttcagagctttatccatattatgagaaattactacccttctagactgagctgactcatgtgagtttccatacacaggactccccggcgggcggcgggcggctgaggtcgcgccagccggctccaggcggcggcgaagtcgggcggctgggcgc

SEQ ID NO: 138162 - DNA, 584 bp, Homo Sapiens
  misc_feature (93)..(93): n is a, c, g, or t
gctaagagttgaactgctttttaccaactccttaaaggggtgggtttttgttttgttttaaacctatttacctgtcagattctgcatttattnagaaaggcaatcaaagaaagaaggcgatcacctaggtgcccaggtagaatttcttgtccagtctacagtatcttagtttttgactttctgctagttctttcacctaagaaatattttgaatcaaatttgaaactagcattcaccaaagtgatctattggctggcccggtggtagagagtggaattttcaccttctgcaaaaaaatgctatttacaaaagggtacttcatttcactgtgggcttttggtctgggctcatgaagcacttttatagagtgatggcagccagggtgtactacactccttggcgcctcgggaacgtttggcaagagtcgtttcacgaaaacaggaaaagagatccttctagtgtattcccatctctcgctgtcatgaggccacagacggtttcataaccacaaactgagctgctaacctcagtgaggaatgtaccaaagactccattcctcccacggctgaaaaaataggtcatcg

SEQ ID NO: 138163 - DNA, 699 bp, Homo Sapiens
  misc_feature (53)..(147): n is a, c, g, or t
  misc_feature (420)..(430): n is a, c, g, or t
  misc_feature (509)..(628): n is a, c, g, or t
agcaattccaaacattacatattttttatttacttgtgtatggtgagccctgnnnnnnnnnnnnnnnnnnnnnnnnnnnnnnnnnnnnnnnnnnnnnnnnnnnnnnnnnnnnnnnnnnnnnnnnnnnnnnnnnnnnnnnnnnnnnnnaccctttcttcttgtcccacaccttcttcccaaaccttctggcatcactcctccaggcagtctgccctgattgcccttcacttgagttctgacattctccctcttcatcctcagtcttgacttggagatcgctgtttatctagaaacttagaattgcggtcttatgttccctggcctgtatgaccaggggctttgcaaacataatgactctatatcggctgcatttctccttccactttcccccgagtcacagacttttatccacttgttggnnnnnnnnnnntctaaccttctctatttgtctttattttctggaaaccaaatgtttgacttaatttatctggccagacatggcggctcannnnnnnnnnnnnnnnnnnnnnnnnnnnnnnnnnnnnnnnnnnnnnnnnnnnnnnnnnnnnnnnnnnnnnnnnnnnnnnnnnnnnnnnnnnnnnnnnnnnnnnnnnnnnnnnnnnnnnnnaggcatggtggctcacatttgtggtcccagctactcgggaggctgatgtgggaagatcgctggagagccca

SEQ ID NO: 138164 - DNA, 1083 bp, Homo Sapiens
gggcagtaactatcacggtctaggtagcgaggctgggtggcgaattcggcacgaggagaagaggtggatccccggatccaggagaactggagaagttaaatcagtccacggatgatatcaacagacgggaagactgaacttgaggatgctcgtcagaagttccgctctgttctggttgaagcaacggtgaaactggatgaactggtgaagaaaattggcaaagctgtggaagactccaagccctactgggaggcacggagggtggcgaggcaggctcagctggaagctcagaaagccacgcaggacttccagagggccacagaggtgctccgcgccgccaaggagaccatctccctggccgagcagcggctgctggaggatgacaagcggcagttcgactccgcctggcaggagatgctgaatcacgccactcagagggtcatggaggcggagcagaccaagaccaggagcgagctggtgcataaggagacggcagccaggtccaatgccgccatgggccgcatgcgacagctggagcagaaactcaagagagccatccacaaagtccaagccttattttgaactcaaggcaaagtactatgtgcagctcgagcaactgaaaaaagactgtggatgacctgcaggccaaactgaccctggcaaaaggcgagtacaagatggccctgaagaacctggagatgatctcagattgagatccacgagcggcgggctccagtgtcatggggccttcggggatgcggtgttggtgctgagggcagcagacatctgtggaggatctgccagggagcaaaacttgagcgtgatgccatttcttgtgagcctcggaggccttgcaagatgacagttggagcaactttgtggtctggacgatggactcggaacccaggtccggtccagatttagattcaggaacgaaaagcccgtttgagatgctgaacagttcctgcggttgtagaggctggaagcttggttttgccaagcctgtgtcctggtcagaatgggcaagaagtccatggtgggccctcacagtgatgcagggggtcttcctgatttaataacagc

SEQ ID NO: 138165 - DNA, 393 bp, Homo Sapiens
  misc_feature (334)..(334): n is a, c, g, or t
agccctctcccaaaatctggctccctggaagggtaacttgttcctttccttgggatctccctctgtgaaagaggtcgtgttccccaaattggtcctaaaatattaatgtttcccatttttatttgtggagtaatcatccagttcagtagtagatctggatttatttctgtcaccaggaagaaaacctgaagatgcttcttctgtctttggtatatcataggaatcaacaggcctcctgtactggtatattctgactgatgtttcccgctctatctctgcctggcgcttctgctcctccgcaggacgcttctgctcctcagcctcagcctgaagncgcttttgctcttgctcttcctgaagctgttgctcccatttcctctctctctcaataac

SEQ ID NO: 138166 - DNA, 962 bp, Homo Sapiens
  misc_feature (50)..(59): n is a, c, g, or t
  misc_feature (61)..(66): n is a, c, g, or t
  misc_feature (68)..(69): n is a, c, g, or t
  misc_feature (72)..(76): n is a, c, g, or t
  misc_feature (78)..(79): n is a, c, g, or t
  misc_feature (81)..(96): n is a, c, g, or t
  misc_feature (98)..(103): n is a, c, g, or t
  misc_feature (105)..(168): n is a, c, g, or t
  misc_feature (170)..(177): n is a, c, g, or t
ggggggtaggcgaaaaattggggccccccgggggggttttttatgagggnnnnnnnnnntnnnnnntnnttnnnnntnntnnnnnnnnnnnnnnnntnnnnnntnnnnnnnnnnnnnnnnnnnnnnnnnnnnnnnnnnnnnnnnnnnnnnnnnnnnnnnnnnnnnnnntnnnnnnnnggaatggcacccaaagcactttatgaaaggttatttcaggaacagcagaagggttactgatcccgggagcacacagcattgcacagtcgtccagatatgctcttcattgagagaaagacattttgcaaagatgctgctgaagaagagtcctttgggcctgtgacgtggcagcccccatagggtttgtggaatgagtttacccaagcctctgcctccctgtgctccccaggggtgcatgctcctgagaggctcagtgcccgccttggtctccaaacacctgtttaatctgggggttgaacggattctcctttcccaggatttggggccactggagctgcacctttttccagaaatgatccgccaacaacagcaaagccacctcgttggggtggaatccatccacgggctcgatgagctgcccgggctgtccgcctctcttctgccactcctgtatgatttcatggaaggcaaaatccatgtagaaaagattgaagtttgtaaatttctcactggctgcaatttttttcagtgtgttggagagttgctctgctctctctgaagtgagagtccgcaacgtcttgttggaagacatccagccgtggcaggggctgacctggaggcagttcaggaaggagtacaactgcgcataggtcatgtctttatttagctggccgagaggatgatatctgttgtgcaaattatcccagagaaaggttccatctggtaagccatacaaaataacatggctgccattgggcaggtgggaatttagatgcttcagagtc

SEQ ID NO: 138167 - DNA, 607 bp, Homo Sapiens
  misc_feature (423)..(532): n is a, c, g, or t
agagcatagaggaatcagctaaattagtatgttttatccatagttacatgactaacaaatgattaaaaagaagttattctctagataattttttaaataaaagtactgttaatatataaactaagttattcattcactgtttttcttcacagtaagaatgacaaaaatctgtgttctttgtacttatcaagtgactcaaattttggccacttcactgtcactgatggcttatagaatgattctagcaggactcaagttattgaactatcaaatgggtttttaattgatattgaagtaagtaagttttgtagcttttggagtttttaaaaactacttcagtgattttgatttatattctttttgatagttcaggaagtgtattgttaaaaaacataagcatggccgggcacagtggctcacacnnnnnnnnnnnnnnnnnnnnnnnnnnnnnnnnnnnnnnnnnnnnnnnnnnnnnnnnnnnnnnnnnnnnnnnnnnnnnnnnnnnnnnnnnnnnnnnnnnnnnnnnnnnnnnttagccgggcatgatggagcatccctgtaatcctagctacttgagacctgaggcgggagaattgcttgaacccgt

SEQ ID NO: 138168 - DNA, 416 bp, Homo Sapiens
  misc_feature (29)..(29): n is a, c, g, or t
  misc_feature (56)..(56): n is a, c, g, or t
  misc_feature (88)..(88): n is a, c, g, or t
  misc_feature (117)..(117): n is a, c, g, or t
  misc_feature (125)..(125): n is a, c, g, or t
ttcacgacgttgtaaaaaagaaggcccantgaaatgtaaatagaactcaactaaanggcgaaatgggtaaccgggcccccccctcgancaaaccctccccaccttggctccccaaangctggganttacaagatgtgaagccactgcacttggccagcatcctacattttcaatgtgaagtcacccagtatccttttaaaatgctccttttaaaatggatgtttccatatagataggtgcaaagctgatgtgcagccagtatacacaggtatgcccaaactagtggttaaaatattgaaaaatgtctggattgatcggtaagtggtccctttcttgagaccctgggtagccactctgctgcctgggctaatttggcccctaacccaaagccttccttggaactccctacaaaggga

SEQ ID NO: 138169 - DNA, 423 bp, Homo Sapiens
tcctttctttacaactatgatcctaggactttggctgcataatgtctgtcatttcccccctctcttatataacatctcaagctgttaagggtgaagtaccgcatacaggtttcccacttgtagatcacactggggatttttggttaattgggttcccatgtggcttgggctggtgatgggttttagttttaactcaaggtaggacagcatccctcgcttgatggtaactttttgtctcttgcctggcagatctgtgcgagagcgaggagagtcacagtcgaaagagtggccagctcctgttgatgttttcatccagcccttccctaccaagccgcacactgcccactgaggaagtgaggagccaggcttctgacgacagctccctaggcaagagtgccaacatcctgatgatcccacaccccc

SEQ ID NO: 138170 - DNA, 450 bp, Homo Sapiens
  misc_feature (20)..(20): n is a, c, g, or t
  misc_feature (38)..(38): n is a, c, g, or t
  misc_feature (54)..(54): n is a, c, g, or t
  misc_feature (117)..(117): n is a, c, g, or t
  misc_feature (343)..(343): n is a, c, g, or t
  misc_feature (349)..(349): n is a, c, g, or t
  misc_feature (392)..(392): n is a, c, g, or t
  misc_feature (408)..(408): n is a, c, g, or t
  misc_feature (414)..(414): n is a, c, g, or t
  misc_feature (440)..(440): n is a, c, g, or t
cttcctgggttgccccaccntttgttcccaaaataaangtccctaaactttccntgtcctcctaaatgtggcgcccatgttgaacaagggcacggcaagaaggggctgtggatgccnatgctgctgacacggaacagggtaaagcagagtccctcccgtgtctcccattgtgcggccagctccctgtccccattccttggctccttgatctgtacagggtctggtagggaaaggagacttgggactccttgacagtgaaggacaggtacctgtttaacatgtatttgcatcccgaaatcagagggtgaggccacttctccacagtggggaccctagggaagcngaccanaagccaagtgggggaaaatgacttttcacccacggatcctttntcttttttcccaggantgttgnatccacttgtgctcccaattggaagngcccctcgtt

SEQ ID NO: 138171 - DNA, 1090 bp, Homo Sapiens
tttagaggttacagagcatgtttatttgccagctgaagctaaagcggcaaaggaaggagagtttcatccctacccttctgcatcccctcattattattttgaagaaaatgactccccagatctttcttttccggaggacactgggcgaaaagtagttgccccagtgactgttcgagcagcgccttgagcgacttctcttagttctattcaggcaggaattcagcaagctagacaagagtgtgatttagaaggcttggcagttccctgttagaatacaccccccagatcaacagggaagtattatagctacatttgagccttttccttttaaattactcagagaattaaaacaagcaataaatgagtatggaccaggttctcctttagtaattggactgttaaagaatgttactgtttccagtcagatgattcctactgattgggacgctcttacttgagcttgtgtaactcctgcttagttcttacaatttaaaacttggtgggcagatgaagcttccattcaggcttctcacaacacgcaggaccaacctcaaattaatataactgcagaccaacttttgggggttggcggttgggctggtttagatgcacaagtggtcatgcaggatgatgccatagaacagcttagaggagcgtgcattagagcttggggaaaaaaaatcacttcaagtggagaacaataccctttctttagtgctataaaacagggaccagaagaatcatatgtggattttatagctcagttacaggagtctcttaaaaagatgactgcagatttggctgctcaggatatagtgttgcaattattagctttcaacaatgctaatcctgattgccaggctgctctgtgacctatcagagggaaagcacatttagttgattatatcaaggcctgtggtggtatcagaggtaatctgcatcaggccacctgctagcacgggcaatggcaggactgagagtggatacagaaagtactccatttcctggagcttgttttaactgtgggaagcatggtcatactaaacaagaacgtagaaaaaatgagtgagtcaggctgccagatagggaa

SEQ ID NO: 138172 - DNA, 555 bp, Homo Sapiens
tttttataaacaacaagaccaatttttttgtacagctcgtaaatttagagtttagaaaatgcctgagcaatgcagtcctgatgatgtacagattcttctagagtgatgactcagggggctacgctcatttgaacggtgtatctaggtgttttgcagctttagaaaccggtccttttgttgcctctcacatggactttagtattcctcttcagcttcagtcccttttgctttcttatggattgcccgattaaagctgtggcaggcaggaacccagtgattgtcatgaagccccagcttacagccagggaatcctttctgagaccggtggcagcacatccaataccctggcccatagggcaatgcctggcaatagggcttggggtgccatcggcacagggacacatcccctttcacatactttttcttgcactgtttgcaaggatcctctctatagcgtggatctcgaacccagcgagaatctgctggcctgatattgtagtactcaatgataaacttgaaatagcagcaggtacatttaagggccactaaactctt

SEQ ID NO: 138173 - DNA, 540 bp, Homo Sapiens
  misc_feature (197)..(210): n is a, c, g, or t
tttttaagatttaacttgttttaatgcagtctgctataaaaatgaagacttctgcatggtatatttggctttacaaacgttaatgcctagttaatgcttgtgttatatggtacacatcattacaatctgttggccagtaacagcttttgcaacatgggttaatactaaaattgtgaatcatggaacttttacttagnnnnnnnnnnnnnnatctacagcaaacttaaatactaatctataatacctaactgggttattggatccattgcaagattgtgcttatttatctcagaaggtaggcaactagcaaaaatacacatttctttcgcatatccccacccccatattacactgtaaaagaaatacattattcagtgtacttcctaagaaataaacttccttatagtatctctctctatatatatctatcccaaaacaaaggaagagcacaatgcaacttttaagattaccatttaaagcaaaagagacaataactctctggcactgtagcctcctctccagtttagaaagtttagctat

SEQ ID NO: 138174 - DNA, 354 bp, Homo Sapiens
  misc_feature (73)..(73): n is a, c, g, or t
cccaaattgaaatgctttttaaacccctaaaaaattttcgggaaaacaaattttatctttctttgctaaattnagaagacataatgggagccatatggtaatggtgaccatatttcccaaattatatatttatggcatagaacttgaggaatgctcatcatggaaacaacaggagtgaaaatttaaatgcaagcagtgtgggcccatatgctctatggctactatggctgcctgtcccattcaagtgggatgtgttcagaggaagcgctgactctggatggcgccccctcatggaaaggaggagccactgcagctcagagaacctttagcttttccatgttactttgatcgggc

SEQ ID NO: 138175 - DNA, 546 bp, Homo Sapiens
  misc_feature (421)..(421): n is a, c, g, or t
  misc_feature (505)..(505): n is a, c, g, or t
  misc_feature (523)..(523): n is a, c, g, or t
  misc_feature (536)..(536): n is a, c, g, or t
gtgtttatacgagtactttattcttaagtttctttttttcaattttaaaataggaaaatattttttcataagcaatatttcagataacacatgaacttgtgaagtaagatttgtgtgcagtcttgcttgttctgtacataactgtcaaacgtaggagcaagtttaaggacattccaggatccagggtcttagaaaacgttttgtatttgcattggtaactactttgttggcagccaagaaagtctgtaaaaattactttcttggtggttttggaaatgttgaaattcaaatcatttatagcccaccatacctgagtcctttcactcccactttgggttgggcgctcagcagcactgagtttctgtgcacccctgccttccagacttcacacttggcccttcaccgccaaggacctgtttgnctggagttcaggaggattaggagggtaggcatacgattttcagctttagggtaagcagtttttaaggaagtttgaggattcttncttgggaacaaaaaattnttctttacccaantttcattagt

SEQ ID NO: 138176 - DNA, 507 bp, Homo Sapiens
  misc_feature (97)..(97): n is a, c, g, or t
  misc_feature (108)..(108): n is a, c, g, or t
  misc_feature (269)..(269): n is a, c, g, or t
  misc_feature (343)..(343): n is a, c, g, or t
  misc_feature (395)..(395): n is a, c, g, or t
  misc_feature (417)..(417): n is a, c, g, or t
  misc_feature (491)..(491): n is a, c, g, or t
tcgatgtttctcttaaaaatatcaaatatttaaatgtctgttagctctggttgctaaattagaggataatcatcaggaggacaggaatcatatcttnttgtctctgantgtccctccaggcagggttgacagcaggtgtgaggtgcttgggagcctggccattaaaagcaggcagatttgagtaggtaggacttgcagtaagtcttcaagaccataaacaacaaaggccataagcaaccagagctccctccttctgagtcaaggatatnatggtgtagtggacactgattttggtatacccagaaacaatgcactcttcgcatctactcaaaaaggagtctgngttttattcatggaatctttgccaccagatacccgtgcaactcagggggaangttcaacttagctccaactccnggggagctgtttttagtctaaggcagtcaacccacttgacagtgatcggttaagaaatgggtacgtgactcaantcaggccaatgaaaat

SEQ ID NO: 138177 - DNA, 483 bp, Homo Sapiens
  misc_feature (366)..(384): n is a, c, g, or t
  misc_feature (394)..(441): n is a, c, g, or t
agcagccgcacctggtgaggctgaggtcaaggctgtacttccaacatggctcacgtgtttttttcttaagagaagggggaatttggaggggggcaaaaaaagaaggagaaagagaggaaaggttaaccactcgagaaaaaatgcacatgggctgaggtttcctgcccttatcaccattccagtataaaacctcaaattatgggaattctcacttaggaacacctcattatggaacatatgtgctgggggtctggggagatgggagaaggggtgtgtgttcatgaccatgtgtgtaaacttgtgtgctccaaattttatcaagttcaagccaaaaagaaatcctctgtggcacttgtttaggacttnnnnnnnnnnnnnnnnnnnccaaccaacnnnnnnnnnnnnnnnnnnnnnnnnnnnnnnnnnnnnnnnnnnnnnnnnttgtacaccctcaccaccaccaccaaggcatagccttggaag

SEQ ID NO: 138178 - DNA, 423 bp, Homo Sapiens
  misc_feature (194)..(316): n is a, c, g, or t
  misc_feature (343)..(358): n is a, c, g, or t
  misc_feature (377)..(377): n is a, c, g, or t
gcgtcaatcagagcgtcctgtgcggtgagtccccagcagcaccatgccacccaccccgagtatctcctgggcatcctggcatagcagtatgacttccgtgcccctgttgcaataaccactgcttccaagtctctgtagaccaccccttgggtatatctcatgtaagtgatatttattttatttattttttgagnnnnnnnnnnnnnnnnnnnnnnnnnnnnnnnnnnnnnnnnnnnnnnnnnnnnnnnnnnnnnnnnnnnnnnnnnnnnnnnnnnnnnnnnnnnnnnnnnnnnnnnnnnnnnnnnnnnnnnnnnnngcatgcaccatggacgcccagcttaannnnnnnnnnnnnnnncagtagaggtgggggtttncccaagttgggctggggctgggtcttcaaacttccccacctcaagt

SEQ ID NO: 138179 - DNA, 535 bp, Homo Sapiens
ttttttacagcatgtgaaatagtggctgtttattgaaggtgttttgcatgtggctctgggctgcagactctaagttagatgtcttcagatgctttcaagcctttagcatttctcagatcctcacccacctgtcctgagtcggcatgtccgggactctctccacttctaccatgttcctagttactctccggcgtggagtctctgatgtctaacgaaggcagagctgcaccggaaggccttcccacactcgctgcattcgtagggtttcacgcctgtgtggattctctgatgctgactaagggatgagctctggttaaacgctttaccacactcattacactcataaggtttttctccggtgtggattatatgatgccgaatgaggggctgagctctcacttgaaggaatttcccacattcattacatttatatgggcttctccccggtgtgggtcttttggtggattatgagattggtactctgggtgaaggccttccacactcgctgcacttgtagggtttctccccagtgtgg

SEQ ID NO: 138180 - DNA, 614 bp, Homo Sapiens
gggcttgggatccactgctttattaccacaggcagtgctaaccttagcccacctggcccacacagagagggaaagaacatttctgagaacagctaacaaacctgggcttcccagatgcattccacaggaaccaaggaagtccattctgagtcagttttctaggccctggggttagtgagcacttgggccaccaggttctgggttaagctgactttattaggtccaaagacagctgtgaggggatgtggcaaaggtgtctgggagctgaccttgcttatgcatccgagggctggggccacagggcgggcttgtgctaagcaccttcttgcctagtgcccaacggcttggaggatttccagggccaagggagccaccgcactgtcggcaaatgaaccactcccaggggccagccgctccagagcccgcaggaggctgcctgcattcttgaggctctccaagtgcttctcattggaggtgatcattcttctgagaatccttaacagaagcttctgctcctttgggtcctccttggatgtcagtaaatgagcaaaaatttccacattttcaggagagaggctgtccgggttttcccctccatacagctgaaccagtat

SEQ ID NO: 138181 - DNA, 270 bp, Homo Sapiens
  misc_feature (227)..(227): n is a, c, g, or t
  misc_feature (231)..(231): n is a, c, g, or t
  misc_feature (258)..(258): n is a, c, g, or t
ctttctctctgtctctgtcgtctctctcgctggctttttaaaaatgaggaaccgctccttgaatgttctggacagagcacagaattgcttcttaagtcagcccggcgcggttgcaatagacagcaaaaaggtaaacgtttgcctgaaatccgcacgccagctccaccgccccgcccgatggtgagtacccttctcgtcgcgattctcctcctagcttaaccgagcgntcgncttacccgaaccgtgggccgagggggncgggctagggtt

SEQ ID NO: 138182 - DNA, 281 bp, Homo Sapiens
  misc_feature (16)..(16): n is a, c, g, or t
  misc_feature (64)..(64): n is a, c, g, or t
  misc_feature (67)..(67): n is a, c, g, or t
  misc_feature (93)..(93): n is a, c, g, or t
  misc_feature (107)..(107): n is a, c, g, or t
  misc_feature (130)..(130): n is a, c, g, or t
gccccagaactataanccacatatccatgaaatgaagtcagaatttggcacatgtcagataacnggntcagactacagccaggcctcatttcncgtcagaaaggtcnccttgagatacttactatttatnggaactagataattttgaaacttccttttgaactgtgcagataaggaactaagtaatgttttattattcaatatgctagcatttactctataatcccttttgaaatgtgagaaaaattgtctctgtgtttgaagaatgccacatctttatg

SEQ ID NO: 138183 - DNA, 383 bp, Homo Sapiens
  misc_feature (89)..(89): n is a, c, g, or t
  misc_feature (352)..(352): n is a, c, g, or t
cagagcttataaccttttaggtgattataattttttaaaaattttcctcctcttggaatacttagcaagctggcgactgcagcctgccntttactgagggtacagccctgtaagtgcccaactgcatccaattcacagcttctagctcaccagtcctctttagccggttctattcccacgtgtaaccagaagcaaagtcaaagggaaagtggatagcaggctgtcacgcaaatcgccttgtcctgggaaatcaaaccaggccacccaagaggtaggatggctccaggttctccccgggagaagccgctcggacaggcgctgtgccagagggcgccgtgagtcacttttactncgtcgtaactttatctgcagcgtccgcaggt

SEQ ID NO: 138184 - DNA, 1378 bp, Homo Sapiens
gcatggcccaaggcatcactcttctcaaaaaacgaagtgactgagataagatcgaagggaaatattccagagcagcagattctgaactcaaggcttccaaagattcacatttgaaaaactctatggatttaggagggttctccaggtttgcccacaaggcctctttgtgtagggaccattcatcctaaggaaatcattcaaatgcagccttgctgtgggaatctccatccactaataactgacggacacccccaccccagcttcggacctcaagacgtgagagggttgcctatgcacagggtgtggaaggctgtggggacagtgcggggcacagacgtggtggggagagtggcctgcatttgcatagttcctttactagggctcaaggtgttgaggtccacactcaagagaggattcgggagttggggaaggggagttcatgaggggcctttgtgagcatcttagggcttaccttttccacacccttcctgccgtgggccatcgggaagcatgcaggccacaggccttccccctctgagcccccatctcagggaaaagacatcataagttacagaaacaggacaactggggagcaaggacgccccccttggcaagcttctttatgtgctccccagggtggggaaagtggcccaggactgtgttgggacacacttgtagacaagtgccttgtgatgctgggagcagggtacagtgtgtttcctaaacatggcagctcgggacacctttgcccacggcctcccccacggacctctcgagcagaggcggtgggggtgccctagggtttcaacttcccctccttggctagtctgtcattgagctggcagagctgggccaggaagccatcgttggggccgatctcacggttctgcctcacgatgctcagggcagacttgacgtccatcttctgccgcatcatgaggtaggcgataactagcgttggggagcggctataaccttcccggcagtggacgagcacccggccattcttttgagccaaagcctggtcaatgaagtcggcagccctttcaaagtaagcgctgaggttgaactcctgtgtgtcgttggccttgatgcccaggtatgtgatgccggagtccttgtagaagttggcattggtgttgacgtgcatgaaggacctgccctcagccgcgttcagcacatgggtgatgcctagtttctgcagcttggggatgtcctgagccacagacgcgttgcccacgtagatccgcggggtgacctcgttgcagggctggctcgggaggctgtagcagccgctgccgtccgagagcaggtcgttgagatcctgcaccgagagctcgaacgagcccgacatggcggcggcggggccctgcacccc

SEQ ID NO: 138185 - DNA, 798 bp, Homo Sapiens
  misc_feature (50)..(90): n is a, c, g, or t
  misc_feature (93)..(127): n is a, c, g, or t
atgtatcgactcacctaataagcggggcgcttagccctccggttttttcnnnnnnnnnnnnnnnnnnnnnnnnnnnnnnnnnnnnnnnnncgnnnnnnnnnnnnnnnnnnnnnnnnnnnnnnnnnnncagtcgacggtaccggacatatgcccgggaattcggccattacggccgggggggagctaatacgtagggcacattctggtagggccaaaatattcagtgtctggggggtgctatgcaaatatcaatgactttttactaaaaacagtggatttcctcatttctttaagatccaagtagaaaatgtaaataacttacattctgtatgcaggactcaatacagacttagtcaatctgattttttttggtgcttttcagtatagcgcaactctaaaaggaaacccattcaccctccttagtcctttgaagtatacttttgaaattataccttattgttaatggcaacctaatcaagctaggatttgtcggttaaaattttgattcttgtaatctgtactgtcaatttttggccactctggctgttacagcaaacttttctcccactgtcataattggtctaaagtagtatttgtttcaggactatccaaaaagcaaggccagcacattgagaagatgcagaatcctactctattacaaacctcactcatgtttcttttattgaaacctttttctactttatatttcctcttttgtaaatttttccatgtcatttaaaaaattttttactttagaattacagattagttctttttttaaagcattatggcattttc

SEQ ID NO: 138186 - DNA, 755 bp, Homo Sapiens
  misc_feature (468)..(502): n is a, c, g, or t
  misc_feature (729)..(729): n is a, c, g, or t
ctcttttctcttctgctgcccctgctctcttgccccctcccgttctggttatcctctcccttcttgatgactttgtctgtagcttctccactttttggcctattatacttcataagggaccattcatgcataaggatagtcataggtatatatgcctggcgaggaaaaattatctcatcctccaaaaaaacctgcagtccttctattcagtctcaacaaagagactggccagactgggaatttggccgcactactgtggaaggagaatgccctggagccccagctaacatgtatttaatgttgttctcaaagggggaactgaagagacccaaataaatatgttccctgtcctgtggctgcctcccagaagtggaagttcttggggttctcacagtcatcttttattttgaaaagactaagttgaagacaagaaggaagagggctctttctctgaagcaggttagagtnnnnnnnnnnnnnnnnnnnnnnnnnnnnnnnnnnngggagaatgacttattcgtgtctacagaaggaaagaaaaagggaaaatattacataccacctatcagaaactagctaaatagatgcactaaagaaatcatttttaaaatttcaagcaggtattttccatccaaactaaacagaaagtccaagacaggcaccacataaactaaagtaaatcctggggacctggaaaaatcaactcgtttcattcactaccaacaatcntaacccccggggcgttaccagacctg

SEQ ID NO: 138187 - DNA, 822 bp, Homo Sapiens
ctaagatgttgcaaagcgctttgaatttactagaagttcaataaatttgctgtaatttagggtctcgactcttatcttgtgaaggctactttgagggctttgtcaagggacgattaggtctaacccagcccaaaagtggatgtcaataagcaggggtgagcaggctgaaagtttgagtgctcgaaatttaggtctgagataaaaagagaaccagtgtgcagtcatccccctaaaagcccaaattaaatagtgtgccaagtttccacccaccaaagtaatccacagggatccagcttgccatgggcgagatattgtccagatggtcgccaagcaagactccctcctcccgattgtccttccttccttgtcggcaaagtggtggaggatgagtgagaggcagccgcagaggggaaactccatccggaccctccaaggggagtaggtggtcccagttaggaccttcagttatcttttttctctgattgcttcttcctttcagcctccagtttttgttgttttgcctccaacctttttctttgatacattttcaccccagcaaatgtcaggcagagaattaatgtttttgctgccaagatatacagcagcaggggcacgtgctcaagaaccttccaattcatggtagactgtgaattcactcctgatcaacacaagcccccaacagacaagtacatgagaggcagctggaaggtctgattgctcccggcagcggaggctccagcgcctggccgcgcacaaaccacgacttctaccccccggccgtaatggccgaattcccgggcatatgtccggtaccgtcgactg

SEQ ID NO: 138188 - DNA, 516 bp, Homo Sapiens
gtaaaagccagcatacccggccagtactggttcttttaaaaacatatacaaattcacactattttaagtgaaaggtctaggttgggagtttatcctctgacaaattattcaataattaagtctttcttctctttcttctcagctggagtccactcaagctgacatttacatggcagaatcttcagttatcttttttctctgattgcttcttcctttcagcctccagtttttgttgttttgcctccaacctttttctttgatacattttcaccccagcaaatgtcaggcagagaattaatgtttttgctgccaagatatacagcagcaggggcacgtgctcaagaaccttccaattcatggtagactgtgaattcactcctgatcaacacaagcccccaacagacaagtacatgagaggcagctggaaggtctgattgctcccggcagcggaggctccagcgcctggccgcgcacaaaccacgacttctaccgtcctgccggggaaaactacacccc

SEQ ID NO: 138189 - DNA, 280 bp, Homo Sapiens
agcttggaaggggtgaaggaattcattttaagtaggctgccctagtccttccatggtaaactctttagcttcatcatcagctccctttctcctctcatccttccaggggttgtcccagactcattagagataattagttatactcaattcaaaattcagcatgtatattacagaacatcctacatctggtcctacctgagaaaatgctttccagacccagggtttctttgattttacaagtaaaattagtttccgggagttttagggccttgttttttct

SEQ ID NO: 138190 - DNA, 520 bp, Homo Sapiens
taaaatcctaacaagactgtatttaaaacaaaactcttatattctggcaaatgtgcatacacatgtgagggctggtgcattccaatatcatccttagaaagtcttttgaaaggtttatcgtgtttgggtttttttgctctaccaccaataaaggatccatttggacactccgccatgtctcatgtctgcctggctgagtcacttcagggatcccgtgctggcaccagagagctgtaagagccacctgcaatgggcagggtgtgtgcctgggacctttcacttccctgcttgtcttctggccgcgtttctgagaggcacgccccccacacacatccatgcacacacgctgtaattggccaacttcctccttctgttcttggaatagcaaccgagacaaaaagcagttagcacgagtggcttgggcttgccaacactacaattcaggacaaaacccttgtaattctccacagtggtggggtttttaaataggtcctcgtgccgaattcgccacccaggcctc

SEQ ID NO: 138191 - DNA, 346 bp, Homo Sapiens
  misc_feature (11)..(11): n is a, c, g, or t
  misc_feature (21)..(21): n is a, c, g, or t
  misc_feature (35)..(35): n is a, c, g, or t
  misc_feature (87)..(87): n is a, c, g, or t
  misc_feature (291)..(291): n is a, c, g, or t
  misc_feature (321)..(321): n is a, c, g, or t
cgctcctagancctagggganccccccgggctgcngggattcgggcacgagacaaaccccaaagtaagatgaattttaaaaatacanccctaagcacattatagccaaactgttaaaaccaaagacaagtgaaaatctttcaggcagttagattttaaaaaaagcatagtagttgtaaaagcaacaaaagacttaaattcactcctcagctgagatgatggaagatgggaagacaatgaaataacatttaaaaagtgctgaaagagttgggtgtggtagctcacacctgtnatcttcaggctacatgggaagggtgaggcnggagttttcactttgaggcccgggg

SEQ ID NO: 138192 - DNA, 492 bp, Homo Sapiens
ttcaatagaaacactgtttattcaaatgacaggcaggaagcggtggcagcagcaggggggaaagggcagccaggcaggggctgggcagtgcttccctgtgtcccctgcaatcctgcttggacagccacccggctgttggcatcagggtcagaaatactttccctcctctccctcctgccccaaactgaataaatagcatccctctccccacgagagctaggggagactcatgtgctgagtttggtgccccagtcacagcccagagtccggtgagggcagaagttcaaaatggcttgtagggagtagaatacaaaactgttctactcattctcaccttcctcttcctcctccctgccacactcccctcccagcctggtcccaggacaggtggtcggtgagggtctggagcgggagaattgttgcctagcatacactgagctcaagttcacaaggccatccagcctgtcacccatccgggttgaccaccaaaga

SEQ ID NO: 138193 - DNA, 438 bp, Homo Sapiens
tcttggctagcagatgctagtcccaggaatgtcctccatgcctttaagctaactgcaaaaacagaacggtgtgagccagggcagaccccatactcttttatattctacctataagggaaaaataaacctagacctggaaaacaatgtgtaaagtggcaaaagccaatcaactcatttaaaaagaaaaaccctccatccaacgtcacgaagctgctgaatattaggttcctgggaagctgtcccagcaacctagatatgagaaacaacgcttgctattctggggtgagaagtgaagttgcctttcactcgggactgtcaaacacagtctataaataccagcaatgccccttgtgaactacgggctgagctcaacccaaagaaggtaagtgtttcccaaaggtcacacagcaattccaggtcccccagaagtagcccttc

SEQ ID NO: 138194 - DNA, 510 bp, Homo Sapiens
  misc_feature (470)..(470): n is a, c, g, or t
cgctacagagagtccccttggaagcgagacctcgcaaatgtgagacacacaccgagagcttcaagaactcggaaatcctgagacctcacagagccaaaccattatgcatgtaatgaatgtggcaaagccttcagttactgttcttccctttctcagcatcagaagagccacactggagagaagccctatgagtgcagtgaatgtgggaaggccttcagccaggagctcatctctcattcagcaccagaggattcacactggagagaagccttacaagtgcagtgaatgtgggaagagcctttcagccaggaatgccaacctcaccaaacaccaggcgaacccacaccggagagaagccctacagatgccaccaattttagagaaagccttcagtgactgctcagctcttgttcagcatcagagaattcataccggagagaagccctacgaatgcagcgactgtgggaagnccttccgtcacagtgcaaacctcacgaagggggatgacac

SEQ ID NO: 138195 - DNA, 405 bp, Homo Sapiens
aactgtctataagtatttttctccagaaactgggaataccatagacataattttattaatcctcaccacacatctgtgaggtagtatggggtgaggtccatatgaaagcctcaccccccttttagaaatgaagacacagacgtgccagggagggccggaggtttcactggggccacaggaaaagaaaaccaagttgaatcccgctctttcatcatctgcagtcgatggccgagaagaggcggcttgcctccctcctgctctgacattctctctaaagtgttatgactagacctatccatggataggatgtggttgtttagacccactggagccatttcctttaggcagacctggacaggtgctctccctgaggtcaagacgcccattttcggcatatatttcaga

SEQ ID NO: 138196 - DNA, 784 bp, Homo Sapiens
  misc_feature (630)..(630): n is a, c, g, or t
  misc_feature (666)..(666): n is a, c, g, or t
  misc_feature (678)..(678): n is a, c, g, or t
  misc_feature (688)..(688): n is a, c, g, or t
  misc_feature (704)..(704): n is a, c, g, or t
  misc_feature (715)..(715): n is a, c, g, or t
  misc_feature (764)..(764): n is a, c, g, or t
  misc_feature (769)..(769): n is a, c, g, or t
ttctttcaagtttagtggagactctttagcttgcggttgctctcagaaaccacatctgctactcgtgaaccaggagtttggggatggccaggagaaggccagtgttgattctgacagcaatcttctggctctcattcgagatgtcttactttcccagtatgagcacattcttttagaacctgacccagtaccagcatatgctctgaaactgctagtcgcgatgactgaacacaacccaactttcacaagacttgtggaagaaagcaaactgatcccactcatttttgaagtaactctggaacatcaggagagcattctgggtaataccatgcaaagtgtgattgcattactcagcaatctagttgcctgcaaagattcgaatatggaactactttatgaacaaggacttgtcagtcacatctgtaacctgctcactgaaactgccacactgtgcttggatgtggacaataaaaacaacaatgagatggcagctccactgctcttttccctgcttgatattttgcacagcatgctgaacctatacctccggtattgtacggctggctttgcaggcccagaagtctggctcaggagaggaccctcaggctgcagaagacctgctggctgctncaacagacctctggacaggacctggattaggcctgncttcatttccantgctttcctnaatggaaggatcctgnaggattttttngattgttttcatcccaaggtggcctgttcttattaattggttttcaggntgttntgggaggggggaaaa

SEQ ID NO: 138197 - DNA, 1244 bp, Homo Sapiens
  misc_feature (44)..(96): n is a, c, g, or t
  misc_feature (682)..(682): n is a, c, g, or t
  misc_feature (684)..(701): n is a, c, g, or t
  misc_feature (1140)..(1174): n is a, c, g, or t
aatatagaacagtcaggttttattacttttaagtaataaagagnnnnnnnnnnnnnnnnnnnnnnnnnnnnnnnnnnnnnnnnnnnnnnnnnnnnnacaacatacattaagtcgtgaatcagatgttaggggatgtggagatggaaggaaaattggtgacatcacaatatttttacaactttacaacaaatataaatctgagtttgttgcatctaccagtgtctagcaagggtggaaagcaaaggcacactcgggtttatggaccctccccccacacacagtggggaaaaaaaacctggggagaaatacttaaatgcagaagacccagcctcaatacatgtgggtattttagggttaacaccagaagtgatgggttgtgggggtgtaggaatgtggatgtaagttttgacacaggtctccttaacagctgaggcagtgatgcctacaaacactggacaagacagccgcttacgtcaatgatgggtgctgcactgccagtactctcgggagtcaagcatgggaaagaagggggcagggggatacagacccatcaccttcctaatttctgcatttctagagaaaattcaaggaagaaaacaatatttcaggttctaggaaatacttcagggtttcaggagacagagttcacaggatgtgaacatggattcccttaccaaagccncnnnnnnnnnnnnnnnnnncaacaacaaccacctactcctaaacaacagcaaaactaatggacttttggaacaaagggctctcacccaccctcagctaagtactcaggtctgaaggcaaccacactgattatggaggctccactttttcactatccaactcaaaactgtcattgtcagtctttttttgaattctttttaaagacaaaactaaacccagaagatcgaactggaaataaaagcagacaaagagaccaccaatatactgtttaaaaaaacacaacacactgctcatggtttacagtatgtggacagttcctttgttcatgatagagtaaacaaagtcccttttgtgtgcttgagcaaatgaaaaccaagaggagaaaaacacacaccacctcccatcccccccggccgtaatggccgaattcccgggcatatgtccggtaccgtcgactgnnnnnnnnnnnnnnnnnnnnnnnnnnnnnnnnnnncgccgcttcctcgctcactactcgctgcgctcgtcgttcgctgcacaggctacgcccaataagtagtgac

SEQ ID NO: 138198 - DNA, 854 bp, Homo Sapiens
  misc_feature (682)..(682): n is a, c, g, or t
cagatttaaagagtttcttcctgttaattcgaagctcactgtgcctcttgtttccgagggaagaaggactgattaagtcatctaaatggatgcaatactgaattacaggtcagaagatactgaagattactacacattactgggatgtgatgaactatcttcggttgaacaaatcctggcagaatttaaagtcagagctctggaatgtcacccagacaagcatcctgaaaaccccaaagctgtggagacttttcagaaactgcagaaggcaaaggagattctgaccaatgaagagagtcgagcccgctatgaccactggcgaagggagccagatgtcgatgccattccagcagtgggaagctttgaatgactcagtgaagacgtcaatgcactgggttgtcagaggtaaaaaagacctgatgctggaagaatctgacaagactcataccaccaagatggaaaatgaggaatgtaatgagcaaagagaaagaaagaaagaggagctggcttcaaccgcagagaaaacggagcagaaagaacccaagcccctagagaagtcagtctccccgcaaaattcagattcttcaggttttgcagatgtgaatggttggcaccttcgtttccgctgggtcaaggatgctccctcagaactcctgacgaagttcagaaactatgaaatatngaatatctctgcttcaaaaaatgaagaaaagcaagactgtcccctatgctgccaacatgcaggcctttggttatggtctaaaaatgtcatgttttatggcatgtctgggaaattgctgagaactaattgaatcccctccatccctggaatcaggtccccatagggccttttt

SEQ ID NO: 138199 - DNA, 1193 bp, Homo Sapiens
ttcatttatgaactttgggaaaattatttatttctccccacggggttcagacaagtaatttcacatttcattgtaagtcaagggtaagaaaacattttttgtacatccatcactaatagagatcacagtatgtcaatgaaatatttaaatacactgtacagagattgctttttaatggatttctataagtagtattaataggaaaaagcatataatacaatctactctgtatctaagagctttaatttattcaaatattggaagaaattcatcttctgaatttttcttatttaaaaagcattatgagaactgattcaaggatggaggaatcaattagtactcagcaattcacagacatgacataaacatgacatttttaagacataaacaaagactgcatgttggcagcataggggacagtcttgctcttcctcattttttgaagcagagatatttcatatttcatagtttctgaacttcctcaggagttctgagggagcatccttggaccagcggaaacgaaggtgccaaccattcacatctgcaaaacctgaagaatctgaattttgcggggagactgacttctctaggggcttgggttctttctgctccgttttctctgcggttgaagccagctcctctttctttctttctctttgctcattacattcctcattttccatcttggtggtatgagtcttgtcagattcttccagcatcaggtcttttttacctctgacaacccagtgcattgacgtcttcactgagtcattcaaagcttcccactgctggaatggcatcgacatctggctccttcgccagtggtcatagcgggctcgactctcttcattggtcagaatctcctttgccttctgcagtttctgaaaagtctccacagttctgggaagagagatctcattttgtaagcttataggagcaaatgatgctggaagtcttgcgagacattctgatttaactcctgggtcagctttggggttttcaggatgcttgtctgggtgacattccagagctctgactttaaattctgccaggatttgttcaaccgaagatagttcatcacatcccagtaatgtgtagtaatcttcagtatcttctgacctgtaattcagtattgcatccatttagatgacttaatcagtccttcttccctcggaaacaagaggcacagtccc

SEQ ID NO: 138200 - DNA, 539 bp, Homo Sapiens
  misc_feature (511)..(511): n is a, c, g, or t
  misc_feature (517)..(517): n is a, c, g, or t
tttttttaaataaatatcttgtattacagctaatcatcttgtatagaaatacatttccttttaatgtcaggattgctaaatgtctgtttatctaacaggacattattccaattgccctacaccaagctcttagaaatgtagctttattttatacaatttgaattatgagagttcactttcagacgaagcacctaacaggaaatctctcaaacacagaaatgctggtttagccacaagatcaaaggaaaagattgattttgtatgtccgtgcagtttttgagagtgcgtctacacattttcgttttcacagcaatctttgtgtttgaagggagttctgatgtggaaacagcttgcagggttaaacctggatggcgcccctgtgatcagacattgctctgttgtaattaaagtgtcctcagttctctttccccttgatcctcctgcctgtacttctcctcgagttgctgtttctcagaatctgcacagtaaaatgtgccaatctggggctttnccgaanccggttcaaactgactgaaatc

SEQ ID NO: 138201 - DNA, 350 bp, Homo Sapiens
  misc_feature (301)..(301): n is a, c, g, or t
  misc_feature (305)..(305): n is a, c, g, or t
agtacagtgctgtaagtaagctcgtgttggtggaaccaagtccatcaaatgacataaactcaagctgataaaagtctgctgccctcagattcagtctccatctgcaagggaacgtttggtgtggaggccaggaaataatccagcctgtgtcttcaggctgactccagacactcagcatattctgcctctgcaatggcttcgtctgctgctgctacaactgttgctgctacctgcaaagagatgtgtccagcaacttcatcactgggggaccatgagctgttcttcacattttagtgtcctngagnggagtgtggatctccggcttggggactgctggctcgctctggacc

SEQ ID NO: 138202 - DNA, 802 bp, Homo Sapiens
  misc_feature (40)..(40): n is a, c, g, or t
  misc_feature (55)..(55): n is a, c, g, or t
  misc_feature (75)..(75): n is a, c, g, or t
  misc_feature (93)..(93): n is a, c, g, or t
  misc_feature (685)..(693): n is a, c, g, or t
caataaaaagggtcccaacaacagggtaaaggcaacaganacagaaggagacccnggttgcctaatgccttaacncctaacatggaataaatntcccaatgcatatccctatgtaaacccataagtgaagggaaataaacctcgtcatgctccatgctgtgaggtgtcctttggatattctgtgatgacagagaagcctattttgttttgttttcagcatctttctctgatgtacgtttttaaggattttgtaagagctgttttcagtgtttaaattagtgctatttttccttgtttttaaaaatgaatctcgtactgtatcttactatgtccatacagatgttacaaatcgacagttttattcttagactcatgtgatccaagctgtatataccatatataaacattttacatgaatcatttagttttttaattcatttactaatgctataaaatttcctatattaccccagtaatttgcatcagctggtttatatactaaagcaacatgttttgatgagtttcttacatccttatcgaggaattgggttaggaaaaaatacataattgtaaaactgagtttgctgtattatactttttttcttgagtattagttgtattactaatcatatgttgattaactgtctacttaaagtcaaggtacctgtatttttaatccactaannnnnnnnnagctgggaaatagaattcaagtcttttattagactaacattttttgagaagtaaaattgacttcatatacaaagcctgtaattttaggcgaaatggaagcagaaatcta

SEQ ID NO: 138203 - DNA, 372 bp, Homo Sapiens
  misc_feature (98)..(106): n is a, c, g, or t
taacataccaggttagttcaaactgattcaagaatttggctgcggtgaaatcattaaggaaaaccttgaacactcaaagcttcaaatgtatccagggnnnnnnnnnttctttgacagtctacataacaactattgcatatatagtgatgctacctgtcacattgcaaggcttacaaatatatatatacgggccttatccagctgtggggttctgttctgtgagaacatctcttcatggtttgcaagaatcttcagcaataaaaaatagtcttggatttaagcgctgatatacctaaagagaaattctaggcttaagtgtaaagaagaggaagtccaaccatagtctcatgtataacagttgtttttatactt

SEQ ID NO: 138204 - DNA, 456 bp, Homo Sapiens
  misc_feature (354)..(354): n is a, c, g, or t
  misc_feature (364)..(364): n is a, c, g, or t
  misc_feature (393)..(393): n is a, c, g, or t
  misc_feature (436)..(436): n is a, c, g, or t
tgagtaaataaaccttttcaaccctctcaatgcctgtgtggcttcatccacattgaaaccagttttgagtaggacgtttgatctcaccttctatggtgcaagcagaagacacaccccctcagacaggccttctctaccaatcagcctagaactttgctcacattttcctgtctcatcaccattttccagtctcatcaccattttcaacatcatagtcttcaaaaaagtcttttaacacttcaatgtgccagcactcagcctttccatgggagtgtaaaactctaaggaaagacttcggaggcaggcagagtccttggggtctaaagaggatcatgcagacagggaaaatggggngtcacaggantaacctaatgtgggcaggggggactgggngggcctccccaggaccctgaaattcctaccatcaaactctcgnggccgaattcccggcagttt

SEQ ID NO: 138205 - DNA, 307 bp, Homo Sapiens
  misc_feature (279)..(279): n is a, c, g, or t
  misc_feature (282)..(282): n is a, c, g, or t
gatcctgggacctcccagcgccctgcagacgtgcacattcccagtccgtgccctagccgtcctgggtccccttacaagcccgggtctgccacttcacccttgtttttccccattctccgggtccacatttcatatgcccctgccctcattcccttatgattccctagctgctggttccagagtcttctgggcttacagtctcccggccctcggggagtttccgaccccttctttccaatcatcccctttacccgcctgccctcagccccgaggaccccntcnccccggcggctcctgggcgccggtg

SEQ ID NO: 138206 - DNA, 509 bp, Homo Sapiens
  misc_feature (28)..(28): n is a, c, g, or t
atttccgggctggctctgacctacttgncccactggagaaggaagccagcactgaaaaaattcaagcttccagtcacacggaacctgagaatattctctatgacagcagtggctgtgaagctgtttctttaaagtaaaaccccttttgaaggttagtctggggtgacctttactgttaccatagggagtagattttgtttcttgatggttcgttgagtggtagagaggttaaaggtagaactaacaaatgtaggaactaaaaaagcatctgaaacttttagcaaaccagtaatatttagagcttctgcccactctgggtaggcatttttatcttgtatacccataccagcttttcacatcctgtttcttgagaatacataaagagcagatttctccacattatcaggaaaacaatttgaagcacaggtcttgtgaattgggaagaccactagcattgccattagctgcttatttgtgtgtgtgttggaggatggattataatccaagtg

SEQ ID NO: 138207 - DNA, 495 bp, Homo Sapiens
  misc_feature (234)..(234): n is a, c, g, or t
tatgcgcatgttgctcatgttatgtttgcagttaagttgagctgccctaccgtgtgtcaagtgtgcttaactcgggcgtgctagcagtgaacaaagtgggatggctccatattcattctctatggaggtagcaaagcacatggcgacatggaggtgtcccagtggtgattccctgtcatgaaggaaagcaagacagctcacagaccagcggcatctgagcccttacctccgtangagagaggcccgtggcctgaggtagtgcagaggaggatagtagagcagggccctgacttgtaacgttcatgggtagccagggtgtatgtggccagagcagagtaagcatgggcgaaagtagagagctaggggttggaggggcatttccaggtcatgtggggcctcgggagaccttgtcctttcccctgactgagaaggagccaccggagggctctgagcagggtagggctctgatcagatggatattttttaaagatcccc

SEQ ID NO: 138208 - DNA, 240 bp, Homo Sapiens
tctgtcgcccaggcggactgcggactcagtggcgcaatctcggcctggcaacaagagcgaaactccatttttcctcaccctacatccaatttggtagcatccctggtggttttaactccagtgatttcttggctttgacctctttgcttcacgtttattaaatcatcatgatcatacatccacattattggaacagaattttcactgggtctcgtcagttcaatgctcctcttcaatcca

SEQ ID NO: 138209 - DNA, 567 bp, Homo Sapiens
  misc_feature (162)..(192): n is a, c, g, or t
  misc_feature (384)..(400): n is a, c, g, or t
gaaaggcaaattgtaaacttctatggtttaacttcaccagaagggtaaagggctccccacctgccaccttgttctataaaaaaagtatactctgattactagaatggatttttaaaattcaattcaaagattcaataactatcaacatttctaaacactgannnnnnnnnnnnnnnnnnnnnnnnnnnnnnnaatatcctgcaggtaataacactgatttttctaatactcagaaacatctacttagcagttgtgatactaatttgcaaaatgtaataatgttatacaaatataagatactactaaatacatagtagaaataattgcatgattcctgatatttatattcaaggtataaacatgactgatttcgctgatactacnnnnnnnnnnnnnnnnngctgctatgtaaaaaattaaagaatatctcaattagatatttttgttcccaatctctttcagacagatctatgaaataatatagaatatactatcaatatgttctttcatatgaagtgaaaaaaatgggatttaaatagtgagataatttctattttttactttttt

SEQ ID NO: 138210 - DNA, 951 bp, Homo Sapiens
  misc_feature (315)..(375): n is a, c, g, or t
  misc_feature (831)..(865): n is a, c, g, or t
ttagaccccactaaagaattacttaagttggctgtctttcttgcatgtggcaacaatagtactacttctgcatgtattggtacttatttcacagcaacacaggaacacttgactttgacattgttaagcactgaagttcaaaactagcaaccatacacacttactattaacatcttgtgttttttcctttattcataggtttaaaagaagtgcttagctacctgatggtgacctcttacacttgttcatgatcgacctggttgtcttgaaaaaagaaataatagtttctattttcgcttccatttccctctcagnnnnnnnnnnnnnnnnnnnnnnnnnnnnnnnnnnnnnnnnnnnnnnnnnnnnnnnnnnnnnacatgtttttcttcttgtttggggttactcaactcaaaaacagtattttatgtccccaaatactgtttaaatttctaccataatttatccccttgaatcatcaatagtctttttcgtcaagcctaccattctctgaagccactacaatcttgtcctgtgacacttagctttagcttttgaaatggaacagagaagagacaaaagcttatgaattgaagccacagcaggggcaaggatttagcctccttttctgtacattctcaaagctgttggctgtagggactaaaatacacattctggggcttttctactggattccagtcacgtaccatgtactaggagtaaataaggacaacaggaaatcaggaaacaggctggaattcactcttagaatttcttccaaatcccggccgtaatggccgaattcccgggcatatgtccggtaccgtcgactgnnnnnnnnnnnnnnnnnnnnnnnnnnnnnnnnnnncgccgcttcctcgctcactaacttcgctgcgctcgttcgttcgctgctaacagagtagcgccctatagtgatctatcagtttcttt

SEQ ID NO: 138211 - DNA, 1055 bp, Homo Sapiens
  misc_feature (661)..(661): n is a, c, g, or t
aacatagtttgaaccaacagtaccctcagttatacaaaacaatttcagcactgaggataggtgattcaaaaacactaaaaggaaggcatcaaattagactatgtctttttctcctcaaaatatattttcaaaactcagaattcagaagactgatactttcagaaattcctttgcttgagtttcccagatttttgctcagaaattgctactatttattataaatgttttaaaaaattcttcatcttaatgcaaatgaccagagcagaaaaactgtgacgtggacaacaggttcgaagacccaactcacttagcttataaatttataatgtagtcctgcaagacaatggtctgttagtctagaggtcccttgaaaaaataagtctgatgtagccttgttcaccagccaactgatgtgcacaaaagggacaggctgcatgaaaagtatgagtaccatgaggaagtgggatctgggaccaataggcagttgtcttttctgaacacacatgcccacacgggctaaacgcatgggttggagggccggcgtccacataaaatccagcttcacatccaagccacagaggaacatagggaccaacagacctacacataggacattcacgatcttttccatcacgttcttctttgtttccccagttatgantagccatgtacatggccgcagtttagatatacccatggttgtttttcatctacaacgtctttcctcttcatactaggaaatgctagtgtgttgaaccctacagggcactgaggtcgtgctgcattgatttcctgtcttaaagcttctaaatgcttcacggtaggagtgtgggaaaggccttctgcagtacgccataacaatgttgcaccacagaggtcaattaacgagccatcttgtaactgattggtttcaatttccaccatttttcctctctgctgagccgatctggtttcacgtaggctaaatacatttccacacaccgatatttctctccatattccaggcttggagtcttctgtgaacccattgcgtggatgcatcacaagaacacccc

SEQ ID NO: 138212 - DNA, 1427 bp, Homo Sapiens
aacctgtggcttccaaatcccttatcttttcatttattcataaagatttctggtcccacccatgttccaggacaagttgtatcaatataccccaatcctttctaacgccctgagttctttcttccacatatcttctaattcgtggtctgggagggaaaagggtagtggagttctcaggtggatgacatctccaaaggggagaggacaaaggcctctggcttggcttcctgcttcagcactccagtcagcaggaactcaggcgagaggaggggcagcccaacccgtagtggaatggagcaatgagggaagtcctgagggcatgtgatcacaactctctgaggcttataggaccgaggcatgctgggtaggtatgtgcctccacagcagctaataatctctcccatctgaggtggtggtggctggactccaggggtcacatagatctcatagccctctagcagccttcgctcccgagccctgctcagtgcgtcttgaaggctaaagccaaagttcttctcttgctcagggtcggtcaccacatattcatccgggggtaagaagaaaccagccttgcgggactgatgcagccagtccagggacagaatgggggattccccgcccccagggcacacaggaacttgactgtccggcggatgcgatcagtgaccaggtgggaagcctctgccgctgaaccagccagacttccccccagtgccagcacagcccgctctccccgagcatccaccactcctgtgaagagcactttgggggctgttgattcttggttaagtttggtccgtcggaggctgcggcttggtattctgttgggctcctcctctgcctggtctctctttctcttgcctggttttggagtcacgacatcctgagattgagaaaaatcttggtgggagtttcagagccctgaagtcatttttcccagctttgtggtcccaaccctctcctcacctcttccttccctggcttctctgcagtatcttcttcctcttccttgataatcactgtcttctgggagacttcccctctttggggctgtttttgatgtggtggtgaatccatggtagctaaagacctcttgcggctttgagaggccttaggctggagctccggggtgaacctagatctacctgctggttccaccttttggatctgggaggcatgaattggtgtctcaagaagctggggagaggcaggctcaggaatggctgtaagggattcagctgctctcactgctccccatctttggttccttgaggcctgggatttaggttccaagggtgcagagcaaggcttatggtcaatgggagctgcgagggagccagggttcccagcggctctctgcctcttgatgcaactgggttgagtaataggctcaggggaaataggctggtctgtggtgacaggagatt

SEQ ID NO: 138213 - DNA, 853 bp, Homo Sapiens
tgccccaacctccggggcccccaggggtttctcccacccagccctcctaaagcggccggggaaacccaaggcgcaactccaccaacgtctgtggcctaaaccctggcaattccccagtaagaagagagcttctgcgacaatgtcggccccaggctggctcccggaactgcctgggggcttcaaaccggatacgccctgccttgggcgtgccccaaaagtgttgggggattacaggcaatgagccaccaatgcccagccttccaatggtttgtttttaacaaataataagtcctagaaccttcctgatcaaaggacatgttactccaagataaaaaacagtccagcagagcccccttctcccaagatggggcaaattcatcagagcaaattaactgttaacagacatggtaagatagagtggctggaagtctgcagtttcatcgtaacacacacagttaccggacaaaactacccccaggagtctcactgggacacattattttggaattccagctcagtaatcatgtcctttggaattcaagggcagtttctttcctttaaggataagtaggaatacagctcttccagtgtctttctgcagaaatcctttggaaggattaaaacctggaaactggcaagttcttcctttccctcactccccatacacagactaacgacatcttattggtgtcaacttcctagtagctcttcaggtggcccatctgctccacttctaccagggcctcagtatagagcctcgctccttgtcttcactgggtccctgcctttgccccaacacctcccccggccgtaatggccgaattcccgggcatatgtccggtaccgtcgactg

SEQ ID NO: 138214 - DNA, 618 bp, Homo Sapiens
gttcaaaatattcaagaaaggatggtttcgcaggctgcatggtctcatcccttcttttcatagttccttcctcttcctcatcctctgcattgatcaccatggtgcccagttgtgatggcaacgtgtcatcgtgctcaatcatagtattggctccatcagtcatggtgctggctactcggacagtgcccatctcatcacccactgctcgaaccatcgtgccagaatccatttcatcctcttctgagttttcttcatcgtcctggtccacttcccgctgctgggattcctggcgtttcagtttcacatccatggcttcattaattaagtctcgcagtattgacactcctttggcactcctgacaaatgggtgctgcaggagctgagtggctgtggccctctgctcagggctctttacaagacactgtttcacaaaatctgtaaagttatctgaccatagctctggttttcggaatgtgggaggaggatttgtaggaatcatgaagattgccctcattggatggatatcagcataagggggctttccttcagccatttctatggcagttattcccagggaccagatgtctgctacacagttgtatccaatttcctgaatca

SEQ ID NO: 138215 - DNA, 1312 bp, Homo Sapiens
  misc_feature (1193)..(1227): n is a, c, g, or t
gttttccactcagcttttgttgccgtttgtgtgttctcttgtttgacattaatcagaaatatactgtgactccctagaggctatgtgtcattcagatttgtaactgctacatgtctgtttgattgtccttcatctatggtatccataacttcatctggactacatgtcagacgctctgtgcacccctttacatagggaactcggtttttgtcttgcatgaactgaaaggttggtctttgaaacatctaacaggtcccttatcttatccaaatatatttcaaaatatgaaaccttaatatgaaattccaaattttcatccatggagtaaatataattaaaaatatcttggcactattcttggaaataatttcccatgccttcctggatcatgaaggtttaccctccattgtgtgtgtcttcccagaggatgtttgtccatatgcaaatattgttccattatatccttcaagtacatctttaacaatcttctttgcacagtcattatacacttgctcttgagatgtgcttgactggaacacccgatcaaatgcataaggcttggacgcgatcacgaccgtgtcttctccctgaaacttggcgatgtacttgtcgccgcggttcacttcagactcgttgagaggtctgaagcgacacatcactttgatgttgcactcggccaggtccgccatctttctcgcagccgggtccggcggccgggagccactccccgccgctcagtcttgcagggaacgcgccggacctgagggcttgtggtcgcgagggccgtgagaggcagcagtcagctgcgccgcgctgcgcttccccgggtggaggcggccggggagccgggacttgaagagccggcgccggcagccgttaaccctaatgctcacttccgatccatcatggcagccatggcggcggcagcggcggcggcaccggggagagcgtccgcggctcctcagcgtccccctttacggtctgggcggactgcgggggctggggaggttctggggaccgggagagtggccaccttcttcctcctcgcgaagagcaggccgggcctacccgtccgcccgctctgccgtccgctggccggccgactgctgcccgatcactcctgaggccgccgttgggcgacccccggccgtaatggccgaattcccgggcatatgtccggtaccgtcgactgnnnnnnnnnnnnnnnnnnnnnnnnnnnnnnnnnnncggccgcttcctcgctcactacttcgctgcgctcgtcgttcggctatcacgaacggctagcgccctatagtgatctatccagttt

SEQ ID NO: 138216 - DNA, 453 bp, Homo Sapiens
  misc_feature (332)..(332): n is a, c, g, or t
gtaaaagtgtgcagttaacaaggctggatgtgaattttattctgagggtgatttgtgatcaagtttaatcacaaatctcttaatatttataaactacctgatgccaggagcttagggctttgcattgtgtctaatacattgatcccagtgttacgggattctcttgattcctggcaccaaaatcagattgttttcacagttatgattcccagtgggagaaaaatgcctcaatatatttgtaaccttaagaagagtatttttttgttaatactaagatgttcaaacttaggacatgattaggtcatacattctcaggggttcaaatttccttnctaccattcaaatgttttatcaacagcaaacttcagccgtttcactttttgttggagaaaaatagtagattttaatttgactcacagtttgaagcattctgtgatcccctggttactgagt

SEQ ID NO: 138217 - DNA, 351 bp, Homo Sapiens
  misc_feature (68)..(68): n is a, c, g, or t
  misc_feature (309)..(309): n is a, c, g, or t
ggaggtaatgagcagattggtgggggcgcgcaaagggaagagcgaggtggattcagaaatggaggggnctgtaaggaatcaaaaaaccaaggctgaacccagataggaatatcctgggctggttttcctagataaggattggcctagacaaaagcaggaagaggaggcagcgagatgtcaaaggcaaagtatgcttgtatttgcctattaggcagatagaaaactgatttcgctgtctctggctaggtgtgttgaaggtaggtagagactgggtctctgtagggtgtatcagaggatggctagatggcntaaatagcatctctacacattagatcccagggttaagggaag

SEQ ID NO: 138218 - DNA, 785 bp, Homo Sapiens
tctgggggggctgggacaacagggcggggggcctgccactccggcggtcatgaatcgtgcctcggggaccttccattttaaaaaggggccccggtacagggcgcccaaaaaattaccgggggggaatttggcccaaacatcttcgggttccccccggtgggggtttttggttttttcgcaaaaccccgaccccttaaccccggccccggggtttccctagggagaacagggtagggccctgttcccctttccctactgggggcccgcgcgcccaaaccgaatgttttggaaaggggtgttgaggggccgaggggggcccgacatttttttcggggggtagcctggttttctggtgggtactgttctgcagttaactccacatttgccacaaactgtgttcttaattgttttggccctttggccaaataagagtgtagattttgtttcagactcatcgtatgatgatggagagcagcaaattacaatagtggttctacagttgccacctaatgaatcttgaaggattcttgtcattttactatctcgatatggaacatatgtactaccctcagccaaagcagaaataacatttccaagagcagaaagtgacttgttgatgtttttagcttcatccagcacagcaccttcagctccagttttactaaccttttcactaccagctaaatcaaccagataaagttttccactcagcttttgttccgtttgtgtgttctcttgtttgacattaataaggaatatactgtgactcctagagctatgttccc

SEQ ID NO: 138219 - DNA, 630 bp, Homo Sapiens
  misc_feature (69)..(120): n is a, c, g, or t
acaggtctcaaggattatgagctctataggtaggagtttgttacacactgctttgactttgtggttacnnnnnnnnnnnnnnnnnnnnnnnnnnnnnnnnnnnnnnnnnnnnnnnnnnnnctgtttaattctgaatctttctttcctctaggcttctttgtttataagttgtagtcaatatagaataatacagggtttgtattgtttgatgtgtatttatctgatctccgtctgcaggaactttcttggagcaagggcctaactttgtactattatctcctccacagaatcttagttggcatttgtgtttgatctcttgatttagatagacacgagtttgatttttggtttagctgtttacttacttttgtgacagtaggtaacttttctgaaccttggtttctctgttttaaggatatacgagatagtgttggttgaggactgtgatggttcattttatgttgtaagcatgactgggccacaggatacccagatcctggtaagatattatttctgactgtgtctgtgagggtgtttccgaagagattagcatttgagctagtagactgacgtagggaagacacccttatccatttggcagatattgtccatccttttaaacctcggtac

SEQ ID NO: 138220 - DNA, 667 bp, Homo Sapiens
ttttttacagtttatgtaatattattttattgccattttcattatattcagtagaaatagtagtactagaaagaagaaaatgagattttaggaacataaaactggctttagatatttgaaaatgagaggaattttatgtttacagatttcaaaaggctttgatattatatttcaatgcaaacagtaacttatcgtatgatttggttcattaataattggagtgatgttaagatttaaacatttcatagaatctcaaatatgacttcaggtaccacattttacagggaaattactgtgattcacccactaaatgatagtgagtaaataataactgggatctgtaactataacctaggagtcttgcgttctagtctaataactgttctcaaaaatatcattaactttttgggtataataaacagcaaactgcagaataaattgcacatactaaagagtaagcaacaaaacaaattgcacatgctgtgcagtatgcaaagccacagaattatcaatctgagaaacaactgaatacaaaataaaacacacagttgtgttttgattaaggctccttttaggcagtttgcttcagccaaggctgtgtaacttctttgagtttccatgtactttataaggctctgtttgaattcctttactctttcatctgatc

SEQ ID NO: 138221 - DNA, 385 bp, Homo Sapiens
tccttgctccctcccttcactacctcacaaggatattgagggtaaaggagaaaaataatggggaaaagtgcttgtgccccgtggatgaaaaagtgcctattaaaagtcaaaggagtgttcctgtttcaattccatagtatgatcagggaaagtgtaactgagtatactttgttgacttgggaaacctggagcactttctttggttggttaacgaagcatgcagatgtggaagcagacgttactattatccctactatggtcttctgtcatactgagacaggctgttttaattacctggttttacataggaaagaagaaatattaaggcttaaagtttgtaatgatcaatggctcataattcattaaatcttttcatacaaggaaa

SEQ ID NO: 138222 - DNA, 441 bp, Homo Sapiens
tttactttggccttttgagacaagaaattatttctttatattttctctaaattctgtttgaaaactgaaccttcttctttagatcatgtccctctcctgtcatatttattcagtgacagttaggggaggctggtagcactttccatgttcttcccagatgtctccttaggcagatccctgagatggtgcagtgccctttcagtttccatgttgtggccatagttttcccacagtccctcagcaagtaactctcaggaccttttctccagtttccaatgacattttctcaccgtccttcagggccctgaccaagagtcttgatgcccttccaggttgcatgaatggtccccttgaggcccagttacaggtcagcctcacagtcgtgtcacatattgtagcttctgattaccacagcagctcatttccagctgccatattctg

SEQ ID NO: 138223 - DNA, 892 bp, Homo Sapiens
  misc_feature (704)..(704): n is a, c, g, or t
  misc_feature (839)..(839): n is a, c, g, or t
  misc_feature (843)..(843): n is a, c, g, or t
tgtattttattataaaagtgtgctttattgtaaggaaaatttaaatataaccaacaatactgaaaataatgtacgtggcatttatagccttggtcaaagttctttattaaacaggcgtttgctgttccatgaatagttaacaattagtttatgcaacaaaatagataacttgaaaaagtgagtaagaatacagaatgatgaaccaggaatctggagttcttttgtgttttttcttgtttaacagacatggcttttaaaataaaatctgaaatataaaacaagtcatcttcatgtagagagctctcttttcctacaagaaggttttgcaaaaatgttaaacagtgttctaaaaatgtggctgaagttatactttacatactttaacttcttatatatacattatccaattaacattctaaccacattttcatatacaagtgggaccataaacattctctagtaagactacactagcacagagtaattttacccatgtatatatattcatttgaaacctgtttcccaaaatgaaatcactcatttaaaagcaaacaactggttagaattaatgtctctagacactgggtcatggggcctagaaatcatgtaagagtatattgctttggttgaatataattaaattcatcttatgtggcagcatactgagcatatcaatgaacaatgaaaatctagtacatctgagntctttctgcactaatttcaactatgagtctacattaaagcaatggcagggccttatggtatatatggtaaggtcagaaattcattttgtctttatatagggttatgctcataaaaatttgtttctattcctctanaggntgtttttaagaattaaaaaaaccaaacaaacccatattggctgctgatc

SEQ ID NO: 138224 - DNA, 402 bp, Homo Sapiens
  misc_feature (49)..(49): n is a, c, g, or t
  misc_feature (154)..(351): n is a, c, g, or t
aataagatagaaaaatgggaaaatggggttttcccataagccccacccncaaatattcagtttttcccttgaattttagggtatacttgttttcccatcactaaaagtttttctgaacaatattattctaaaaatactggcccaggcgcgggtnnnnnnnnnnnnnnnnnnnnnnnnnnnnnnnnnnnnnnnnnnnnnnnnnnnnnnnnnnnnnnnnnnnnnnnnnnnnnnnnnnnnnnnnnnnnnnnnnnnnnnnnnnnnnnnnnnnnnnnnnnnnnnnnnnnnnnnnnnnnnnnnnnnnnnnnnnnnnnnnnnnnnnnnnnnnnnnnnnnnnnnnnnnnnnnnnnnnnncttgaacccgagaggcagaagttgcactgagccaagatcgtgccactacac

SEQ ID NO: 138225 - DNA, 536 bp, Homo Sapiens
  misc_feature (489)..(489): n is a, c, g, or t
atttttcaggtgtaaaaatcaaacatgataaacctagaaaactatcagcagggctatttcttacagggttccagcaagggttagcattgttacatttcagaagctgactttctttaaaccatctttacagaggagtaaacttcacagttccacacatggctgggctccaggtagaactccataggagtgacgagggaaagtcaccactgggcagggagggcatttctgagaaatgcagatgagaggagaggctgtgagcacaggctgtgtcaaaacccagggcaagggctccctcccgccttccctcccagtgggaaggccaccctgagccccaaaccacattctgttccttcctcgtcattctgcagacaatggtcatccacagaccacacgtgtggtggctttggcaaccagaaatttaaaataagctatggtttttccagtagccaaaatgatcctgcaccaaagctcatagactgagaacctgancatgcaaaaccacagtctgggtgaagggatgtctgctttgtaaatga

SEQ ID NO: 138226 - DNA, 674 bp, Homo Sapiens
ggccgctccacagccccgccacgcggcaggtgctcgtcctcagagaagctcgagtcttggttgggttcaaagtcctcctcggctgccatgctctccatcagcttgctcacggcaccccccttgccgcggttctggggacagaacatggccgacaaatgacttaggacctgaacaggggtcctgccaggttggggaccctctctggaaacctggagccacagtcaggccgcagggggaatctgtcatgtgcatggcagggatcccagttaggggcaccccagaggccagggggaaggtgaaatgggcccaaaacccagctggcccatgctcagtactcggtgctcaatactcagcactctgtgctcagtatcagcactcagcactcagtactcactaccatacctcagtccatcactatggcaggtgcctccgttcccttcttagagaaacttcagcagcatctccagcatttccacccaatgggcttgaggaaaaaccacttgggcaggggctagcaggtgtggggagtggacatgccatcatctgccactcgggcagattcacccaagcctgagggccctgtgaggacctggtgctgggctgggggcctgtcacccaggtctcctggtctctgttccagtgtccctcgcccccgctagagcagacatttcctg

SEQ ID NO: 138227 - DNA, 569 bp, Homo Sapiens
  misc_feature (302)..(315): n is a, c, g, or t
  misc_feature (518)..(527): n is a, c, g, or t
attccagacacagaattatttgccttcttacttcctgagagttctaggcacagaacatacttgaggtgttatacaaaggtaattagaactgacagggaattgtatgattaatgacgtgggacatgagagatttggaacgagataaaaaggcttaccttgaggacagccttattaggagcagaggcaaacacaggttttgtgggtttgaagcctacacatttatagctttctctaattacacaggtaggaaattataaaatcaggtacaagggcttggcaggggcctaaagcttaagtgatgnnnnnnnnnnnnnncaccacacctctggtgaaaccaatagcttacgaaaaagtagaaaaaagcgcgatgcatggggagctccggtagtcctttgaggtatttgagaggctgagtcaggaagatggcttgagcaccaggagttggaggtttgtaagtgcagtgatggtaaactgccgctgtactccagtctggcaatgtagtgagaccctgtctctcnnnnnnnnnngtaacccttgcctgactgggacaataattgagaaaccagtaa

SEQ ID NO: 138228 - DNA, 559 bp, Homo Sapiens
  misc_feature (511)..(511): n is a, c, g, or t
tttaagtttcaaatcctaaatatttagtcctttatttaagcctgcccctctaaatttaaaaaggtatcagcactcttggttaccaattgtaagcaatataaaaatttcactggtatcaattctaattggttcagtccatccattttcttatacagtgaatgtctttttttctatcagaatccaacagaagaataatgcaaatctcacttctgagcccacgggcaagcagtctcaacaataaccaaaaaatgtcactttacgactggtagtctgtttctgaagtaaaaatattctcgccagtaatcaaaatttgtcatgaggaaatccttcactgttcaagaagcacagttcgaagctcatcttctttattgatcatcatcgaagcaattgcaccatcattaaactcaaaagaagttcctccatccacaaccatacaggcatcccaacaacgagaacgaacacaaacctttgaggagaaacaacgctgacgactgcttgagaaaactctatntgctattggttctcgaataactgaaagtatttttgttctttcggactg

SEQ ID NO: 138229 - DNA, 186 bp, Homo Sapiens
  misc_feature (165)..(165): n is a, c, g, or t
atgagccaccatgcccagcctctagagctatcttagccctattaatatagcatgatctttctggggatgttactaaatgccttgggtgttcagtgaggttcctctagtctgacttgggtaggagcttgattgtttcctgcttgtgagctctggaaattgacctgnctgtggctccttggcaactac

SEQ ID NO: 138230 - DNA, 255 bp, Homo Sapiens
cagttcatacgtatttataattgttacatcttcttgtgatttgactctcttaccaacatacgatgtctttctgtaacattttttggcttaaaatctattttgtctggtattagtatagccaccccagctctcttttggttactatttgcatgggattatctctttccgtcttttcagtttgaaacaatttgtgtcttggggtctacagtgaggtattttgtaagttgcatatttgggattgtgtattacatcatt

SEQ ID NO: 138231 - DNA, 677 bp, Homo Sapiens
  misc_feature (41)..(41): n is a, c, g, or t
  misc_feature (114)..(114): n is a, c, g, or t
tgggaatgagacctcaagtcagtgaaattatacagcaacantattagtacctttgttttcacatttcaacccacacagtcattgatcctatgaaagaaagaatattaaagcaanaccactttaaacttttggaaattttaatgttaaaatcaaattatgtttttctgggctcttaaacacctctgctgtttatgtagttatgcagcatgtcaagaagcatcttaagacagaaagtttcaaataggtcacattcttttggtctttctactcaatttctctctgtgatcaacagcaggctgatgcctctgtttgacacccccttctgttaagatattattgcaattagatatatttacaagaagactccccccgacggcagtgggggaaggttggagctcctcttcggcaatccactcactagttttggtttcgggatatgaaggccaggactcgtcgaataccattcagtctgtcctttaaggacctcattgctaggaaggggagctgagctcggctttccaagggaagaactgctaacatccaccagcaccaggctgggccattcgggttcatctgaggatcggcgtctttctccggcatgggaccaaagtgattgagtatccgattctttagggataatttgagcgaatgaaaccacaatgatgcttgctgataga

SEQ ID NO: 138232 - DNA, 289 bp, Homo Sapiens
  misc_feature (208)..(208): n is a, c, g, or t
  misc_feature (269)..(269): n is a, c, g, or t
  misc_feature (277)..(277): n is a, c, g, or t
ttttacagaataacttaataaacaatgtcatacactacatcctttttggaaaggattttacctcttgccctcatcctgtaaacaaggatgggcctctatttaaagaagaggaaaaggaagaggggggaaggatattattcacctgggcctagcattttttgaggcagatgttttcctcctttcattgttcacaggaaaattgggtttnagggtcatataaaggcaaatgtttcaaaaaaactgtggatcccttaaatcatttcatactnttcttttngcttggggtagg

SEQ ID NO: 138233 - DNA, 944 bp, Homo Sapiens
ccagggggaggattataagctcattatgatttaatatgatgattgatcatctctgccccgccagcattatcctaagaatagtgatgaaggtcggagaggcccatgcctgtcagagctcaagctcaagtcaccagaagatagaaaatatacttgtacgttactccttttttcattgtaaaattcacacatgtggccccacgccctaactttttccataagctgtcctccatgctcccagcctgcctcactgctctacgatttctcagccctggattgttcttccacagatctgctcatcaactctggctcctgaccctctctccttagtgaccccaccccattcccaccccctgcgaaagtgaccacagcttccactatggcaagggtttaggaaggtccaaagggctcttcagtgggtactggcaggcattcagtttaggtggaaggcccgagacacctcccgataggcatttcgaagcaggacataagggaaacaggactccagcatgtccagggtcaggaaggatgactcctccaccaccaagcgcatgagcagagaaatggattctcgatttctggttttaagcttgtcagtctcctggcccagctgcaagaggctgacagaggccaccaccagaaattccttgaggtgagtttcaatgttcttgttgtagagcgtgaagagggcagcagacacctggatgatggctttggtcaagcaatgaatattgttgttgtaaccatccttctcaatgctataaaaggaagaagggtcagtggcaaggagtgggagggaaactgccagaaagatcaagagcaggcaggccaccttatattcctcctcaggagatgaagtatcagctttcagattagcaatggcagccaccaaggctgggtcaatgtcacagcccacacctgcagcagatgccagctcaaagataccc

SEQ ID NO: 138234 - DNA, 472 bp, Homo Sapiens
cagtatggctctattaatgcctgttgtttatctacacaaatacagagcagcctgggaactgtcctagtttctttgagagttatcaactgaagctaatgtttccttagagaactccactttgaaagggtactatgaacctggccagttttcattgctgtttagacagacacaagcacaatttgcagtgtgggcaacaccacctcttagatgcaatccgcctgtcttcaagtgagtctcccagtagtcctcactgtgttcgtttgctctgccaaaaataaacaacagcctctcccctagtaaacagcaggtaggaatgggtttaatcataaattctagtggatggcagtccagtaacaaagcagagctctctttggtggtagcattagcttctttctgccctgctcaaaacacccctaaagtacactgacttggacatgatctcattcaatatatgaagcactgtgatggttaa

SEQ ID NO: 138235 - DNA, 766 bp, Homo Sapiens
  misc_feature (150)..(161): n is a, c, g, or t
  misc_feature (401)..(401): n is a, c, g, or t
ttttccacagcaaggtatgtaactttatttttctagcataataatttaaagtatttacacactgcacactcactgttttacacagatacgtattcatatatctatgaaccacatctaaaggtttctttgcaaagactcgacacactgttnnnnnnnnnnnnagcttccaagcataacaaagaggacaaaaaaaagttttgagtcttttaaagacagccatgtggagcgtctgtgaaaaccagtgtttcccccgttttaagctcccccaggagacctctgaacagctatagcctatccacatgttggtatgacctgaaattcttctagctaaggtttcaggaaccaacatgtgcaagcagcattttttctagaaatctcaaaaaaaggagaaaattaaaccntggccccttacggtagagaaatacatcttatttcctgaaagtaatctgtggggattgttttacagggacaccgattacaagggcagaatagcaaaatacactattactagtgatgcagggtgcttttaaatgtcacttccagctaaatgatatggcaaaataacccaatcttcttttcccaactatcaggtaagggtggttgttattttccctgaaaagagcaaaggtatatttattaatgatacacactctaaacccagatcctatagaaatttcttctattgcttttacttcactttcatactatttgcacaaaaatagtggttatcctccgtattttttcctcgcttgtactactcaattat

SEQ ID NO: 138236 - DNA, 561 bp, Homo Sapiens
tttaacactcattttttacatttattttgacatatttgagcttattccatattaacaattatttatcatgcttttgtaacacatgacagcatttttcctttaccaaactttttgtgtacatattttaatgcctgcataatcttccattacacggatatgccacaaatattatgctagtgtacattttttattttgcaaattatgcactgtcataaatatttcagtgatcatcctcatacatatttctgtcttcattacaagttagacccttaaggtgttaacaatagtaatattattaatggcacctactatgtgccaggcactcttttatgtgattcatacatatcatctcaatccacatgacaacgctttgaggtagatactagtagtaacctcattatacagttgaggaaattgagccacaggttattagcaatgttaagagccccagttaagtgactattctactcccttaatgaaaaccatttctgataggtatgttgtatgtgggcatggtgtgtacacagtgagaagagcagcaggaaacatgaaacccaggac

SEQ ID NO: 138237 - DNA, 500 bp, Homo Sapiens
aaccaacttttggaagactgagttcatacctgattaaactccaaaaatgaccaataagctttttgggagtatcattatgaagtaatgaagtttttatctctgataaaaggctgttctgggacaccactgctgccctgctctccagtaaaatatgtctaagaccaatcctgtacatttgctgcccccaagcttagctggcccttctcaaaggaatactagttccttttggtgggaaatttgattttcaccttttcctctccagataaaattaaattcaaagttatctataacacaaagaaaaggaataaaacaaatcttagcttttgtactattctactactagaaatattctcaaattgcattaagaccttaaatgcagcaggcttatgggttaggtttgataaagaaaggctgccatacattcagctaggttaactgcatctctttttattttactgtacttgatttatcacaccaactaatttcaaggtaaatttcac

SEQ ID NO: 138238 - DNA, 534 bp, Homo Sapiens
accttacttgaagcactaggaagtaaaggaactgaacccaaagctttctttgtggttacagatcactaagtgactaagttctggccagtgagaggtaggcagaagttctcaaggaaggttttattttctagaataaaaaggcaagacacatgaggacaaggtgttttaccctttgttctctctccttcttcctgcctggaatgaaaacttgagtcatggcaatgtagcagccattttatgacaaagacaataaaagctacatgctaaggatggtgaagtagaaagagagaaagagcttgggtcgatgacgacattgttgagctgcttagagctttggactgcttacgccacttccttttccaatgtcctggacttcctattacatgagataaactcttacctgtttaaaccttttacaaacagatacactctacatcttaatatctcactgtctcttagataaagtgtagccttttacagccaggttcctgcttgtatttctaggtttaaatctagtcattgctactcctcccc

SEQ ID NO: 138239 - DNA, 622 bp, Homo Sapiens
  misc_feature (102)..(122): n is a, c, g, or t
ggagaccaacagaactgtcacagctttattttgtgactcattatattacaacatagaaatatgcattttaatacttcatataaagttattgacatacaaaannnnnnnnnnnnnnnnnnnnnaatgaaaatgatttaacttagaaatctgttgtgaaacttttgtctagttttgcaattctcagatattccagtgcaaaaatagatcccattacagacagcgtaaagtgcttggaatgagggccaatgatgaacaaagagcacaaaaacagcttcatcttagggtataagaagggataatagcatacctaaatccttatggaaatagaaacattctaagggggatgcaacaattttgaaaagaattagagcaatatttctacagtattacattattactagtagataataacaagggtacaaattaatgtctcaatatcaaagtggttcagtattacatgacacatggctctttggaaaatattttacctgatatatacaaccacaagaagaaaacacagacaaatggctttagtcaatgattactatacagtgaatgaatgatgtgcaacatttaatagtcacaaagcatttgctttcagtacagataatgaaatacagta

SEQ ID NO: 138240 - DNA, 489 bp, Homo Sapiens
ttttggttgtggtattgatttatttttccccagcacatcttaaaaatcacacatgggcatttgcttatagaacaatacagtctaagaaaaccagtaagaggagaatctgaacacacactgaaagcacggaatactgactatgtgttgagcccttgtggaaaacagtatggctcagtcggaattgacaaagctatgctggaatctctcaggaattttccttcccactgcatatccccttttagactataaatgtaaagagaagaattgtttgtatgcattagttacagcagtataatggcttacatacaagtgcttactcacatgtagttcccaaaggattactacagtcctggcaggaatatgtactgccttggaggaagactcaggataagatattattcaagttaagttgtatcagagccaaagtatttcacaggcttagcaaaaatggacaagaattaatataacctacatatatttctcataaga

SEQ ID NO: 138241 - DNA, 504 bp, Homo Sapiens
atccatcagtcaatcagcaagcatttattgagcacttgttgtattctcagagctccacttggctgtggagagatagcccatgatttaagcccaagttcttacttctacagagctaacttgtgcagagctactggctagaagtgcagtcataaaggagcagtggaaggcattggtctgaactatcacattcattctggccatctggacattggacatgatgcttctgattgtcagacactcatgctccagctccaggatctcccgagggacctgcaggacaaatttcaccaccttcagctccttggacgccttcttctgaatgacgctatcaaaatcacagtctagctggtcactggtgattggccctgttaggacagccaaggtgaactcaaggccatgaagcgtgtggctgaagggagtgaagaacaggaaggccaggtggacatcagggccctagtagatcaacaggcccacagtgccctggaagctgaggctcatctatgc

SEQ ID NO: 138242 - DNA, 377 bp, Homo Sapiens
aaaagaaagctgttttcccctcatcatatccctcttgagttttgcctggactttccctctcaagtgtgtcaatcaggtaaactgaggaatgcatggaagctgaggatggagcttgatgggctccctgtcctgggtgtttgctctctgaagtggaggcctgaggaaggtagtacttccacaaaagggagggacccgggccccagcctcaagctagtgggggaggcagatagcctgaatccaggggattttctgggcttcttaaaatgtccattgtgagttccctgtgtttgggattccactcattttggcattcacagtgcctggaatgtcttagattttcagcaatgcgtgttgaataaatgaatgacataggcaaa

SEQ ID NO: 138243 - DNA, 497 bp, Homo Sapiens
  misc_feature (66)..(74): n is a, c, g, or t
tttttagctcatctgcaagcaatttttagaagtttgggtttcttactgaaatttccatgaagtgannnnnnnnnctgtgcttaacttcagttacttaaagacctaaaagacaaagtggtatcacatcacatattttgtatgtgtgggcttttttgaggggttagtacttgaaagatatgaattgatatttttttcacattctaaattatgttaaaaccccttcaaatctcactgtttgctcatgcatcacctattagagcaaggtgctctctaaaggtgtgattttggcatctcataggcttccttgaaagccaagcaccagaggtctgcaataaaggcagttgccagctaaatgaataaaagcgagatttcctcaattcaactataaaagcttagagtcctgactgctgaattaccaccaacttgtaaataaataatcactactaaatacagataatgtgttaacagctaacactagtaatcactggtgcagagag

SEQ ID NO: 138244 - DNA, 428 bp, Homo Sapiens
tttaggataatttgactttattatcactataggctttctctcttcccaattctcatggcagaagatggctgctatcgaattccaagttttacatgttattgaaacacctggaaagaaaataagtcttctctcaacttgaccctgatcttgggtcaagttctacatcaggaccaattaatgtgtccatagagacagtgtcacattgtgcaagcatggcagcctctgattggaccatgtggatgggaggcaggatgtaggagagtggattagtcaatgcctagaacaggatgctgggcaggtccctagtgacttccagtctacggcataccccttattagggggtggcaactggtaaagaagacattaacaggcagatggggatgaaaacttcatcttgatcagatccaggtgccatgctggctgccctc

SEQ ID NO: 138245 - DNA, 998 bp, Homo Sapiens
  misc_feature (222)..(250): n is a, c, g, or t
  misc_feature (272)..(281): n is a, c, g, or t
  misc_feature (423)..(456): n is a, c, g, or t
ttgtcataggtctataagatccatctgttcctcctaccctaaggaatggctaatgtcatcacttcgttgtcatcaggacgtttgctggttttgttactagggcagccgagcttcccctaattcaatatccagtaattataaacactagctgacttgaataccaacaaaaacgttcatgtagttttcttcagaagtacactttttcattattgcaagtttacnnnnnnnnnnnnnnnnnnnnnnnnnnnnncagacttacaaattaattatannnnnnnnnnccaaaagaagtttaggcacaaatgcattgttccacagtgtggaaagattgccgttcagtctctgggctgtgtctcagcctgtacatactgctttgcacattctgaatgatatgttaaagaaagtcgtccctcaagttgcacnnnnnnnnnnnnnnnnnnnnnnnnnnnnnnnnnngataattgggaatgctgaaacctcttgcgtctgcgattcataactactcagacttgtcttatattacaaaaatgggggttaaggagaagtgtttatgtgggtttaagataatacagctgttaaggaagtggtctcttgttttaatgaagcaatgtggcaacttggacccttttacatctgtcccatgtgattcgatgcgtctcccattccagggtgtgggccggccaaggagagagggggaggctctgaggacaccttctcttcctcccttcttttcagacacgcagctttcggattcagattcctttctcggacttgctgctccagactgaggatgacggccaccgcctggtggaggatcaggagcttggtctggggcttgtcactcttgaggtggagctgcaccatgcggccgagctctttgaaagcctcgttgatgtcacggacccgcagacgctctcgggcattgttggccatcctccgctccttctcacgctctgccttctgctctggtgtcaggtcctcatcgtcattattgctag

SEQ ID NO: 138246 - DNA, 848 bp, Homo Sapiens
  misc_feature (125)..(137): n is a, c, g, or t
  misc_feature (252)..(284): n is a, c, g, or t
  misc_feature (506)..(535): n is a, c, g, or t
  misc_feature (707)..(741): n is a, c, g, or t
tctacttatttatgaatgagaagcaacatcagggtcagcatttcatcctgcactacccctctggaagcagagttggcactacaggttacgataacaaaccagggaaagggacagaaataagaccnnnnnnnnnnnnntccatatttacagtaaaatctttcttttaaaaaagttaatcagtactatttttttacaggagaaaaaagtctgaaacaaatgaacaaaagcttaccatagtcactaaatttttannnnnnnnnnnnnnnnnnnnnnnnnnnnnnnnntgtcataggtctataagatccatctgttcctcctaccctaaggaatggctaatgtcatcacttcgttgtcatcaggacgtttgctggttttgttactagggcagccgagcttcccctaattcaatatccagtaattataaacactagctgacttgaataccaacaaaaacgttcatgtagttttcttcagaagtacactttttcattattgcaagtttacannnnnnnnnnnnnnnnnnnnnnnnnnnnnncggacttacaaattaattatatgttttttttccaaaagaagtttaggcacaaatgcattgttccacagtgtggaaagattgccgttcagtctctgggctgtgtctcagcctgtacatactgctttgcacattctgaatgatatgttaaagaaagtcgtccctcaagttgcannnnnnnnnnnnnnnnnnnnnnnnnnnnnnnnnnngataattgggaatgctgaaacctcttgcgtctgcgattcataactactcagacttgtcttatattacaaaaatggcggttaacgagaagtgttatgtgggttaagat

SEQ ID NO: 138247 - DNA, 309 bp, Homo Sapiens
gtattagggctacccatgtgattcgatgcgtctcccattccaggatgtgggcggccaaggagagagggggaggctccgaggacaccttctcttcctcccttcttttcagacacgcagctttcggattcagattcctttctcggacttgctgctccatgactgaggatgacggccaccgacttggcggcaggatcacggagcttggtcctggggcttgtcacttcttgacggtggacggggtagcccttttaaactgcggggtaccggaggctcggaaattcggtacatccatgggtcataaggcctgtt

SEQ ID NO: 138248 - DNA, 516 bp, Homo Sapiens
ttttggaagaaagaattgcatgttcagggcatccatgtagaccagttggtcctcggtatgtcggaacaacacagagaaggctggaggttttatcaaaagaaatgtcagtattgctctttgagaaagtttattggcaccaggaagggtgttgggagctggcaactacaactggtgagcaaccgggcaggcaaaattattcctagagcttcagcaagttctctcagcagttatggacaaagctggtcccagcttacagcacgcagtttcaccagctggatgtgcagagaattacattactagattaatgttatgtgcctgaggtgcttttatccctggcttcttgactttagattgggtgtgataagaatgacttaatttggtgtaatccactttcacagcactgagcatacttagtatgtactgagggttgctgaattaacggtgtgtaccgcaccccatgaaggctcaatgaagtaggattactgcttaagctaagacctttattaaaattttgtc

SEQ ID NO: 138249 - DNA, 415 bp, Homo Sapiens
tttttttgaagtcgaaacagacttttattttaaaaagtattcttgataatgtgttcaaagactgccctggctacagcccaggactggcagtaaatacaaccagctttggggaggaatctccctctggggaatgtggaatcacagatgctgacagcccaaaggaggcactggaaacaggtgagtgaaactcctggggagaatcttagctgaggaattagctagggaaactccctaagcatgaaggtttctatggcagatcaggatcacttaccctttcaagcactcaggttttgtttgcaggcaaattgtttacacaatcagaggactcagttgccaggaaacagtcaatgtccccagctcattagtctgatggcaaataaatctaccaatatcaaggcaccgggcctggtccctg

SEQ ID NO: 138250 - DNA, 470 bp, Homo Sapiens
  misc_feature (216)..(328): n is a, c, g, or t
cctcaacccccaaggtgctgcacccttaattttaacttgtttcatttaagttacatatttgaaatgtcagactgtactttatgaactgccttaaattacttttcaaacaagatgggttataaataaggtgatgctttggcctattatttttaatatctacatttttacttttttgtgagataaaaactaatggggctggacacagtggctcacacnnnnnnnnnnnnnnnnnnnnnnnnnnnnnnnnnnnnnnnnnnnnnnnnnnnnnnnnnnnnnnnnnnnnnnnnnnnnnnnnnnnnnnnnnnnnnnnnnnnnnnnnnnnnnnnnnttagctgggctgtgtggtacccacctgtagtcccagctacagggacagctgagatgggaggattgattgagtccaggatgttgaggctgcagtgggcaccactgcacttcagcctggatgacagagagagaacctgtctcag

SEQ ID NO: 138251 - DNA, 677 bp, Homo Sapiens
  misc_feature (214)..(234): n is a, c, g, or t
tttatagttattcaatatgcatttattgagcacctactacataccaggcactagtaacacagataaagagtacactgataaagcttaattcagattaatctttaaaaatgctttctacttggcccctgggaccattgtatcttctgaagtcatcacagtagataagggagaaattttgccttaaaaaaatgcacccggttacagtgattaaaannnnnnnnnnnnnnnnnnnnnactaacatttgtggggtctaatggaatagtggggaaaagacaggatttggaataaggaaatccagtttaggcctattacttattagctgtgtgcccttaagttaaatttcacttatctggcctaactcttaattggtaaagtgataattggcctacagttgtagcatattagagccaaaaggaacagagatcatctagtcctgtgctttttgaagttcttcgttcaaatgaaaatattatgtagcagccccagtgtaaaactgatgaacgcagtcactttgacagcccctgagcatcactcactccctgtcgcgcccgcaccgtaaagtattcatggagggaatcacgagacaccctgaaggcgactcatctagtgcaaacccgcactttcagagtgagaaaccagacccgaaagagaggggcgtttcagggacattggcttc

SEQ ID NO: 138252 - DNA, 411 bp, Homo Sapiens
ttttattcatctttgtgtttttatttatctaaaatgggtattgatttttaggacggttttgaaaaagaaaagtgttgggaatgaagcaagtgattgattggaaaacatactgaatggaagaaatatttagattaaaaatgaggtaggttgaagttttttctctgaaatgatagataaatggtgaagataaggcttattgtgaggattcagtgaggtaatatatgcaaagtacttacaatgttttggtccatagtaattaattaagaaaatcgagcccccttaattacctagaatgcagggttgttagttttttggttgacttttgttttgctggggcattttgccaatgttttagtgtcctttattaaataatagtaaccataaaagataacatttataaagtgaaaaaaa

SEQ ID NO: 138253 - DNA, 471 bp, Homo Sapiens
  misc_feature (415)..(429): n is a, c, g, or t
tttttatggctgacaggtctatgcattgcgttatgcttcacaaccagagctttcgagcctctatggctggcgacaagtcaggagatcttcaggcaaagaggggtgtgtgcagtcaaggggctgggagagaagactgagtgggtgtgcagaacagaaggacccagaggacatcaccctaaaaatgttttataggctgctccagtttaactccattaagacaaacccaaagagaaccttttatttgcattccatttttcaagctgcaagtttttaatacatcattgtaaagtaaacctgtggttgactgccaaggaagaatactgtgggctttccctttttgcccagttttccagaaatatcctcaccttggtcatagccagtcttttgacaaagtaagcagcattcgatgagggtnnnnnnnnnnnnnnnctctttattccagcttccaattcaagatgtagagagctaccc

SEQ ID NO: 138254 - DNA, 1583 bp, Homo Sapiens
  misc_feature (1505)..(1505): n is a, c, g, or t
  misc_feature (1514)..(1514): n is a, c, g, or t
ggcctgggtggcgaattcggcacgaggtacagagatagtggggtgttttaaggcagggggaggaactgcacagcccagacctgggagggagggatccagggaaggagagatcctgggaattgcaatagcagcaggcagaggcttttggttcctattgtttcctggctgctatgaatgacttggctttaatgactcccaaggttctggatctctccagttcaaatttcaaattattgacaaaacaatctgattggccaggttggctcaggtgcatatgctaggactaagctttggccagtatgactcacatggtaacagacagggctgctggggccctgtctgtcaccagaaagggagtcacaccggctgctacccctagagggagctatcctaatcaatcataggcaaggtcaaaaaaataattatggaattattttccatttgtgattctctacgccaccattacactccacttgaccagctaactgagaaccaactgagtacagagaacttagaggattagctctgaagagtcctgaagataaggggtagggagggaaatgggttgagtttagaaagaagggcctgggtcccaatcccacaccctctcttgacacctagccctagctccactctgggccagcaggtcccagagttaaggtgcaagtctctcatagagccagtcttcctccccgcggtgggtcatgggccccaaaggggaatctcctgtgggtaggccccgccgaaagactatccggtcatgcaggcggttggtttgaccttgccagaactccatcacctgagggtacaggacatagccaccccaggattttggcttgggcacctcttgatcctggtagagctgttccagttcctcatttttctttctcagatactcccgatcagggatcacagaactctggtggctgaccacagccccgatctggctgctcttggggcgggagtggaagtagcactcagcctcctcctcaggcagtttcttcacagggccttccacacgcacctgacggttaagtggctcccagtagaagacaagggaagcaaagggattagagtccagctcttttccttttcgactctcgaagttagtgaagaagcggaagccatctttcccgaagcccttcagcagcaacatgcgagcagagggttttccatctctggtgcaggtagccagacacatggcattggcttcccctatgtcaggacactgaacagcctcctcaaaccaggcagcaaactgtttcactgggtcaagggaggtcagatgagtctcctcaaatgcctctcggtccccgcggtaactcttgcgcatgggtcccaggtccatggcagcactgcgaccacacaggtgactgaggtagcctggccactcggcaggtcgcccgaacgtcgccgtgacgccccgcagccagcacgtcatggggggccgccggccacgtgacccggctgtggcccggcactgggttcctttgagttcggaaccnatttctcancctggaccctcgtgtcgaattcgccacccaggcctcgctaccttaacaccgttatagtactgccgttcg

SEQ ID NO: 138255 - DNA, 463 bp, Homo Sapiens
  misc_feature (309)..(309): n is a, c, g, or t
  misc_feature (379)..(379): n is a, c, g, or t
acataaaatttttgagaaccattcacattattatatatcagaggttgtttctttcttacttctgagtacttttacactgtaggaatatgctgatatggtttggctgtgtccccacccaaatctcatcttgaattgtagctcccataattcccacatgttatgggagggacccagtgggagataattgaatcatgggggcagtttcccccatactgttcttgtggtagtgaataagtctttacgagatctgatggttttataaggggttttccctttttgcttggcccagtattttttctcattctctcntgccggctgccacgtaagatatgcctttcaacttctgccatgattgtgaggcctccctagccacatttanctgcaggtccattaaacctctttttctctataaattatccagtcttgggtatgtctttatcagccgcatgaaaacgaactaata

SEQ ID NO: 138256 - DNA, 491 bp, Homo Sapiens
actagtaggatggcgataatgaggaagataaataagtgttggtgaggatacagagcaattggaacctgataccgtttggctgtgtccccacccaaatctcatcttgaattgtagctcccataattccacgtgtcatgggagggacccagtgggaggtaattgaatcatgggggcaggtctttcctgtgctgttcttgtgatagtgaataagtctcacaagatctgatgtgagatcagatttataaaggtggagttcccctgcacacgccctcttgcttactgccatgtaacacagtaaaattgcttctactttgccttctaccatgatcgtgaggcctccctagtcatgtggatctgtgagtccattaagcctctttcctttataaattacccagtcatgtctatgtctttattagcagcatgagaacagacttatacagacctttgtacattatatgggaattaaatgtcgccggatctctagactccta

SEQ ID NO: 138257 - DNA, 569 bp, Homo Sapiens
gggagtgatttgtttttatttttacagtgatcacctatcaaactgttctgctgtgttatagttcccaaactggagttcaacagtcttagaaattcagtggtctaagaactgcagttcttgagtccaacctcctggaaaagtgaagtataaaactctggctccagctgcttgttccggtacttgttgacaatgtcggtgattttctgtttccggcggacatgggggggactgtaggagtcactttccagtctctttcttctacaaatgttaattacagtctgcctcaccagaaagccaagagctcgcctgctgacaatcatcccatccacaagagggatgaccatattaaattttccagtggctccttgaatttttatccggaataatccagtgtttaaagggtggatgaagatgacaggaacttctttttcaagagttgtagatctcagtgaagtgctactatttgcagtagtttccacaccagtactgatctctgtcatcagctctgagaggggaaagttttctatatcatcatagcgttccacccagactacagaaactcttgtctc

SEQ ID NO: 138258 - DNA, 909 bp, Homo Sapiens
catctctagaatagtaacagctcgacttagatctcgtcgcagcttaagcattttttcgtaagaggcttcatcatttttgcgattttttcgagtctgcatttgttcagtacgccttctaaaagccacataaggatcatttgtgctggaaccatctcgcttctcttgttttactgatggaataagagatggccctcgacagttttttctctttttaatccaatattcataaacttctctaattagttcatcatcttcttttagcagtagtttggcttcctgcagactgactggctgctgaccactgcctttttctaggcggtcaatcatctcctcaaattgcaatgggcagatgtccattttctttttcagtttattcacaaatacttcatcttcagaatccaaatcataatcaggctgttcagcatccaaactaaaaggctgtatgtgaatgagctgctttggcatcttaaattccccaggatatatagactcatagtaagcaatattactttctgcctctgggaccggtataaccatattatccctcttctcgccatacacctgctgtgctgaaatagcccgctgaagatgatgttccattagtgcaggcaaagaagacggcagttcttgaaaaaaaattgtaacaatataggctggatacttgtgtccctagaaacaacagcctccaggcagcatatggatcttccaacatctttaaaatgtttggtaaataaaaagtaatactttcttccatgatcggtggccgaatggggtggcttcccccaggatctgtgggcttttgggggaaatcggagaaatatccacagaagattaaaagcagaggaggcagcacagccaccccggccgtaatggccgaattcccgggcatatgtccggtaccgtcgactg

SEQ ID NO: 138259 - DNA, 443 bp, Homo Sapiens
  misc_feature (56)..(56): n is a, c, g, or t
gggtaactaatcttttcatctttttcctgccatatgactcagtagtgacccctatncccatcactcagcccccccttcccacacccccactatgccccagtgcaaagaaatcagctttgttccttcactggaaaagatgcacgtttctctgactactgtagccatgctgaaactatctcccaggaacaactttttatctcattcatgtcaaaaaagaagagtcagctagaggggatctgtggcccaaaactcagagttttaaaccagagctcagaaagtatatccctgccaccagcttctacaaagacaaaaagggaacagggacttgagggttcggtgatggaaggaagctagccactgatgagtatcttccttttccctttttcatctgtaaaacataacctcatagggagttacgagattgaaagcatgcctatcaaata

SEQ ID NO: 138260 - DNA, 459 bp, Homo Sapiens
ttttaaggaacaaaataatgtttttattaaaaattgtacccatagcacctctctgtcttcctacaagttgtttctttttttcttttaatgagatctgtttttctgcacaatttcagaaaaagttgtagggaacgtttagggacctgacggctccctaaaccagaaggtgacgcgggaaggagacgtgtcccagcgggcaggctcagctcatgagtttccacgttgtcctcacctttcagactggatccatgctaccaggacgctgacccacggggagccacacttaggtacgcagacgggttgctcgtcaggaggatagctacactgtgtgccaagaatgcgtaagaaataaaaaccatgctacgaaccattaggcaaacatcatgcttcagcccagtcacagttagatacaaacacggcctccgaagacctgtacagagtgagccacctcccggggct

SEQ ID NO: 138261 - DNA, 966 bp, Homo Sapiens
tttttttccttccatctcttttatcagggttgggggtcacagttcttgtaccaaagcccaaatcccattatgcagaggtttgggtcttcttagtgaggggaggaagagccagttgtaagatgcttacttgcacagagtggttagaaactgagacagtactccattctcccctgagctggtatgtgacccctcttgctgcctcccagtctcctcttccaactctgtcctgtttgatgatggcctcagggagacaagggatggcagaagagccctctgagaggcccaggtcctagagcagcttctgcctgggctgaggtcttgggggcttggctgttttttaccaggctcctctttgttcccccactgggatatagcctctgaggcaagtcaccctgctgagtctgaaaagccatgtgtcaccttcgcagcttccggcacctgcaggtgtctgggttgagctctaagccccgcccttggcaacggaggaagctgcggcgtcggcagcggcagcggcaggtccgggggtcagggcgctggtggtgctgggtgcagcgtgggcagaggggcctggggctggagtgggatgggtgatgtcagctggggagggtgctccgggggcagagtcccagcccggaacagaacggggctggggacggtggtggggagtggcagccctgtctggcttcacagcactgtccttttttttaggtctgcattcacactggctgtgttcttccagggacatctcccccagctgactgctcgggtaccggatcatgaggatctgcatccggacttggtgctgcccagtgggcacacactccaggccatcgtcagggcagcagccaccacagcgctgcacagtcacgcagctgggcaccagctgtttggccacggtgcccatgagctccacagtcaagggcaccaccacctcccggggctggcagtagcgtagagtatacacat

SEQ ID NO: 138262 - DNA, 753 bp, Homo Sapiens
  misc_feature (257)..(288): n is a, c, g, or t
cgcattattcggctcccttggctccccggtggatcgctcgtggctccgagctctctctggagtttttccgaacacgtcgtttcccgcgcgcctttttatttgggggaatccccgccgctgttctggccccggatttctctctggtgaaccgcgcatggacgccggtcgacgtcacgactggggccgcctgcgcgccccaagcggatgggtctctgaaaacggccttttcctaggggctgcgggcggcgccaacacannnnnnnnnnnnnnnnnnnnnnnnnnnnnnnngtggtcttccatctcttttatcagggttgggggtcacagttcttgtacccaagccccaatcccattatgcagaggtttgggtcttcttagtgaggggaggaagagccagttgtaagatgcttacttgcacagagtggttagaaactgagacagtactccattctcccctgagctggtatgtgacccctcttgctgcctcccagtctcctcttccaactctgtcctgtttgatgatggcctcagggagacaagggatggcagaagaaccctctgagaggcccaggtcctagagcagcttctgcctgggctgaggtcttgggggcttggctgttttttaccaggctcctctttgttcccccactgggatatagcctctgaggcaagtcaccctgctgagtctgaaaagccatgtgtccccggccgtaatggccgaattcccgggcatatgtccggtaccgtcgactg

SEQ ID NO: 138263 - DNA, 486 bp, Homo Sapiens
tttttttgtaatggttttattgccctttaccaaggggagaaaaatacacattacagaaatagcagcaactttaattacaagcaaaggttgattttattcccacacccccaatgacttgttttggtttcagcaaataatttattaataaatgcatctagtaaacctcaaatagttatactgaatatttaaattcattggctaaaattatggcttaaacagttgatatgtgaaccaaacaccacaataaaaatgggtttttaaaaattaaggtatataacaaataaattaccaaattttctgtaaacctgccaaacttcttgccttggggcctcctatctctattagttgtaaaagaatattgtataaaagaaatgattcattcacggcctaacccacaggaatacagttaacttatactggtgccctgctttcaagaatgtttgagatgaactcagcagcacagtgttttatttcagatacttgaaa

SEQ ID NO: 138264 - DNA, 876 bp, Homo Sapiens
tttttggcaggttaaaactgctttattattatttttttaacatagaagaagcttggtagtggacatgtggccatttgatgtttttatgactaagagagttcaggctcaatctcttacagaatgtaaatgtacccctatgcatgcatatgtaattcttatcaaaattaagcttaatcactaaaagaagattcgctatctgaactttcttctacagttttctcactttcgccatcaggcactggagcatctggcctctcaagaagatctgggtctagtccttctgatatcattttgtttcttattgccatcactggtacacccacttgaaccattttgagatatctggcatatcttggatccttggctacagttaagatattttctgctgatacttcactttcctgtagtccagagtcttgtgtactgttctgctgtggttgctctgaagtggcttcaggatgtgctccatttgtgacactggtgacatttaaaggagatacttcaactgtgacatcatctaggcctgggatagatgacaactttgcatctaaaatattgagagttgtttcaatttgttggatacgaagtgaaaggtctgccagtttctcctcacaaactgtagaaaagcggttgaggaactgtacagtgtgcaccacaaattggtttagaaaagccaccgttcttttctgttgaatagctggcaccttggtcaggtctatgcctgaccccatgagaggaagcccatcctcatccatctcctcagcgggcggtggaccccgagttcacccacaaacccctcccagatggggcccgcccaacccggtaatcacgtctcaactttccccccaagtgcccgcctccggggcccttcccccc

SEQ ID NO: 138265 - DNA, 409 bp, Homo Sapiens
tttatttttgcttagtcttgctttggctatgcgggctcttttaggtttcatatggattttaggattggtttttctagttctgtgaagaatgatggtggtattttgatgggaactgcactgaatttgtagattgcttttggcagtatggtcattttcacaatattgattttacccatccatgagcatgggatgtgtttccatttgtttgtgttgtctatgatttgtttcagcagtgttttgtagttttccttgtagaggtctttcacctccttggttaggtacaaagtattttggggttttttgcagctattgcaaaaggagttaagttcttgatttgattctcagcttggtcactgttggtgtatagaagagctgctgatttatgcaaattaattttgtatcctgaaac

SEQ ID NO: 138266 - DNA, 541 bp, Homo Sapiens
  misc_feature (291)..(291): n is a, c, g, or t
tttttcgggttatagcagagcatattgaactcgagattctcatcccagtgccgcagaagcacaaacagctggcgggcagcggccttgagtgtgccctgcgtgcggccctcgggtacttcctgctgctccagccatgagttggccttggcagccaccaactcccactcagtgaagtaggaggccgaactgtgctccagccatgccagccccaccaccgtggcccccagcttcccagtgtgctccaccactgccctcggctccaggcccagcttgcccttggccagaggctcncagggagaagctgtcacaggacgggtgcctaggcggggagctggtgcacagctggggactcggggtcttggactcagacgggcgggtggtgagggacactcgatggcaggtgaagggggacgtccacttgagcttctccatggggatgtgcgtggcctcacagaaggcttcgttgagcaggaaggctccggaggccagctgcagagacacctgtgtgtgggggaagccttcagtgggcctcaaatgtttt

SEQ ID NO: 138267 - DNA, 674 bp, Homo Sapiens
gaagtgggctggcctttctctgccggggataatttcttctctatatttccatattcaaactctgggacgtctgcagtgcaaccaaatcctaatatcaatccacaggatataaagcctgctgcctccccagaggacacccttgagctcagcgcctttttgcgaaactctactattcctcatcttgtcaggcagagggatgtacatgtggtcgaattccacagacagagccctgcaaaaatactgaattgtacaaatatcgagtgtttacaaatctcctgtgcagtgggacgactcgaaggaggagaaagcgcagtcctgaaagtcaggtcacgattatgggcccacaccttcctccagagaaaaaatgatccctatgctcttgcatccctggtgtcctttgaagttaagaagatgccttatacagatcagccagcaaaactcccagaaggaagcatagcaattaagacatcagttatttgggcaactccgaatgtttccttctcaatcccattatgggtaataatactagcaatacttcttggattgttggttctcgccattttaaccttagctttatggaagtgtggattctttgacagagccagacctcctcaggaggacatgaccgacagggaacagctgacaaatgacaagacccctgaggcatgacaaga

SEQ ID NO: 138268 - DNA, 447 bp, Homo Sapiens
acacattgtatacagcagcagtaaatgaactattctgctatgtgacatgatgcatctgccctctgtgatagacattctaaatgtaagtttattgtatctttccttaaaatgattacatattctgtttgtctgaaataagcctcagacatgataagtacaattacagaggttcaaagtcttaaacccgtgtgtccagagccacttgtacccttggtaatctgcctacctcctcatgaggcattccaggttattcctggaagctctcttggggggcatgtctattgattgccaaggaatatatctctcatggaatgctgttgttctttggtaacttgcggttgggctctgtaaccttgtattgaagtagagctgttcctttctttcccatcctcccttcctactttgagcttcctaggaagatttcttctgaggtttccttggcttaaa

SEQ ID NO: 138269 - DNA, 437 bp, Homo Sapiens
tttgagaggaatgaagcgactgcctttattgcatagaccttttcaattgctttttagattggggacggaggacgcgcatgagacgaacaggggatatgaatttccccgcccccacccgcggggagaggaacattagtgcaaatcctagcgccggccccggggaacctgcccctcctgggctgattggccagctaaatggaggcaccggagtggatggggcgaggctgcgggccctgaccggccgactcactgaggcctaccccagccagtacattccaggtcctgtcattgggcgacgcgtaaaatagactccgccctcagccatcctggccgggtaggagcaggtggcaagcgtcaggactgagccctgccccgtaagggcggccccagacaggaaggagaaacagcgggagcccgaggccagcgtcacggagagc

SEQ ID NO: 138270 - DNA, 1478 bp, Homo Sapiens
ttagggcggggccccgggggaaccgggccccttcatgggcgtgtttggccaacttaatgggaggcccccggagtggatgggggaaggctggggggccctggccgggcggactcactgaggcttaccccaagccagtacattccaggtcctgtcattgggggacgcgtaaaatagactccgccctcagccatcctggcgggtagggagcaggtggcaagcgtcaggactgagccctgccccgtaagggcggccccagatcagacgccaggccccgccctcattgatcaggcactaccctcgggacgagcccatttctctttaaccgtgacgacgcccaccttccagcatcacgtctggtcccatgaaagcgagcgcaatcctgagacggggccagggcccctgccaccacaactctagcagccaggccacaccccctagctcaggctccgccccattggaatgtaggccccgcccccggcgggtaccaagcttgtttagtttcagggctcccgccccgggcagccaggaggcccagtgagcagtgtaccgatgccagggtgcatctgtgcctgtagcggcccatactccacctgctccccgtccactgtgagcacgccgcgtggtgtgagcggctctaggcggaaggcacgggccgcggcgtagcccagctgcggacagcccaggctgaagtggctaccacgctccatggccaagaaaaggcgcagcagcgcagcccgcgagatgccgctacgcacccagcacaggtgcaccaggccgtcgtcgaagcgcgcatgcggagctgccaccaggtcagcgcctaggtggctgggcgagatggccaacatgagcacaaagtccccctccagcgtcacccagtctggggtcagcggggtgcccagcggaggcagcaggtgtcggcgggccgcaggtggaggcccctacccgggcatcaggggtgggaagtgggagcccagaggatgggggaattacgggggccccttcggagacgggtgagtgtagagctgccttgggagagccaggaggtgaagacagcagtgggtccggggacagcggagcatccccagccccaccccagtccccagccagctctgggcccccaccgttgagggacaggatgggcaggggttctggcgagccaggagaggccagggcaggctggggcaggggaagaggcaggtcagacacagaacgatgcaggggtgagtgggccatgggcggggctgggtctggggttagggtcagctccgacttggcacgaggcaggctatgggcaggggtgggcgaggcaggttccacagtggcggggaggtaggagaggcgtccgcggtaggtgtgcagtgtggcgaggcccagcaccgtgcccagtgtgaagcgggcactgcccaaggccctgaagcgctcgctctggatatccacatctaccctcgtgccgatttacccccgcctcgtactagctt

SEQ ID NO: 138271 - DNA, 1093 bp, Homo Sapiens
agttattaattatggaccgtggggtgaaagtatagcacaaactgcttttcagagactaggtttttaaaaactctaagcaaacaatttccacttcagattatacatattttaaaaatcagcattgattcgtgagcatatattttactataatgaagggaaatatggcataataaaattctggaagcaatttttccccattaaattatagtgttgaaacatctaatagaggaatatttaataggtaagttgacttgcttcttgcctttatgttcctggatactgaggacattcgtgtgtatttttcaaattcaaacaatcaaaacatttatttattctttttcttttggtatacggataacaaaagtatatagcaacataataaaaatgcaagaaactagatctgttgatacagatcatctttctaactcttaatggtttgacaaaagatgttcatctctgtaacagctttggctttaagacttcccacatttcttcagtttgctgtttggctacagcatctccagagtagtcaagacagtttgcattccacatgccaatgccccgtaagcgatagttttgtatatatgttgcctttaaagaaatactctgagggttatcataccatacttgatgaaagtggccagcaggatctttatagttataataaggagcccgctgatctttatcccataggtttccagaaatagaactatttatttgcttcatgatcgttttgtagggcacctgacgtcctgcagcgtcactacaaggagccccccggaaagggacttttgcaatggtacaaacatgatcctcagacagattcaggcaggtataatcataaccataccaaggaacacccattacaagtttcttaggattaatgctcatcttgatgtagtcattatatccagttaatgtctgattatagggagcattggctgctgcaatacattctgaccagatctgactttgttcatcataagacatcacaaagaggaagtcacaagcatctgcgattccagtataattagcatcttctgtctatgttctttggagacaagctacatcaaggtactgtgatcctcatttc

SEQ ID NO: 138272 - DNA, 1353 bp, Homo Sapiens
ttttaaagtttcatactaagttttattgtatgctgctgccagtgtatataaaacaattacccttgtgaaatagaaattcatgaaaattcagagaggtagatgttaaggactgacgaaagtagaagtttgtatattatggcacatgtgttacagggataagcttttgtacaggcttcaaatgtagctctcttgaatattcactggatcataaggagtggtttgggaaacctttgaaagattcattttactacaaaaaggaacagactttctggggtctgaagggatttgtacttgaagatactccagtcagcagagggtcatgttgagcattctgcagacagaactgtttcaagtctgcagctgcctgggaaactttatagttataataaggagcccgctgatctttatcccataggtttccagaaatagaactatttatttgcttcatgatcgttttgtagggcacctgacgtcctgcagcgtcactacaaggagccccccggaaagggacttttgcaatggtacaaacatgatcctcagacagattcaggcaggtataatcataaccataccaaggaacacccattacaagtttcttaggattaatgctcatcttgatgtagtcattatatccagttaatgtctgattatagggagcattggctgctgcaatacattctgaccagatctgactttgttcatcataagacatcacaaagaggaagtcacaagcatctgcgattccagtataattatagcatcttctgtctatgttctttggagaccaagctacatcaaaggttacctgtgatccctctatttcacgatggaaagagtctgtagtttctttgactaaagcagttaatgcatcatattcaggtgataaaccatttacttcttgctctatatctatattgaattccatccatatgattgtgttttggccaaattaagtttttgagctatccaggatgctctgaaagcaggatcaatgatatcctttaaggatacatctcctttaagtactactctggctccttttgaatgatgcgtatgcacataagttctgagtcatattttccaaatgttgccacagttgtaatctgtgaccaatcataagatttccaagttttctgtccaacatcaaacacgaagacctcgaaatctggatggtggcgaatcgggcggcagagctcaggctccgggcatgggcagtcggtcccggccgcgagccgcagcgccagcagcgccagcagcgccagcagcgctagacccgggacgccgctcggcgggctagagacgaggcgccagcgtcgaagctgcggccggatcccgggaattccggaccggtcc

SEQ ID NO: 138273 - DNA, 567 bp, Homo Sapiens
taaagtttcatactaagttttattgtatgctgctgccagtgtatataaaacaattacccttgtgaaatagaaattcatgaaaattcagagaggtagatgttaaggactgacgaaagtagaagtttgtatattatggcacatgtgttacagggataagcttttgtacaggcttcaaatgtagctctcttgaatattcactggatcataaggagtggtttgggaaacctttgaaagattcattttactacaaaaaggaacagactttctggggtctgaagggatttgtacttgaagatactccagtcagcagagggtcatgttgagcattctgcagacagaactgtttcaagtctgcagctgcctgggaaacttttacgcggttgagtccggcctccagccggagctgttgaaccactttcttcatagcggcgacgctggaggagccagacatggtgcacgcgacggccgggccgattcgtgggctccggtgggtcgtgggccgtgggtcggcggggccagaccggacgcgtgggtcgacgatatcccgggaattccggagcggtacca

SEQ ID NO: 138274 - DNA, 876 bp, Homo Sapiens
attagaggggagccccctcgcaggaagtctgccccccatctctgggaatttgtgttcttcaagaaaaccgcgttccgggttgtctcccccccgggggccgtttttgttgatttggggtgggggattcccaaggccccctaggtccatgggcccaggggttctccctagggaaaacaagctaagggcccaatgttccacttttcctctcctggggccccgcggcgcccaaacggaatgggtttaagaaagctttttggggggccgaaggcggcccgacaagttttgttttccttctgtgtcttgtttttttaaagtttcatactaagttttattgtatgctgctgccagtgtatataaaacaattacccttgtgaaatagaaattcatgaaaattcagagaggtagatgttaaggactgacgaaagtagaagtttgtatattatggcacatgtgttacagggataagcttttgtacaggcttcaaatgtagctctcttgaatattcactggatcataaggagtggtttgggaaacctttgaaagattcattttactacaaaaaggaacagactttctggggtctgaagggatttgtacttgaagatactccagtcagcagagggtcatgttgagcattctgcagacagaactgtttcaagtctgcagctgcctgggaaacttttacgcggttgagtccggcctccagccggagctgttgaaccactttcttcatagcggcgacgctggaggagccagacatggtgcacgcgacggccgggccgattcgtgggtcggtgggtcgtgggccgtgggtcggcggggccagacaactcagcggcgcgcggcgggggcggggctccgaactttgtctctccc

SEQ ID NO: 138275 - DNA, 409 bp, Homo Sapiens
  misc_feature (309)..(318): n is a, c, g, or t
  misc_feature (321)..(321): n is a, c, g, or t
gcgcaaccaacatgtctgctttatttgagtggctttctatatcattatacttgtgttatagatgaagaaacggtattaaacactgtgctaatgatagtgaaagtgaagacaaaagaaaggctatctattttgtggttagaataaagttgctcagtatttagagttacctaaatacgtcagcatttacactcttcctagtaaaagcttgccaatctgaataatcctcctttaaacacaatttttgatatggttaagttttttaagaatgcaactccctgcaaaatagctgaacagaccaatacacatttnnnnnnnnnncanacacaaggatcaaccagacttgggaaaaaatcaaaaacaacacaagtcttattaagaactgagttcctggccgggtatggtggctcat

SEQ ID NO: 138276 - DNA, 1007 bp, Homo Sapiens
  misc_feature (728)..(806): n is a, c, g, or t
cagtcgacggtaccggacatatgcccgggaattcggccattacggccgggtaagatcaaggtctggtagggttctgcttctgatgagggtttgtctgtggctcgcaggtggctaccttcttgtgtgctcatgtggcctttcctcagtgcttgcacatagacagtgagacagattttcctctcttcctctttctagaagaccaccaattctagtggatcagaaccccacccttatatcctcatttaacgttaactgtttcctaaaagacctgtttccaaaatcagtcacactggagttagggcttcaacataggaattctgggcaacacagttcattccatagcaacatcgtaaggtactatactcagctattcaaactctattagggcagacatttctagaatagtcacaacactgacatgctccttgtagtattaccatccatcagtaagccaaagcccggaaaggtgggatttatcctaaacccatcttccttacctccatattaccatgtcacagtacttacatctcttaactaatcttaatctagctcccattttcctttattttccttttcttctctagtttgaaaatgctcttacctggcttctttatccatagcttctcttgatttttgtatgtcctccataccattgccagagtgatctttctaaagatcactttgccaaaaataaacttctaattaaatctaaactcttttaatggctnnnnnnnnnnnnnnnnnnnnnnnnnnnnnnnnnnnnnnnnnnnnnnnnnnnnnnnnnnnnnnnnnnnnnnnnnnnnnnntgaaaaaatggaaaatgtgtttacgtaaatggcaaaagaaaaacaacagacaaagactctggacccccggccacacaaaggttaagacaagcgagggagcgcgccagaagaaagcacgagcacaagggaacagaaacgggcaacaaagagggaacccagaaacgccgggaacgcagctcaaccccagggcgaggacagaaa

SEQ ID NO: 138277 - DNA, 906 bp, Homo Sapiens
  misc_feature (830)..(863): n is a, c, g, or t
  misc_feature (886)..(886): n is a, c, g, or t
tttttttcaatgtaaaatcaagttttatatgattcaaagagaaaagttacattacacatgctcgtttaaataatgtcaaagtctgttacataaaacataattatgaaacattttaagtcttatcattcaaactacttaaaaggctcaaagtcacaaaagatcaagcaaaactgcccaggcaataaagtgcacgaggggagcccacctctccagcggccgtcagcacccagagccgccagctgagggctccatgccgaatccatacacaaggtttgtggttctcagaagagttttcagacaggaactgtttccaacttaaaatctttcaacagacaaatggaggtggaagggggatggtttacacaaagtatttccaaatgtaatcaggaaatggaagtgtaaattaaaaccgttttcaacatgtatctcctctttagaaatatcactgcttggagaatgttgtgacaagcaaccaaatactcaaaagaccttatccaccagaatactggcaggactcacattactttgcatgtcataattaagaaaaatatccaaatttgatgccatttatagtgtgtacagtcaaaaatgtgtatgctgattttgatgagcaggagaaaggactgggtggtgaggaaacatgaactatgcacaacatgagacaactgtgctgtctcacgaagacacgacactcacctatggagtgtccagactgaaaacctctgaataacacacacatttgtgtcaagtaacagctgatactaaggggcaagttaacgggtatcaagtcacacacaagtgaatgaccaggtggagattttatcagcctnnnnnnnnnnnnnnnnnnnnnnnnnnnnnnnnnnggccgcgtatgcggccgcaagcnttattccctttcagtgaggg

SEQ ID NO: 138278 - DNA, 144 bp, Homo Sapiens
tgacacacgtgcctggccagccaccggaaagttttatgtaagcaggggagtgatctgttttatcatttagaaggatacacacctcttcttctttttttagagacagggtctagttctgtcacccaggctggagccagtggcaca

SEQ ID NO: 138279 - DNA, 551 bp, Homo Sapiens
  misc_feature (476)..(485): n is a, c, g, or t
cattaacagccccctgtgcatatgagtggatcaaaccggttctgttctttcttgtgttgccatgttactatgcctcaagcccagtttgcttttgccgcagcgatggggccagtctcattcctccccaggagtgaaacttgcttcagctgaaaaggttgggtgcattgtcagtaaaaagggcttatttgtttcattttactttcctgcaaaattttcttcaaagcaacaagtcctaggagcacacaaagcaacccaaaggcttttccctggaaaagctctttcttacctaaagataaaaccaattcacaaactgaaggtagctttttattactccgtggggagcatgtacagagctctgtgtatacacagcttcacacccaccagattgttactacagtgggttgggttttcatacagacgtaaattttgagagaaaagtcaaaggtgcttcagccttgtactgtgtatatatattnnnnnnnnnncaaagttttgtatgtttttattactttaactattgttataaaaagcctgccatttttaatatgtgg

SEQ ID NO: 138280 - DNA, 532 bp, Homo Sapiens
tttataaaatatgaaccattttattgaagaacagttatacagtgtagctacagatactgactagatactaaatatttctgcctgatttttcattgtcttcacaagttagggaatagaaatcaaaaaaccaaaaatctcaaatgatttagctgtccagaacatatttgacagttgataaatttataacagctctgacatataaatttctaattagagaatcctttcatttgaaaaaattgagatgatattaccctaatgaagtttttacctgaagttaacaaagtcctggatttgatatattactttgaatgcattaattctgaaaatttatatttagttctactttataacatttcttctcttaaggatgggatatgaggtacacatgagctggtttctacagtatgaatgtatgtacatatataaagtatggttgtaaaggagtgggtgatttgcaaataaagcacattatacacaaaatataaataacttcccttttaaaagttactgagaataaagaatatagaacatg

SEQ ID NO: 138281 - DNA, 413 bp, Homo Sapiens
gtagcagaacgtgctagctgagaatacgttgtattctacatcactgataatgatctgaagtgtacaagtcatcagtatcagatctatgagagtttttgtaattttgctctaacataaatttctctttgccacctccaaagttattatattaatagtaaaagtaatgctttggagagggtggaagggggtatgccctagcctccacagctcctgccacaaactgcccaggtaagcaggacctgagtgtgttgaaaggctgagttgaagagcagattgacacaggagggctggaatgaacgttggctagagcaggtgtgtccaatcttttggtttccctgggccacactggaagaagaaaattgtcttcagccacacataaaatacactaacactaacaatagctgatgagctaa

SEQ ID NO: 138282 - DNA, 316 bp, Homo Sapiens
aaacccgcagcttttattagccatcgttacagtctctcgtccacaaacactgcccagctcccttcccagggcactttactggaggcaagtgcaaaacactgtggtgctttctattcaaagaaacagaagatgtagctgtggtggtaatggacagcccagctacccaccagttttacagcaggatccgcagtgagcttgatacagatagaggatagatgacggtaaagggggaaaagagtttaaaattatcaagtttcctcttgaaatgtcttttcccaaggcactgtgaaagaagactgctgctagcaaattttct

SEQ ID NO: 138283 - DNA, 348 bp, Homo Sapiens
ttggctcaacttatttgacctttattttcatcatcatcggccactatttgatgtcaatctactatgctgtgagcaaacattaaaattaggaagccaggggtatgggaaccactgattagcatcatatgccagatgtgcttccatccaaagcacatgaacagaatgatattaaattacaagcctatcaggaacagaccagctttctgcctccctttctatgaataccaagtcccatgaaccttgtattcatgtggagttttaagtgcatgcttggaagttatgaggagacagcctggtatgttcgggaaagaaaataaaggttaggtacatggtaggctttggctcagc

SEQ ID NO: 138284 - DNA, 375 bp, Homo Sapiens
  misc_feature (257)..(321): n is a, c, g, or t
gcatctgagtgaagatgaactttcctttcccagccttgagagagggaggctgagctcagtagctcagctcatgggttggttttgaacagtaaatgatctaggtacctggccagcacagctcctggtgcccctttcctgaaggctaacaatgcagttcaaattatatgcttatgcatgttcagaacgcagtagacatcatgtgtcggtgggtgttgagctggggtccctggctgcctgttgctcttaaggagtgatannnnnnnnnnnnnnnnnnnnnnnnnnnnnnnnnnnnnnnnnnnnnnnnnnnnnnnnnnnnnnnnnttagtaccgttgatcagaacttggtgctcatgcctgtaatccactgcactctgt

SEQ ID NO: 138285 - DNA, 840 bp, Homo Sapiens
  misc_feature (21)..(21): n is a, c, g, or t
  misc_feature (47)..(47): n is a, c, g, or t
  misc_feature (56)..(56): n is a, c, g, or t
  misc_feature (89)..(89): n is a, c, g, or t
  misc_feature (605)..(625): n is a, c, g, or t
ccgtggaccaaagagaatgcntgggggttccacccatgcccaccagntaccccaantgtgcccacccaggttggttccattctgggctnccggatgtcgatccccctccccctgggatctgcccttacatttgctaccaggacaggctcatcgacagggcattagagatgcatctcttcagggtggagacacatcgggatctgtcatcctggaccaggatacttgttcagggttgccatgctgctgctgagctgatcaaggaattctctctaggctgcatgttaaatggccaagaggtgaggcttactattcactatgaaaatgggttcaccatctcaagggaaaatggaggctccagcagcatattgtaccgctacccctttgaaaggctgaagatgtctgctgatgatggcatccgaaatctatacttggattttggtggtcccgagggagaactgcccatggacctgcactcttgtccgaagccgattgtatttgtgttgcacacgtttttatcggccaaagtcactcgtatgggactgcttgtatgagcaacaaaaaatcagaaaagacccttgactgtcacaagaaatatttccccctcnnnnnnnnnnnnnnnnnnnnngcccaaaaagaaactctttgctctccttcagcacagtgccttcccaaggacctgcaaataactgctgaaccataaccgtgtttaaagaagagcctacctttcacagtctaccttggccagatattctagcactctaaaaggctccaaaatgaagctgttgatttattctcatttcaaaatatggtttatgagtaattaggtttatttctactgct

SEQ ID NO: 138286 - DNA, 179 bp, Homo Sapiens
cctcaggcctctaccaccagagagctggagaatgggtccacgtcattcaaggacctgaattttttatgctcaggagcattggaatcctcttcttccagggaggaattagcctgcaaggttaggacttgaagagggaaggtatttaataactgggcgaggatgggtgtggtggctcacac

SEQ ID NO: 138287 - DNA, 836 bp, Homo Sapiens
gaccgactgtcgttggggaaattgtgatctgggccaaagttttctgggaaaaccaaaggggccccttatggggttgggggataaaaagagtcccaaaaggggtaagggagtgaaagtcctccatataaagcgtccgtgttccttctggccacaaggattcttggccaggctctaatggctggatccaagggcacggtttggcgataaggaacaagaaggtgcaatatgggaaggggattttcaattttgtcatgctgggaactgtttggggcctgtatggattggaagcaagtgtagagtacccgcccagtctttgtgttcttatcttctatgaaacaggaaaaaataagtcctacaaagccttgatccatcatctggtacatggcttgtgtgcgaacatcaacatgtgaaggccaaacagttatatgaggatgggaatgataccagcccacaactctcatggggcggcctgtcagttcagccaacctctctgcctctgttgaagctgcagacagctgctctggagaaatttctactcggtccttcctcttatcagaacgtcgtaagatgatgacagaatgaatgtgaacaattctgacggcatcaaccttttcagcaactgtgcgcatttcagttccagtatatgcaaatttggagtcactccttgtatcatcgttcaactcccctatgcacagccccattacttcctccttctctgtgctcagagcgtggttgagacaaacgaggaaagcgtcagactcgagatgaaccgcctgcaccgcctgcaccacctgcaccgccatcttggcccgacccttctcacgtccgcctccccc

SEQ ID NO: 138288 - DNA, 1751 bp, Homo Sapiens
  misc_feature (385)..(415): n is a, c, g, or t
tggttttccgtggctttgcggcggtctcgcgtgtgttttgcgcgcgtgtttctgcttttgtgttgctcttcgtcctgggctctcctctggtttgttcgctgcgggcgtgcttcttgctgttttgttgctcgtgcttgtcgctctctttcgtctgctggtgccgccttctctgcggttgtctcgctgcggcgcgtcgccctgtcggtttctcgcctctctgtctgccgcctctgtgcttcgtgtgtccgtgccttttcgcttcgtgcttgccgcgtccgtgcgggtgtgcccggcggtgcttggtgggcggggcttgtgtgtggtgctttttctcttctgtttgttctgggtgttgtgtttgtttctggtgtggttggttcgttgnnnnnnnnnnnnnnnnnnnnnnnnnnnnnnngcatgagagatgcaacaggctttattgttgcagcaacactaacatatacgccccattccctgctgaggcctgtccccacctcaccccttggttgtcgatggtgtggaacattggggtgaggggcaaaatgcctaagcagagctggagggaggcaaatgggactggtgagggtcgggatcacctggaccaggggtccaacagtcaggatacccgactccatccacacaggggcatggaacacttgggttctgagttcaagatttggcaatgtcttgacctgggttggaaggtagggtggggtctggaaaagctttggtccagggttcaagatttgagagtgccttgctccaggccccagtttggggatgagcatggagaagggtggatgggagtgtctctgggttcacaatttgaaattggccatggatgctctggcctgaagccccagttttggggctggatgtaggtggctcttggtcctaggttcaaggctggggaagactcttgtccctaggtaatgggggctgggtgtgagggatatcttagtttggggctggcgtgggggtagggcggtcacagatgtcctgttttgtttgggcagggggctctaggctcctgttttaagtgctgggaaagggctctgggtcccaattatgggctgggggtggggtggtattctccaggtcctgggtacagatcccaggggcctaggatccagcctcctgctcttgtcccagtgcctctagtagcaggcccattggcgtccgcttgagaccaatgctctcgatcttgttctcaatcttgttcttaaggttgcgcaggcgcaacgaggcgtgcaccaggatcagaagcaccggcccggcgatgctgaacaggaaggtgcaagcgccgcccgcgacccagagcaccaggaggccgacggcaagcactgcggccaggcaggctgcagggtggctgcggcggcagcggcgcacagctgcgcgggtctcagctgcccacaccagcacgccgagggccaccgccactaccagcgcgctcaggagcgtatgaagtggccgcacgtacccggcgagagcgaggccgatgccgaagcagagaaggtagttggtttggtagtagaggaggttgttgatgacgcggtggcaccatcgctgcgggtcgcatggatccggagccgccagacgcgccgaccccagaacaaagtcgtccagggcgcgtagcggtggcagccgcacctccgacatcccggacgcgtgggcggacgcgtgggtcgacgatatcccgggaattccggaccgttaccagcctgttttgtcaacggggggagttttcattt

SEQ ID NO: 138289 - DNA, 504 bp, Homo Sapiens
tttcaatgaacaattcgacttaatttagacaatgtttatttcatatgtttactgctacattccatcaagaaatttcttgttttgatgttatgacaatttagcaagtaaaaaacacatttctttgaaaaaaatacttctaagctcaggctcttaacatataaatataatgcacaaaataaatatactgcaaaaaaccacccacctacaaattgctgtatgcatcatttctgaaacatgaaatacttataaaagcgtaactctacattgcttttattttcagctctaagtaacagaaaaacttactttgtaaagtgctagatcttaggctcaagggcatgtggtgtctgctacaactactcaactctgctggggtagtgcaaagacagccacaggtcaaacataaataggtgttttttgtttgtattcatgttttcaaaactttatttatggacactgaaatttgaatatcatataattttcatgtgtcacaatattctttgattc

SEQ ID NO: 138290 - DNA, 1577 bp, Homo Sapiens
  misc_feature (81)..(115): n is a, c, g, or t
tgtatagactcactatagggcgctaggtcggtcgtagcgaacgaccgagcgcagcgagtagctgagcgaggaagcggccgnnnnnnnnnnnnnnnnnnnnnnnnnnnnnnnnnnncagtcgacggtaccggacatatgcccgggaattcggccattacggccgggacctgcaattagaaacagcagttaaacataaaacaaagaacagagcagaaggcacagtctaaagagtgggtatcagaagaattttaccatttacgctcataggaatactaaaccaaacccaatcagaccaaactccaaagcccattgtgtttacaagtctgcctcttttgtgcgatagcaagtcagtcctttaaagcagaaaccccatttactaaccctacatcccaagtaagcaggcctgtatcagaaccaaacagctgtcctcttacatcagaaaatctaagtgatctgaaagacaattcatcacaagtgtttccaattttcttctgcgaacatcaccaatcccactaatgcaaactcagaacattacttcagtcaaatttcgctaaatgctatagctttcttcaaataaaaattagccagaaaaataccttagaaaagattctttctttcttcattggtggattccaggagacttttaagacatggaattctcggtgattatattcaaatggcagagccacatttgctaacagtattttctaattttatctttcttataagaaaaaaagggtaaaaatcggatctgaaatactgacagggttccccaaagttagatattaacacagcttctcatttctcttatgagaactttactgtaaatatacctttatcatagaaatgagatatccaatacacattacaaaatgtcatatttaaagatgacaaatctattcttaacccagattcttcatccacagaagtttaatgactaaaataacacaacagaatgaacgaatgttttattggcatgttcattgttgtaaacagcatctggcatgaaaaagttttaccaacaccttttttattgatttttataaattagatggtatgtacaaaatttatgtagaattgtgttcattgagtacttttatttagcaaagcaaaaacttgctgatactaataaactctgcaatgaaatcatgttgactgcatcagtctgtaccatgaccctgacctcattagcaagtttattcagaacaatgttaagacgtttcccaaaagttaaactacatgtaactaccacttgactctaaaagttaaaactggacttacaagccttctagaagattcacacttgaggtaaatcattcaccactagatgtacaaagagaaaaaaattgaagccgctgaacagagaaacctcattaccaagggcaacgacaatcctatgggacctagcactgaggaacctcactgaggattacatttacatagattgctatacttctcaatgtacacaaatgtacagaatgaatgatacgtgaaaagaataatcatggcagatagttgaactgcaattatgataactcaacaggatcaattttatttacatgctgaataaatgaatg

SEQ ID NO: 138291 - DNA, 1509 bp, Homo Sapiens
  misc_feature (1431)..(1451): n is a, c, g, or t
aagaaggaatagttttattcagcaaacaaaaaacttgctaattcaaagtatcctctagtccacgtaatggggtttaaactacatttgcaaaattagggccttgacgctgaacaaaataaaatccagaggaagaactacagtatccaatcaaaaaggaagtactagcaaatgaaccagaataaaagactttattgtattccatacattcacaggtcacttccagatttagtaacaacactgcaatgctatgatgctgtgcggtcatttagcttaaaccacagtgtaagttggtagctctctcctgctctcttggcctctagatgtatcacaatacaattcctaactgtggcctggcaaccaatgcttatttcattggattattttctgactgggacatgagttcatcgcatcttcccagaattttaaagtaccttcccttacattataagagatgaccaaacactctagtgtgagggctgcttcacacactgttcttatctatcatgattgctcttccttacatacacgtcccgtacagatcagctacacacggcatggtcctgaaaccacagcttttgtttctttggccagaatgcacccctcaccttgagtgcccgccttagaaacacaggtacttggttctcacagggtgtgcatggttgacacaagttcatctgccccacggtaaaagctcttcaaaacctttgcctgactttttgggagcagggtcacaatttgttgcatgtgacctgcctcagcctcaaaagttaagagatcatgaggctccaccgcccccggggtcaggaaacttgatccacatcgctagggctctgcctgttaggttatggatgctcacctgactctctgaagcagagggaggctgacacagattagcttttattgaaattattaaagtgcaactttgtgttttcactctatcaggcactgaaaagcaagaagcttttaattttttcttttctataatgaaatatattttctgtactcttatttgtatctgtaatacacctgcaattagaaacagcagttaaacataaaacaaagaacagagcagaaggcacagtctaaagagtgggtatcagaagaattttaccatttacgctcataggaatactaaaccaaacccaatcagaccaaactccaaagcccattgtgtttacaagtctgcctcttttgtgcgatagcaagtcagtcctttaaagcagaaaccccatttactaaccctacatcccaagtaagcaggcctgtatcagaaccaaatagctgtcctcttacatcagaaaatctaagtgatctgaaagacaattcatcacaagtgtttccaattttcttctgagaacatcaccaatcccactaatgcaaactcagaacattacttcagtcaaatttcgctaaatgctatagctttcttcnnnnnnnnnnnnnnnnnnnnnggccgcgtatgcggccgcaagcttattccctttagtgaggttaattttagcttggcac

SEQ ID NO: 138292 - DNA, 707 bp, Homo Sapiens
catttctcattaaccttttatttttaacttagttttacaataaacagaaaagaagttatcattaaaaaaataccatagctgtcaagtttaaatgaggttcttattaaacaaagcaggaacactatatcctataattacatctttacttttatatacaagaactgtgtgcaaagtgcttttcaaactataaaataagactttggaacaggatagaaatggttatccctaggagttagttatcccagactgcttgtaatgattcacaactgcttacactcttaatttgcattttatttatttatatactaagagaaaagacactttttactgataccaaattgatatctcatttttgaaaataatctttgatccacaggtctaaatgttatttttacatataaattcagttgcttgcttcactttttcctaaataaatagggaacacttttttaaaagcaaatagtagtagatccctttagacagacatattttaatcagtatgggattaaataattaaagttatttgaaagaaaaaaataaggaaaaagagtttgggaaaagtaaattgtattcttatacttttcaggcaaacaaagaaccatcctgtatattaaagacagattatttcttatttaaaacactgtgaacatatgatgttaaacccaacatcatacatcttgagaatgcttaaaaattatttgctacag

SEQ ID NO: 138293 - DNA, 1045 bp, Homo Sapiens
tgaccgctgtcctatagtccgtcacggactcggttggtttgacgtacttgtcataaacgcacttcccatactggttcacgatggacacacgggcggccatgctctcctcccccttagggcccacgcccaccatctcacagtccaaggctaaggctcttgtcaggccgccgaaggcctgctctttcacgaggctgaggctgacgctgccctcgctctgacccaactgtttcctcgctatcttggccgcctctggacctatggcagcttcgatatccgctgggtccacgtcgtcaaaccagatgtcttcctcggtgggtggggctggggctgcctccttagctttccgcttcttatgctcgatgtcccctcgttctggaacaatatcaccatttgtcctttccttggttcctttcttattgtgctctgttccactggccttggtgcgaggtactggcgccctcctgtccatcttggaacctgaaggaacagagcccctgctggcctcctggtcttttcctgccggcatctcctctcccttcacttgaggcgaggtctcttttttgttttgctggataattttgggcttctttttggaacccatctgagagatgacaagaggcttttctggggcctgagatttttgtttcagcagccactcttgcagcgccttccagttttgagaaaagtcttctggtgcctttggaggtcgcaccacagcaccggggccgcttgctggcttcttgcttacttcccgcgccttgcttttccaaaacctttttttcttcttgtttttcttccgagtgagcgtcttgacaggacccggcttagccacggggctgctcggggcgcgcttggaggcggggaccttcgccttccccatcctgctgccgtccagcgcctgggccggcggccacccgagaccccggcctccccgggcccggcgcctggcagcacaagcgcctgcccaggccaggccgaaacacacccaccgcaggaccccgtccaggaaaagcctcgtgccgattcaacacccagctcgtactag

SEQ ID NO: 138294 - DNA, 976 bp, Homo Sapiens
cgggaccgggggccgcccgcccttggcggggcccacggcccaacccaccggcccagggtcacaagccggaaaacgggccagggtgcccagggccggccggggtcccccaccgaccatccggcgcccaaacacaacggggacagtaaagaccaggtttcagaccacaagttcaagaggaaaggaggcctttctcaagtagcaccacgccacgccccctctggccatgattctgaaaaggtttcaccagagttgccactctggggagatgtgatctgtccctgtgactggtcacattgcctctgtagcggggcggcagcagcagcagggcaggactgctaggcgtcgtcactgcagtggtctggagcagtcagcagggggcgcctgtctcgggccatgctctcccactccttcttcaccatgacgtacagcctcattgctgcctgggcatcctgaattgaacagtgctccgcctgctggacctggagcccaaggatcttctctgaaagtagtctcagagacggccttccactctttacttgactcttgaaaggtttatatttctgtgtgtcccgaatcttcttttttggatgatcaagaaatagtacctttaggtcattatgcagagcgtgccccactagaattctgcccttcagcatctctgccacttccttctgaacaacttcaagctcttctccctgcttgaggttctcaggccgaatcccactgaccgctgtcctatagtccgtcacgggctcggttggtttgacgtacttgtcataaacgcacttcccatactggttcacgatggacacacgggcggccatgctctcctcccccttagggcccacgcccaccatctcacagtccaaggctaaggctcttgtcaggccgccgaaggcctgctctttcacgaggctgaggctgaccgctgccctcgctcctcgtgccgatttaaccccagcctcgtactagcctt

SEQ ID NO: 138295 - DNA, 1150 bp, Homo Sapiens
  misc_feature (54)..(54): n is a, c, g, or t
agggccatccaaagggcaggtaaccatcaggatccatttcgtgtcatacatccnggcatgggagcacaagatggtgcttttgggataaagggcattaaaaaaggcctttggcttgatgtggaaagcgggtcagtaaagactccagttctgcacaatggaatcttccaagccaagccgctttccacaaatacaaattcagtctatctttctttctggaccagtctgggagcatcgacaaaatctttgccattgtaaagaatgataaaaaatgttccaatgcttgcaactccccagaagagcacataggccagtgtttctgtccaagtgtcaccagccataagcaaacagataatgcacattgaaaaggcaacaaccatgataactaggcaaagccaggaatttccagtcccttggaacacttaaaggactatgagattctaattcatccactgaatagtttccaagaaataagtctatggaatcttgtctaaatccatcggaaaagttgttcttataatatcgtatcattgagttccagccatccattataagtcccaaatgagttctctttccagttctggtaaagtcagtcttcaagggcaccagttcccgcatattgcttggcacaagcatttgcgttgtcagcccaggcatttttgtaaatcttctcaaattcatcttgttcttcaagcttttgtcccacatgcaaaactcctagtctctgaagttgggcctgaagtgaacgacgagctaacaaactctggatcacattggttctatctagacaatccatgcaattgcttcggaacacgccttcctggtttgccaccacctggccagcagagtccactagaaaataacttaattcatcttgcatttctgctacctgatccaataaaatacttagtcgatcccatctcatatttttacattccttatggaagtcaaaggcaatgtatctcatcattccacttcccaaggaagacaccattgttgcaaatgtctgctcaagtggcttctccgagcccttctggttaatcagattgattataacttgttttccataaataattacttgggaatcaaaatgcctttggaaaccgtccatgtgatttgctactttgctgatctgtggcagtggtttgtaccc

SEQ ID NO: 138296 - DNA, 341 bp, Homo Sapiens
gttggaagaaggggtggaggaacaaggagacggaatgtgcaggagtggggtaaacatgcctctggcctcacccggcgctggcacgcagtaggtggctcagtaaatcctggctgtgtagactgagccgtggaaaagatggttactgactccagagggagttaatttcatttccttccccgagagcagctcttgggagggtacatgaaacttggataatggggcacacatttaggctgctgaaaatggcttagccctgctcttccatcttcagggtttcaccacgtcctggttgcgtggctgtggggtgagttaatgaggaagagcagcctgtctggggagga

SEQ ID NO: 138297 - DNA, 690 bp, Homo Sapiens
tttaaaaattgaataagtatttattgttccagaaggtacattgctttttatacatatttcataaatgatacaggattttacacatgttcaatagtttgctatttgtttaaagaacttttctccatgtcctccctcccttgcttcccacacaccccaaaaagatttgctcgttgcactgtgctgtttcttcttaaaaaccctatgcacaaacaggataaatgggttaaaaataattcacacaacttaacaaaaataaatgagggaaggagctgacgactgggggtggtggagggagaaggaagtgggcggagggtcaggaagtggagacatgcatcctttcattccgtcatgccaatgaaaggggtgttggcaggagtagcagcagcagcagcaatcctggctggccttcaacctttgcaaggcacctggagtctgggtttgtcatttaaagtttttcttttcatacacaatgatcccaaaggaggaagaaaaagagaaagaaactccttgccacaatgaggaaggatgaatcacgtgaaagaaaaggccaatcagtggtgtggcagccccatcatcctttccatcctgcccctacagcagttaaaaacaggatattagacacagattcctttgactcttcaagcgcagatgtcatctggaaatatggtagaaaatgttttgacaaagtat

SEQ ID NO: 138298 - DNA, 1006 bp, Homo Sapiens
  misc_feature (303)..(433): n is a, c, g, or t
ttgcgccttggagtttttcagtgcgtgcttttcccccgcatttttgcgtggccctcttttgcgtgcgtcatcgcccgcgttccgctttttgcgccgtgctcggcttccgcttcctggtactcgccgggttcatgtctcggttctgagacttttctttctggaccggtttcccctgcccgctgggtgtccttgcattcccgcttcgctgcacctcaacatcctggacgcagtcccctcccccttagcatcctggtggctgggactacaggtgtgtacccctgctggcctcattacgtttttggnnnnnnnnnnnnnnnnnnnnnnnnnnnnnnnnnnnnnnnnnnnnnnnnnnnnnnnnnnnnnnnnnnnnnnnnnnnnnnnnnnnnnnnnnnnnnnnnnnnnnnnnnnnnnnnnnnnnnnnnnnnnnnnnnnnggggaatacttttaaaaacttaaagcgagtgaagggagtctgattaaagtatgcacaatgaaatataaagctgtttagaaggcttaaaggtctcggcagtaacctaatttccccactttcctaactttatactagtaattccaaacatttcctgatgagaaacttcgatttccctgaaattttatgatcactaatagggaaggactgctgagtcacataatcactggtggaatggggatttaattagcaacaacagtcaagtcccacccagtaagcacctgagagcttgtgagtcagttgaagacacgtatttacctgagtacctgccatgtgtaacggtgctggtgatagagcccaaggaacttggttgctatgcttcaaaggagtggtggactgttttactaagtgggatatggcaggaacttgattgaaacacatactcagaagtagttcacctcattatagcttaaatatgtaacactctgggcttcaggtgattccggaacgcgtgggtcgacgatatcccggaattccggaccgtaccagcctgctttttaacacaggggtatattg

SEQ ID NO: 138299 - DNA, 525 bp, Homo Sapiens
aacaggggagggttgtggggggccattttgtggggcggctatacatctgcatttattatgagcagcaggtgggacacttccagcaacagtaaaaaaaagtaatttacaaaagcaggtttcagtgaagccatctggttgttacccttgggtgctcacacgtagatgccaacccagagcagcaggaagaggactccaaagcccatgaagagtgaggccactaaggagatgaggagctctttatagatatcacgagtgtacttggtagaggtgacctcgtaaacgaagaaccaggcggtgaagaacatgccaatggccaaaagcaccacggtcagatgggggaagacagctgggttcactgggctggtatatctgctcatggcctcgagctccattttgccccgcgaaggctaatccgccgctccgccaccggaagaacacgtcggcaggagcaggcgcctagcacaaccggaaaaggaagtgcctccggcgcaagtggcattgagggacttgtagtcctgcgatttc

SEQ ID NO: 138300 - DNA, 557 bp, Homo Sapiens
ataaggactgatggaggaggggataactgttggatttctcaactaccacagggctagcttctacggattctggttctgaacctgcagccatttccaagtatgacgtctctgctgtatcaacccccaatgggatcactatgctcatgacgttcgcctctggtaaattcgattactatggagtcctatgcattggtatccaaaacactggggcatgccagccacagtgctcattgcaaacatctaagtgcatccacaaaccctgtgatgttcacacacgagacacccgaaccccgttatgtgctcgacccccaaggagtctctccgcacctccgcgaacaggcgaccccccgacagcagccactgcggacacaggacccggctccacacaccccctccccaaacagcagcgagcagcctcttcaccaggaaccgaggagtaggggagggggcagccaggcagtcaacaggaacgcagagacgacggcgaggctgctcggagtgtctatgcccactctgttgccgctcccgaactccggcacggtctcccagtaggccaa

SEQ ID NO: 138301 - DNA, 1187 bp, Homo Sapiens
tttatcattaactttggaaactcttgaagcagttaaagtaattgatgttggagtatgctgaaatgcagtatataattccacaggaacctcatcaccactctcagttgcactggtatcaccatctgacatattttcccttttccggcgttgtagtagcactgccctctctttatccaaattcctaggctgacaacgttcacatagatatgtatcaggaatatgctgcctatcaatccccatgcagtcaatatgttgccaaacgctgcatttgtcacaacagatcatgtatccatcatcatgtgtaaaaccacatatgcacctggttacatcagtaccataacttccatcctcagatgtgctgattgtagtagcactggaagtttcatcaaaattaggagtggtaaatatgcctacttcatttttgctaataaggactgatggaggaggggaagccggaggtgtcggaggaggacgagcaccataattatggtccgcatagggcaaaccaatgtaactgtgtgaatgatgtgagctgctggtatataactggtggggataactgttggatttctcaactaccacagggctagcttctacggattctggttctgaacctgcagccatttcgcaagtatgacgtctctgctgtatcaacccccaatgggatcactatgctcatgacgttcgcctctggtaaattcgattactatggagtcctatgcattggtatccaaaacactggggcatgccagccacagtgctcattgcaaacatctaagtgcatccacaaacccatgagatgtctggtaaatctgaggtccaagaaagaataaatgtcttcacaaaacctgcttatccagaatagacctgtgatgttcacacacgagacacccgaacccccgttatgtgctcgacccccaaggagtctctccgcacctccgcgaacaggcgaccccccgacagcagccactgcggacacaggacccggctccacacaccccctccccaaacagcagcgcgcagcctcttcaccaggaaccgaggagtaggggagggggcagccaggcagtcaacaggaacgcagagacgacggcgaggctgctcggagtgtctatgcccactctgttgccgctcccgaactccggcacggtctccgactccggccacctgcgcccgctcagtgtcac

SEQ ID NO: 138302 - DNA, 621 bp, Homo Sapiens
agctctgccaaacgctggaagtggtagaacttgccaagcattgtgtccttctgggcaggatcttgagctatatcgaggcactgcatggacagcatccagtaataataggcagcatcattaaacctgctctccgccacggcattgtttgtgagctgctccagcacctggacgtcttctctctgtcgcccagccttgtggaacgctttctgggcttcctcaaagcgatcgttctctgctagccactgagcatacggcatgtagatgtcatccttaaactcaggatgcttctcacccaaagcaaaggcctcatcccagcgctgggtctccacgtgcagctgcaccagggacttgaggtcacccatcttcaggtaggtctcagcagcatagccagggctgtccagcttcttgaggtagttagcgcacagcagcaggggctcgcgctcagccttgtccagtttgcgggcgatgtcgatcaacatgtcaacccagccatggtcaccacagatctcgatggccttgacgtgctctcctgctgagatgtacatctccacggcggctttgggctccttgatatttctggccctcgtgccgaattcgacacccaggcctcgtacctagccg

SEQ ID NO: 138303 - DNA, 610 bp, Homo Sapiens
gtccccatcagggatgggcttgggcaggtggtgaacggtcacctcatattcctggtcagggtcaaccacaaagtgggtgaaggtaaaacgccaccgcctgtggtgatgcctcagtttggacagaaactcaaacctgacgcacaaacgttcattggtgttcagctgcaggacagataactctgcaccctcgaggtacaggatgctggcgtctgtctgcagtgtccattcgatgtgagccacggggaacaggtctccttgttgggtgtgggcaaagtgcagctggatctgcaggtcctttggggaggagggggtcaggtttcgagggtgaatccagctgtcatccaggcaggtactattcttgaccgtgcagtttagccccggctgggagcagaccagcgcccggtggtccaggagtcgcagggaggcgccacccggggccagcacgcccaggagcagcaggagcagccccagcaggggccccgggacagcggacggcgggctgcgtgcggcccccatggcccgggtggcgtcgcggagggctcggccccggctggggacgcagcgagcgaacgttctcgtcggctttcggcgcgccgtcgacttcatactc

SEQ ID NO: 138304 - DNA, 601 bp, Homo Sapiens
gacacggcaggtcgtttgcttttgatcagactctttggaagggtgttggggtggcagtttttatccttgaagacctcagatatgctaagtcaacctaagcaaagtatactcggtggaaccctagctctgtggggtgatctgcaaaatagagtatcctggtcatgtaagttcaggaaatgctacagactcaaggattatttttggggattcaccatgcacagcacacattgaaggctgaaaagtccttgcagaaaggaaactgacttaactttgtttcttaaggatatttgaccacaaaacccttagtctgcatcacaccaacctgatgcctcctggaacctgtgttctgtagaatgcgtattagaaaatgttggacaacctgtttcattatcagaagtcccatttctgaggacagtgttctctgcctggaaataaggtccagattctcaattccagggacagccaaggtctgtcactctacccagtaaaacacattgcataaatctccatccatcaagggtatagttgctgcgcgcttcacaaaggggagagagctcggaagaaggtacacaacgttttataaatagcttcagctaccttc

SEQ ID NO: 138305 - DNA, 705 bp, Homo Sapiens
tttgagaaaaattcttttggattttattccaagtgtgatgggaagccttggggggttttaactagggaataatgtgatctggttcacattttcaaaagatcattctgctatatagaaaagtaatgaggcaacagaggaagcaggaagatccattaggaagccatattatagtggcccactaggtgacagtagccaggaccaggatggtaacagaaaagctggagagaagcaacagcctcaggatgtcacatggagtgtaaccaaaagaacgttctggtgaacagatgacagctgtggtggtgggacagaagggataatgaatggggagtcatcaaggataactccacggttgtggcttgttccaacattgagaggtcaggggcaaccagggggggtcatagttttcgtgagagagatcaagagtttgacttgggatgaataaatttgcctacactcaagccttcccagatacctcatttcccttacctgccacacccacgcagccttcaaattcacaaatttaaacttctcaataccgactctcttatcaaatgtaccccttcaacttcaatacccattgcctctgtcctgctctggtcctctcttgccttgacatatataacaatagctatgaataaactaacacaaagcacttaataagggtgtatctctctctcccaccagccatctttgatggcagaaacc

SEQ ID NO: 138306 - DNA, 474 bp, Homo Sapiens
tgacgtcttgcgctggcatctacttgtgacttgagtaaataacgaacacaacaaaaaggagagataccaggagtcagatatcagctatatgcctctctctgtctattattcatttataagaatggcctcatggagctgatatgttaccaaaacgttgtatatgagtgcatccaactctgtcatccctgaaacctactacaaactactgctataacaggctacttgctttgcaaggttgatttcaaatcatttcctttctctgctacgttccaaaaacaagggccatgctcagatctgaggtaccattcccatgacgaggagccagttcatctggcctgtcttacagtgcccttctctttggatctcaatcaccctgggcgcccagcatgcgcgttgggcccccaccgaagcagcagatgcctgactctagactgccggcaatcagctgaatgttaggatttttgagtcagcttc

SEQ ID NO: 138307 - DNA, 371 bp, Homo Sapiens
ccgccgcagcctcatccaccaagattctccactctctgcccacagatttgctggctgccggcctcagtgttcacagtgaggcgttctgggctagacagaaggcagcgatgccaacgtgccagaaacaacacagcatggagaagacagccaagccgaggtggtcgtggggtagaaatggtgaaagacggctgcctccatcccagtccgagtcactgtcactggatgacatgtcctcaacatcagggggccttggttcccccaggccagcgctcacggagggaagaggcggtgacaggaactgcaaacccctcagggactcggcaaaggctatctctcttaagggggaccccagctcatcctccaggcttctg

SEQ ID NO: 138308 - DNA, 502 bp, Homo Sapiens
cccattgtctgttgcttttgttttcattagtcatacttctagtttcatgatgtttaatttagattgtgaagctccttgtgcatttttggggggatattttagctgtggcaatttgttgaggtgtaaaatgaagcttcttttccagagatgacttgtatttgtttctaccgggtgctcaggggcacaaaaccagcctgggatatgcctaaattaaattctcagcttgggtgtttgaatccctatggtatgaatgccaggaacaagtaagcatcgatggcttgtagtccaagccttagcagtagaatctacactgctcagaacccaacttcggagctgacttttttatttgcattcatctgtgatgggtttgtatgtgtggttcatccttctactcttgagatgacagatttaggtctggtgtctcaccttcacctaagaagatatatcaggctctataccctggtcagtttccacgggttgagtaaaagccagctgtagtgcc

SEQ ID NO: 138309 - DNA, 554 bp, Homo Sapiens
ttttttttcaggagcgaataccaacctttatttgcacttgggttccagttcaaagccaccttagacagtgtggcaaagtgggaaaaagcacagatcctgggaccaaggttcagattccatctcaagcgagcatatgaactgtgtgacaacaggcagacagtacctctgtgtctatgagaaagcggggagagcaacaccccagcttctagcagctctacagctgcctggacctgcaggccctcctaggcccacttcctccccagcacagtgtgtgttcccgggcgtgtgtggctctgggtccagctctgttcagggtgggactccaggtgaattactgaacctctgaggtgtacccccaaccccaaactttcaccaaaagcaataaagaggaactctagaactggagccaggactaagtgagaaaaactgcttataagtgcttaataaatactagttatttacaacttttgctcaaccgaggcagaggcctttgtacgcagctgccgaactctgactctagttctgcggaagaaaaggatgcggtatttgctttt

SEQ ID NO: 138310 - DNA, 959 bp, Homo Sapiens
gggaagactccctgcacagagaggttgccgataacctgcagcggagttcggcaggacaagtcctccagcacagcccattcggtgttaccgcttcaccagtttgtaggcattcacagggtgacccaggtagccctcagcatcagcactgacttgctagtcaaggcttccatttgttggcccaactgtgaaccagaggaaaaggaagactaatgcgtccaacccacataggtcttgacctgtgacaattttcctagtgagaattacctggtgccaggttctggggcccttttcatcaagaggcaatgaaaaatgaatacagtaactccccacagatacttctagccccttaatctagataacagctgggacccccaatgtaagggaataggtcttaaatagaaaataaacagtgactccttagcccatgtacttagctcctctcaagcactggcatgaagtaaccaggccagccccacatcaccctctcaaaggtttcctcttataggcaccctggatggcttccttgttccttgaggggcagaagggaaggaaggccaactaaggatggttggggacttaggacacctcttaatcttggaaagcttggcttcctccacaaggatgtactctttcagagactgcaccagctctttctctgcataaatcaggtcagtcatgtgcccaatagaggtgaagaattcggcctgcacacagctcaggacaccaaaccaggccatcagcaatgcagacacccagagtttcatggtcacagagggaagtgtcacactgctctgggccaggaccttcccgctcttccaatccgcctgtcccactgggttagcaactgcttgcggtttctggcacacagaagggtcccgtttgttgaattagttaacgaattatcacgggtctccgcagctgccaaggaaaaacacgctggttccacaaggatgtctgga

SEQ ID NO: 138311 - DNA, 966 bp, Homo Sapiens
aagggttcgtaaacatcccttctccagggccaggtagtcccacagggcctcttcataagatgccttctgggggttgctagctcagcttctgtctgatttgttaacgttttttctctctcttcctccaataactgctcaaagtaccgcagattccctccagctcgttcgtggcttgggtcaagggagagcaggcggcgggtgagctccagggcacggtgcagatcacccaactggaagacagcatagctgaggtagtccagcacctgtgacttggttgtggtggcctcctccccggcatcaagctgctttagcacctgctccatccacaacaccgtatgataatagtccccttcattgtaggccgagcggcccatcccaaagcagtcatccacactcagcattgcctggtacttggttcctggaagttcccctctggaaattgtgcctgggtccagcctgtatgtgtcctgaagtctcatcagggctttggcagctcctatctcgtcctcatcagtggggaagaactgccgctgcacagagaggttggcgataaaacctgcagctgagtcctgcaggacaaggtcctccagcgcaggccagtctgtgtttagccgcttcaccagtttgtaggcattcacagggtgagccaggtagccctcagcatcagcagctgacttgctagtcaaggcttccattttgttggcccagctcttaatcttggaaagcttggcttcctccacaaggatgtactctttcagagactgcaccagctctttctctgcataaatcaggtcagtcatgtgcccaatagaggtgaagaattcggcctgcacacagctcaggacaccaaaccaggccatcagcaatgcagacacccagagtttcatggtcacagagggaagtgtctggacactcgcagctccgggcgtttccagaacctcccgcggcgtcgcccggtcagctccc

SEQ ID NO: 138312 - DNA, 913 bp, Homo Sapiens
  misc_feature (198)..(198): n is a, c, g, or t
gcacggttgcagatccaccccacctggaaaggacagcatagctgaggtagtccagcaccctgtgaacttggttgtggtggctcctcccccgggcatcaagctgctttagcacttgctcccatcccacaacaccgtatgataaatagtccccttcattgtaggccgagcggcccatcccaaagccagtcatccacactncagcattgcctggtacttggttcctggaagttcccctctggaaattgtgcctgggtccagcctgtatgtgtcctgaagtctcatcagggctttggcagctcctatctcgtcctcatcagtggggaagaactgccgctgcacagagaggttggcgataaaacctgcagctgagtcctgcaggacaaggtcctccagcgcaggccagtctgtgtttagccgcttcaccagtttgtaggcattcacagggtgagccaggtagccctcagcatcagcagctgacttgctagtcaaggcttccattttgttggcccagctcttaatcttggaaagcttggcttcctccacaaggatgtactctttcagagactgcaccagctctttctctgcataaatcaggtcagtcatgtgcccaatagaggtgaagaattcggcctgcacacagctcaggacaccaaaccaggccatcagcaatgcagacacccagagtttcatggtcacagagggaagtgtcacactgctctgggccaggaccttcccgctcttccaatccgcctgtcccactgggttagcaactgcttgcggtttctggcacacagaagggtcccgtttgttgaattagttaacgaattattacgggtctccgcagctgccaaggaaaaacaacgctgttccacaaggagtctgacatctcccgggaatccggccggtccagcct

SEQ ID NO: 138313 - DNA, 862 bp, Homo Sapiens
gaacgggcctccccaccctccggggcaccgacactcacggagtcactccaacttctctgggtgctccgtggagcgaagagcgctctaggacaagcaaggattcctcttctcctgtaaatgaccacagaggaagacaatgaatgaggtgaaagaatcccttcgcagcatcgagcagaagtacaagctcttccagcagcagcagctcaccttcaccgccgctctggagcactgcagggagaacgcccacgacaagatccggcccatctccagcattggacaggtgcagagctacatggaacactactgcaacagctccacagaccggcgggttctgctcatgttcctggacatctgttcagagctgaataagctctgccagcactttgaggccgtgcactctggcaccccagtcaccaacaacctcctggagaaatgcaaaaccctcgttagccaaagcaacgacttaagcagcctcagagcaaaataccctcatgatgtggtgaaccacctcagctgtgacgaggcccggaaccactacggcggcgtggtcagcctcatccccctcatcctagacttaatgaaagaatggatcgcccactccgagaagttgccgcgcaaggtgctgcagcacgtgagtgagccccaggcgcaccaggagagcaccagggtgagccgctcggtcctgcccaggccatagggacccagcccagggccactaaacaccaagtgtagaacaggtcacaaaaagccagcctcaaaacccaggggatgttcaaaaccaccctggaggcctcctggtgggaaattgtaactcagagccaggagctccgtcggcggagagctttgctgtttaatttggatt

SEQ ID NO: 138314 - DNA, 1225 bp, Homo Sapiens
  misc_feature (76)..(76): n is a, c, g, or t
  misc_feature (1027)..(1035): n is a, c, g, or t
ggcaccaactccaccttgttcttctgcagtccagagcaccagccgcagagtcctctttgacgcagcccaagatctntaataagtgagagtgcttcccatgatataaagctccaccgccatcatccatggcaccctgcccaacatcccagctgtccagatgtccactgaccagtacaacctgttctggatatttgctcccagtgatctctgctacagtgttgaaggaatcagtatctgggtaggtctttgcccccatctttagctgaatgacaattttgatcccatgagaagccattcttgacatcatttctgcatcttccaccgtaatacaggctgttggaatcttgggcacgccatcctggtattcctgaatacctgtgtgaggactgtagatggagaaggaggccacggatcgaatgagagatgccaaagccccaaccttggcagcttccaccgccccctgcgttcggtattgcaccgtccttgagtagttgatgtaaggttggttataaacgacaatcttccctcttgcttctgaggcccttctctgcagttcatcgaaagaggtcaccaccagaacttctgctgtaatgccttctggaggagtcccaatgctgctgccaagacccaggatggctatcttatgaattcttggctccagcatcacagctgattcttctcccctctcccagtggggtattctcactggctccaggtgaactttctccagcccatcttgctgcaggttttggtacataatttggatggctttttctaggttcttggagccactcagtctgggtccaacagtatcaaccagaagtgccaatcgctcataggatctgttctgggctttaccataaacagctaggttgatgattgctttagcaacatctccacagctggctatttcttcttttatttcttcaaaagtcctcttagagatgccattcttgcatatagctttcccagagcacagggataaaaggtgaacaccaccgaaaaatgcgaagataaggaatttcannnnnnnnnccagttggttttcttgttaagataatctgatagggcggctctgacggcggcgacggaggcggctcccaggactaagctcgcggcctagcccttacggtggcggcggccacacacctgactgggctggggccctccgcgccgccccgtgactgcagccctgcttgccggccaggccgcgggccgagaggcg

SEQ ID NO: 138315 - DNA, 720 bp, Homo Sapiens
  misc_feature (68)..(122): n is a, c, g, or t
tgcatccgcacccagctcctaacaattttttttccccctcttattgagccagggtctcactctgtcannnnnnnnnnnnnnnnnnnnnnnnnnnnnnnnnnnnnnnnnnnnnnnnnnnnnnngctcaagtgattctcccacacaggtgggactacaggcaggcaccaccatgcccggttaatttagaaaaaaatttttgtagagacagggtctatcttgccctggctgtcctaacaattcataatcttcatgaatgtggacagtttgaaggaaaaccactactctcacctctttttctaagcacacggttatagcaagtagagattaaagctcattggcttacctagaacaccaagagaggaaagataccttgtgaattaggtcatagcaatgcttcaaacaacaactgcccataaccctacaaatccttgcaaaacaacagttactcacattctttcttcacgctacggcatgactggcagttctgcactgttgcccaatcccggatcactaggaaccagaaatccttatcaatttggaaaaaggggaaaaacataaaagtagtggtaaatgtcatcacttttttcctccctgagaaatcaggaaatctctccatggaagccactcatccccctggttttcatcaataagaaggaagcaaagtgtattacacactagaaaattcagctaggctgaactagttgagaaatttagatgcag

SEQ ID NO: 138316 - DNA, 1260 bp, Homo Sapiens
  misc_feature (1143)..(1177): n is a, c, g, or t
tgatgtgtgttgccatgtgttttggctgccgccagctttgtgtagctgtcctttgtgtgtgtatattgggcatttgtctctcttggttttattcgttactgtttcacttgtcgtacgtctgtcatgcttgttttccctgctccttgtctttgtcgcttacgtgcatttgtgctgtttttttccacgaatctcttgtcgctccccctagtcgttctttgttctctctttagtgtgtatccgtttgtttattgatggtcatggtgggttttgtacatgtctatgttgtctcgttgtcccctttcccgtgctgtaacccccctcgttgtgatggggtgttgtacctatatgagcttaagtttccttggagtgtactgttatttcaacttgggacgagtgccggtatggtgtctccagtagagtctcgtccatgttatttcttgccattgtttcgtggattcctagtctgtctttcccttctgcatagtactcaagcagctttgccctctttgtcctccttccagcgtggtaaacctaccctatggcactgtaaactctgcacatctaaagccttgtggacaaagtctcttggtagaccatttcttcaagagcacttgtcagtttggtgcgaaggggtgatctttctttgacctttaaggcttctaaataatgatggatggcagtattttctgatttacggtgcaattcctgaaacgcggccatagtgctaatggatctgatgtgttgtgatcatcggttatgttctccagacgaagagctttccggaaaatgtcctcagcattgctatactggcctccttcagcgtacatgttggccaggtctgtgtaggcaaatgcaaacatagagtctcgttccatggctgctttgaaatgaaatatagcagatgaaatcagctcatcacctttagtttatcctttcctttaggtctgttgtgtgtggccttcttgatttggatcatttgtgccctgtagcaagtcccatctggtgatgcaggaaagaagaagttggtgtcacctccaggccttttttaaaagttcgagagctttgttccaggaattttttctcctatagaaccccggccgtaatggccgaattcccgggcatatgtccggtaccgtcgactgnnnnnnnnnnnnnnnnnnnnnnnnnnnnnnnnnnncgccgcttcctcgctcactgacttcgctgcgctcgtcgttcgtctgcgacgagcctgaggccctatatggtctgtgcatgtgt

SEQ ID NO: 138317 - DNA, 1772 bp, Homo Sapiens
  misc_feature (839)..(852): n is a, c, g, or t
ttttttagggctggtactttttttaggctccagtgaccaacgggaacacaacggtgccacccctgaacgatgatctggacatctttggaccgatgatttctaatcccttacctgcaactgtcatgcccccagctcaggggacaccctctgcaccagcagctgcaaccctgtctacagtaacatctggggatctagatttattcactgagcaaactgcaaaatgagaagaagtggcaaagaaacaactttccaaagactccatcttatctctgtatggcacaggaaccattcaacagcaaagtactcctggtgtatttatgggacccacaaatataccatttacctcacaagcaccagctgcatttcagggctttccatcgatgggcgtgcctgtgcctgcagctcctggccttataggaaatgtgatgggacagagtccaagcatgatggtgggcatgcccatgcccaatgggtttatgggaaatgcacaaactggtgtgatgccacttcctcagaacgttgttggcccccaaggaggaatggtgggacaaatgggtgcaccccagagtaagtttggcctgccgcaagctcagcagccccagtggagcctctcacagatgaatcagcagatggctggcatgagtatcagtagtgcaacccctactgcaggttttggccagccctccagcacaacagcaggatggtctggaagcttatcaggtcagactctcagcacacaactgtggaaatgaaaacttgaatacaagtttcattcagaactaccacctgacattccttgctgaaacgcatctagttcccctgtttattcatatgcatannnnnnnnnnnnnnacccatttgttcatattaagaatgatctgattgaccgtgttggtctgtactgattcaatttgatgtggtgaaaagcaggttgataaatcattttatgtcaagggcagctttgctcatatttcccatgatttcatgtactgcattatttgagaagctgctcaacttgcaaaatcagttttcctctcaataaaattatagctctaatgtttgcatataagggaagtagttatcatgttagtaatacctctaatagtataaaccccaccccaaaattagccagtaatcctgtaggaaggtactgtatgatcaaatgtttaatcatataaatagaatgtaaatgtctcactgagcactgttttctagtgtatcaaaatgctcttatttcatcattcacttcactgtgctgttgttatgatgtgcttaacagggaacgtgattagtgaaaggaagataaacgtggatgttactccaaaacttcgtttaatgaatgcttaaagaattcaaattttatctgcctctcttgtaatttggatctcttcttaatgtacatagtgctaacatgaagacctttttctgcactatatgcaaacagggtaactaactaaaacaaagccactttcaatcttcaatccttgaaggtatatctaggtttatgacagtaattgtgtttacattttatggtgcctagtattgacaaaatgttatttccctacattaaacatgactccatagaccttttcatttgtgggtttttatttcctatgatgtatactgccactaaccttccaaaaattacttagtattgcaaagtcaggaatcatcaggaacgtttagctgacaaaatacttgtctgttttaaaaacctgttcaagtctaccaacctgttcaagtctaccaattataagggcaaattggagaaa

SEQ ID NO: 138318 - DNA, 268 bp, Homo Sapiens
acaggccgttgtacacttttaaacacctagaaagactagatgtttcaaactggacttaagttttccattatatacacagtagcattgaataaatggtatacatacataacacagactgtaatttgagtgtcttctaaataggaacattctggcctagaacccttccctttcccacctctaccaaccccgtggacagctataagccatctgtaatgcttagggggggttttaacaatttcacttgtttttaagaagtcttccctatgcc

SEQ ID NO: 138319 - DNA, 1035 bp, Homo Sapiens
tttttaaaggaaaaactcctgatctttaatgcaggtttatgctttacatagtaatttgatgggacctcgccgtccctgtcaggtctgaatgtcacttcatctgctgtgatcacacctgaaccctcagttcatcaagacgttaaaggacagtgtaacataaacttgtaactgcatgcactaagtcataaacagacgctgttgttgcagattaacctctacgtaaataacgcgcccagaagggagtgagtacacgctgctgccacgctgcgacggtcaattttcctccggcacccttcctagtacctgagcagctccctctcaaatccccaacactacgtgtgggagggtgcactgaattcctctttaaaaaggccactggaaggcgtggctgggaggggacgcgctctagacccccctggtgccagggcaggtgcacgctaccgcgctttcggggcggggcccagggccccacctgaggcggggggccgcgggctctgggcgtaggtgcagcttctccggcctggtgcggggccagacggccgccgccggcttagcgggggaacttcgcctagtcctcgggctgcggtcgcagcgtcattttgcctgagttggatcacgctcgtccacccaccccgtgtaaaaataacaggtgaataccctatgtgggggtcctcatcgccgccatttccagaagcttccagtcacagccactgccacggtcgccacaaatgctactgcagagcccgcttgcccagcagcgtcaccggcgcctgccctgcctcttcgcccagcctttgattccccctcctttgtcggatagtgtctgcggcggggaggcggtgacactagtccgagtggggcgtggagaccgaccagcacgaagggcggagttccggcccgcacccctccgccgcctgccgcttggtacgtcccgcttccccgccctgcggctcgcggagcctggctgagcagcaggaggggcgggcgccgcggacgcgtgggtcgacgatatcccgagaattccggaccggtacc

SEQ ID NO: 138320 - DNA, 639 bp, Homo Sapiens
  misc_feature (623)..(623): n is a, c, g, or t
tacagtaaggaaaaaaatatttattttctaaagtcattaccttgacaggcaaaacaaagcatgttctcaatttcatttagaaatacatattttaaaaatacatagaccaatatggcctgcccaaacagatatttaacatggtaaatataaggaataaattgtttgaatataaatatctataaaaaaataagtacatcaaaattcaatccaacctctttcattagccggttatataaaggaaaataattttactgctttaaagcgtaacaaacacttacttttcaatatatttcataaacaaccctataccattgtgtctccaaaaatcaaggacagggaatctcctgatttaatgatcttttttttcttatggatcagagctagtagattaccatgaaaatattatatctactgctgacacattagaccagacttctacgaggctaggatttagtatgggggatggaggaaggggcagcaggggtgggaagagtttggggaggcaataattaaatgtgggaaatacttctgccagagtgcaatataggtgaggtagactcatattcatgaaacatatcctgatttatggtagtaacagtttcattcagttttgcattttacanatttcctcgtgccgaa

SEQ ID NO: 138321 - DNA, 398 bp, Homo Sapiens
  misc_feature (343)..(343): n is a, c, g, or t
ttagagttcattcaacaagagtttattgtggttgtactgtgagctcggccagagctgctgagtggcgggtgtggacggatctggtccgggatcatttcatggggccatggtctgttacatctaataacaaaaaatcggcgtgtctttctgttcatatcatttttctagtatttcttattgcattttacaaaggcattgctttgtgaagaactggaaattgagaaagaagccggatcctctgccacagataatgtgagacacgtggacacagcgtgtgtagtctgggtgggtcagggagctcctgccctgctcttctcaagtggagaccggggtgctcagatancctgcacccctcccgcccatgcacacacaggagcccctcctagcaccaactcact

SEQ ID NO: 138322 - DNA, 721 bp, Homo Sapiens
tagagttcattcaacaagagtttattgtggttgtactgtgagctcggccagagctgctgagtggcgggtgtggacggatctggtccgggatcatttcatggggccatggtctgttacatagctgacttctaggctccggctggcgttgagcagagtccgggagtcctcgtggctgaccacacacgtgtaggtggctggctgagggctgggcggggctgggacacgcagcacactccaggcccagaacgtggtgctcccgggctgtggaggggggcgtgcgggggcaaacccagaagtgttcacctcacgctggtcctccagccacatcaggaggatgttggggggcgagaagccagacacctcacacaggagccacgaggccgcctcgggagggtcagacgaggccagcaggttcagggaaagcttgacgggtgcctgcgcagcgggttctctcagcgccatcaacctctggggtgggaggctgggatggttcagtgtgcaggtgaccgaggtccccgctttccacaagggccctggcagggtcaaaacggcttacttgctcttggagcccgttgctgtgcccttcagacagcccttactccccccacttggggggacccttccagccacttcccaagtcggagagcatccctcaggtcactgccaccacaaaaccagtaaaggtggcttgtcccccgagccaaggtccttgcctcgcagg

SEQ ID NO: 138323 - DNA, 156 bp, Homo Sapiens
tgttctcaacttgtttaatatggaaaaaggtcatcaaaacggtaggcagggttgctgtttttaatacattcttgggatgttggccattcagacagcattatttcaaatatagatgagttatccaactttttttgactcaaagatagtttgcttaga

SEQ ID NO: 138324 - DNA, 326 bp, Homo Sapiens
  misc_feature (217)..(235): n is a, c, g, or t
ggaatatgttaagaaaactatcagatagcgtttgatacactagtcattgtctcaatcactgatcctgtaagttgtcatcaaaatatgatttagaaatattggccaaggtgttgctttaactgaggagaaaagaaagcacactgcctaaatgtgtaaaagaaaaatgcagaggttattaaaatgtaaagaagtaccaatctttggatttgtctatacnnnnnnnnnnnnnnnnnnngtgctttgccttaatatacccccttttttgtttgtgactttcaactgtaatcagttaataaagtatttattctctgcattcaggttcaaat

SEQ ID NO: 138325 - DNA, 1372 bp, Homo Sapiens
  misc_feature (1260)..(1294): n is a, c, g, or t
cttttcagaacaagttattttattttgatgaataaaagcagtagctggcaattgaaaaaaagttatttgctcaataggacagcacataccttaaaagtaatgggccttttcttacacatgaaaacaaaggtattggttatagagactacacattatttggttccaacttcactgggacaggaaacacaccaaaggaagtgctgaagcctgtgttggtatgaaacctgtgatgaatgtgacacataggaccatcaactcaattcttgtttctgaaaacaaatcctggaagcatcacttccagaaacacttctgtccctagcagagctccagccaggctccaggccacgaggtgctgtgccacagttcctcagctctggtcagttactttcactatctcaatcttcgagcaagtagttagggttaactaccaagtagggatcttcttcatagctctcacttccctctgtggagcctttcaatccagcctggggtgagctcaattagaacatgatcatagtgtgtgagtcgatgaataactttctctatgattctttttttatttataagttcttcttcagagtctatctctgattcgatttccttcaagtaccagttaacaagctcgctcctctttaatgctgactcgtcctcttcttcttccacctttctgaggtgaagcacaataaggttagagattcggcagtactcagagaagcccagccttaaggaggctttgggagcagactcttgatttatgtcttcattgtagccattgatcccgttcacaggagcagggctgtcagcatgaccattgatgccaccagcaccctcatctacctccatctggatctcttcctcttgatctagattgacatcaggtgtttccacacggatgattgatttattcagtaaccggaaagcttccttcacatgtttaggttggacctcatcacagcagtgcatccgagccatagcttcagagagacgaatcatgctctcaagctgtcgcactgtaatcctccatgaagacttggtcactccagaaccatctctctggcggagatgtttatattgctccacaatgaagtcctctgactctttggaaatcttgggtttaaactgtcttgcaaagagaagatatcttctgatatcatcgagggaatagacacgatccattgattcctcaattcttgaatgcaaatctactatcccggccgtaatggccgaattcccgggcatatgtccggtaccgtcgactgnnnnnnnnnnnnnnnnnnnnnnnnnnnnnnnnnnncggccgcttcctcgctcacagactcgctgcgctcgtcgttcgtctcaacaagctgaggccctatagtgagtcgatcag

SEQ ID NO: 138326 - DNA, 744 bp, Homo Sapiens
ttcattcttaaataacatttattattgttgcaaagaagtcttctccatgagaacagttctcacatttatttaaagatatagaggttatggatatagataagtatgcccgactatgatccttaattcagcaatctaatattcacaatgtgtttgttgccatttagctatttatcccaacatgcccttaagaaaaacaccaaaaaaccacatgtgcctagacagggtggaaaaagaaacaccaaggccttgctaaaaaggagaagcctaaaaaagataaaattcccacggcagttctgttcaagtgtagcctgtgagtgcaggaataatgttcccgtggggaagcattatgcccagtggtttcttggtgtcaacgtgtgaaagcccttgaggttttctgtcgctgtacaggaggaagcacgaagagtgtttatggaatccagtcgacgttcaggcaccgcgcgatgaacgcaaacatgtttgagacttcctctatcactttggctgtgggcttccccgccccgtggcccgccttggtgtccacgtggataagcagggggttgctttgcttcctgctgcggcccacgatgtactgaagggtggcaatgaacttcagggagtgaagcgggaccacgcggtcatcatggtcagcagtgaggagcagcatggacgggtactggatgtcatctgcttctggtaacttcacattatgcaatgaagagtatttgacaagccattcaaaaagtt

SEQ ID NO: 138327 - DNA, 476 bp, Homo Sapiens
ctcccaccttagcattacctgaaggtggtagccagtagttttgtgcatgggtatgaaggcactttaagaaagatgttaatactgacttgtaatatgcaatggtgtaaaaccaattaagctgtgttgcattttgttacaatatttttttaattttgtttagaagaattttgaggcctttcagttaatttttctggaaaagcatcatccatttttgcttttattattgtccactaatgatttgagaggaattgtccaagttacttattgaggcttaataccttaacactttgtttttttccttagtttcacaggaaggttgtaggggatgttcactagtggggataagaaaatgagatgttgaagtggcttggtcccaaaaggtgattaggaaagaaaaataatagtagttaagaatcttaagccaagaaatggattctttctagtatcttctctttaataatcagtactatgccaaa

SEQ ID NO: 138328 - DNA, 511 bp, Homo Sapiens
aatagaaaagggaaaggtaagattttggtaacctccaaacattgaagtagttcacagacccaaagtcagtacaaattagaatgtccatccataataaaagtatctataaaattacacagacacattctacatagtatttaacattagagaagacaaattacacagggactgaaataaaatgaaacatctactctcccgacaaatgttgaatatacctaatcaacccaagttcagtttatttttgcacattgctttagagatataacttggctgggcacagtgtttggtttttaagacttctgagcacagtaactcatctaattctgatcaaactaaggttacccatacgaatacaaaataagtttctatattctataaatgtcaaatcactgtactcttacttaaaacataacacacataattttggctaacgattttccttatgagcacccagctctttgcccggccgtaatggccgaattcccgggcatatgtccggtaccgtcgactg

SEQ ID NO: 138329 - DNA, 1015 bp, Homo Sapiens
  misc_feature (708)..(708): n is a, c, g, or t
  misc_feature (729)..(729): n is a, c, g, or t
  misc_feature (770)..(770): n is a, c, g, or t
  misc_feature (788)..(788): n is a, c, g, or t
  misc_feature (820)..(820): n is a, c, g, or t
  misc_feature (851)..(851): n is a, c, g, or t
  misc_feature (875)..(875): n is a, c, g, or t
  misc_feature (883)..(883): n is a, c, g, or t
tattttttgtacttttattgaaaaggtacatttaaaaaaatacacagacattttaccatttacaggttgcagatatagatgctctaaaagagtccactctattttgttgttctatgataactcttgcccctgatatcacaaacattccagtcttgttgatatcggcttagaaaggggggcatgggagcatgacctgcaatatattcagcgaacagaaagacaaattgttcaattataaatttttttatcttctgtacattattgcattagggagccacaaaattatgtagcatcattacaaatgaaaacaggttaaaaatgaagaagatacttatatagaaatacatggattcattgtcttcttgcagaatgcacaagaggtgcaaaaatgtgcaatttaggaagctctttttctgtttgtatacgtttgcttagcaacacaaaccagtgaggaagctacaaaataagttaaacaaaaatagcaaacaggtagtaattatagctatgttatatggctttctatttcatttaaatatctccaaataaaatgtgaaataaagaaaatacattattttatcttttattctcttacagagaaaattcaaagctactttgcttcctaacatttacacagcaactaaaaatgtttaattcagacaagagatacagatctagtactacacaggatacagcagtacttgggtcganacagtacacaatccctgtcancaacagtacaccaaaaagagaacttttgtgatcgttggtangatagtatccacaagtangcacttgtgttcactgttttttgttcacactnagatacaccagttggatacagagttattacnacatctgaggagatctagtttcantctgtcangaatattcatatgttttagcagtcatccatggaaataagatgtttcttcttttctctgacataatgtcagaataatatcgaaaacaatgacgcgaggtgggagataggaatagctagtgtgtctcatatagg

SEQ ID NO: 138330 - DNA, 986 bp, Homo Sapiens
  misc_feature (32)..(32): n is a, c, g, or t
  misc_feature (364)..(376): n is a, c, g, or t
  misc_feature (535)..(584): n is a, c, g, or t
  misc_feature (857)..(943): n is a, c, g, or t
cgcattcattgcagttcggacacgtcgaggtntcgagtcagagcttcatctatcagtcttttcgttctcgtctgtcgatctgtgatcatgcgcgcagggccgagtactcgacagctgctcagctgtccagtactgtgctctcagctggcggagccagctggctcatgacagagctggggttcacaggtgtgtttaaaggtccaggtgaggggacactgaagttctgtggggtccgcgccgtcactgggctctgggagggctgcggtgaggggctgggcaggaagctactgggagatggggcagggccagagctgacgttggagttgggctgtgagctgggctggccgggctgcggggacggctnnnnnnnnnnnnncatcgactgcggggtctgcacctgttggcccggtgacggcgaggacagcatggggaggctgctctggctgacctggactccgggagccaccatggggaggctgctctggctgacctggactccgggagccaccatctgggcagcctgagctgtctgtannnnnnnnnnnnnnnnnnnnnnnnnnnnnnnnnnnnnnnnnnnnnnnnnnaccatcggagctcggacaaatttcagtggtggttgggtatacaacatttgtccagggagagcttgcgcctgtgacaccaaaggctgggtctgcgactgtggcgggagttgtgatggttggttctgagcaactggaggctgctggggctgtggtggcggctggtggtgctgtgtgtgatgcatctgctgcagctgctggggcagagcctgggagggcggaggctgtggctgctgcatcggtggctgctgaattggtggctgggcctgcaaagcnnnnnnnnnnnnnnnnnnnnnnnnnnnnnnnnnnnnnnnnnnnnnnnnnnnnnnnnnnnnnnnnnnnnnnnnnnnnnnnnnnnnnnnctgctgtatctgttgctgattttgatgatgcaatttaattaga

SEQ ID NO: 138331 - DNA, 940 bp, Homo Sapiens
  misc_feature (626)..(840): n is a, c, g, or t
  misc_feature (844)..(845): n is a, c, g, or t
  misc_feature (849)..(849): n is a, c, g, or t
  misc_feature (861)..(862): n is a, c, g, or t
aaagcacaactcaagtgaaattgaagtagtcgataatcagaaaagatgacaaaagtccacatgtgacatttgtacgtttctagctagaatgttaaacttcatcctttttttactgttgacctatttgtgggagggatgaaaggctacaaagagcacattcttgtaattttcaaatttttgcctgtctcttgaagaggtattttttcacccttagaaaagggactgtttttctatggactaagtagaagttccagagtcatgtaagaaaatctttgctattgtgtggagagaaattgctgcatttctgtttcttaagtgatggtacatttgtccatgtaacagaacaaaagatccatttggaaattttttttactggtatcaccttacatggtatcactgggaacatttatggaatcaacacttctgtagctcagtgacaggtggtggttgtttaagtgcagagcaatattaaaatgtactggtgactagtacatgtatttctccataagcagagttgccgaatcaataaacatgcaagtttgtactttgatctttaccaggtcagtggattgcttcaaaagcagagttttgtgcaagcactcactgtgctctctgaaagagctgannnnnnnnnnnnnnnnnnnnnnnnnnnnnnnnnnnnnnnnnnnnnnnnnnnnnnnnnnnnnnnnnnnnnnnnnnnnnnnnnnnnnnnnnnnnnnnnnnnnnnnnnnnnnnnnnnnnnnnnnnnnnnnnnnnnnnnnnnnnnnnnnnnnnnnnnnnnnnnnnnnnnnnnnnnnnnnnnnnnnnnnnnnnnnnnnnnnnnnnnnnnnnnnnnnnnnntgannaagntgaggttgcaanntgaacccgaagaatcgagccaacctgcacctcccagccctggggtggaacagaagccgtgaaggacctcccgctctcc

SEQ ID NO: 138332 - DNA, 420 bp, Homo Sapiens
cttgagaaaaaataaataaataaagctgggacaatggcataaatgaatctcacaaacataatattgagcaaaagaagccagactcaagggtatatactctgtgattctattcataggacttaaacaggcacaatcaaaaccatctcagtcagaagtcagagcgtggtacctgggagagacacccgaggggcatctggagtgttggggccatgttggtgatatggacgtacttcacttgtgaaaattctcaccaaaatgttcacaagttcttttgaaagagaggggatgtggggagggagaagaggttatatgagattgtctttaatgttttgtactttttgcatttttaagctttttgacaacatgtattttataatcagagaaaaatgctgacttttataaagtgccattattatgatt

SEQ ID NO: 138333 - DNA, 499 bp, Homo Sapiens
tgatactgctttttccctttcttgcacattcactattgttaagtattaggaatgaggagctgctgtgacattcaaggcctgggagagtgagcattagattataatttgaaatcaaagcctggtccttgcaccccttagatgtatgaccctgggcaacgtgggtataagaatagtacatttctcatagtgtcatgtgatttaatgagataatggatagagagtgtttagcaccatgcctggtacactctaagcactcaataagtggtattcactatttttataaagttgaagtttgacccatacgaagagaccaaaacatggatgctggggtaaaagtggaggagtaggatgccaggagagagagcactcatgactgtcaagctgtctgatctgtgacagatttttctgagttacaactagaattgaccttatatctttgctcttaagagacaggtataggtaaatgcttctagggacttaagttgcagcatctttaaaa

SEQ ID NO: 138334 - DNA, 923 bp, Homo Sapiens
ggccagcttggaatggcctttatcttgaatttggagggagttttttgtgaaaaggagcttaaattacccccatagtggcaaatgtccctcacttgctcggaacaaggtccaacaggaagttaggttccccaggctacctcccttgtttttttctgtgaatcacttctttttgaaggttttttgccagcaatttctactaatctggctgcacggagtttatatgcttcggttaggctttcggggctgttgatatccaccatggttggccagactgctacctgctgtggctggatgcgctgactggggcaggtcgttcaaataggacaccatgccacacaccaactttcctgagtgcacctgatcataacttttcatcaggaacctagccgtctggagcatcatgacagtgttttctccctcaaaggtacagcttggggtgaaattgacataaatatttggaagaccactgcaatgagaatagccatgcccaccacaagccatccgacatgcttcaatgccagtgtttgcagtccaggaggtgaaagccttcagtccagcggtgagggcatgaagctcaggcagttcactcaggtccccttgaccaatgccttcgttaatccggtgataggtctccttcatgtatgcgcccacaaactggaaggcataggcagtggccaggagtggaaagagtttatactgctgggtttgaaaatccaaaatctgtggttctggttcacctggcttcatttcagactggtgcctcacagcgctgtatcggatggcaatggtgcacgccttagacagagcccgagcagcttctcccacaaggaaggacctgacaaacaccatggtcccgtaagtcagcttgttactcagcggtttcacgtatgttccatcaggcttcacctggaagaagaacgtgg

SEQ ID NO: 138335 - DNA, 361 bp, Homo Sapiens
  misc_feature (157)..(169): n is a, c, g, or t
tgaatggatttatgctgtcttagcaatatgacaataatcctctgtagcttgagctacccctcccctgctgtaacttacgtgacctgtgctgtcactgggcataggacagcggcatcacggttgcattcccattggactcatgcacctcccggatggnnnnnnnnnnnnncgggggttctttggggtttgtttgtttgcttcttttccagagtgtggaaagtctacagtgcagaaaggcttgaacctgccagctgatttgaaatactttcccctgcgcagggccgtatgcatcctgccaagctgcgttatattctgtactgtgtacaataaagaagtttgcttttcgtttaccaagcacccg

SEQ ID NO: 138336 - DNA, 988 bp, Homo Sapiens
  misc_feature (33)..(33): n is a, c, g, or t
  misc_feature (142)..(142): n is a, c, g, or t
ttgagccagcttgctattttggcttcccatcanggtgacccaagaacattctcagaaggttcttttcaaagttgtgcacatttccttgaaatatctttacacatctctcttggggggcaaatggccggacatccccagacancgaactgtattgtccattgcattggacaaaagataagagccttcagaacttaaactcaggccagtcactgaatctgcatggcctctcatggtgtaggttagcttgttctggcgcaggtcccagaccttgatatcattgtctattccaccagaaataatctgatcacttgtgtcattgaaggtcacagctaacacctggtacgtgttctgaaatgtctggatggctgctttcttccggatgtcccaaagcttaactgtgccatcgtcactgccagtgcagacaagctgagggcctctcctggctggataacaggaattcacaaaggaagtatgtccctttagccttttaaccctctcacctgtttcactatcccacacagccacggttttatctgtggatgctgagaaaagcatactgccatctgtgttgtaatgcaattccatcactgctccactgtgtcccttcagtgtggcatagttatcacagtcaccatagacattccacagtaatatcagtcggtcaaatcctgcagatgctaaggtggatccgttggggtggaacttgcagcagtagacttccccttcatgtccagagagcagcatgattggggcttgaagggaggaacatcttggaggtcccgcttgcagcaaggctcccggcgtcgcctgctgctgcccggctcctgggccagaccccgctcccaacagcaactcatgccgctgccgcttgactggaaccagcggcaactctgggcccttacgcttctgctgttctatcatggcggcaaccggtctcttcagccgacgcgtggtcgacgatatcccggaaatccgacgcggtaccagc

SEQ ID NO: 138337 - DNA, 318 bp, Homo Sapiens
tttttctttttaacttagaaaataaatttatttagagaaaatgtttcatatttcttttctagacaaaggtaaatacccaacccagcagagttcaattgttaaaatgagtgaccgctgctacaggtcacttccacatgtcatgtgtgtacaactgaccattagcacaagtgacgaggcagccaaatgattccatttcttatttatcccactggctatgccaacagttgcttcatatcatgctgaagaaaacccacaggaaaacaggccaagaaatgtccactgcatgagcatgaggtctttttgttgatttaagggtga

SEQ ID NO: 138338 - DNA, 953 bp, Homo Sapiens
  misc_feature (650)..(650): n is a, c, g, or t
ctcttgtctgtttctagaacaaaatatattttattttaattataccagcacagtaaggcccagaaagaccatggagttgcacaaagaatgttcagcaccagcaagataaaacagatactggcagtcagtgctaacggctagcacacaagcccctgccgcatttgtatgatctggagcagagcctcctgaacatcttcatccatgtgaccctgtgcagcactaagaaggtgtgtccgataaattgcaattacttcttggtgctgtctgtcagcatcggccagctgttgctccagagatttcacttggtgctgcagagtgtcaatcagctggctctgcctcttggtggggttcccacttgtgtaggtgagttgggaaaggccattgagtgcctgttttaatctttccacatcattaagcagttcagttatcttattatcttttgcttctatttgtttagcagattcttgtattcttctttgtaactctgtgattgttgttaaggacttatcacatcgttccttctgatccttaatttcttgctcaatgctgaaatgcagtaattccttctcatcttttgcagatatttccttctttttggcatgcaaaacttcctcacatacctcctcataccttctattcagattggccantttttcatttaggctagaatctgtgtctcaaatcactttttggtggctttaaattaaacaagtcactacctctcagtcttaaatttttaatggttggtagaatccgacccccacggaatttggggattctccatttggtttggctcgtcttccttccccagctggttttagatcaattcttcccaagctttgtactggattgcctgcacggtaaaagattctttgctccaaactgtatagttggcctgggccgcctcccgaaattggagccttagcccgttgattcatgtgcatcgcattttc

SEQ ID NO: 138339 - DNA, 783 bp, Homo Sapiens
ggtttatggacatgttttggtggagtttcctgagaaaaggcccgtgggagataaatcagttgagaccctgtatatctgaaaatgtctttttccccctccggcagacacattttcactcagcaccctgaggatgtttctccaatgtcttcaacttcccccgttgttactgaccagtcttaggccattctgattcataattctgtgacctacacccacccccaccacccccgtgttctaaaatttcacaggggtatgcctaggtatggatctttttcattcactgtcctgatcacttgtaggacctgctcaacctaaagatgaatgtcctttagtactgcaaattttttttcttaagcaattccctctgcttttattctgtccacaactattaagctggtagtacagttcctggactaagttttttaaaaatccttctgtcgtactgcccaatattccagtaaatttccttaattttattttcaaatctttctggtgattttagttctatttcttcagttttaatttctaagacctgtttttcagaaaatgtttttcactttttccacaagttccctctttatggcatcgtattattgctgaagaatatagtgtcttctcatatgtctctgaagatactaaatttcttaagattttgaagaatctctcttctgctttccccagtatctccaattccactaaattcttctttctctgttggttttgttaatctctgtgttgaaggctttcttcgacgtcttgctggtaggaagggaccgagctcga

SEQ ID NO: 138340 - DNA, 824 bp, Homo Sapiens
ccagcccaggagccgcgggccttgctgggttgcggggccccaggccgcggggcggcgcgggacggcgggcgccggcgccgatcagccagtagacatgatgagcatcaaagcctttacgcttgtctctgctgtggagcgggagctgctgatgggcgacaaggagcgcgtcaacatagagtgcgtggagtgctgcggcagggacctctacgtgggcaccaacgactgcttcgtctaccactttctgttggaggagaggccagtgcctgctgggccagccacgtttactgtcaccaaacagcttgagagacacttgggcttcaagaagcccgtgaacgagctgcgcgcggcctcagcactcaacaggctgctggtgctgtgtgacaactccatcagcctggtcaacatgctgaacctcgagccagtgccttcggcggcccgcatcaaggcggcagccacgtttgcactgaacgagaaccctgtgagtggggaccccttctgtgtagaagtttgcatcatctctgtcatacgcagaaccattcagatgtcttctggtgtacgaggaccgggtgcagatcgtcaaggaggtgtcgactgccgagcagcccctcgctgtggctgtggacggccacttcctgtgtctggctctgaccactcagtacatcatccacaattacagcacaggcgtctcccaggacctgtttccctactgcagtgaggagaggccgccgatcgtcaagaggatagggagacaggagttcctgctggcgggccccggaggctggggtgaggaggatgcatttgtgcgcctgatctttttgggtggc

SEQ ID NO: 138341 - DNA, 906 bp, Homo Sapiens
tttctgtatgccttaaagaatttttatttaacataatgagagtttaataacttatattaaagacggcgtggtgctctttctgttgctgttcaccaactgtttttatgacgataacttcgagatctggaatgtgaccgaaaatgagaatgctttgctgtttgtactttagtttcagaattggtataccctttgggagatttacacggggatcttgctattgagtcagaatgtcttccatgtgatcttgattttgttcctgagctagtctgcttttgaggtgaacttgactgtgattttcctattgacttggacctcttttgtaaggacttggaccttgaccgtcctctagagccaaaattccttcttggagttcttgactgccttgctgaggtagaccgccttggtaatgatttggaacgagatttagactggctataagaaaatcgcctgtgtcgagactctttaaggctgtctgaccgcctcctatttcttccccatgaagaacttctacttcgagttcttctttggctggggcttattgatctcctgtgatcacttggagaacaaggatgacgttcttttgatttcatttggcctggtgttttgcgatcaccttgtgcaaactgtatttcaatctgacggccacatacccactttctattgaggttataaagagcatcttcagcatctcgaacatcttcaaattgaacataagcaaatcctcttgggcggcgagtgtagaagtcaagtggaatgtaaacgtctactatagggccatatcgaccaaactcacggcgcaagtcctcaggcctggtggcgtccgcgacgttcctgatgaacagggaggtgttggggggcctcgtgtagcgagacatgaccgcttcctccgttccctccgggtctgcc

SEQ ID NO: 138342 - DNA, 1041 bp, Homo Sapiens
  misc_feature (78)..(112): n is a, c, g, or t
  misc_feature (494)..(507): n is a, c, g, or t
tgtatagatcatatagggcgctactcggccgttgccgaacgacgagcgcagcgaagcagtgagcgaggaagcggccgnnnnnnnnnnnnnnnnnnnnnnnnnnnnnnnnnnncagtcgacggtaccggacatatgcccgggaattcggccattacggccgggctccttgagtgataggagataggtaaggtaaagttgtcaaaaaggatgtcacagcaagtcacttttctagattaacgtcagtgattcgagatactgaactcttgccatcgtcattcttctttcccattttcctattgatgttagataattgatatgtatttttaacaaactgtgagaggaagacattagtcgtatcccttatgggttatccacttaaattcaggtatttttcatagttactcagggaaagatggaaatgacagagcacagacatttattttttaaattgatagggtagaaaatgaaatgtacttctgtttattcttaatacnnnnnnnnnnnnnncacacatagttttagcaaattggaaataatatattcatttgtatggcaagataaatgcagtcatcttaatactagtctatacatttttgccaaatggcgcaaatatacctccatttatattttgtatcttaaaatgtagtttaaaaataggaccatgtatgagacactttttttacaaaaagtgccgtatatacatatgtaacaggtgagtgtgtgtttaacataatttatcattatttctgtcagtacagcgtatatggaaaattcaagttgtttttaacatattcaagtatgttcagtattaaataagttaatcccatttcataatgtaaatcatatttttgttatttgccatattttatttgaagtgataaaattttataactcaaatttgaatgtcatagtacattgtgtgctaaccatggcaagcaaacatttacatttgttttttacaataaatttcttttaaaatatactttctatttttctgtactgacatatgcaataaattggtacattaaaaatttgaaaaaa

SEQ ID NO: 138343 - DNA, 1077 bp, Homo Sapiens
aacgttccaattaatttatttaaattcattaatgttgcaaaaaatatgatgtgcaacaaatcaagacacaagttatattcctaacaggtcaaagaaaatattacatctccttagtaaatcatgaccaactctggtatttcttacagggaccacattaatatcttgcacacacagacatcagaactgaatttctgacagtactaggctgggcaacatcatcttaagagtaggaaaatatcacagtacattaattttgtctaaatgacagcaatgaacctgtggtaacaaaagtatttttggaatagatatcaaagtgtgttaatgtcttaacaaactctgaattgtgttctgtgtgaatagtgctccaagggctgtgcaagtcagtggccctgaacatcatcaatatttactagctaggtttacacaaataaacaagcaactgttaaacggacattaaactttacaaagtccacatacaaaaagtgcagtgtagaagctgatgaatgttattttccaagttcctccttagccaaactgcataaaaatttcaaaatgcaaatattttaacttcttgttaaacatgattctaagacatcctacaagcctagtatcattaatttgaaagcacgaaatgattttcatttggtgcttacgtgctttatgtgaatttttcatagcattttacttagttctcaaaacataaataggtctattataaatagttgcaacatactgttatattcaaattttagtgtcactccttactgttaaacatgccatactactttattttcaattatcctttagaacttcaaaggaaagttacataactgggtctcaccattgatctgattgtaagttcattcagaatctcaagaagggcagagggggatgcttgccaggtaattgttttgtattagcttagaacatttgagtagataataccccacttccctcaccagttggccttcccattcaagtctaagttcttgactccttctcgcagcaactcaaactacacaattcccccggccgtaatggccgaattcccgggcatatgtccggtaccgtcgactg

SEQ ID NO: 138344 - DNA, 854 bp, Homo Sapiens
tttgcacagtcttacatattccagtcaaggtctatgaatacagaccctcaacaaacaggaagcagctttaaaaatgtatcaaattgctatagtcaattcctacactccagcttgtagttttctttgtttcaggattagacacagaacccattcttcaaggactggcaaaagttctagaaacaaacaccatggtggtggaagcggttgcgttgcttcagtgatcacctagatttggtgtctttggtttcagtgttctggttactgaaggaatcccggatctttacaacttcagctgcacacaaatgtccaaaagattttgtgtaccattctggcatgtggccccttaagtcaactctgcacatgtaggtgagtttggattttcctggcccacagggttcaatcaaatacctggacaagagcacattaaccctcacacccaccacaggtgcgcgatcgtgatccacagaggttagtaaaagggcacaggctcctttgggtaaattagtcctccaggttcttaaaacaacgtagtctcgagcaggatgaggtgccatactgttttggacatactggtaaatttcagtttggctgtccagaatttcgatcacttttgaatccaacaggtctacatcccagaggtgctgttctttaagtaggcgctttaagatttcctctggcacagcagggacttcaatgactgacctccaaagcctcagagggggtccttcgctcaccttcttataggacagctcagcctgctccgaagtggagtagctgacccagcctttaaacttctctttgacttctttaaacaggccatccacacagtcctgtgggcgtgacggaccggctca

SEQ ID NO: 138345 - DNA, 484 bp, Homo Sapiens
tgttttcaatttagagatttatttttccaaggttaaggatgatgagccaggacacagcctcaggaggtcctgagaatacaagcccaaggtagttgggttaaaggctcttgtttttatatgttttagggagacataagacatcaaccgacacatgtgaagtatacattgatttggcctggaaagggagaagcttacaggtcacaggtggattcaaagattttctgatcggcaattggctgaaagagttattatctaaaaggctgaaattaattgaaaggagagtctgggttaagataaggggttgtagagacctaggttcttatgtagatgaagtctcataggtggctgcccttagaggcaacagatagcaaatatttcctattcagacctttaataaaaggtactagactcttagctaatctcttcaggatcagaaaaacaccggggaagggaaagggatcctctacagaatgtaaatcccctc

SEQ ID NO: 138346 - DNA, 422 bp, Homo Sapiens
tttgtttaaccaattaagctttgagtgttctaagcaggacaggtaagatctgcgtctggcacagtcagccaggtctccttaccctctgcttccctttctgcctgtgactgaatgggcatgtcagggtctagtaggggatccaggaggaggaagcctcattaacttctattctgcagcaattgatggccatccaacttgaacagtgggggcttatcacctcatatactaagaccagagatagctgatgccaaggttggctaaattagtagcttgaaatgttaggtttttcatttgaggtttctatgctgctattgtcttctgctcttggtcacagagactgccacaatcggcatgtcaagtcctcatgtgacaatatccagacacagcaaggaagaggtagagtgtattcctgcatgtttctt

SEQ ID NO: 138347 - DNA, 1225 bp, Homo Sapiens
catttgttcggctctttggctcctgttggtgtcccccgtgtgcccttctagtccccctgtggatttgttcggaccccctgggtccccccggggcttttttattggtgtgaatcctccgctcttgttcctgtccccgggtttctcttggggacccccgtttgtgcccgtgtctaccgtatacctgggggccccgcggcccaacacaggtgtcttaggaactctttttcgaggccctcatctcggcccaaacaaggttgtgtgtctttcattgtctctagatacatggtgtcctgtttttttcccctaaatggtaggatttatttcaatgctcacatacaattgaatgagacaaactatttacataaaacataagtacaaaaaatataatacaatttatactgtacacaatcaggattcccttgttttgttccccccacaaatggcagctagagatggtaagaagggggttggtaggaaagtgtgactgcacactcagcagtgctgaggatagatcttcagaatgctttttcataaagatgaatagggttgagatacagaaactgtcaatgcaccaagagcagtaagagagcacaacatattcacttctgtaataatagctatatattttttcttataaacgtgtttgtttctcaaagctgaggcttggagcaggtgtgagttgccttccattgattggttaggtgacctccgcccacccctgctccaacttccatagttgatccaatgcagcaggtaatgagtttccagttgccacaattggtgtcttaagctgatttcagaaaacaatgcatctgtcagatgtcattaagcaacaatctgggatacagacctagacaggtctcaggaagcatttacaaccagtgaattgatggacaggaaagataaaagtcatgaacattagaaatttctattgcgcacatgtaacaagaaggttttgaagaatatcaatgcttcaaatgtaaggattgaaagaaagtgtggtgtgtccatggcccccttacaaaggacccagcaatctacaagtgttctagcatagcaacccaagatccattttctcattcaaacaaaggggaaatgtaaagctatctcattgttttaaaaagctaaattataattaagatacattgtcttttaaaattaaatttaagatcagtaactgtctgcaagcttaccaagggctgaaattggctttggaggagtttca

SEQ ID NO: 138348 - DNA, 896 bp, Homo Sapiens
  misc_feature (590)..(613): n is a, c, g, or t
  misc_feature (783)..(783): n is a, c, g, or t
  misc_feature (787)..(829): n is a, c, g, or t
tttttttgccacaaataaaatgagtttattttatattaaagttatcaaaaaacacacctgtaaaattacccacatactaggcttagagatagccttttacaaacagattattaaaaatctgcaaacttattttctcttaactattaaagtacatagatttaaaaggtgttagaaaggcaaaatgttaagtcatggtcaatgtcttaaaaaagagttaatataattaaatctgtagcatactacaaaaagattaaatcttaaaaatattttgggaaaaaagctataattttctttctgaaaaatttaatcttaagtgatatttactaagaaatatatactgcaaaccacaataacaatgatcttctcaaaatttgcctaattgcttcacaaatgagtcaacttacaaagaagaaaacacagaaaattgcttttaaatatataactccttaattttcctgataatcaaatgaaaatttagtccatcccaattaatacaaattagactcatgcttaatgtaagatatcattatatatttcttaacaacataaaagttcaagcatttttggaaagcacagactgtgttattctnnnnnnnnnnnnnnnnnnnnnnnntatttaaccacagaaatttggaatatttatatactttataacactgtagaaatctttggtggtgacatatggaataagatccctgaaaatactttaatcattttgtcccatcaatcagtgtagtcaagtatttataatcagtaattttggcagtataattttttagccanaatnnnnnnnnnnnnnnnnnnnnnnnnnnnnnnnnnnnnnnnnnnntatatattgtgaagtatgtgagggggatcttatgcaggacctaggtgggcttacaatcccgggaatt

SEQ ID NO: 138349 - DNA, 315 bp, Homo Sapiens
tttactggcaggtagcttggttttcagaaacaacgatgaatgatgcaaatatctagaattcagtgagtatttatcatagaagcaacagcaagaccactactattgctatatctaagtaatatcccagttaattgtcctagagtggcagatggtctgctagaacaagtattcaatcacaagtgaggagatgcagctcgtttaccagccctttctacctcacagctatggtgagaaaggaatgaagaccatctggactgcaaatgcttggttaaatgtttatcatgcattttgtaaactgttaaagtctacaatgtt

SEQ ID NO: 138350 - DNA, 382 bp, Homo Sapiens
ttttcaataattttttttgtttaatgctaagatcacttcagtttccaaggtcatataaagaaacatccaatttagagaaaaaattctgtaataagttcaaataccaaagcgtaaagatgatgtaacacagtgcctatgctgcatggttacacaaatgaaacgagaaaggtagtgattgcttctaaattctcactgaaaactccaatttaaaggtttattgcagtctaggtatttttaatttttcccttggtgattatcaagatggttgatgctaataagtactattaaaaaactaaaatgctgtcgaatatggaacttcttttagttaagaattattaatatagaaaatgtgagttggtggactggtacttcttgtgctctg

SEQ ID NO: 138351 - DNA, 580 bp, Homo Sapiens
acttctttgcaacttgtttatttccattttatttttacacaaaggcaaagagaataggagtgaggaggcaggaataacgctgggtcactcccaggaagtggggaagaggctgcagccaagaagaatgagtcaggctgctcttccttggctttcttggtaacagcaatgaacaaaaggaagacgaggcatggactccaggcttaagttaacaaggtcagtctgttcaggccaagcaatgggaaggaagtgtcagatctgtccaatccatgttcataaagaggaaataaggcctaggtccgtctattgaggccttggctcaggattggctggggcccttctctttgaaggtcgaggccgctgtccccagggcgtataggggccacggggacgatacctgccaaaacccctatgtaccactggggcaggccgctgataacggggtgtggggaagaagggcataggcagctgaggaccaaccataaaattgtcttcgacgaagaaacctgcatgggctgatgaggggacatctgaatggcaatagaattgatccgactggaaagtatggtctgaggaaaaacag

SEQ ID NO: 138352 - DNA, 460 bp, Homo Sapiens
ttttggcttcatatacacacacacacatatgcctacaaggatctggggagctccaaatatcatactatggaattcatattcaggagcatacaaggatcctgagagcagacttctgtcctagggtcaatcctaaagttgccttattctcaaaagctccagttcctgaagaaggattgaaatatactgagagccatgaagagacagtagtgatttcagctgagggtgagaatttaggtggctcagagataaccacagccttaggcaacccaaagcaaagcaaacaatggaaggaatcaacgataccaaatgtgttgggctttggttactggggacttctagaaaaagtagagactgagtagctagtataaatgaccagaatatcagccatcaaccactctttccaccctctccttataaaccttttacttaatcccccaaatccccgacagtcctccagtgt

SEQ ID NO: 138353 - DNA, 562 bp, Homo Sapiens
cccttttgtttctttcttgtttcctttttgttcactggaataaagattttaattgtctctgctcatggtagaagcaaggcatacaggcccccaacccttctgcgccacccctcttctcccctgtgcactgtgtctactgctgggtggagggggtcgggggagcaggtattgtgggccagccccagatgtgggctcccctgccctctcttcacctagtctcttttcatgttccccttcaggtgactctttctcctcccagtaagtcacagggtagcaaggctgagggaggagagcatggggaggggaggggatcaggaatccacagcccagcccggcctgagtccaggtggagagcaggtgcgtgtgcctgtgtgagtgtccctgtgcatggccgtgggcttggctcagcctgtaagctctgagatccccccatgccagtcccctctcagaggtcctatctggtgtcttcactggggtcagcacacctgagctattcaaattacttccatcctttggcgatggggctgctgtgggtgaggctgaggcctggcacctctgttgc

SEQ ID NO: 138354 - DNA, 530 bp, Homo Sapiens
ggaagttaatggactatgagtaaatttattggaaagtagacgtcataagcatgtaagactggccaagaaagtgaatgtcaagagaaagaaggaggagtcaatggctgagggatgcctacggtagtgaagagaaccactaggagaatcaagatctctttcatcctttctgcattcctccacagtgctacaacacactccaaggcctgtgtgggagcagttttcccagaggatggaggcaagttgattctgagtttcctattttaaaacaaaatctagggtttgactttattttctgaagtctggggaagtcttcatcttggtacaattgttgtgatagaggtaggtgacagtgaggactgaggggcagctcagctttctcttaggtggctgcaattcttttttgcaggtgagaccaggagcacagctctggggaatgtttcccatttgcctttttccttctctttccctgtcttccccttcctcccaaaatagtgagttgtgggattaccagtccgggtatcagctctctg

SEQ ID NO: 138355 - DNA, 632 bp, Homo Sapiens
  misc_feature (362)..(370): n is a, c, g, or t
  misc_feature (447)..(587): n is a, c, g, or t
agtgtctcatacatgttagctgctgctgctaattatgattgtgactaccatcatccagcagctgtgaagtagagtgccaagtacctcttctgtagcatctgtctctctttttgaaggagggggtcaggagcagaatcttatttttattttagattttcagtgtctttgctttgggaaagtttagtacagtagagggcaattgaacccctgtgcacccattatcacccagcagcaatcatcacctcatggctattcttgtaaactcctggctcctctcccaccagattatttggaagcaatcctagttgtcataccgtttcatctgtaaattagtacatattttaaaaatatgactctttttnnnnnnnnncaaccaactattgataccgtgatcacaccagcactgtaataactccttaatgttggccgggcacggtggctcactcnnnnnnnnnnnnnnnnnnnnnnnnnnnnnnnnnnnnnnnnnnnnnnnnnnnnnnnnnnnnnnnnnnnnnnnnnnnnnnnnnnnnnnnnnnnnnnnnnnnnnnnnnnnnnnnnnnnnnnnnnnnnnnnnnnnnnnnnnnnnngccagctactcccgaagctgaaggcaggagaatggcgtgaaccca

SEQ ID NO: 138356 - DNA, 1593 bp, Homo Sapiens
  misc_feature (1097)..(1135): n is a, c, g, or t
  misc_feature (1260)..(1275): n is a, c, g, or t
catgttggcaccttgtccctgggttgttctagtgggagtaagtggccagaacagcagagtttaagaaactcaaactctttcttctttggatgggaaagccactgggggactgaatccttcctgggactataggatttatgtttccaatgggagactcccacaagtggaaaagagcacttctccccttcctcccccaaggccaaaggaaagcaaagaagatgtctataagtgaagaacatctatacatatacccggagtttttccttttatttacaaagcagtaaaccaaattcctgtgtgaacataaatatccaatataatataatattgcgtatgccatttcccccctcaaatatgacttcaattttggccagttgttctgacttaagccaaaaattagtttcatctatatgaacatatgatggtaagtaacctatttattaccttaaaatgtttccccacataaacggaaatggtagagagttaaggggaaaacgagaaataaggagatgtgataaaacctattccaccatctttatcttcatccacagcatgtcctagacattcagtgcctgggccagtctctatagtaaacttgggctgatctggaaacgtctccacttagctctgtaaggatggcacccttcagggtgcttcagaggaaacttactgaattcaacccaagtgtcctgaaagaaattgaagaagttactcaaagagctgaactttaaaacaaggagtagctgagggtgaggcatatcctatcttgagtttctgagcactctggtaccatggaatgtctgtacactgaccttcgccaaagccaagaaagccctggtaggagtcacagcagccatgggtgagctgaaaggcttttcctgacttcctggggtctcaggaatagccagaggtgaaaagatttgccttttttactacataattgcacaaaccatggtatctattttctgatccagatttccaaaggcttttctgaaaactacaagatataccccttgtggactgtgtgaaaataaatttatctttatgtatttgaacagtagccatagatgtgcctcttctctacagatttttctgtnnnnnnnnnnnnnnnnnnnnnnnnnnnnnnnnnnnnnnnagtctgtgtggtgggccaaacatgccaaaaataaatactctcacttctctaaattatttatagaactcatctgatttttaaaatatgttaataaataatctaaatgggggagggagttgaagtgnnnnnnnnnnnnnnnnacttatgttgatggatagccacaaagcataatcatcttatttacaaaaaacaaatgccccaaaacctaaaaaagcccccccagcaaccaaacatcttctgtaaatatagtttttaaatgatgagtaaggtactgtgccattggcccccatttggttatgtgcatcatgttagtcagcagtagccattccacgaattcctcatgggtagtgcaaccagttaaaaagtgtataaaacattatacatagaaaaactctcacatcctttggatgtttgcagttcatcataactttgtggttacctttccgcaacataaattt

SEQ ID NO: 138357 - DNA, 1631 bp, Homo Sapiens
  misc_feature (154)..(184): n is a, c, g, or t
  misc_feature (306)..(379): n is a, c, g, or t
  misc_feature (408)..(408): n is a, c, g, or t
  misc_feature (947)..(959): n is a, c, g, or t
cccggcggtggggaatttagaaaagaaaaaaccccccattggactttatacgtcttttttggggccgaaatagtcttacccaaaattttaaggaaattgggggtttaaaaaattttgtgccctacagtattttaaaaggtgtttattttagaannnnnnnnnnnnnnnnnnnnnnnnnnnnnnncccacaaaaggaaaatgtggggtttttttaccccaggagaaaagggggtggaaaagtttcgaattccggcccaaaatttcccaaaaaaaattttgggggggttttttattgtttcttccagnnnnnnnnnnnnnnnnnnnnnnnnnnnnnnnnnnnnnnnnnnnnnnnnnnnnnnnnnnnnnnnnnnnnnnnnnncttgggcccaccccacttttataaagganatttcaggtaggtggggaaccaaggagatggaactgggcatccgatttttcaagggaatttcggttctcttccaagtttcttataaaactattgtcagaactgctataaatagccaaggcttttgctggtactttagcttgctttatcttcagcattaaaaattcactttttctttgttgctgaggcaaattgcaggttaaaaaactaatatggctatttcttcatattttcatgtaatgaccctttcccacccactggtatctactgatattgatatactaaagtattttgaaatgacaaagaacatttgtgaaatgtttgcatattttatacacatcaagttagaaggatgggttgtaaggatgggatcaagtctatggtgaggaaaatggttttcttattttattcccctgtgcgtgtgtgtgtatgagtgtgtatattttcagggatgtttttgtttttcctctgcataaatgttattctttcatgttccatggataccttgagtagtgggatatatatgaaatggttgatagannnnnnnnnnnnnaatatataaaacattagtacaaggcaggctagcatcctttatggatacaaccaaaggtgcattgtggtctaattgtggatttcagatcaagttaagaaaaatatagcctagttaataaggtctcttggcttctgccacccagcggcagccttttacaatgagaaacacatagcaactatgcaagtaaaagagaaaaaatggataagaaatgtcctacacatgatatagcagtgttgatattactgcctatatcttctttgctgtgtatgtcaatgcatatgattggagatgaatcgacagatcttcacattccaagagaaggaaaatctttcctagactgaaatatcttttaaacaatatatattgactttcttatggcactcacttattaaagggtctgaaaattaatcccttatagacgaatattagacaagagtcatttttttaaattaaaaaaagggacatagagaggttctttatgggatttcttgaaatggctattaaatctctttattgaagaaaaaatagatgacatacatgctttatgcagaagtgacatttgggggtcctgacacaccgggattgttcaacagtcctatattgctgacaagattgtcaagggtcagttaaaataattaaaaacggatgacaaagcaactatccctttacctg

SEQ ID NO: 138358 - DNA, 465 bp, Homo Sapiens
ttttaccaaaatatctgtattatctataaaaattgaactctaatgagtcactgatacgggaggcagcaatacccgactgtgctgacatgcagaaggaagacagctctgtcccaccaaccctatagcagaacatttgtattgagtggcacgtgggctgagtcatttgtaaggtctcaaaaacctggacactttggaacgtagcaatcggatgaacgatcttggaaacatctctcgggactcctgggctgtgtacttgaaatagttctggggatgggccaggacatcaaacagagccttgataagtttcttatccttaagtatttcctgatggttctcagatgcatagagcctgccatctcgaactatgtcttcaatgagttcctggtagtcctcatcatatgtcacgtatgggacctggaaccctctagcgctgttcccttcattggacttgaactgaatccacag

SEQ ID NO: 138359 - DNA, 745 bp, Homo Sapiens
  misc_feature (278)..(291): n is a, c, g, or t
tgataatgaggattgctaattaaatttttcaaaaatagggatggatctctgttaaaaatttttagtgacataggaaaatgcttaagacttaaaaaggaaagatttaaaacttacgttttatacaatcccaattttgttaagtgttttttagtctatgactgaattttgcttttatggcttttgctctcaaaaagtagcaaagctcccaagaaacggtgaggatagaaggggccgtaaaatatcaaacagagattaaatttgtgtatgcacagacctcnnnnnnnnnnnnnncttcattttcatcacagttttaacagttggccttctgggctatttttatagacaaagttgaactgctgtaaaaagccattctttcccttcctgccttgtctactttcatccttactaggaactcagcaaattcagtacttaataggcaccgagggtatacaatggtgaacaaaaagctcactgttcacttagaaaagacagtcaacggtcacctaaataaatacatcattacaaattgtgctcactactctggacaaaactgcagagtgttacacagaaagaaatgaaggtggagatcagggaatcattttggacaaggaagtttgcaaagacctccataatgaggaagggacacttaaagtcagttttgaagtatgagtaggagttagtctcacaaagtgtggagggaaagcactctatgaagagggacaaggacatagaaaggttttcaagc

SEQ ID NO: 138360 - DNA, 345 bp, Homo Sapiens
  misc_feature (166)..(185): n is a, c, g, or t
tggttctttctgatatatgcctaggattggaattgctgggtcttatggtaattccatgtttaactttttgaggaactcacaaactgttttctactgtatacttaccatttcatatcccacttgcaatgtacaagagttataatttatccacatccttgccagcgcnnnnnnnnnnnnnnnnnnnnaattgtagccatgccaatgtatgtgaaataatatctcactgtggtaaaatgagttttatatgtagcttttctgcctgtaacttactctgtatgttaaaaggaggcacaatgatcaatgtgttaaaatctattaatatctgaaaaatgggctgggcacagt

SEQ ID NO: 138361 - DNA, 359 bp, Homo Sapiens
gcatgaacttccattatgccagtctttttcctcacatgtatgtacaactaaatttttaagcccaaagacaactgatgttcaattttggtgtttatggacttattttcccttccttctgttttgccatttctcttgtaattttctagtgtttagttctataaaactattataatgcaacctcaaaagattggactctattaaagttgatgataatgagactttgactttaataaattcacctttgccttaattataaagaaaaactttacaaaattcagctaccttcagaaaacgaattctttaaaagaccatagtgcaaaatgatgctgtcatgaatctcattggttcattcagccaaa

SEQ ID NO: 138362 - DNA, 610 bp, Homo Sapiens
ttttttattccaagaaccattttactagcatacagctgcccagcgttcaactaaaagcaatggactagattgccaattacagcatggccacaatattagggtggaatggacagagccaagaacactgctctgtagtgttagaaagtgagagtgtgctcagtgcccacttcaggtcccctacctctttcatctacggccacagaagctactcaaaatttaatcataatattgaaaggggcagggaatttccttcagatttcccaaggtctgaaatgggaagataaagttaccttctccacagaactaatggaaaatcaagagggaaggtaattttaaaacttctctcaagttattttgaaatataaaccttcctgggatacttctggctcctggaatattttgcaaaatagctattgaccttccatcctgctcctcaagcaactgggactgactggctcacaagccctctgcctggactttcaacacagcaacgatgtctctccattgccctctacccataccataggagagagatgattgactttcacaatttcattctaggacccttatctcgggagcaatcagctagcatggttgttgattatttatt

SEQ ID NO: 138363 - DNA, 128 bp, Homo Sapiens
tcttttgataggcatttattggtcatttgttatatataaagcactgttgtggctgttggagatgcaaaaatgatgacagagggtccattctatcttgaagtcccgtctagagaaggagaaagcctaca

SEQ ID NO: 138364 - DNA, 590 bp, Homo Sapiens
ttttttttctagttaatcatttgttccacacgtatttattgattaatgacaacataaagggcatagtgcaaaacccaataacaatattcagctagaattcagcttccttgggaactgttgtccaacttcagcacacaaaagagtggcctttcttctcacaaggaaagagctcaatgaattatgaatcttttcctttttcttgaaaaaccacagcctataagtagagttctctgaaggtagtattatctttggatgcacattcctgggtcacgtgccctcaggtctgtggcactgggggagagaattcatcgctgatgggcaggtctttctttccttggggcccttcattagctctgtggcctgtattcctgagggttatttgtgccacacccctttacccaaccaatcctgtccttagcacaacagaccccaaggaaatagtggggtaacagaactgcctaatgagaattgtaggactggttaccatcaacgatggctgatgagccagaagcaacctccatctttatagaagttacctcatttgtctgttcgtcttccacttaacatcattttaaaagtgcttttgctct

SEQ ID NO: 138365 - DNA, 759 bp, Homo Sapiens
acatagttaagtatattttaatgcagttattctatttaattaaaatataagctaattattgaaatagaagatctataatatacattagagaattatctaagtctaaaattccaaattatttgacaacctggaagtacataaaatggtgggacaagagaaactaaaaagtttttaagtttctcacttcacatttttgacaattagaaataaataggttcaaatacaaattttagaaaaataagatgtactccatccataaagaaagagatgtaccttcaataatcatagtatttgcctcccataaatgagataaattaatatatagtccttctctaacatagatgtttcccagatgtctaacagtggtctaaccttttttatttttacagtgctcccaaagcttgctggcacataaacatgaatgaatgaacaatgtagaattcactcaagaaatttcaaggagagagaggaggagatttacatcacacagcaaacaacctaataaatctgttaaacgccatgcatgtgaataggcgttttcctctttttgaccctttctttccacatagaactcagtgctccttcctcgtcctccgttacaggtatttatcgccttccttcttccacgccggggagcagtcgaggcttgtgttcttcagcggatcttgccaaatcatcccctccagcatgctgctctctcccttccgcagatcatattttacatccccatttaaagctttctcatggttcctcgtgccg

SEQ ID NO: 138366 - DNA, 552 bp, Homo Sapiens
ccggttaggcaggaatgttttggaagggaaatttaaaatttggggacccccaaaactcattttgccaaagggaaaaatcaagctgagaactgggtcatgcaaacctgcctcccccttttggttcctaaataagatggctacaagaggaaaagctacatgcctcccccatattttgctcacaaggaaattcctagtgagcaatgcaaagtgatagcttatctttacaggtgcagtcacccaggcccaccacacgcaaatgcatatctaattgttcccctgccccattttgtctgtgttatgtagaatgcagattccctacgtttttcttctgccccgtttatgtcatcttatgtaaaaacatgcagattcatggagccagacaaaggcatgactatcttttcccacccacccccttacctgaaaattgtgtacttctcaatatcctgccctttcccctttaaatttgaagccctcaaaaatcatcttcagagaaagatgtctgtctcctgggtgcgtgtccttaactttggcaaataaatctaaaaagaatga

SEQ ID NO: 138367 - DNA, 523 bp, Homo Sapiens
aaggtgattagatgtgatcttttaattttgcattatgctaggaaaaaaacctcaggtataggctaaggattatattttaatatccatgcagatatggtgtaaagcatgcttctatttgattaaaaagaccgccactcctattttcttcataagcaaagtaccctggttctaagacactgtggtgtggatatttcaaaggtataatttatgtgtatctaaacatttattcatatatacttatatttggattatttacactggtaacatcaagaaaaaaatacccccttcacacacacacattcaaatatttataacacattgaaatgccgatgcctctggttactcattctttgtcatggtcagttcatggctattttttggcatatgaggcttcaattgaaccagaagagacttaattttggatattataaaactagagaggaggtgcacatctcaactaaatagaaaatattcaccatttgcaaaatcaacagtaagttataaacaggaagtaagtttaaga

SEQ ID NO: 138368 - DNA, 486 bp, Homo Sapiens
gtttttttgtttctcttcttttattatttgacatgatatgtacttactagtaattaaaaagttaatagaactaaatgtcatagtacagctatattcatggcactcaaaatgctgttgagttgtaactgtattattgcaatttgcagtggaccaaacagcagtgtaaagtgaagtgtgccacatttggtcacaagtgtgccacatatagtcactgtctcaacaactcaattctgccagtgtagtgcaaaagcagcccatacaatacataaacaaatgagcatagctttgctccaattccatatttttcacaagtcgtatccttttgactttttaaaagcatttaaacatgtaaagggccattcttaattcacaggtctacaaaaccacagaatggatcagatatgcactgtaatatctgatccattctctggatcagatattattaacagattagctatgttcctgtcaattcctaatttgctattg

SEQ ID NO: 138369 - DNA, 496 bp, Homo Sapiens
  misc_feature (449)..(449): n is a, c, g, or t
tttttataaaaatttccaatatcatttttgtttttatttggaaatatcttcatgaattcctattcaatattcaaaacatcacaaatatgtagaaaaggggataaacatcaaggtagtacaatatatctaattttttggttgaatcaaaaatttaaaatatagctgctagctgttttgtgttttgtttctatgtagacttatctctcagtaatgatgatgcttcaaaagaacacatctatatcaggttctatctctacacaccctttactattatcaacttgtaaaatgtatcagccaaacaggacctgctacaggattgctgatgtctataaaaatgcagaaagcactaaatcaaaacgggctgctgaaaaactaaaaatcgaatatcacacaaatcactcagctgcctgggcttagaaagagagcatttgaaagctcctatgtggacntgatattgcccattgacatactcgggtggtttaagccatcctttaaa

SEQ ID NO: 138370 - DNA, 397 bp, Homo Sapiens
ggatagaaacagatagctaatacagaccagaatcatatataattccgtgactttgttatctttcaagtatttccttattattgatgcctacactttctcaatgtctaaaatggacaactaaattgctactgtggatttacttcttaactaaaacagattttacattcgtataatgtagatttacatatgtattacttatacatttaaaataattagaagttcatatattttcaacaaaaaggaactcatctaaatgccagcctgggttgcataatgtggacctcatgctgtgggagttgctgctttcccaagttgggtatgacaggctagttgcaattacataaatgaattgttttctttcatcctcactggtgcattaatgaaagcctgcacaatt

SEQ ID NO: 138371 - DNA, 579 bp, Homo Sapiens
  misc_feature (556)..(556): n is a, c, g, or t
ttttgtaatgcagaaacaactttattcataagtatttcacttaatacagattatacacactgtatgcactgaaattacatcaaatacaaccaggtgttagtatctacatgtattccagttgaaagatgctctataattagtcattctaacatattcatacaaaaacctgttcattctttttttaaaattacagctccaaagtagaaagccaaaacaatattttaaaagtgactgttatgaatcctcttgtattttaaatcttcttaattttaatgttatactgcttttcttcaatgctgttcttaagtactaactctacccaaaatcagaaatgataataaactgtatacattgcccaatctgaaaattggatgtatcctcataatcatattcctatgatttatgccagtccaaagtcctcactgagctgtttacaaaaatgtttgtttatatatacataggtaggcatgtatgcatgtatacaattatggtaaatccataccatagccatttgatgaagacataaattaaacccataaagttgaagacacatganacagcaaatctgacattgtacag

SEQ ID NO: 138372 - DNA, 912 bp, Homo Sapiens
  misc_feature (850)..(867): n is a, c, g, or t
ctgaagaaaaaaagtttatttttattcatttatgcaaagacagtatcagcaataggtagtaggaacatttttctcagtttagaattaattttccattttgaaagggacttaatatcttctttaccttactctattaaatacttcaacaaagacaaaaatttattcctttacttttccttaaggtcatatcggaataattagaattaactctttagaatgtaggtatcatttacagaaatctggagatttaatcacagaatgatgtatgtcggaatgttaaaagcactaaaaaaactatggataattttttaatggacaaagtcatggtgctttcaatttctgaggtgtaataaagccttcttgggaattctaaagtttaaagactgtatccttcggattccgaatgaaaattttgagaaatcatagaccccagtgggcattagtaatatggcccatagtaacgacattaacttagagtctccacgttttagggaagaagccattgaaagaagggccagaaagccactttaaacacatgtccatggcagatcaaatgatactgataccaatgtttcccttagaaaggtattatatcccattgctaccattccacggcttggcctttgaactgctcatacagctacttccattctttacatcaccagttcttagagcaaacctcctgaaagactagtaaaagaggctgggaaaacaagactgtgagtatagcaaaagggctctggtgctctagctgtgtggtcacaatataaaatgaggacactacctaatctagaaacaacatgcctcttctggacatattttattttacagaaggaaatataacaggctnnnnnnnnnnnnnnnnnntctatttatagcaagtaactaatacttcaatgtttttataaaaac

SEQ ID NO: 138373 - DNA, 595 bp, Homo Sapiens
  misc_feature (66)..(97): n is a, c, g, or t
  misc_feature (106)..(366): n is a, c, g, or t
tttaacggaatggcttcagtgagtcctttcaaagcatttaatccaatccatagaaatggcaatgcnnnnnnnnnnnnnnnnnnnnnnnnnnnnnnnngagatagannnnnnnnnnnnnnnnnnnnnnnnnnnnnnnnnnnnnnnnnnnnnnnnnnnnnnnnnnnnnnnnnnnnnnnnnnnnnnnnnnnnnnnnnnnnnnnnnnnnnnnnnnnnnnnnnnnnnnnnnnnnnnnnnnnnnnnnnnnnnnnnnnnnnnnnnnnnnnnnnnnnnnnnnnnnnnnnnnnnnnnnnnnnnnnnnnnnnnnnnnnnnnnnnnnnnnnnnnnnnnnnnnnnnnnnnnnnnnnnnnnnnnnnnnnnnnnnnnnnnatgagccaccacgcccagcctgcaacgctttctttttgccctcttgtttatcagtttgtgtcatatttacacagcaaagcctagtggctaaaagcacgagccacggagcaggctgcctaggttcttatctgagctctgccactagctggcttaaagcagagctgcggcctctattttttcattggtaaattaaggccaatgatcatatatacctcacacgatggctgtg

SEQ ID NO: 138374 - DNA, 612 bp, Homo Sapiens
agatttgtctactcatttttggctttttaaaagatttattttttgttgttgttgagtttagtgcatatcctggatattagtctcttatctgatgaagagtttgccaatattttctcccattcaacaggttgtctcttcattctgttgactgtttcctttgctgtgcagaagcactttatatacagtcccatttgtctattttttagtagtctatgcatttaaggtctcagccacaaaatctttgcctagaccagtcctaaagtgtttcccctatattttcttctagtagttttattgtttcatgtcttatatttaagtctataatccattgtgagttgatttttgtatatggtgagataggggccttgtttcattcctctgcatatagatatttaattttctcagcaccatttattgaaggtgtccttccctattgtatgttcttggtgcctttgtcaaaattcagttggctataaatatgtgaatttatttctgggttctctatgtggttccattagtctatgtgtctatttttataccaatatcatgctgtttgataccaagcctgtaaatatttgaagtcagtagtgtgagcctccagcttgtctttgc

SEQ ID NO: 138375 - DNA, 453 bp, Homo Sapiens
ttttagctttttaaatgttttatttttgaaaaggtagtacatccacatagtacatagtacacccacattttcaaaagctatgaaaggatacagttgtctccctctcaattccatccccccagccaccactgccccttcccctcccaaggtaatcagggttaccaggttctcatgtctctttccagagataacttatgaattcacaattatgtacttaccatttttctcctttttatatacaaatggcagtcactgtcctcaaccttatttttcctacctaataacataaactgaaggttatcccacatcactacataaatggtttccaagttctccttatttattcattgttgtctacccaggagtaggctgtatgaatataccacaatttagggaaccagaaccctgatatggtgtcatttaaacagcttccaatcttttgttttcacaaac

SEQ ID NO: 138376 - DNA, 485 bp, Homo Sapiens
  misc_feature (49)..(274): n is a, c, g, or t
gagataggctctctcactctgttgcccagactgaagtacagtgacacannnnnnnnnnnnnnnnnnnnnnnnnnnnnnnnnnnnnnnnnnnnnnnnnnnnnnnnnnnnnnnnnnnnnnnnnnnnnnnnnnnnnnnnnnnnnnnnnnnnnnnnnnnnnnnnnnnnnnnnnnnnnnnnnnnnnnnnnnnnnnnnnnnnnnnnnnnnnnnnnnnnnnnnnnnnnnnnnnnnnnnnnnnnnnnnnnnnnnnnnnnnnnnnnnnnnnnnnnnnnnnnnnactgcgccgggcctacttttttgttttctctaagtaggacaaaagatcacttacattttgtttcaactgtgatgatacctcagagcttttctttttgtaagtcatggttctacttctctgtggtaaataaagtgtagaagcctcacgggactgagactttgggcacctgtggatggcagtggagggaacacgggctttgctccgaccagtt

SEQ ID NO: 138377 - DNA, 519 bp, Homo Sapiens
  misc_feature (347)..(347): n is a, c, g, or t
aaatctcttggccccttcaggcctacatagggttaaagctccccactgttgcaaacctcaggatgtctcacaatctcttgttgttttatgtagtcctgaacatatctttttaaagagtcgcttcattaaactcttctaaattacctgattctttcctgctggaacccagactgacacataaggtcatgcttttcaacatacagccgtgcaaaacattgaaggaaaggtagcacctggaatactttctataagcagaaagcagcagttgagccagaaggttgaagactctctcccaaagcactccacttcaaactcttttgtcatttggagcttgggtagctcacatnggagggcaaagtgagggactctaatcttctcagtatttggcatcccaactgacctttcattcaggtaaatgttatttcctctgacaacttgaaggatgagaggacttgctggtactccatctctcaaatgatcaaagtttcctctccatctgcattcaatccactgagatat

SEQ ID NO: 138378 - DNA, 305 bp, Homo Sapiens
  misc_feature (63)..(63): n is a, c, g, or t
accagtttattttccccccgtctttaccacatgcatgttttcacttttttaaaaaatgtttgngtcgccaggcatggtggcttaggcctcccaaagtgcggttctctttatttgtagacagaaagtaggaagttttgcctaaggagttggacattttcctaataaccaattcaaaaaggaaatttaaatgtagatacttattttaaagtatatgatgactcaggtcttagtggttagtgcctgtcaaggtataaaaattagccagtcagaatctgccaaatctggagcaatacggtgcctcacac

SEQ ID NO: 138379 - DNA, 553 bp, Homo Sapiens
  misc_feature (424)..(500): n is a, c, g, or t
tgtgttccaataaaactttatttgcaaaaacaggtggtgggctgggtttagcccaagtactgtggtttgtcaacccttgctctagggctttaaggactggaccttgccttcttgatttttgcatgtcccgttcaagccagcacagcacttcacacacagggaccgacagtaatcaaagctgactggacaacattgaattatattattttagtttccttcttttaaaagaaacagtagaaagctgtgaagactatagccaaataggaatgagtgcgtgttcctgcttcacaccaagaatgagatgcaggatatgctgggaatttctctgtccagactcttccagaattcagaaacaaccagagcaactggtaaaagatactcctctctggggcacacctatcataaataaatgtaaaagcatgcnnnnnnnnnnnnnnnnnnnnnnnnnnnnnnnnnnnnnnnnnnnnnnnnnnnnnnnnnnnnnnnnnnnnnnnnnnnnnagcatcagcacaccaccaacaggcatccacgttgctggcatccacgatgccag

SEQ ID NO: 138380 - DNA, 795 bp, Homo Sapiens
  misc_feature (493)..(659): n is a, c, g, or t
tcattcatgcattgattcaacaaatatttattcagtgcctactatgtgccaggcactatttacaacagtgaataagacagagaaaaccattgctctctggaagatttcatcctagtgatgggagacaaataagaagcaaatatagaagcaaaatatcagagtcgtgagtgctttgaggagcaatgaagcatgggtgcggtaagttgagtggagccaggactgggcctcatctttcagcaggctcggggacccccacgacccttctgaacctgaatgttctggtggacagcagccaccgcaaagtctgggcccatcctgcttctttcccagtcgtggtttgcagctagccttcgggaatcagttcccagtcatcacacatactttccccaaaacttgcagctttattaaagaaaatcttcatgacaggaaaatacgtgtggctgctgcatttgggtctacagtccttggtcctatagctgtcagcagaggtgcnnnnnnnnnnnnnnnnnnnnnnnnnnnnnnnnnnnnnnnnnnnnnnnnnnnnnnnnnnnnnnnnnnnnnnnnnnnnnnnnnnnnnnnnnnnnnnnnnnnnnnnnnnnnnnnnnnnnnnnnnnnnnnnnnnnnnnnnnnnnnnnnnnnnnnnnnnnnnnnnnnnnnnntctactggacaatggcttcatggacattttagaggcagtcttaagtctggtgtgggcacaggcatgtcggatatgatttccctgcagggatgccctctcggtggctgtgggggatgcttgcggcccctcgcctgcc

SEQ ID NO: 138381 - DNA, 565 bp, Homo Sapiens
  misc_feature (136)..(187): n is a, c, g, or t
tttatacttaataattttattacatgtacacacaaaatcatagcaaaatatgatatattttataggatttttttgtcttttcatgatgccatcgaatatttgcaaatgcctaaatggaaccctttcttcattctcnnnnnnnnnnnnnnnnnnnnnnnnnnnnnnnnnnnnnnnnnnnnnnnnnnnntgcatccttttaaccaaaggtaatactcactggtgttaaaactaacagctctactggacaatggcttcatggacattttagaggcagtcttaagtctgctgtgggcacaggcatgtcggatatgatttccctgcagggatgccctctcggtggctgtgggggatgcttgcggcccctcgcctgccagcgctgagctcagcctcacagtgagccgagatgaacaggtgctctcttctctggcggcggcggcacgtgaggtcggctccttgcagaacagcgtctcagtgggagacctttagcttcacggcctttccttctgaccacccagcaggaaaaatatacgaaagcgtttttttctgccagttttgtcgatgagac

SEQ ID NO: 138382 - DNA, 572 bp, Homo Sapiens
gatgtttcccttttaatatttgccctttaaaagcaggaatgtcatttttgtcagcgtggatgggcctggagaacatcatgcttagtgaaataggccaagcctgggccggaccaattcccccctggatcctcaccctatgtgtggaatctgaaaaactttaattcatagaagtagagagtagaatgtggtttccagaggctgggaggctgggggaggagggtagacagagaaaagggaaaaggtcttagctaaaggttacaagtttcagttaggtagaaggggaataagttaagatgatctattatacaacttggtaactatagttaataatactacattgcatatttcaaaatagctgagagaatggactgtaaatattctcaccacaaagaaacaataagtatttgtggtaacaactttggtagcctgatttgatcattccacaatgtatacatgcattgaaatatcgcattataatccataaatatataaaattattacttgtcaatgaaaaataaaactttaagagttttgaaaaagttgtaaagtagaaataaaatgtgtataaaatt

SEQ ID NO: 138383 - DNA, 502 bp, Homo Sapiens
atctttgagtccaaaatgacatttatttaatctggcttcccccttgcttctgtggaatattgagtgctgctgctgagctaacccagagcaaactgaggcatggggaagcttgttctctgagctcctgcaggcagcagctcatccacctcgatacaccaactccccttccctgaccacccccttcccacaccactctcctgtatccccggctttcagcctggaggatgctcttccttggggacctgattttaattttttagggactcatgtctgaccgatttcttgccaagctcctatcctggtctaggaacaagctggacgcctctatacgcatgcttttatttaatccccacagccactctgtaaaataggcattattctcattttgcagatgacaaaaccaagacaagttcaatgactgcccaaggttcacatggacaccaaaggcagagtgggaatttaacccaggttctccaactcccaaaccagtgccctttccatc

SEQ ID NO: 138384 - DNA, 824 bp, Homo Sapiens
acaactactgctaccatctggcgtgccattcagaggttgttgcacaccggcaaagttacccagtgcagagatgatgtgccaaaacttctctaatgtggtcttcacttagtacctcgtctaggttttggtcgagaggcagaggcggggtagtggcatgctgaactgagaagacctggcttggaatcctggctcttctagttggtaattggtgatcctggacaagcaaatgacttcttagaactaactttttcctcttctacatggggacacttagaaataccggaaggtttaagtgagagtaaagtgaaataacacgggaaaactcctgacgtgtggtaggtttattcatggtagcagtgctttgttgtaatactgaaggttctgaaaccgggacctccaaggcagcagtccaagctagaaagtgcgtgtgttgcactttgtacatacctcagtcttgctgcgcagatattgtagttatatgtcaatatgtcctggtggagtgtgagcctttcggggcaggcttttagcccctgcatcttctgtgtttagcacctagcaaaaagtgcctggcacatagaagctggtcaatcagtgttaaaagactgcaggagtaaatgagcgaatgtgttggcttttcatgtcctgccctctgagaatgatagtggaaatagaaaaggggtgatcatagcactcatcagcaataggtggggctcaatttgtttactaatctcacccatgtgtactttataaatctgtgcattttaaaagggacctttttaaaattacctttaaactttatatattcagtaataccacacacacaa

SEQ ID NO: 138385 - DNA, 735 bp, Homo Sapiens
  misc_feature (486)..(512): n is a, c, g, or t
tagcccacatgctccgatgttaatgacatcgaaggcacccgtctcgaggaaatctcaactgcacaacccctactatgccccaattcagcaggaagcagttagagcggtcgtcagccaacctccccagcagcacttgggttttcctgttgagaggggggactgagagacaggactagctggatttcctaggctgactaagaatccctaagcctagctgggaaggtgaccgcatccacctttaaacacggggcttgcaacttagctcacacccgaccaatcaggtagtaaagagagctcactaaaatgctaattaggctaaaacaggaggtaaagaaatagccaatcatctatcgcctgagagcacagggggagggacaatgatcgggatataaacccaggcattcgagccggcaatggcaaccccctttgggtcccctccctttgtatgggagctctgttttcactctattaaatcttgcaactgcnnnnnnnnnnnnnnnnnnnnnnnnnnngctattgcattgcatgtctgagtaactctctgacatcactttctatcattctccccaactttcattctgttccaacctctcaactaccattgctgtccttagaattcactaattataatcttgacccaagggcttggtcctcactgttccttctgcctggaatgtcttccctcaactatctgcatagcttgttctctcacttcaattaaagccctgcataaat

SEQ ID NO: 138386 - DNA, 460 bp, Homo Sapiens
  misc_feature (297)..(297): n is a, c, g, or t
ccgtatccaatcccatcgctataaaaatgcataactttttatttcaaaatttactagtcatgttttactcctcagtatgtgtgatgcctctgtttcatttggtacagttcctcattccttcaaggactatgtactttactgccgtctaaaaagttattccccaggtcttgtgcatggcttctcatcatttggatgtgaactccttagcaaacgtcttccctgacttcccctattaaagtaatttctcatcaccctctattacattacctatgttttactgtctttggggcatgtcangcattgaaagttttctgaactgttgatgtctatgtttactttttgttgttgttgttgatctctcagcaggagaaagtaagcagtaggaaagggaccttttgtaactcatttcctccctatcttcagaaaccagaatacagtgtgtcacatattgccagaaaat

SEQ ID NO: 138387 - DNA, 502 bp, Homo Sapiens
  misc_feature (210)..(210): n is a, c, g, or t
tggaccctaaccggggaacataacaaggctaattcccttccagctatggcctggctcaggcattttgacataacttaatcagggaggaattaggaagttaacactagaagtacacaatagttatatctgcattttattctactttattgcatataattcatgcctaaattgactataattatttaatattgcatagtgtcatttctaacntaattatttttcttgtcattatgtagcctcaggtacaaagtctgctgagatagtgttaaagagaggatataagagaaaataaatatttagcaactgtaaataccatggttatggactgtattacaaacttcattggttttttcacttaattttcacaacactacctacatggtacatttactagtttattaaaatgtttattaaaacatttactagtttattaaaattccaattcatatgaaaaggcatttgaattagaatttgaactccatattttttatgagctcgtgcc

SEQ ID NO: 138388 - DNA, 373 bp, Homo Sapiens
caaatttgtctttatttgtgtgtgtgtgcaagagaagcagaatctgtactagtacttagataacaaaaatcaatttaattttttatatgtactttaacattactggatctgtgatcatttgggaaacagacaaataatttttttaaaagaaaaaaacatgaggacatatacagaatgtactggatatgacaaggattttctaaatgaaagattatatatgggatgatatcagggatactgggtgattatagtttagaaacgaggcataatggtgtaaaaggggacaataacattgtaaatgtagatgcaaaatcttttaacaagctttctttagtttgaagtttatcttacttttttctgctagaaatttgac

SEQ ID NO: 138389 - DNA, 236 bp, Homo Sapiens
tgaagtcttatccaaacccagtaaaacagattctaagcaaacagtccaatcagtgagtcataatgtttattcaaagtattttatcttttatctagaatccacatatgtatgtccaatttgattgggatagtagttaggataactaaaattctgggcctaattttttaaagaatccaagacaaactaaactttactgggtatataaccttctcaatgagttaccattctttttttat

SEQ ID NO: 138390 - DNA, 372 bp, Homo Sapiens
agccagactgtctcaaaagaataaaagtaaaagaaaaataagcccttcaccttacccttcatcctgtgctatgactctctctttttctctctcacagaaatgggtgggtgcacccttcacttggctccagcctggagctgggaccctggagcccagaggtgccctccaccctggaggtgtacagctgccacccaccacggagcccggccaagaggctgcagctcacggagctacaagaaccagcagagctggtggagtctgacggtgtgcccaagcccagcttctggccgacagcccagaactcggggggctcagcttacagtgaggagagggatcggccatacggcctggtgtccattgacactcgtgccg

SEQ ID NO: 138391 - DNA, 432 bp, Homo Sapiens
tgcaatttgtcacatacttaattccttgaggtttcttaaagctaacataaaaatacctcaggaggaaaagaggaccttaaagtaaaatcaaaattaagtactactgtcccagttgtacttctggggtgttgcttctccagatgcttctccagatgcagggcgcgacagtgtgagaaggtgcgaggagactcacttgcctcccctcccctcatccctgtctccaggtgaggaatgcgatgccagtgccagggtggagcacgcagctgctgtgtgcagtgtgtggacgctcgtttttccaacttcagcacaccaggctcctcagcctacttctgtttggaaaaacagcgggtctaaaattctcctctttactccccattgcctgtgcaggagagcacagcccccttgcacccctgcagcctggcagctggggct

SEQ ID NO: 138392 - DNA, 637 bp, Homo Sapiens
  misc_feature (62)..(62): n is a, c, g, or t
  misc_feature (71)..(71): n is a, c, g, or t
  misc_feature (87)..(87): n is a, c, g, or t
  misc_feature (118)..(118): n is a, c, g, or t
  misc_feature (128)..(128): n is a, c, g, or t
tgagttctccttttgcaaccaagccacagatattactcaatgctccaaggctgcagtcttanttatacccngagcttatttttaganggtacaccagcattcaggttcagcttcacantctgaactantcattaattgcatctttaggtcaaactctgtaggaaagttattcagtaaatgagaagaggaagcagagcaagatggctgaatagaagccttcactgatcatcctccctgcaggaacaccaaattgaacaactatccacacaataaagcaccttcataagaaccaaaaatcagacggagcaatcaaaatatctggttataacttcatatcagtgaaagaggcacttgaagagggtaggaaagacagtcttgaattgccaacaccacccctcctccatccccttggcaacgaccatgtggtgtggagagagaatctgagcttaggagagggagaacacagtgactgaagaactttgcattgaaactcagtgctgccttgttgcagcagaaagcaataccaggcagaactcaggtggcacccatggagggagcatttagaccagccctagccagaggggaattgcccattctggtcgttgcaacttgagttcctgcaagtcttctcgtgccg

SEQ ID NO: 138393 - DNA, 569 bp, Homo Sapiens
aagaacattgttcaactaaagaacgtgatttccagtgatctctggaagcgctaaagctaaaatttctgttcttgaaacacttcagctttgcaactaaaatattacagattaataataaattaaaccaaccaatgataaacactactcagtccaccaacaacaaacgtgtttgaattcaccttaccaatattaatcccagcgtgtgtaaaacagaacagtaactctatgtgaccccagataacattttgtaacattgtgcttccttgtagtttgtaatgtgagttcaatcagtatttatgttgaaatttctaacattaaatctagtctctatcctgttaatttaatttttaaatgctttatccatttgtgcaaaggtaaacgcagattgtatcttttttaatggtacggcataaaaagtaaccctcaagtgaagtgtctctatactgttttatagagtactttaacatgaatagataccttgtaaacttgtattgtggatgtgtaaataatatgtactttgggtttttaacaccgcatgtaaagtcaaaataaaatatacaaatcattat

SEQ ID NO: 138394 - DNA, 587 bp, Homo Sapiens
  misc_feature (14)..(14): n is a, c, g, or t
  misc_feature (41)..(41): n is a, c, g, or t
  misc_feature (324)..(371): n is a, c, g, or t
atttttaaaaaggngaaacatgcatgtggtaaagacggggnaaaattaaaactgtaaatgggcatgaccccaaaatttgccaacctccctaaaggtaaccaatgttatccatttctcaagtgtcctttcagagatattcagcacttaggtattcaagcatatacattcctcctttatcacacaaacagtagcacattatattaacttttctaaaaccttgcgttaaacatatatatatacctatgccacttagaactcatatagtactaacatggaatttcagtactataaagtacagccatttgaaataatgaacagccacannnnnnnnnnnnnnnnnnnnnnnnnnnnnnnnnnnnnnnnnnnnnnnnaatacacgctctactgatgaatatctatgatgcttcccaatgatgctgcaataagtttgtgttgagcagaaaaggtgcattagaaattatttttctttctttcaactttaaattcctagctttgaaaaagagtctccatgtgctatgaatacactgtaagctaacattgtactagttgattttgattatttactagtctttcagaacctcgtgccg

SEQ ID NO: 138395 - DNA, 689 bp, Homo Sapiens
ggggtagctggctgccatttctgagagtaaattgtgtctcaggaacttcacatgcatcatcttccattctcacaactgtcctaagaaatagatttgattcctaatgtgcagatgagtggttgagactcagtgagacaacacaccttgttcaggatcccacggtaaatacgtggtagagctcagatgctatcacaaagcccagtaaggcaggaaagcaggaggcataaaagggaggacatctggggctcaatagaagtggggaaccccaagagggcccatcaacccctcccagcagcaggaaagatggttttcagaacccaagtccattcattctctttcctgtgctccttcccacggctttcagctcaaagacacaattggctctttaagaccaagagggagcaatactctcattaaaaacactcacttttcctctagctcatggccctccacatgacttctctagctcatggccctccagacagaacaaaggggtcccaaaatgcctagcgtggaatcacagaatggcccaggcttgaaccatctctattcccagagatagtcacagagatgcacgctatgggacagtcttggcagggtctttgaggaggaagtggattcagcaggatgatggggctggcatcgtggatgccagcaacgtggatgcctgttggtggtgtgctgatgct

SEQ ID NO: 138396 - DNA, 513 bp, Homo Sapiens
  misc_feature (417)..(417): n is a, c, g, or t
tttttaaaaatctagacatctttcaataagttaagaattaattaaattattatacatctatattatagaatgctttgtagctatgagaatgaattaaagctacatgtgtttaatttccacatctgaccatgaaggacttagggagaccaatgcaaagaaatctgtagagtattgctagagtccaggtgagtaccttgtcctacctagagaatgattgcacaggtaaagagaaagatgctaaaaacttataggaggtggagcaagatggctgaatagaaccttccagtgatcattcccctcctccagctggagcacaaaattaaacaatcatccacacaagagagtactttcataagaaccaaaactcaggtgagtggtcacagtacctagctttaatatcatatcaaggaaataggncctaaaaagggatcaaggacagtcttgaactgccaacctccaactccccacagagcagcttggcataaagagagatctgtgtgcttggagggagga

SEQ ID NO: 138397 - DNA, 294 bp, Homo Sapiens
aagctgagttttcaaataatctggactcttattttattccctgctttgttgtggtgctgctgcagctagaagcagaatcaaatgaaaatgtttaaagggctaccttttttaaatataaattataaactatttttcttggagacccagtcttagagacccagtagtgaaaacattaatatttaggacaaaatagacttaaataatggtgctgaaaggtcatttgagataagacaacagctgcttttgcttcatttttgtttctagttgcttccaggtataattctcctcgtgccg

SEQ ID NO: 138398 - DNA, 443 bp, Homo Sapiens
caataagtcatcttcctgtttatgctggatgaatagcaaaaaatgctgcttctcccaccaataaatctaagttaaccacaaaggctgtgcatctctcaagatctggctggctttgtctccaccccactggcccttccctgtggctctatcatctctcacctaaatcactgcaagcgcctgtgcctgatcttcctgcagcctcccctgtccctctgaccactcttcacactgtagctgcggccagctttctaaaggccagatctgagcccatcacatttgggctgaaaacctctccatggctcccattgctctcagcctaaacttcaatgaagctccttgaccaggttttcaaggttgtgatctggcagtgtctccagatagtcccgcttcaccctctgtgcttcaactctgtggaccatgtccatccacaggacctcgtgccg

SEQ ID NO: 138399 - DNA, 288 bp, Homo Sapiens
ggcacgagctgctcttctcctatttttccaatcccaataataattgttcaggctaaaaatcaaacaatcatccataattcttctcttctcggcaaatgctcaacatgcataataagtatggattgtctccccacatttctccactttacattgcttacactaataacaccccaggcctacctactaccatctcttggttggattgttttgatgctctctgaatgatatccttgcatttacatgtgacccctgaagtttattctctacagagcagccaaggcaatcttt

SEQ ID NO: 138400 - DNA, 376 bp, Homo Sapiens
cggcacgaggttattttgatttaatagatttttctttttaattactcaacaggagttggtagttgacagtcagatgcagtcaatattcactgacattggaaaagttgatttcacagatccttgcaactatcagttaattccagcagtacctggaatatctcctaattccaccgcctctacagcctggctcagcagtgatggggaggccctgtttgccttaccatgtgcttctgggggaatctttgttcttaagctacctccttatgacatacctggtaagaatgggaactgagcatggatttaactttaaacaaggaatgttaacattgaaacagttccaacctccgtcatccaatgcagggattgcatctctact

SEQ ID NO: 138401 - DNA, 535 bp, Homo Sapiens
caggaggaagccaaacaatttattatttcttgaacagtttgggtaaggaaggagagggcagggccacggtccttaactggaaagggatgaagaaccttttcagtgcagaacagcctgttggtcagaggtatgagattaggcctgatggtattttcagtgctgattgggaaggggcactgtgaggtcaaactaggagcatcccagagtcagtcctgtgccaggctccatagtctctaaaacaatcagtgccattaatctatgtgtgtgagaggcaggtcagcccttgtcagagttcccactgtgtagaaatagttcactgctagggacgctgtgtctctccaaggtcagtgtcatgtttctatgggccaggctcagtcccatatcagaggcatgcctcctttcccatgtactgctccattcttattcctcttgtgtcaggtaagctaccttttcctgtgcgttggggttagtccatgctttgggtgttggtttcctgtgtcagttgtggtttgtgttttctatgtctggaagggtc

SEQ ID NO: 138402 - DNA, 446 bp, Homo Sapiens
tttcttctagatttggaatggagagaaatggaaggagatgattgcgagttccgttatggaggtagaaactacaggatttggcaacagattggactggggagagggggagtgggtaaagtgacagataaccgggattttatatttagaacaattgggagaagttgccatcttggtgagaaagaagggttctaggtttagcttcaattaatttgtgtcagccaagggtgcattatttgattgacacttcattttccattgctttttccatagatggtacaaatgaggctcaggacaatgattttccaacaggtaagcattttctctgccttttctctctgttctatgaaagggggttatcatctaggccagcagttcccacacctgactgtatcaaatcacctggggaggcagagcactcaggtttaggatgccctacttcattaacc

SEQ ID NO: 138403 - DNA, 479 bp, Homo Sapiens
attctagtattcataaaattgctgaggttttattttataatttctattcacgtattaattaacaactccctgttgctgtttgaaggctcattagccattttaaaataagtcccaccgcagcttgcaccatggcagagtttacatgaaacttagagtcagtatgatgccaaagtctactgagtctgagttcttacctgtttcacctcaaagtgattttgagtatacctcatagcctgtgtctcaacttagagtatctgaatcattacctgttggtttactgacacttaaagcctgtggtacttgaggagtagagtaatagggcaagagaaatttaattttactatgtagataaagaatggggcaagctgtagtaattcctttatttttaatcgaggatttaagttatataagtacacattaagattctgtttttattgctcttaaaatgattattataaatactcattaatatcgttgct

SEQ ID NO: 138404 - DNA, 421 bp, Homo Sapiens
aatttcatagaggtttattaattataaaatcaacaaaagtaaacaagcagcaatgccacccgaacttagtaacaagccggccatgtagtacaaatgtggtgtactgaaaaaccaactgctttcaaaaatagtaacactaagaagtgtagctttgatacctctatcttgtcggttaattcatattgtaaaaggactgccaggagaatgacggctatctaaatcaaaccacagtgtcaatatgttgggaacaagtaccctggctacaaggaaggaaaaggaatacagccctaaaagatgcatacagataagcaagtaagggggaggcactcttgtatttaatttacagctgaaaaattcaaagataacactggtagtaaaaacctacaaaatgactgtgagtcagagaaagtgctggtttttt

SEQ ID NO: 138405 - DNA, 293 bp, Homo Sapiens
aaccacctgatactggctctaaaggttttcccctgagaactgtgtacagggcaggagtgaggggttggtgatagaggtgatgatttcgtgtgttggtagcactgacgtattcaatgttgaatgtattctatgatattttatgattatcctgttacatgttttcagtataatttagcattacttttcagagatgtatcagttggcaataaaaagccttttctgtatttaacactgtgacctaatctgctggaaatttttctgtccaaataaatttcctgatggcttacatctta

SEQ ID NO: 138406 - DNA, 541 bp, Homo Sapiens
tcattcaatttgtcatgacattttacttagagtattttttctctaaatcttgtgttattcagttttccaagccagtatcaatattatttaattctaaataaaacttgaagctctactttgtgaagatgaaccaaattgaaacccaaaataggataaaacatgtaagaagttggatcatacagaggaaagaacacatcaagtaacaaaacacatttgagtggttttctcactattttctccattgactctcaaaacagctcaacgtggtaggtataactctccattttacagagaggagagaaagttcccatagctgttataagaaggtacacatttggacattacagaaaactatgaagatttctgaatccgaataaagaaacctaatagagattactttacatttcttattgcttaagaataatacaaatgagaataaccatcacatattttactttgatataaatgcaatgtcaactattcaattactcctagaaagcaatacacgtgaataattcctgtggaaagcttccattctttt

SEQ ID NO: 138407 - DNA, 139 bp, Homo Sapiens
gagacagggtctcactttatcacccaggtggagtgcagtggtgtgatcgggctcaagcaatgctcctacctcagccttctaagaagctgggactacaggtgtgcgccactatggttggctaatgttttttctgtgtgtg

SEQ ID NO: 138408 - DNA, 501 bp, Homo Sapiens
caattttatcattgactcacatttattagtttgatgcaacttgagatcaactaagagttcattgtcaagatttgtcttgtatttaaaagcaggcaaaggtaaagttaaaatgcattatcctttcgttttcaataccattcttaaaccaaattaaggaaagtccaaatttaaaaatcaggtctagttgtaacttcattttaaagatggaacctgggtgttcagatagctttcattggtagtgctgatgaaaactaattaacaatagcatcaaaagtatgctgttactgccagagactttctcatttaacctttcaaagctgtatgaaaactacacaaaatttagccacatggctaaagagttatgtcttctaaagcttccccgcattctaagaatgttaatttttcatatcaacaaacaagaacataagtagattatatatttaaaaatgtaataaaatccaggatatccctgccactacatacatgcaaccaatataatcc

SEQ ID NO: 138409 - DNA, 301 bp, Homo Sapiens
caaaggtaaagagcttggattttgagccagaatccccagcttcaaatcccatctccactacttactacccatgtgtgtggggtgcgcggcggaaggggtgggcgggccagtgttggaagtagaagttgcttaacctctcgaagccttagtggtctcaccaataaataagattgttgggaagatgggatgcaatatcctaatcaaagcacccagaaccacggctggcatgaaatcagcatttgccccaaagacaattccgattgttaaaataccaaggcaagcccagagtagtggttcacac

SEQ ID NO: 138410 - DNA, 485 bp, Homo Sapiens
gtttcattatttagatgctttattgttataaatttactggcatttcattatactaatatccttggggaaatgcttaagaacaatattaagaagttctagaatgatgttatgtttgtaacatcccttgaattgaatcctggaacttaccttacaccaaattctgtattataaggggttggtcatatcagagcaactctacaaatcataaactatacaccaagcattcatgatgaatattcttaggtagttgtttgagaaaaattcttgggtaaatgtgtaagaaaaatggtagaaatattagaaagatattatagttacgtaaccctttgaatgtagtcatagatagaacatataccaaattctctattatagatcagttatgttatagcaaagctacaaagtataaataatacaccgaacatttaaagattcagccagtcaaaatgaaaacccaaagtaaactcacatttttaaattcaatttaa

SEQ ID NO: 138411 - DNA, 434 bp, Homo Sapiens
  misc_feature (194)..(288): n is a, c, g, or t
  misc_feature (290)..(311): n is a, c, g, or t
aacactctttatccaggagatgaatacatgggcatttattttactaatatctaaattataccatatttctatgctgccttctatctgtatgacacatcttacaatttaaaaaattaagtataggcagtaaacagacaggcccacaagaataagaacaaagaacaggtgaatattggccaggcgcagtgctcatnnnnnnnnnnnnnnnnnnnnnnnnnnnnnnnnnnnnnnnnnnnnnnnnnnnnnnnnnnnnnnnnnnnnnnnnnnnnnnnnnnnnnnnnnnnnnnngnnnnnnnnnnnnnnnnnnnnnnttagctgagtgtggtggtgtgtgcctgtggtaccagctacttgggaggctgaggtgggagagttgcttgagcctgagagttcggggctgcagtgagctgtggttgtgccactacattccagcc

SEQ ID NO: 138412 - DNA, 448 bp, Homo Sapiens
tagaaaaatactaataaattattcattttcaaatattatctctaatagtgtgcataggatcttaatatggccacactttggttacataagtcatgattaagcagaatatacagtggccacatagtaggtataataacttgatactgcttttttgtaagataataagataaaaaacaattacataatattaattattggactaaaatgacatctttttaatatacattcatcatatagacttttttcataggcaagggtattatgcattttatagcccactgattattccattagacacaaaataaaatctttgaaacatgcaaaatgaaatacttttgagactagagtatcgttgctctatcagtcgtttgtttttactaaatagaagcaaaaaaagactatctgattgctttcataaatgtgtgctctttttcttgtacattacagg

SEQ ID NO: 138413 - DNA, 185 bp, Homo Sapiens
tgaaatagtatttggccactgcggacactaaaaatctttctattaagtatcgaatttaatatattacaataaaataatttgaaatcaaagagaagacttcctatatggcttagttgcaatctatcaacgatcatgtgcttcacagctgatgtacatttaatattctactatcctgtttagagact

SEQ ID NO: 138414 - DNA, 400 bp, Homo Sapiens
tttttgcaaaacaaggggcgattttatttcagctttgaactttccaggtctggggttcagaatttcctccagttagggaaggtgtctggtcgcctccaaggaggggaggccccaggctctttgactcccacaggaaggccgcctgtccccctccccaacccatccactgacctcttcccaggaggcagagaaaccctggttccagtagggctgtggctgccttcggctgcctgttccctgtgcaagtgccctgccctctcagaggagcagaggaaccttctggaacctgtagaggcctggcgtctgcacagggaaaagccaggctttccctcgtgggatcctgtggagaatgagctcagacggattcctcatattctaatccgacaccactggagacctt

SEQ ID NO: 138415 - DNA, 841 bp, Homo Sapiens
  misc_feature (769)..(769): n is a, c, g, or t
  misc_feature (824)..(824): n is a, c, g, or t
aacatctggcactttcatttcaccttctacctcaggcaaggacacatccacatctcccttcaattttggccccttaagattcaggtccacatcaggcatggagatcttgggggccttgaagtgcatctcaggcatcttaaacttggggcccttcagtttcccttccgggccctcaaggctcacatctgggacttcaacatccaccttgggtcctgagacatcaatgtcagccttgggcaagttcacatccacttctgggccctctcctttgagagccaggcatgctgaacttgggcattttcatcttgggcatcttcaggtgccagtctgggccgtgaacctccacatctggggcatcaatgtccactttgggccctttgatgtcaacatctggcactttcatttcaccttctaccttgggcacagacacatccatatcccctttgactttggggcctttcaagtttaagttcacatcgggcatggagatcttgggggtcttgaagtgcatctcaggcatcttaaacttggggcctttcaacttcccttctggaccttcaatatcaatatcaccaacattcacatccatcttaggggctttcacatcaatttcaggacccttcaagtctccttccactttgggaagggaaacatctacatcagttttcagtttaggggctttcaaattaagtccaacatcaggcatagagattttgtgcgtctgtatattcatgcttggcatcttgaacttagggccttttagtttccnctctggagcttcaagattcacatctggaacatcaatgtccaccttgggtcctganacaccaaggtcagcctt

SEQ ID NO: 138416 - DNA, 609 bp, Homo Sapiens
aggtacatcacatcgggccctctccgtgaatccggcatgctgaatttggcattttcacccttggcatcttcaggtgccagtctgggccatgaacatctacatcaggggcatccgaggtccacttttgggcccctgatggtcaacttctgggcccttgaggtcaccgtccacttaaggaagggaacaatccacatcagccttcaccttgggacctttcagatgccaatcaaagtcaggcatggagatcttgggggttttgatgttcatctcaggcatcttgaatttagggccctttattttcgcatctggaccttcgatattcacatcaggtacatcaatgtccaccttgggtcctgagacgtcaaggtcagccttgggcaggttcacatccacatctgggccctctcctttgaagccaggcatgctgaacttgggcattttcactttgggcatttttaagtgccagtctgggccttgaacgtccacatctgggacatcaatgtccactttggggcccttgatgtcaacttcagggccattgaggtcagcacttccactttgggcagagatgcagtcagctcggacctattctgacttgtcatcccgccc

SEQ ID NO: 138417 - DNA, 191 bp, Homo Sapiens
accgggatgtggcaacgagagcccaccctcctggtaacagggcttgcacccagcagctggagagtcaatgtcaagggcagagggagatacagtctccattactggagagctcccatttgagggtgacacgggcctcagctcaagaagggatccaggtcacgtcgacgcggccgcgaatttagtagtagtag

SEQ ID NO: 138418 - DNA, 477 bp, Homo Sapiens
aaggactgagaccctgaagccagacccccacctccgcaagagtccctcactagagtcactgagcagacccccgtctctgggctttgtggacacaagactgctgagtgcttccacccgggcatggaaaccacaaagcaaactcagtgtggaaagaaaagaccctctggcggccttggcccgggaatacggtggttccaagcgcaatgctctactgaaatggtgccagaagaagacacaaggttatgcgaacattgacatcaccaatttcagcagcagctggagcgatggcctggccttctgtgctctgctccacacctacctgcctgcccacatcccctaccaggagctgaatagtcaggagaaaaagaggaatctcttgttggcatttgaagcggctgaaagtgtaggcatcaaacccagcctggaactcagcgagatgctgtacacagaccggcgtacgacgcggccgcgaattta

SEQ ID NO: 138419 - DNA, 102 bp, Homo Sapiens
aagtggttacatctattaataatttcctttgtgtctctgaggttttgttgcttaagaaggacttctcaaagatttaaccttattttttacttaaagagcaaa

SEQ ID NO: 138420 - DNA, 260 bp, Homo Sapiens
tttattactactactaaattcgcggccgcgtcgacgcaaactcctccaacactcctcagaccccctaccctgctttatcgaccccagttgcacgtttcaccttggaggatatattttgcatttctgtttacttgttattgcctatctcccctccttgaatgaaagttttactcgggcaggtaccttatcttcttcacttgttatatctgacatctcagcggtacctggtctatagtaggtgtttaataaaaatatttgct

SEQ ID NO: 138421 - DNA, 1139 bp, Homo Sapiens
  misc_feature (168)..(168): n is a, c, g, or t
ttttttataaaaacccctttttccgcctgagggggagttcttcatgaaaaaaagtttgttccgtgtttaattccaaaatggaaaaaggtccttttgaaatggccacaagaatttccccttaaaacccataaaggccgtttcgaccttggaaaataagctgaccttggngaattcaatggcccctgggggagccatgggcggtttttatttcaggaatgggttatttttacacttttttccattcccccttgcccatcaaaccatgcaaaccgcagttcagggccatctggggctttaattccaccaaggtcttcagggaggagcattacactctggttccgatttttttagccattgacactgcatacttggcattaatgtgcgtgtcatcttctgttagattgccactcttcacaaggtcatagtttatacagcctggctggatggcatcaattaaatccacaactgccaaactggagctgatcgtcttgtccttaaaactttgaatggaagttgattttccagcttcactcaacgtttctgttcacccagttcacaatgatgttcgtcattggctttctgaccatctccaagatcttccaggacattgaggggtatatcttttcatcagctgccagactaaagctaaagtcagggtttggttcccatcattcaggtcttgccctccaatgccaaccagggagaatttagcaggatgcttccctaattcaacagcatagttgcagttttctagctttttcatgttggctcccagtttcgggtatggaggtttattaaccttactccagtcaacaggaactttaattcgttcatataactgtaagattaccagggcatcttgcaggtcagcatagagatggtttacgtgaggattgacaccaagagagttcatccagttacggaaggttctttcttcacgagtttctccttctaatagagtccagtcaatatcctggttctctggcttagttagtgctgggtatttattaaacaggttagccacgaaagctaagttgagtttggggtttccactgacaacatcagcaggggtaacaaactgtctgcaacctaatttatctgcttgttgaagcacactctcacctctcttcaaatcatct

SEQ ID NO: 138422 - DNA, 218 bp, Homo Sapiens
tctttcttcccaacttttattttaggttcagggagtacatatgcacatgtgcaggttttatacgggtaaactctgtgtcatgggggcttggtatacaatttatgttgtcaccccggtaataagcataatacctaataggtaactttttggatcctcacccccctcccacccttcaccctcaagttaagccctggcttatggtcgacgcggccgcgaat

SEQ ID NO: 138423 - DNA, 272 bp, Homo Sapiens
ttttttattacagcttaattggcacatggttcactgaagatacacttcacttttacataggcttgtaaatagaaaaatacattgatgcacaaaaaatatagtacttcaataccaaacttaaatgatttccaaaaaggaatacaggttatttcaataattaaaggtggcttttgtgtgtgcactatatcatgtatacacttaattgtatgtttaaggccagtggaatctatagctaattactcgtcgacgcggccgcgaatttagtagtagta

SEQ ID NO: 138424 - DNA, 243 bp, Homo Sapiens
ctgcacagatacaatacattatttctaaaagaaaataagtacaaattttaaattgaatcaaagacgtaagatatctctggaatctgaaagaattccaaaaaatagcacagagaaaccatttgaaagccaaatactttacattaaattggtttcacttgtcagactcccaattccataaaactggaaaatcaatttactcaggagtcagtgtattttactgtgggggaaattactttaaaaaag

SEQ ID NO: 138425 - DNA, 463 bp, Homo Sapiens
tgccatcaatttattaaaataaacatgtatagcaggtttcaacaattgtcttgtagtttgtagtaaaaagacataagaaagagaaggtgtggtttgcagcaatccgtagttggtttctcaccataccctgcagttctgtgagccaaaggtcttgcagaaagttaaaataaatcacaaagactgctgtcatatattaattgcataaacacctcaacattgctcagagtttcatccgtttggttaagaaaacattccttcaattcatctatggcatttgtagtggcattgtcgtctatgaactcttgaagaagttctttgtattcagtcttagacacttgtggattgattgtcttggaaatcacattctccaataaggggcagccagagcctgcgtagcagtgctgggagagggccgccagcatgaggaccatcagcaacttcatggtgagactgctgctgtcgg

SEQ ID NO: 138426 - DNA, 598 bp, Homo Sapiens
  misc_feature (533)..(551): n is a, c, g, or t
gaagagaggctaacttcagttacaagtaatagaaagtcaaacagcacacctgtagtcaatccgttaacaataggaaaatgttattcagttaaagaaacaagcaattagtatttactaccctactcaattacagcccttttccaataactgaattagcagaaaagacatttccaacacaaacatttaagtgtaaactaaaagcattgaaaacataaaaatattactctgcagcaacccactggaatatactgaaagaacaaaaacagtaatttctatttccaaattttagaacaaattcattttatagaaggaagacaaacaaggccatagcaagttttgccaaatacatgctagtggcaatgacaaatcataacagttggtagagaaaaagacaagaaggtctcttttgcagttttctgatcacctctatatctctgagtgatggcatcctctttggtagcttaagtactatccccagaaattctaatcctgtgagtgttagggagcagacagacgatggttattcaggttannnnnnnnnnnnnnnnnnngagacgaagtttcgctcttgttgtccaagcacaagggcgcgatctcg

SEQ ID NO: 138427 - DNA, 1242 bp, Homo Sapiens
  misc_feature (568)..(568): n is a, c, g, or t
ctattaagtcgtgtcacagccaaactctcacccctaatgaggcacagctgggcccttggccctgagagaaatacgcgttggaaatgaactggaaaacacttggcctccctcaaacttcccaggagacagcttagcccctcgtgccccctgggagttggcttcttttccagcggccatcttcacaatcaagcaggaaaatgccattgttccaaagtacacaataggttctggtggttttcaaacatcctccatataccaagtgcaaatggaggggcatctgaggcgaattccacaggatgttttaggagcccacaggcctttgactttcttttctcggcagaagttttaagttccagtccccaggctttcattctttatattcttggtttggaagacagaggcagcagtaagaaaatagattatgtataaggaagacaaatagggcccaatgaattacccaaaccaaacaaacaaagtctgctttggaaataaggttttggagggaggtgagacctgtatgcatgagtgtataaaatcagagagaaatgtgtcaaaaacaaattacaanccttccaaatacggggattacacatgaatggatggtaataatcacacatcactccaaggcaatctgtgtattacatcttgcatttcatcaaacaaggcttagctcttggggtcattaattagcaacctccggttccagataccaaaatatgaggaaggctacagtactcgggtcctgcttcaatattgtgatttgtttttcttatctacttctctttttcttcccttattttgctcacaatgccttctgaggaaagacaagacctttcttataaaaggaaaaatatccatgtctctacccacagagtccaccattaatggaaataggagattgctttcttcaaagtacacaattaaagtaacgtactaactcctttacacataacacaagaaagctagaggaagttttatgtatttatattacactttttccttcttcctcttttctcaatataggaatctttctgttttatgaaagctaagccactccatacaacgaacagtttactccaatacaaatagaaattatagaaaatataaaaatcctactaaaccttttaatctctaactttccaagcaggtgaattaatacagaggacattagagatttattttctttaagctccaacagtaaagagtgtttcaaagtcattctcaaagctgtagagattttta

SEQ ID NO: 138428 - DNA, 442 bp, Homo Sapiens
  misc_feature (161)..(183): n is a, c, g, or t
  misc_feature (420)..(420): n is a, c, g, or t
tataaataaccataacgttttattaccattaagactaaacttgtattgaaaagattttatataacaagacaagaaaagcaatagcaaatttaactatcaactagattatgcatagcgagtaactgtttctattacccagggaagagcatgaacccttgtannnnnnnnnnnnnnnnnnnnnnnaaatatataaccgtacaaagcacagaacatactaaaatgatcagtgcactggacgtgggagagtgctccctcagtcattttgttcccttaagctctgttttgttttccccaatctgagttacattaaaataaagactcagttgtttttatttttctactgtgcagtaagaaaaaatattcacaacaaacatgacaatatatccaagaatagttctacacaagttacccttgataccnccttaactgtcacttaaatatc

SEQ ID NO: 138429 - DNA, 874 bp, Homo Sapiens
cagtcgacggtaccggacatatgcccgggaattcggccattacggccggggggggaagttgtccgaaatgccctctgaattgccggctgcagggtccttgtgcctgcgctggttctttgaaagtctcagtgttgatattgaacttaaagagcagagatggagatcagtagcaaggcagtcatttttttaaagcagtaagtaacaagtaagatttggttcccggtttactttctgctgctaaaaaccacgtcagtgacaactgctctctgtattatagcaatcttgaatggaaacatttctgtcaagttgtaagttttaaaagagtaaagtgttttggttagtaatgatgtggagaaaaatacagtattgcatgtgttcgtgtgtatagattgtggttcgaggattgggagggctctgagaagcagagtactacatcaaaattgttttaagtattttttgccaataaaaaattaattttatggaaatggcttgtgctttgagaagcccagttttattctgtcttatgaaactaatttccactttgaaaattgttcttctgttgtttatggtataaatgaatggaatataatgatatcctccttctaggaaacaaagcatttccttaaaatgtttgctaggttaagctgtgctgttctactgatggttgttttaaattaataatgagaactataatttaaataatatttctttgttagacattataatgttaaactgaaagactaaattctgcaagtactatataatatttttggcttataatgctacatttttattaatgtaccttccgttttgaggatttatatctgtatttctctttgcattatacaaatataccagtattttcattctggaa

SEQ ID NO: 138430 - DNA, 437 bp, Homo Sapiens
  misc_feature (313)..(313): n is a, c, g, or t
caggtacctaagaactgttaccctgctccaatggaaggtgcttttccttggtgcctaagagcacctttttggcattgaaaccaaacacctttacaccacaaaagagagaaggaggaatagaatacagctgtcacttaccaatgtgtcctaagtccttattgctatctcagttaatcctgctttgaacacttaaaaaacaaagtgccattctccaagtttcagcttgcactaagtcttaaccagaaggaaaataccttaatttcatttatcttaattcaagatgtgtttgttcatttcttattgtattattaanaaaatccttctagttaaaaagatgagtgggtatcaaaaatatcagcatttttgtataattaaatttttgtgctggtttttgtacaatcaaaaaccagtattttgggggccgggcgcggtggctc

SEQ ID NO: 138431 - DNA, 740 bp, Homo Sapiens
  misc_feature (524)..(535): n is a, c, g, or t
tttttgggcaaaagcagcaatttattcatgtcttacaaacatggtcttacaaacatcatacagagctggcacaaaagaacagacactgtctcacacaccatgcttccttccaaaacacttctattgagttacaacatcagaacaaatcaattactgagttacacagttcttcaaacatgtatacctccccatttgggtggtgagattggctaatcagacaaacaattaatttacatgtttaatacagtgcaggatttgtaacaggattcaagatattcacattgatattgtaatacattctaaaacagtacattttcagaaatgatgaaattaggtattaagatctccctgcctgtttcaattcctttgttgtttcttttctcttttctgaaaaccagttgcaaatagttttactcaacttttcacactcaaaaacactttaaattttaaaagctaaaaactatttacaaattatccattttaattttaaaaatgtttgttgttggtttcattgttccatgttnnnnnnnnnnnntcggcctcgtccaacaaccatacctcagctgctaccaccattaacttctggctgccgtgaagaatacttagaattggccccttacaacttttcagaggtccaacatatattctgttccacggcccatgataccaaatgcacatacataaaatggccatttgacttccccaaactacacacctactacagttcatttcatgttgct

SEQ ID NO: 138432 - DNA, 457 bp, Homo Sapiens
ttgtttaacatcctgaactttctattaatactatctgaccaaattttaatacaaaaggttaatttttatgaacaaatggataataacccaactgcaaactaccaacatatattctatctgaactcagcagttcccagggatgatgtttggaggggaggaaattgaatgcgtacagagcacgaagtctggctaacaaggcctgagccaacaataaccttgctctttctcttcgtcttcaggcagcccaggctgagggctgcaatcataaaaccaggctttggctttcttatgaagtctgagttgaattgaacctcagcacttgcagatcacagaaagattgcagatcagcagactgttttccccagaattccagaacctccttctcaagggtgttccagggcctgaatatcctgcttaagactgctcaactcttgaagaaccaaattttgaaagcgct

SEQ ID NO: 138433 - DNA, 1038 bp, Homo Sapiens
  misc_feature (836)..(836): n is a, c, g, or t
ttttttttcaataggtacttttattttaaacaacagcacacaaacacaatgacataacaggaccattagcttaatactgataacattccttgacaagttacttataatttacatatattgtttttatctggaactattttaaatattatcttaagatatactgtaaaacacaaatcctaaatatataccagttgcaaacataatgtgcttagttactgttttccttgttattcaaataaagtaacttaaagttcttcgaaatcatgtccacttgtgttcattgtttcaggatgcatgactcgtcccatgaatagaattgtaccagttctcctgtttctgataagaaagaaaaatggatggtcgacaataacttgaggatacagcacagccatcctactaattgcaatcattcctgagacagcagcagcttctgagccttcttcattaacctctaggaaggacttgtgaattgctttggaaagaaaaatctccttattatcagagaggcctgtcaaatttgcatctttgatgaaaatttcagttattccaagagccttcacaacatcttttaaatcaatttcctgttccactgtgaacctgggcaggtatacttctactttttgcttcttcacagagtttgcccattcttcaaccagctgtgctttgactaatggctccagagtagcaagaggaacttcctgtctggacagcaccagcatcatgcttatttcatctccttcatatggtatttctaggacttggtagataccaccagcttcattggagccatcactaaattccccataataaaattctccttgctgatacactcattnggaatttggacttcactttcatcatctttaggtgaaaggaaaagggttctagtattttcaggcctaaactgcgacttccagttccccttgaaatagacagcattaatgagggccagataaagtggcagcatcaaaatcccttggggataccaaatctttcaccagattgtttgtgttattctccacccacttattgatgtag

SEQ ID NO: 138434 - DNA, 1263 bp, Homo Sapiens
  misc_feature (1067)..(1067): n is a, c, g, or t
  misc_feature (1144)..(1144): n is a, c, g, or t
gttttccaaccctggggccaaccaccttgtttaacaataaaggccaaaatccctggggatttgggaggccatcaatctcgcaataaattacctaatttttcccacatggttttaagacttttgtgcctggattctattaaacatttcaattagtatgaatgctaaatcatactcgtttttgtgtaaacaagttagaaggctcttctctgaaattcaatagatctagttagttaatactattattgtgtttccaaggtgcttaggtttttatgagggctatttcaacaccaagtaaataaaatatgctttcataaaactgtaatttaaaagaaattcagaaactaagcggttggagaggagcattggaaatagagggggatgctatgagatgggggttgggagcagagaagaaactgcaggagggcaaagtgtaactagcaatataccttctgtgatgctccagaaacacatgtctgctaagattaacttgattggagtttcttatgaaacaggctgatcatcaagatttttaactcaggtttcagtgaaaaaattggaaacttttacaagaaagatttgagaagtagaaggcaggcagcaaattttccagatattatgcttgcatttcaaattcctgtttcaggcttttcaagtaggcatgcacattcccaaagccatgatatttggctaaatacacaaggaccccagtcgcacaccgtccatctcgctgccggcagaaactgcagttgcagattcctcgacaaggcgggcaatgccagttcggatccagcagagcatccctgacctcttcaccataacggtttcgaaggcaggggccacagaactggcctcgaacgccccagcagtctgggtttctgcagtttgttttggtatcaatagtcttctgacggcattgatgacaagtagagcccaagtgaacgggttatatatcttctctcggagaattgctgcagacgttctccaactcctcctctgtaatttcttccactgggcgaattatatgcggaagggtcacggatgatctggagcgacgggcttctgggcanggtcatcttcattcatgtagccatccacggtcttcctctttctcaccaacatgtacttatcctcttcctcctcctcnaccatgggtagagcgtcaagggacccgaggatccgggaccttgacctggtaagaggacgagctctccgttcagggtttctcctggaagcaacacccgggaaatggtacccttcgcggtc

SEQ ID NO: 138435 - DNA, 632 bp, Homo Sapiens
  misc_feature (389)..(389): n is a, c, g, or t
taaatagtttgtattttataataaggagctctttgaacttatccagatagtaactcctttataactgaaatcagctttaactattaaaattatatacgaggaaattaggggtgttgcagtacttggttgcaaataacttgccatctggtgttgggtcagaaaatgctatttcatcagtgctgagaaaacagccaaacatgaagcaattcctgagggtatcaaccagtcgtcttgcaatgcgctttcttctcttcaggtctgaaaccccagattctacttatcccacagactgcaggttctgggtacatctgaacattgccaagccctaggacattccgtagagcttggggattctggaccaattggttcagacaggacacgaaatgccntgtttgatggggttctgcaattaaacacccaactactctcttttcatcagatataaaaagaaaagtttttattttgtttggacatttaggaacaacttgctggaagcccaattcattatcaacaagttcttggacatcttctacctttttgatagcaaagcttggatcatgtggcagaaccaacacgattttcccatcccaaaactctgctactacacgttctttcttccaacccacatattt

SEQ ID NO: 138436 - DNA, 584 bp, Homo Sapiens
tattcgaatgctgtggaagtttattcccacgcaaggcacttactcccaacaagacacaaccgtttaaaattttacagcagtgacaccagggaggggtcccactcctatagacgtcagtattctgcatcgatatgctttgcaatggtgttcaactggatgttggcagctccttcatatatcgtaccaatctttgcatctcggaagtatttctccacagggtaatctttggtgtagcctactccccccatccactcgatacatttactcgttgtttgtcctgcaatctaccaaaagcaagtgcaaatcacacactgaaaccacataacttatacatgataaacacttctgggtaacattttcagcaacatggattcactgttagtggcactggaaggactaaagttatcttctaaactagcattgtctcttcagtcccattctccataccatttctgtaaaacatcctattaattcacagaatccccattttcttaagaaattagagcattgttcacatgaatctgcatgctgagagatatcatttattcaggaaatgtttactgggggcctaacggacgagataa

SEQ ID NO: 138437 - DNA, 416 bp, Homo Sapiens
  misc_feature (237)..(237): n is a, c, g, or t
ttacatgcatttttttccacttaaaaaacttggaacaaagtataaagttttagcaaatgtaaaatatttatttactttatccagtgaaataagttgaaattattcaacttaaatttttaaagaaagaaaatatgagaatgtgacagatactatgaaattctgtttcaaggttttgcctcagatattccactgcaagctgtgaaggcctcccttgctgggtccagggaagaaacccanggggagaggcatgacatcacccacatccgttgtgcagatccagtcaggtcaatccagtattgacagtctccgaggaacctcagtgacatggaggtggaaggactttgggtggggagagtcataggagggggcaggggtggtactgacagcttccagggagagatggcttccctcgtgcc

SEQ ID NO: 138438 - DNA, 917 bp, Homo Sapiens
  misc_feature (459)..(473): n is a, c, g, or t
  misc_feature (821)..(875): n is a, c, g, or t
gggttaaaaacatttgtgtcagatgacagggtgggcttttactgtcaagacatgaataagaactgatctggctgcctgatgagtgtttccacgcagccctgcatatttagtgaccaaggcatcaaggacatcccgaaactggaaattcatatccatctggtatgaatatataactcagctggcaaatgaatgtgtttgttgagatattacagtaataaaacacttaagaacaggaagattacatttgttggcatacgaaaccttagtggctacagaagaaagttggccttgtgtcactatttattttatgccctgatcagactagcaacttagataagtgaaagtttttctaacatgccttaaaaatattatggtttgatccaaagacccactttttctttagctcttgtgataagattttcttctttttacttttatacaaaggcagcatctttgaannnnnnnnnnnnnnngatgttgcaacttttgggttcttttaaactgtgatagtgatggtaactgatgcctttcattttgttcaacttatacaaaacaagccagcatctgatcaaaagtattacataaaatattttcttaaactattgaaaggtgctttgatgattttctcctttggtttgtagaattaggactgaacttttgactcaaattgctacagttgccatcacctttctgtggtaatactactgatatttgcttttctatataaagaaatgttgcctaaggctgtctggtatttcttttcaagggttttccagtatgaatgttaatgttgtcagtgtatgtatgaatatgaaagtgcnnnnnnnnnnnnnnnnnnnnnnnnnnnnnnnnnnnnnnnnnnnnnnnnnnnnnnncttatcagcagtcttgtgttagcactgggtaagctataattg

SEQ ID NO: 138439 - DNA, 307 bp, Homo Sapiens
tttttttcattaaataaatttatttgttaaaataatttaactccaaatacaactgttgaatttgcattgagttataactacaattcatgttttaattgaaatgtcaaggtttaacaactgacattgttacaaaacaataaacttgttcaattttaaatggtcagttgtattagagcgcaacaattaactgtgaactatatctctgggaaacctcaaatcaataatgataagtctgtttccaaaacccactgcagtcattcttgaaaccctgatcaagatttaatagatgaacaatgacatgttaaat

SEQ ID NO: 138440 - DNA, 1078 bp, Homo Sapiens
  misc_feature (1019)..(1031): n is a, c, g, or t
aaagaaaaactccaattactctgggatattcttaatccttattttagtagctgagtggaaggatcttttccattaaaataaaattctgtcccaaaaatagctaaaatggaaactgaaatatatgaaccatttgtgacacaataaaaactacttgtcagagccaactcagtttctcatatctcatatttttaatattgacttcaggccttaaaatttctatttatctttctttaaaaatataggttctatgccagggagaacatgaacatttcctttgcaagtagcaaaacacaagtaaactttcacgacagctgcaccggcataattcatcttaaaatatttaaaacatcatgcaaatttaacagcatgggtacttttattatacagaatttaataattaacaaaaacaacttccattctcatggcacttttataagaggtaaggaaagaaaaatattatgacgctcactctgtggaaaaagaatgagataatggctgcagctgtgaaaggacaaaatttacgacagttgtctggttgcaactgctatcttctctcttcattagcatgttctagaacaagaaacatgatactgtacactcacaaggtctttcatttgaagatttcagaacctttaataaaggtccatctgcactaaccagcactactaatcccatttggatgttttccgcctcatataactgtgcccctcactatcaatagcttcatagaggtcctttttattctcttgtattgcatgtagataaccaatatatgccacgcaaagtgaaagagttaccaatccgaaagccattacaggtttgttaggtttaatgaagagctctggattcacagcacgaaataaggttgttgtgcgcacccctctgagccctgggctttgaaactctttctctttgggtggttcctttttgaatgttggaggctcaggtgctgaagacatcttgatcaatgatgatttattatctttcgcggggtcacctcctctcctcgcccgagacgnnnnnnnnnnnnnggccgtaatggccgaattcccgggcatatgtccggtaccgtcgactg

SEQ ID NO: 138441 - DNA, 2024 bp, Homo Sapiens
  misc_feature (1776)..(1864): n is a, c, g, or t
tttttttgcaggtttagaaaataaagtttgttgggatcttaaacattttggataaaactaacaaaaaaatatgaacacacattcaggttgtggtgctatgaggagtagcgtcatcttatttagttccttgagatacacgcacggctgctcggtgatcggtgccgccctgggaaaggttggtcaggaggtgacaggggtctccaggaggagctcgggaggtgacaagggtctccaggagggagcaggggctgctcggccaggctgccctggagcttgaggataaggtcaaggttggtatgtgttgctccgacttgagaatgaattaggtgtgtgactgtgtggcatcgtgaacatcagtagtgacgcagccgtggcctgggctttgcctgcagcgcacttaggttacacggagcgggatcagaagcaagcgattcggcacacaggcgtttggccacagcaattaggaaatacatattctgcggcagggacacgatcatattttggtgtgaagaagagggcaagagaagcagaaggagaatgggtcggtaggtgtgaaaagtgtttggcatgcatgggattaaacagaaaaggtgtggctgagatttcccagtggtgctcacagtgcatggacagcgcggggtggggcacggcgggcttcacacagttctgtccgtccctgagtgcttcctcaccaccttgcctccgttcacctggtcgaccgccagggtcttcacctcgggctgggcctgcggcggggtggcgtggtggatccgatgtgccaccccgacgtgggccttgtgcggcttttcgcgggccgggttgtgctgctcgccgcttcggtcggaggcgatgggggggatgacgaggggcctctctttgatgaggtggacctcggcggactccctagccagcaagaaatggggtggggtcgggcatagcatccactggttcccgcaaaaggagtttcctgctctctgccccgaatctgtagacctcttcaaattccgggtgcaagggggctgagaggctctttttcatgcggcggcgaggcgtttcgggtagcttgtctttggggggcgctggcttgtagctggccagcacggggctccctgacgggctggcatctgaaggtcccgctggagctcatgagcttcttcttggcggcgtgcagctgggaggtcaggtaggcgatggtgctggcccgctgctccaagctcgctagacaagcagggtcaagcttgtgactcttggccttcaagctcctccaggtacttcttctctcggctccttgatggtgttctccagcactgtgatcatcgcgtttttctgctccagttctttcaacaactcagcattttcgttctctttcactttcagttgggtttccagctcttcacatcttttctttaattcactgcttttagaagtcccgtctcctgtctgttccgaacttttgactgtcagctcatatgttaaatctgtgcagtgctgctgcagccgcctgatctcggagtgcagccccttgagcgtgctggcatgctcccgctgaaggaacaggaggttcttctgtgcgctgtgcagctggttctccaggtttgtggctgccatgctgacatccagaggaccttcatcgtaactcgagaaatgtggtgaagtcatgggtctttctggaaaagctaccagagtaattcaagacgcttgtacagcactgaaaaatactgcgggcgccgccgtcgcgttccttcaggcggctgccctcttaggctcggtcctccnnnnnnnnnnnnnnnnnnnnnnnnnnnnnnnnnnnnnnnnnnnnnnnnnnnnnnnnnnnnnnnnnnnnnnnnnnnnnnnnnnnnnnnnnccgccgagggaggtcagtgggcaccgcccgcccggcgcatctcgcccgctcccaccccagcgctagccgcggtgcaccctgggagcggggccggcggcgaggcctggccgcgctgacccggcgggctaggcgccggcgcggcggcgggcctgtgtctccc

SEQ ID NO: 138442 - DNA, 988 bp, Homo Sapiens
  misc_feature (726)..(726): n is a, c, g, or t
cttttataatataggttaaacagatcctttctaagatggcattatttaatctttacttaaaactatgaaaaatatgtgtaagttattgtttataaacagaagagactataattaaaatatagagcagattccaagtgaccatcattttactttttagatttaaaacagaatgaaacagaagatttagtcataagaagatgcttgaaaaacaatccaagtatccaatgcagtggctataaaatattatttcatcatttaatcttaatcattttgaaacaaagacagacttcaattttacactgcttgcactttattttgtacagacatttcattaattattactcaattttgaggtgcaaaccttctgaatatagctttcattttggaccaaacaatttgttatggcaataaataatgatgcattgaaaaaccaatttttgtatttgatttaatgcactcttacatttaagaaattatatatacattcttgaatttcaacttaccaaaatagaatagcttttatttaacagcctaagcttttgttttcctgacaaatactgaaactttttgttacattaatgctgcaaagttgtttatcacctcaactttctcactgctttgctcataactaagtgtgattacatggagagagaaagttttgtaacagtaacacatgatttagagtttaaaatcatatcagaagatgggaattatttaaatataccntattaaaataggtgggttaatccatggggaaaaaaacccaggggtttttgggcttataattaggaaaataagtattattcttagttaatagttaattaaaaaaaatcaacaacctaaaaagtaaaaccaattctgatgtgttcagtagctgaaagatatgtatgtttgtaggtataatatacaaatacagacacaaaccattacagtaattttgaaaacaactagaaagcttatactgtgttgacaaatatcaggttataac

SEQ ID NO: 138443 - DNA, 534 bp, Homo Sapiens
ggcccgcactgccggtatccgccgccatccggactcccgggtcctctgtgcaggttggaggatggttggttgtggcgagcgaggctgaaggagccgggacgcggggctctgggcctcgggaactgagccggtactcacctccgccccttctccccgtcgctgtccgcagccatggccctacgctaccctatggccgtgggcctcaacaagggccacaaagtgaccaagaacgtgagcaagcccaggcacagccgacgccgcgggcgtctgaccaaacacaccaagttcgtgcgggacatgattcgggaggtgtgtggctttgccccgtacgagcggcgcgccatggagttactgaaggtctccaaggacaaacgggccctcaaatttatcaagaaaagggtggggacgcacatccgcgccaagaggaagcgggaggagctgagcaacgtactggccgccatgaggaaagctgctgccaagaaagactgagcccctcccctgccctctccctgaaataaagaacagcttgacaga

SEQ ID NO: 138444 - DNA, 475 bp, Homo Sapiens
tttcttttctgtcaagctgttctttatttcagggagagggcaggggaggggctcagtctttcttggcagcagctttcctcatggcggccagtacgttgctcagctcctcccgcttcctcttggcgcggatgtgcgtccccacccttttcttgataaatttgagggcccgtttgtccttggagaccttcagtaactccatggcgcgccgctcgtacggggcaaagccacacacctcccgaatcatgtcccgcacgaacttggtgtgtttggtcagacgcccgcggcgtcggctgtgcctgggcttgctcacgttcttggtcactttgtggcccttgttgaggcccacggccatagggtagcgtagggccatggctgctgctctccagagacggccgtggcggaaggcctggcgccgcgcggaactccgggatatctccccggcgtaatggccactctgcgttatagcactgcttcc

SEQ ID NO: 138445 - DNA, 1086 bp, Homo Sapiens
  misc_feature (138)..(138): n is a, c, g, or t
  misc_feature (280)..(280): n is a, c, g, or t
  misc_feature (354)..(414): n is a, c, g, or t
aaatagatagagtaacaagagtgcggcatcggggtcggtctataaagcgtgttctcatgctcgccttttcgttgcggcgccagagactctgctgtacatgaagcggagggacagatagggtgttttgcaaatgggaancgcttatggcgagtatgggcacacattacagagcgtggtgttgcatagacgttacgtgcatgatgacaaattggagaggtatccgcccgggcagacacgggtgtagaccacatgggcgcgtcgcgtactggtatatgttggncgcgtgtgtgcgcgccgccataaaaacagagatggtggtattcgtgagagagcggggctcttgtgtcttttaannnnnnnnnnnnnnnnnnnnnnnnnnnnnnnnnnnnnnnnnnnnnnnnnnnnnnnnnnnnntcgaggggtaagcagagggctgatcaagtgggttgcgtgttcagggggcaccaagcgggcgggtcttcaggtgaaatttcacagagaagaaggaacgggccccagggcgaaaggggaggtcttcaagggttctttttttgtgggcataggaaaggttgttccccttaaatggagagcgccagggtgcgtgttgttatcggtgtccctcccgcgtttcctttcttgggcgcggagaagtggattcccccacccttttttctttgataaatttggagggggccgtttgtccttggaggccttcagttaactccatggcggcgccgctcgtacggggcaaacccacacacctcccgaatcatgtcccgcacgaacttggtgtgtttggtcagacgcccgcggcgtcggctgtgcctgggcttgctcacgttcttggtcactttgtggcccttgttgaggcccacggccatagggtagcgtagggccatggctgcggacagcgacggggagaaggggcggaggtgagtaccggctcagttcccgaggcccagagccccgcgtcccggctccttcagcctcgctcgccacaaccaaccatcctccaacctgcacagaggacccgggagtccggatggcggcggataccggcagtgcgggaaaccacttacctgcccc

SEQ ID NO: 138446 - DNA, 263 bp, Homo Sapiens
aagttgtatgtttcaggagaaagaggcaggaactattgtagtacacctgggtctggatcccaagcttacccaccatgaccttgaattttcacccttccccatggtcttgccctctctgttccccgttccagaggctgggcactcactgcagctggctaatgatgaccatgtggacatgctttcgggccttcaggatcttctccagccagtggatgtcgtacgtgttggggttccggaaagggatgtcaggtggtggctcacac

SEQ ID NO: 138447 - DNA, 1383 bp, Homo Sapiens
  misc_feature (516)..(516): n is a, c, g, or t
ttttttttaaatggattgtttttattaatttacaatgaaatagtttttgaatgacttcacacaaaaacctagagataacatcacaattgcaatgttataaagtttaaaggcctattcatttcactgtcagttgaaattcgttaccaggtgaaaattctggagctgggttttgcactgaggatgctacacagccactagcctttttaatttggtcttattaacagaaatactgacttagtgaaattacaggcataggcctcttaatcgctttttatgagtctgaacttttgctttcaataccaaatagtatctgaaaaacatgctcacttttgtgcttcttgagaaattctaagaattggcccagattcatgtgatagtcattccttaatccatagtcaccatgagcctcaaggagtaactcttcaaaagaatggaaaaggcgcaggtcctcaccatttccttctgtctccacgctttcagcatggcttacaggaaatgtgcttccaattggggtanctaattgtgtgccagaactcctcacagtggctcttgaaaccctccacacagattataccaggctttcctgtcatgcaaaatccagtcacatctaaccttttcccaacatccaaaatctttttccttaggtcctgctgatatatatggtgactgtagatccacattcggaggaatgtgttcttgactggctttgcttgtgtagatggttcatatacaagctttctgttcaggaaataagatgcactgttgtccctgtagccactggattgctgcacatacacagagctcacctggatcagaagtccctatgtaagaagtgagacctttgttgagaagtagctgctgatgtctgtcaagttcagatgaccgtccaaacagctgcaatgctacataggggtagctgtgaggcatggtcacttgcaaatcaattttcaccttgggctcttcaatctggagtgtaattacaaattcgatttttggtggcagcgcctcccttgtgccttccaaatacctctttatattcgtcagggcatttacatcttcaagttttacttctccttggttaggaaacatagaaaacagcatttccatctccagtagatgaagctgaaggctttctttcactgaagcagacatgttgcctcgcaatcagcctgcctggaaacctcacaaggctcagggacgctgggtttgtcaatgccagccggtatccagcgaaatttcccgaaggtccctttacgtggaagcaattctgcaggaacactttgcaccgagagcctttctggtcactcaatggtaacagccccagacccgggtaggaaccgcagccgcagttcctcatcgcaggaattccggaccggtccagcc

SEQ ID NO: 138448 - DNA, 576 bp, Homo Sapiens
tgacactgtgcctggccattattttgtttatttaaatatgacaaaatatatctatcaaggtcagaaactaaacaatgtaggtatatatttaatcactactgctctaagccaatggttttaaattctgcctcacattaaaatcacttggggatctttataaaaaataccaaggtctacgtgccacccccagattttccagttgaattggtgcggggggacccagttgcttccaatgtgtcgttacggttgaaacctttcacttaagatataaatatgatgaaaaagacaaaaacactgtgaactttatctgaataagtcggcattaatgagaatagggctccttaattcaagtatccaagagaagtaagcttctgagatggatactcataaccgcttaattcaaacaggagtccctttcattaactgtcactaatggcttataatcaaatatgaatttgttagataagcaaatgagctatgctgcttgaagcataaatacgagatttttttctttaatctcacagtaacccacttcccatggcaaataattcagcatttagttttgtgctaacatgc

SEQ ID NO: 138449 - DNA, 372 bp, Homo Sapiens
cagttgacttccacaagtgattactgagtggcaagcatgtaccaggtaccatgctaggcagaggcagtaaaatgatgaataaaacacagcagaatttacagtttggtgggatagcaaaacacagaaatagataactcagtataatgtggtgaatgctaagagacttagctcaaatcagcttgttttgaaaattttaactgttgccaagctactagtaaatgagttcaaattgtccactttagccttctaaaccctgattgtttctgtgcagttttaattctcattactatactgtgtgatctttctgattcagatccaaacagatttctcttttatgagccttattgtctcccatttctcaccttggatctt

SEQ ID NO: 138450 - DNA, 656 bp, Homo Sapiens
  misc_feature (14)..(14): n is a, c, g, or t
  misc_feature (38)..(38): n is a, c, g, or t
  misc_feature (45)..(45): n is a, c, g, or t
  misc_feature (58)..(58): n is a, c, g, or t
  misc_feature (106)..(106): n is a, c, g, or t
  misc_feature (168)..(168): n is a, c, g, or t
cagtctttttaganctttttcccccccaaggaaatttngtacggnggccattaaaacnggagtaactggaagatccggcttatttcccaagcagcttcccatagcntaagagccagtctgccaagtatatgtacccaattccaaaatgaaagttataatcctaccggnatttaaaatccgtaatttctattctgaattaaatgatttaattccaggttggttttcctgtcttgttttagtaaccctccctcagtgtagaatttgtaatcaacctttgtcataaatacacatgccaaactattggaaagtaatttgccagatgaatggatagggtaatgtattaagagtgagacagcagttctgagcccctggctggagtctagtagaggaactgccagaggatcaatatcaacatagacttttagatataattaaaacctattatctaagtcagtattcaaatttgtcatgcttaatctctttgaagacaagaaatgctcttctggttactcccaaagtacctgtacacattctagatctgcactgttacataattataaattggtatttgctaggtagataaaacttaagacattctgaaacatttctatttgtactttttcaataaacttgactatatcaagatgggaactaaa

SEQ ID NO: 138451 - DNA, 439 bp, Homo Sapiens
  misc_feature (145)..(145): n is a, c, g, or t
ttttttgtattaaatcatttaattcagaatagaaattacggattttaaatcccggtagattataactttcattttgtaattggtacatatacttgcagactgctcttagctatggaagctgcttgggaaatagctgatcttccangttactcctgttttaatgcctcagtactatatttctttggggagaaaaaagttctaaaaagactgacccagttaatgaaccagagattttatattttggagggtaaagaaatgagttaagttttccaggtattaagaacatgggagggtggggaaaggcacttaatgcggttttgcaggaaatgggattactggattggagagataggttgcttgttagtaaacagatgttccttgtcagaaaggctgcaaaaaggactctaaaatcccagctttgagaaagacccacttttaa

SEQ ID NO: 138452 - DNA, 631 bp, Homo Sapiens
  misc_feature (236)..(236): n is a, c, g, or t
  misc_feature (562)..(562): n is a, c, g, or t
  misc_feature (569)..(569): n is a, c, g, or t
  misc_feature (606)..(606): n is a, c, g, or t
  misc_feature (619)..(619): n is a, c, g, or t
tacagtttactgaagaaaaagaagcttttatctctgaagaggagattgcaaaatacatgaagcgtggaaaaggaaagtattattgcaaaatttgttgctgtcgtgctatgaaaaaaggtgctgttttgcatcatttggttaataagcataatgttcatagcccttacaaatgcacaatctgtggaaaggcttttcttttggaatctctccttaaaaatcatgtagcagcccatggnaaaagtttacttaaatgtccaccgttgtaattttgaatcaaatttcccaagaggttttaagaaacatttaactcattgtcaaagccggcataattgaagaggcaaataaaaagctaatggaagctcttgaacccgccactggaggagcagcaaatttgataacacagtgtgaatatttgttctacaaaggtgtttgttggaaccattctttggtaagtatagcttatcagatagcatagttggatcagtagatgacatgtatggtgtaccgtgtttcactgtctcagttgtgtaccaagaatgagcattgatcattttttcctggncccgtcnatgtgcctatcttgtaagccataattccgtatagccngatggataactcncattccctttaa

SEQ ID NO: 138453 - DNA, 1834 bp, Homo Sapiens
  misc_feature (912)..(926): n is a, c, g, or t
  misc_feature (1329)..(1339): n is a, c, g, or t
  misc_feature (1732)..(1779): n is a, c, g, or t
gtgattaacaggacttttattggtagtaaactagagcaaacaatcagaataatacatatgcagtattcagtacacacaataaaagttaaagaaattcaaaacctgtataaaacaaactggagaaaaatcatacagcttaagagatacagtggtaaaggtcctctccatcctttgattacagcttgtactctgtactcaatagaacttaccgcacttactgaaataagaaataaacactttttagtactcagcgtatttaagattaagtacattttctaagaatcttgcaatgacaagttggtgaccctttagctgctaaagctaaagggaggaaagtgggaaaaggaaattaactaatactttgtaaccatttttaatatttcttattttccaaacactgcttttataacagaagtgttttacacttgcacaatattaattactttattatacatggaagcctgcggtaggctgattacacaataagactgcaaacaaccagtggtacttttctgacgtcagaagagtacataagactgaaacatcaccaaaagtacataaaaaactcatcagcataaacatcaaagtacattaaaaaatataatcaggaaaaaaatacaattgctaaaaagcagttttagagtagagccactgccaatcagtagcttcaaatggcaattagagttcatagcaagttttgatgactttacaagacccctgtacaatactaatgcaccctttcattaaaatgtacattaaaggccgcaatttcacaaagaggttctgatgttattactataagcagacacattcttatccctcacaggagttatgtcaccagttggaattacaaccttattaatatctatccaagaacacggggttttattacatatggaaatctgtatgggnnnnnnnnnnnnnnnaaaggtgggttttggggatgtttaccctattgttttttatttggatgccctaaggcatataaagcgcatagtgaattacctactggaatgtaaatggttctaaaattaaaactgttaaaatagaaagagggaaaaggaaggcccaagaactcttaaagagaggctgagaacaagaacaaaaaaacccagaagtgtaggtaatacgtaacagcgcagacagaaccgttgtaggccatgtataataaataatgcatgccccaaatttcagttaatcatataatttcaacttgagttctaatactggaaccagccaaccacttgggcttcaacactgtactagatgtcagtagaatcgcttgatggaattacagccttgttacagttgagatcaagagagggtgcnnnnnnnnnnnccttcttttattaaagctatcattccaggctttgatcaaagatccaagaatatttgttctaccaggctggaatgaatgtggtttggaagttcagagtacatttaaaagctgcaacaaaatataggtagccaacaatctcagaattttggatcagcccagatggagatagcaatttgaaatgtcttcgatcccttacttaaatgacgaaatgtctatcagcccagatagagcaatttgaaatgttttcgatcccttacttaaatgatgaaatgtatatcatactatctgtaaattggatattccattacagtgataacgtacagaattcccatgcgttattacactttcctgagagtaaagcaattagaataaccttaatcctagcaacaaagnnnnnnnnnnnnnnnnnnnnnnnnnnnnnnnnnnnnnnnnnnnnnnnngcgtttaaaacatttgggctattccctgacgatctatacatgtaaatttgattgc

SEQ ID NO: 138454 - DNA, 713 bp, Homo Sapiens
tttggtgttaaaacagtgtttattgtgtaattttatacttactataggtttcttctgctttatagaccctgatcctgaaaatccagaacccacaactacgaatgaatgtccatccccagatacttctcaaaatacttgtaaaagtcctccaaaaatgagcaaggtaataacattgacctttcgatgggttccaaaggactttaggttgagtgcagaaaagctgatggttataatatgcagtgtttttctgctgtatcaagtatcaacttgtgacttctggacacttttcctgtcagaaatactcaattgtgtttactactgtttgttcttcttactgaacatgtgatggataactctgaccaaacattcaagttttctaagcacacttcaacagcttacattttcttcaaatgttccacctctattctagtggtgtccaggaaattcatagccttgtcatgaaattcttaaccatccaattatcttttctctgcctttgggcagttctgtctgccaacttctagatagccagctcctgtatctgctataaacacatatgtgatccactgcttgtcattttccatgaagatttcacatggaactataatacaggaatgatgtccctttgccagaagataaaattgtacatttccttgctatttcttggttccaacttgataatttcttaagattgtaaattatatagtactcag

SEQ ID NO: 138455 - DNA, 1740 bp, Homo Sapiens
  misc_feature (1045)..(1045): n is a, c, g, or t
ccaggttattggagcccttcacatttttaaaggggaaatggctccttctttaaaaggtacttttaaaaaattatgcaaaaatcacaaaatggggcttggtaaattataatgcatattttagaatgagaaacatatcttttcttccttaaagttgccatatagagaatgacatctttataccccagagccactttgtttaaaatccaatgtgaaaagactgttatggaatgaaaagtttgcacaactccttggagcagttaaagtccgctacatgcaacataggctacaaagcactcaagacttggtagcttttctgaaatttgagtccccctcccatatttaatggaaagtaacatttacagggtgcatttacatacactataatacaggaatgatgtccctttgccagaagataaaattgtacatttccttgctatttcttggttccaacttgataatttcttaagattgtaaattatatagtactcagctaaaatatttcttcataaatagttacaaaacctgccaaaacacaaaggggaaagtatttttcattcaaaaaaatgacatttgaatgtcacacaacacaagaaacaatgcttagagacatgttattgtttccagaagaaaatggtcagtaaactacttagctgaagacaaaagactacccttccccaggatcacagtgcacaaaaagcaaaatgtcaaacaacagtacctcaaagcaaaataaaggtctgaggatgaagccagctcacttgtaatcctgttaaagaatgagagtcaccgtttaggtccaatgtactgggaacatttgctagctcagaatgcaatattggtagaatttgctaagaattcaaccaaggatgccgaaggcattcgccagctgaggctcgtttttctggaaccatttctaacatcgggatcaggaaatctgtaaactgtgcagcatcttcatggggccagccatacttttccacaagtacatcaaagaggctccagggcttcagcttggtgatgtgtcgcagttctccttttctggtgnaaaaactccgttggagtatttccccaacatagcgtattttcgagggactttccccagcagttcaatgatcaatgctatgtgatcttcgtctctggaatagtcttccccagaaatgtggttcaaaacaaataatctcccgttgccagctcaaatgccatacacgccgtgctccagatgtccgcaggggtgctgtaccccgctcctatttaaacctctatggagcggtactgacgcgtctggatgtcttccgtgaagtgtttatgcacccaacaagcatttcccaggtcagcaatttttactctaattttatctgcattccgcggatccaggggattcaccaacaagtcagctgcccgggtttttgcttttggcaaatccccagtactggaggctgaaaccgttctgcttctgtcatgggatggactgctctcctcttgctcagtaagtggtgatccctcagaaagcacagagccgcaggccacaggttctaaggatccagagaacaacgaggtggaaaactctgggaactgtgactcgggaattttatgtcgtccatttggcaattcaccattgaattgttcataggagctgctatatgtgtaatcactttctgcatttggctcatcaagattatattcctcaggatttgggcagtcttcttcatcatcatcttcatcgtccagttgctgctcccc

SEQ ID NO: 138456 - DNA, 1706 bp, Homo Sapiens
  misc_feature (43)..(53): n is a, c, g, or t
  misc_feature (673)..(682): n is a, c, g, or t
  misc_feature (1592)..(1616): n is a, c, g, or t
tttttaacttttgccacttttgtattttattgtggaactgagnnnnnnnnnnncctttacatcaaatatcctcaatggaagaggggatattgcacacaaatatcataaaagcactacatattactttcactggaaactaattttctacattagatatgactggataggatagaagtgatgcaggattataagacataataccatacacagctgcagactgacacaaacaccattcagaacaagagagaggagtgtgaagtgcttctcagctgggctcaagaccacttctttccagtgctggaaagaggggctgcatgcagtgtaggaaaagcgtgtctctgaactgccacagggtgttctcgaaagggcagcccggtcttgatgccacttctccatggctcctgttttggggagctccaaacaagtgcagagaagctgcctattttttcccttccttttcagtttttgatgctgcctttaaaaatcaacttcatgaagtcacagattttttaacagtaaatagttttaataccaggtgaataacctaattgctttcaaagaaatgctcatccctaggctgcttttggtgtattgttcagttggttaaaagataaaagcttacagttcctttcaaatggaaacaggatcttttcttctaaatctgaagccaccnnnnnnnnnngttattatcctaactcacatatcattactgagcaggaacctcctgtgacaggtgactaaagagaggcaagaaaagcaattcagaattgtagagcagctcctaagagctgaaatttggtaacagagggaaaatgaaaggtggtaagatttccattagcaaatgattaaatcttaattaaatgagtattggaaagctcctagactgcataagctattggagacacttaaaacattcatatacactggggaaaccattcactatgatatgtaacgttaagaaaagaaaatttttttgaactccatggaaaatggtgtttaaagaggggaggaggggaagttagtcattgtatccagtcccaccacaagactgagaaagcatgcacagggctcagggttttgagaaaggggacagaattggttaaaattgaaaatggaggatcatcgctaacatttagtctctgtagaattttgtttaagaatactaccaaaaaggtcatgatcatgagtgctatctcgatagaatcccatcatttaaacagagtgtaaattccttccactcaaatattcaatctatacaattggattaagtaatcagtatgaacaaagctcctagaagtctgtgtcgatctttagctctcaccatgaatgtacatggtacattgtgatggctgttactaaactaatcgtgtatttatggaactagcaaaattaggttagtcacacaggcaggaaaggtgtctggaaggacaggagcaacctgtaatgcgaatattggttttcttggtatactcaggctctgtggtcattattgagaacaacggatggagaaaggtactgatagatttcataggaaaaagagccagctgactagtgacagtttttacatatttttcccattaaatcccatagcnnnnnnnnnnnnnnnnnnnnnnnnnaagtgaggagggtggagtggttataactgaagacctggctataacctcgtgcgaattcaccacccaggcctcgtacctagccgtaactgg

SEQ ID NO: 138457 - DNA, 594 bp, Homo Sapiens
ctgatatgtcaaaggtgtcatccaacagttctcatttataaatatatatagagagaggtttgttttttaatgtagcccgttcagcatcctgccctgtgcgagtcctggtctcccccggggtgacgctctcgccggcgctcagtacgggcgattggcgtctttgggccgcttcagctgcaccttgagcctcttcatgccgatctggaagccgttcatggcctggatggcggtctgcgcgctggccgggttgtcgaagctcacgaagccttctctctgctgctgggggatcattggaggcggctgaggaaaggcctggcttatctgaccataggcagcagggtaggcagctggacctgcatactgctgcactccggcgtaggcctgctgcagggggtccgcggcggtggggctctgtgctgggtaggggtggatgccattggcgaacacagcttccgcagcaggttgcccattggcctgtggggggaggccggtgaagccattcaccccaatgggggatgggatgctaggcacggctggtgcagtgatgcccggaggggtgctgccacctgaggttggggtcataggtgcggccgc

SEQ ID NO: 138458 - DNA, 1419 bp, Homo Sapiens
  misc_feature (372)..(435): n is a, c, g, or t
  misc_feature (747)..(822): n is a, c, g, or t
tttgctttcctctaatttttcttctattatataggtattttaaacttttcctttttaaaattctgtacaactattatgattttaagagggggaagagttagaagcatttacagacttttcacaacaatgaccttgcttggtaagtcccatttgttcccctccttgttttctcacacttcacgggtgagttttaagatttgtgttgctttccccaaatatccaccaatttgttcatcttttaacagctccatccagacatagaatacagaaaaccataggaaagtgtcatagacttggatgagggtcatcaaagcgcctctcaaagtatcaaagaactattatcttgctgttttaaaagcattgaagcgttannnnnnnnnnnnnnnnnnnnnnnnnnnnnnnnnnnnnnnnnnnnnnnnnnnnnnnnnnnnnnnncatagaatcgctctaagctgtttcaagaacagccatgaggcaggaaggagggggtcctccattccccctctatttgacatagagctacacatctgcaataaaaagtttggtcctttggtccctaaatagctaaaggaatgacagatagagatgctcagtgtcggcctctcagccgccccttggggaccaggccccacgcaccacttgccccagcctgcgtcaggtcgcccgtgggctggaaaagccccgggatcggtaagcagcgtctcctcccagctcccagcccttcagcctccccgtctgctcgtgatnnnnnnnnnnnnnnnnnnnnnnnnnnnnnnnnnnnnnnnnnnnnnnnnnnnnnnnnnnnnnnnnnnnnnnnnnnnncccccaaacacgtgccctctgaactccatagacgctatactttccttgaagaaatgttacagtcacacagacagtgtctggagtcttcagcttgattgatattggctgatatgtcaaaggtgtcatccaacagttctcatttataaatatatatagagagaggtttgttttttaatgtagcccgttcagcatcctgccctgtgcgagtcctggtctcccccgggggacgctcccgccggcgctcagtacgggcgattggcgtctttgggccgcttcagctgcaccttgagcctcttcatgccgatctggaagccgttcatggcctggatggcggtctgcgcgctggccgggttgtcgaagctcacgaagcgacctgcatactggtgcccttcgggggtaggcttgttgcagggggtccgcggcggtggggctctgtgctgggtaggggtggatgccattggcgaacacagcttccgcagcaggttgcccattggcctgtggggggaggccggtgaagccattcaccccaatgggggatgggatgctaggcacggctggtgcagtgatgcccggaggggtgctgccacctgaggttgg

SEQ ID NO: 138459 - DNA, 2151 bp, Homo Sapiens
ttttttttgccaggtacttcagctttcagtccaatgagtcagtagcaaattccactaatatttcagctggatcttgaactattgttttataccacaagcttcttctgttttatccttgaattaagaatagatagccttttatgcccctgatatttatggtgacacactaaaacaaaaagcaataggctggacatactaaagtagctcaagtacttcagaggtcagagttcctttgaagcaccttaacacatcacttacggatcaaggacaatgtggcataatggaagtatttctcttaaaagactgtgcagtaagaccagaagtatctctgttgggaaatcaaaatgtcattagtggaaactgcaaatttagacctcagtgaatatggtggtcgtctgtctcagttctgttgtaaaatgagattttccagttcatctgcagatcgcaataaaaatgcagctgattctcgatatcctgcaacaagctgtctcacggcattgatttcagttggactcagctggggtctggagtttgagctgctggaggatcctgagctagtcgccaattgtctcttcatgctgagatcagtgggtccactgctggaagcatcattcagatttagcagaccccctcctagccctctgtaactatggtaactataggtcccatttccattgatgtacagcacgtcctgtgagcctggaacagctgatgttgagtaagtggcctgggtcgcctctggtttacactgtttgtcagctggagcagactcattcctgctgtctctccagacgcatcctcttggcggcatttctactctcactctcacaagctgaagccaagatactctctgcaactgctgaagtaaggtgggaaggaataggtcgagaattaaaagctttcagccgctcggcttcaacgccgtctgtctcattaactttctccgaatcgtcatggtcctcgtggtcatcttcgtcctcatctcccctgtttagtgagaggtcctcagctcctcggtctacactctcatttttgccagagtcatagctggagtaactatgtgcaggagacttgcttccattttctctcgcctctcgttccatcttgaggtcagaaattagaagattcttatacttgtttttcccattactgttgtgatcatctattctgtattccgaagttagctgcgcagagaggggactgtcactcaggttcagtggctgttcatcttgctccagcccagttttgccatcactgttggagtctcccatctccctgctgtgtgttccccctgaagcaattgaactgtgccccagagtctcattgccattaaagctctctgcagcagaatcatcatcttgctggccatgaagattctggggactttgcattctttcttcaagattggagctaagatcagagttcacagctgacatccgtgttgaatcactcatgtcaaattcatcactttctattgaactttcatcctcatcttgctgtgagtttagcagctgcagcttcatgtgtttcatgtaggccatggtaattggcatgttgtagtcaatcatgctggtcaccaaagtgggaggttttccattatctttatgatctgttccatctgggtttaaatgcattcttttctggcactctgagcagctcattagaaatcgtgtcaccgcttctcttggtaggaaggcatagctctctgaaattgctttgtaagttctcttttgtccagcgtgtttccgaatttgttctccatttggccccgtttccacatgcatcgaataaataatgtcaaagaaatcttcaaccacagctacccgtcgtaaagatagcttctcatctacccctacgccatccgtggtcttgacaggcacgtagagcacttgcttggcgccgccgcctcccccgcggacctcgtccggctggcccagctggaagcccttcgatttgacccagaatttaaatttggcgttgtccgtggagctcgactcggagccattgaggagctggacgatccgttcgtattttttacgggtcaccgtcttggtcttgcctgagtccccgtaagtcctgaggcaccagtcctggaactggcggcacgaggcctcgtgccgagttacacacccagcctcgtacctagcgata

SEQ ID NO: 138460 - DNA, 598 bp, Homo Sapiens
  misc_feature (528)..(538): n is a, c, g, or t
ggttccaccctagattggtgtctttctttttcttcctttttttaaaaaaaatctatttcttaaataataataaatgcacatgatgtgttaaatatgtacatatatatttcaaaagaaaaaatggggcacaagattgtcttacaagtcgtgctggctaatttttagtttgtattcataagtggtttttaaaagccttttttaaagtgtaatttgcatgttctactttgattgtatgtaaacatattttagaacaaaaaatgtatttgtattttattgaatatagaggcaagaaaattgtacattgtttgaaatgttctttttgtaacagtttttattcataaagcatttttgtacatttaaaatgaacatggacttgctgttatttgaggcgtagatacatctagcatgcttactgtcatgctcctccatggtcttagatgttgggttttaaacatttttttctaaaagaaagctcagtcttttccgctaccagatcaggttagcacagtatagagcacttaactattnnnnnnnnnnngttaatcctattcatatgttattcattgtgtgaaataaaagcccttcaattcagtctaaa

SEQ ID NO: 138461 - DNA, 588 bp, Homo Sapiens
tttaagagatcaagactgtttaatagttacttttttgagggaaatccagtcacatttgcctgtaccattacatacaccattacttggacattcacactcaattgggaacataaattacaaaagagagaggaacttttaaaaccacatttaatttttaataccaaatctgttgcactattacagaagtgaccctttcatgcacagataaatttcgcatctaccagtatggaagaggaaaaaatgtagttttattgttctcccaaaatattggcaaatttaaagtaacttttaatctttgtgctctctgatgccaaggcaaacctgttttgtctttttatattttcaagagacaggtggatctgtgaaaaatgaatatagagacatgaaagtatttagggccatctttacctgggattactttaaattatgctttacctacatatatcaaacatgccaggttactaggcctactgtgccccataggcaaagctctgaagatttcatcgaaaaatctgctgtcaatacgtagaaaagttcactatttcagtttcacagcaaaaaaaggtggggggaaggggaaacccaata

SEQ ID NO: 138462 - DNA, 612 bp, Homo Sapiens
gacacgatttttttctaggaaacagctatgcccagaaaataaaaataaagcggactttatttagaagataaaggtggtggttatcggttttggttaatcgagttgggctcaagtgttttacaggtcttaaatgccatcacagactggcatgccaagggcattctgaatgccaattacagattgaagttgtttcaaaaaccaagatgctatcaaaagctgatgagtttggatttttcttaaagttggactaacacacttcttaaatatttgtaagagtaaatagattgcttggttctgaaagttaaaacactacactgagcaattccccttctccacaagtccctaaggcaatattacagttgcctctgacagcaagtccaacatttcaacaaagggggggtgaggagaactgggaaaaatgaaaagcaaaattaataaatgtaattgatacaggcagctgccacttgtggcaaaccaaagcctagtccgatgcccattatcttcacatttgcactgacatcttcccaagcagacggtaactacattcttgaaggaatgtgccaagactagggtggggaaggcccagacagtgagtgaacagaatgcatttcc

SEQ ID NO: 138463 - DNA, 887 bp, Homo Sapiens
  misc_feature (204)..(212): n is a, c, g, or t
  misc_feature (466)..(478): n is a, c, g, or t
aaccctgctgactattacagggcttgtttaatcacagtggcaagaattacatgtatcttacagtaaagaaacagaatacatggaatcgttagagaaccctgatgtgttgacctggataaagtacaaaggtggaagagggaatgagttatgctgttaaaatctcaggctattctgttaatgttcctgctactatgaacccaaacnnnnnnnnncccccttttgactccttgtgtcttcctctcctgtggcataaaagtagttctgtcgttaacttgtacaacattgccatctgctgttgagaattggtaggtactgcttctgagaacctggctgcagatccttagcataggcagcaaatgttgagaaagtctatctgtagtattacatatactaagttacagaggatgcattcaagtagagaaaataatatgtgggttaagatacatccttaaacttttttttattnnnnnnnnnnnnnaaccggaagatttggccgtgaaagcgccccaggttgtggactttgccaccagggccactttcttcagttgcgcggtggaaacctttaacctcccggggtttcccagccaatttcttcggtggcctcaaggcctcccgggagataccggagaataatacggggcaccaccaccatgaccgggccaaacacggggcgattcccagctaaaaaagcaagagttttcagccattaattgggcccagtgtgtgtgtctcaaaactttctgtggaggctcaaagttgaactgagccgtggctcaaggcctccccaaaatggcctggggataaacacggcgttggagacccacacaaagccagagggctccattttgtaaaaacttttaacactgtgcacaattctaatcaatggc

SEQ ID NO: 138464 - DNA, 496 bp, Homo Sapiens
  misc_feature (213)..(213): n is a, c, g, or t
gagagaggggtggcagaatctgtaatgcctcaaaagccatttaagtgttacgttgcaggattttcagtccttctcgttatgtaaaagtagataaatatagacgttattctcaacactaccctatagtatcacagtggtccaaatgccagagcttacagataatgtcatcacagtgcctagaaactcgaactgtaatatatcgtagcattttcnttggtgtttcttaaagtttctttccacaatacaaggtcctctctgcctcttgtttcttggagagttcaccccactgatgagtcttccttccctgttggactcagtcatttggggaacagtcttagaagcacatatcaacccaaggaagaaacttccctggatatctattggcccacttggcccaaggtctaataaacactaaagggggggaaattgaaaaggagctgccaactgggtcaacgtggaaggggcggttccaccctagaattggtgtctttctttt

SEQ ID NO: 138465 - DNA, 1099 bp, Homo Sapiens
  misc_feature (72)..(72): n is a, c, g, or t
  misc_feature (77)..(77): n is a, c, g, or t
  misc_feature (971)..(971): n is a, c, g, or t
ggcgggagggggggaacccaataggatatctaagtagatgctttccaatcccattcactgcattaattagcntaccncttatacagtacaacatatacattgcatgtttatttgtatgtaacacctataagcatatagcatctacattttaagtgtatttacaaattcaacaaaatatctacatataaaaagctttacttaaaattaaacttgatgcaagttatgagaaaccaatttattggcaaatgaaactgagcattccttcaaccataggttgttatagattttcatatttggaggtaacccatttgatagatattgtttatgaatacgatagaatatatatttactttttaaactgcagatgtaatcccttggaccgttggccttttaagcacttgcctgatttcttagattctgaaatgtatccataacaatttgcatacacgttgtttaatgctgcagagttttgaacacttacataggtaaagtcttggagaataatatattactgttggcatgctgttgtatgcttttagtgttggaataacttagttttaaaattaattttctagcatgttgacatctttcttactgcatgtaatagaaaccataaaggaccacaaatcatcatgtgcttcagttggcaacaagattttctttttatgcttatgaggaaatgctatttctaataaactgtcttatttttattttcatgtttccttcttttcccagcattgcagttttcatgaactctgctttttaaaagttacttttagacatgacagtaatctaggacccagaatggactggaccagctgatacagaatgcacgatgttgtggaatgcttaatatctgaaggcactgtatgtgtcttgccctgtgttctctgaaataatgtttgaaatttaatttggatgatttgtttttgattctttcagtatggcacaaatgccgaaatgcactgcantacacattgtttatgcctaaaaacaaccgaacatagaaatgatgtaaaaagtagaacctgtgctgctgtaatgcctggaagattaagaagcctacggagtaacaggagccaagagtaggtaatagttc

SEQ ID NO: 138466 - DNA, 730 bp, Homo Sapiens
  misc_feature (49)..(49): n is a, c, g, or t
  misc_feature (106)..(106): n is a, c, g, or t
  misc_feature (255)..(264): n is a, c, g, or t
  misc_feature (509)..(529): n is a, c, g, or t
  misc_feature (541)..(634): n is a, c, g, or t
  misc_feature (673)..(673): n is a, c, g, or t
  misc_feature (678)..(678): n is a, c, g, or t
aatttagtgtgactaaggcctttatttatgtttgtgaaactgttaaggnccctttctaaattccctcccattggtggagattaggaccggtgtccaaggggataangcttaacactggccctaaacttctattttcttaaggaagaagagtattaaatatatactgactcctagaaatctatttattaaaaaaagacatgaaaacttgctgtacataggctagctatttctaaatattttaaattagcttttctnnnnnnnnnntccagcctcataaagtagattagaaaactagattgctagtttattttgttatcagatatgtgaatctcttctccctttgaagaaactatacatttattgttacggtatgaagtcttctgtatagtttgtttttaaactaatatttgtttcagtattttgtctgaaaagaaaacaccactaattgtgtacatatgtattatataaacttaaccttttaatactgtttatttttagcccattgtttnnnnnnnnnnnnnnnnnnnnntttaactgcttnnnnnnnnnnnnnnnnnnnnnnnnnnnnnnnnnnnnnnnnnnnnnnnnnnnnnnnnnnnnnnnnnnnnnnnnnnnnnnnnnnnnnnnnnnnnnncacctctcaccgcgccttgttcacagaaaaataatatanacgcngttttttggggccccttcgcccccccaaaaaaatttttttaaactctccttt

SEQ ID NO: 138467 - DNA, 432 bp, Homo Sapiens
attatgcataaaattcatttttatatcacggttaaatttagtacaaactataaaaatgttaacactgaagttttcaacagaagtctattaagatgccttagaaaaattaaacaacagcaagtcatttactgctatgaggttaatacataaagaaacattcacacattttactgaaattttcagtaaataactttagccataacacttataattaaaagttcaaaagttgtgtgtggctctacagcaattataatttgcaatgaaaacactaagccaaatctttttgagctgatcagaacaatcttagctacaaaattggctgaaatttgcaaaccttaaaaagaacaccaattgtgaatgggaataggtatcataacttagcttaaagtgggaagatgggtaaaaacctcgatggcttaagtctgaattggc

SEQ ID NO: 138468 - DNA, 1106 bp, Homo Sapiens
  misc_feature (566)..(598): n is a, c, g, or t
  misc_feature (942)..(971): n is a, c, g, or t
tttaaccaataaaacgtaacactttattattatttttatcttagaaggaattcaccaaaggcttcatattatgctatggcatctttaattataaaaataagcaaataaaataacttgcatctgtcattaccatgatatgtttcataacctttatatgcacatggagcttaaaaatgtaatttaacaataaataatgacatataccagatatgctcactgtttattccagtactcagccaaaaacctaaatatcatttaaattataaatacataatgcaaatataatggcacaaaaatgtctaaagtgcaaccaaatcacaagagaagaatcatgcaaactggtctaggtcagcccccgaatcactctgcagcaaacacaagacgaagctttggaagtttaagggggaattggagggagtagggtgggggaaagagaagcaaaaaactagcaacattgtgagaactgcttctttctgtatgtgtagatatatgtattgtagatacatatatagatatcatcgtggggagaaaagggggggtaccacggtttgaagaggtcacagccnnnnnnnnnnnnnnnnnnnnnnnnnnnnnnnnnggaaatctactgaactgaagaaagagagaaatttgctaggaatactcatgaactacttgtcgcattggggtcctggcttagttgggtttgcaaaatggacacaacacacaaactttaatagcttttctgattcagagaagtcagccttgcctgggggtgggaagtgtgggagggaggggaagagtctaacttagaatatggtctacctgatttccaagaggctaaggcagtgtccataagtttggggacctggggatgggacagttctgagtataaaaatgcccttaacaatctgatgtcagcacgcttagaggctgtgtggggacaaaggcagcaatgtttgnnnnnnnnnnnnnnnnnnnnnnnnnnnnnnaattgctcttggtccttgagcagcacgttactggttttaaaggctttatggtaaagttgtattgcttttcatttttctggagatgtgccctctctcctcccaccaggatccctatcactcgatttggtcaatctt

SEQ ID NO: 138469 - DNA, 1010 bp, Homo Sapiens
  misc_feature (548)..(557): n is a, c, g, or t
  misc_feature (631)..(641): n is a, c, g, or t
aaaaatatcgaggaggggggtggttataataaggtgcgcgcgggtccgcacaaaaatggctataaagagaggggggggccaaataatgataaataaatgggccaagggcgcgaggaataatatggggaaaactgggaggcgggccgtggaactccccaggtggaaaaagccgccgggaaaggccgctaaggagctccgcgggtaaggggttattacgagaacgtttgggtgataccccgggggggtttgttaatgggggaaaaatccccaggccagtggttaagggcccagggttttcctagggaaaccagggttggacccatgttcggcttgcggggaaaggcccgccgcccccagaaggaaagggttttggaaggtttcttgagggggcgaagggggacgggcaggtagggggtggtaggaatggggtgaaggggccaggacaagaaaactagggcccatttttttaagggagctccaactagaattccaaataacggttaatggcaaggagcatcaggggacaagggggacagagacgagtcatnnnnnnnnnntgctttgtttttttagcacggtcattacgaaaccccagggtgcacatggcaacaaatccgcccactatgaccgnnnnnnnnnnngagaaagccaactctagtattggatataacctgaaatataaatataattgttcatccttcttttaaagaaatatttttacccatgccctcactcaatcacagccctgaaaaagtgtcagcattctcaaaatgatgcctaaaccctaacttctaactcctatggggtaggaggtggacgtcagaggaaaatgggatcagggatccttggcaactgaacaactaagaatactaaaaggaagagaaaaattcaaacatctctcacctgcctcataaggccatggtgaagcaatagattggaatgaagcacaatccctgtctccccggccgtaatggccgaattcccgggcatatgtccggtaccgtcgactg

SEQ ID NO: 138470 - DNA, 825 bp, Homo Sapiens
gtgcctatgttgaaaaatttcatcaccctttaaaactgaagcagagttatttctaaaaatggttttccaagcatacacgacattgtgtgccatttctaagtatttgtgtatccaggaagaactcttaattactttgaagtctccagtggcataaaaatcagagtcacacttaaaaggttcattagaaagagtcacataaatatttccgttgtctactgtcactgtgtgaatcctttgctttattcctttggagcaccacttgggttttgctgatggatctttagggtttatagactggtacagaccttctcctgttgccaaagtaattttgtatttatgccaggggcaaactatacacggtcgtccatcaaaatcctctatatctcccaaatgtaaaggtcctcctgagtggtaacagcgaatatccatagcatgatattctcccttgtggtagaaaatgaccacttctctatcatggacaacagctgtcattctttcagattttttaatgtcatcttctctgcccacacacacagaagaatattccctcttttcaggatcttgtgcagagccatcaagattcatgttggagaggaagtgtagataaggaagaaggtctaagacaattcctgaaacacttcaacatttagaggtcaggtggaagagaggttgtagagaggcaagatcagtagagtgtccaatctattgctaatcaaatgaaattcattcacagctttcttctctgtcttatattctccttgaattgcaaataggtggtaactgtccccgagtcctcgctccgcctccgcgtgacgctactgcccc

SEQ ID NO: 138471 - DNA, 108 bp, Homo Sapiens
ttttttaactataaaactaggcacatttttttaatgagctacaaactaaattacaaataacgttaatagcaagagcactcaaggacaagggtgacagagacaaatcat

SEQ ID NO: 138472 - DNA, 577 bp, Homo Sapiens
  misc_feature (148)..(226): n is a, c, g, or t
  misc_feature (509)..(509): n is a, c, g, or t
gggggggatttccaacccctagtccatggcccggatttctcttgggaacaagggtatggcccaaggttccctttccctattggggcccgcgccccacaaagagaaggtttaaaaaactttttcgagggccgaaggcggcccgacaaannnnnnnnnnnnnnnnnnnnnnnnnnnnnnnnnnnnnnnnnnnnnnnnnnnnnnnnnnnnnnnnnnnnnnnnnnnnnnngaggcttatgactggttcttttacttacaaatattgtttagacacattttcaaatgtcacaccaatcaataataataaggaatggattttatctatattgacagttctttcaaccttaagagtgaactgctacaggtaagattcaatcacatttttcaggagaaagctattgagaccaatatgctttggttatctaataagggtggaatgacttataatgctatttactccaggcaaagagaaaatacaacagacataggatcttgatttcaacgtagttctncctccatgtgcatttctctgtccgtttaggtcaatgccaactggtccaccagtgaacatgtccaccgg

SEQ ID NO: 138473 - DNA, 347 bp, Homo Sapiens
  misc_feature (242)..(280): n is a, c, g, or t
actttaagtaccatttatttatatttttacatacaatatgtgggcataacaaaaaattaaaggaagaatggtcatttttagaaaaaactttatttacaaaaccacaactcagtctgctttggtattgacaaaatccctacaactgagatattaaagagatacatttattttagagttacataaaaccagaatccaacactaccctactttcctattcctttgtggctctgaatgcagctttnnnnnnnnnnnnnnnnnnnnnnnnnnnnnnnnnnnnnnngctctttataatgtacaatggcttaagcaaatcgctttagttttttttctatttaagatttaggacc

SEQ ID NO: 138474 - DNA, 184 bp, Homo Sapiens
ggaaaaaactttatttacaaaaccacaactcagtctgctttggtattgacaaaatccctacaactgagatattaaagagatacatttattttagagttacataaaaccagaatccaacactaccctactttcctattcccttctgtcgtcttctcgcagccgtatagtagtagtaggcggacga

SEQ ID NO: 138475 - DNA, 759 bp, Homo Sapiens
tactcgagaaatggtgaaccatccaagagtcaattaaaaataccctagaataaaactaagttgtaatctagtagattacatctaaggtgagaaaaagtattaacttagactagattgtcttcatagtgtcttagaaacagaaagccaaatagcaagaaagggggtggggctttttcacaggaaggaggacaatgttctgtgatgtgagagaattatggtggtcactggaaaaaagatagtattcttattgttaaacagaacagtttggaagccaggatgaaatatctcctcagaaaatccaaattcctgtgttgattaatatcttattcatcacacaacaactgtttaccaactgggctgccaagatacacactttcatgtcattctgctgctcaaaacccaccaatgacttcctatcttactcaagtcttatgaggacctgtaagccccgcacgatctggtccctcactacctcttggacttcagtttctaagatgctctcaactgttcactcaactggagccgcactggccccctgttgtttcttacacaagccagctacagtctctcctgagaattttgtttgtactgtttaaaattctcttcttccagataatcctacagcttgttcctcatacctttgcgtctctgctgaaatgtcaccttgcattagcaaggtcttctcaaccatgccccctgtgcccttaagaccattctcccaagtcactctccatatgacccttagctttttctatgtat

SEQ ID NO: 138476 - DNA, 136 bp, Homo Sapiens
accagattaatgcaaagtagtacaagacattgaagcccaagctgcatgggctaaaatggtaaccggtgcacagtgaatctctttcacaccatttatttaattcagcatagaattaataagtattggccgggcgcgt

SEQ ID NO: 138477 - DNA, 508 bp, Homo Sapiens
  misc_feature (119)..(177): n is a, c, g, or t
aggggctgtaattaccaattaaaattaaggttcaggtgactcagcaaccaaacaaaagggatactaattttttatgaacaatatatttgtattttatggacataaaaggaaactttcannnnnnnnnnnnnnnnnnnnnnnnnnnnnnnnnnnnnnnnnnnnnnnnnnnnnnnnnnnggccatttctttaatatcataataaaattaacattccatccatgaaataaaccagaacttgagcttagagtctctctctactaaacacattacttttggaatgtttttgcatctggacaaaatggtatccaaattgatcagacatataaagtagacaagtgaaactaacatacgactgccagtttctaaggagtgttacggtcgccatcttcgtaaagccagacccaaactgcaaccataacaagctgtcgtcataaaggcaaaaattgaggctgctacgtttatgttatactggttatcactcaggagtggctgcccggttatggttgta

SEQ ID NO: 138478 - DNA, 532 bp, Homo Sapiens
tttttgatagcaaaagagttttaatcagtagagatcttaaactcaatacaaggcaagaggaaaggacataaaaatcaagcgtgggcttgctaaattcaagatttaaatatattgcctttctttcactacaatcacaactcagttaggtagatactttaattcacattttacagatgagaagattcagagtttaagcttcccaaggacagaaaggtaagtcagtgggaaattccatgtacattccattactaaatgccacataactgtttggataacataagaagagtgggtcattatatgataccaattagaagatattagggatggtggaggcagtaatttctggggataagaactataattttacagaataaccagacatcatctgatctggtgaaacctgtgcattcccacaattaggctttttcacactttctctctttaaatgtgcaacaccttccccatcccctttacttgtagcagttgattctgcttcttatatcccgagaaagcaactaccaccaaatctacc

SEQ ID NO: 138479 - DNA, 597 bp, Homo Sapiens
caggcatcaccaacatgctttcttctgacgttgcacagctgtcagatcctggtgtgtgtgtatcttcggatacccttgatggaaacagcagcagtgccggatcttcttgtaactcaccagcgaaagtcagcactaccaccgactctcctgtgtcacctgcccaagcggcttctccatttattccactagatgaactttcgtctaagtgattcactcatcctgagactttctttttgcagtggagagagagaataatctagttggggcaaacactgaactttgtcaattaatttgaggctatttcctatttgaccccttttcttttttgaaattccctgaaatgatgttattctagagaacttctatgtcaggttcctttggatacccttgaattcagtgtagtaatattttcagacgtttccccaataagtgtgttgaagcatacatctttacgctgctaatatgtctaaatacatatgttatcccttgatttttttaaataattgagagctctatttatttatgggattattaagttctgatgaaaatataaatgttgacttaatcagcatagtaaactgatgtttaaaattccat

SEQ ID NO: 138480 - DNA, 514 bp, Homo Sapiens
  misc_feature (433)..(433): n is a, c, g, or t
  misc_feature (457)..(457): n is a, c, g, or t
ttggtttctgaatggatgattttaatggtgatatgaactgattctaactgcattctgtcgcaccctcattcaaaagagtaaaacttacagtgaccatgtttatcatgaaatagtattgcatttattttaaactgatggtccccaacttacttaaaaatcgtagaggcttaacggtttttcagctttacaacagtgcacaagtgatatgcattcagtagaaattatactttgagtacccatacaatcattgtttttcactttcacaacagtattcagtaaataacatgagctattcaacacttcattataaaataggctttgtgttaaatggttttgcccaactgcaggctaaatgttctgagaacatttaaggtaggcttggctaagttatgatttcaggtaagagatattaaatgcattttcaatatgatanttttcaaattataatgggtttacngggacctacccacatcataagttgagggagcgtctgtatttaatatgagaaattaat

SEQ ID NO: 138481 - DNA, 1926 bp, Homo Sapiens
  misc_feature (127)..(139): n is a, c, g, or t
  misc_feature (149)..(233): n is a, c, g, or t
  misc_feature (608)..(617): n is a, c, g, or t
tttggggggggatcccaggcccttgttccaggcgccgggttttctttgggaagcaaggtttggcccagttcttcttcgctttctgggggcgcgccgcccaaagaaaggttttagaaaagtttttgannnnnnnnnnnnncgacaaaggnnnnnnnnnnnnnnnnnnnnnnnnnnnnnnnnnnnnnnnnnnnnnnnnnnnnnnnnnnnnnnnnnnnnnnnnnnnnnnnnnnnnncttgtgagtacaaacaatgtttatttgtttgtaaagtgccaggtttatatttaagtaaacattaaaatctgcgttgaagcagtgaggctgcatcttttaactggctgtgctggttaaaggactgtttaatcccgctgtgctaagctcactaaagggtcacccctcactttaaagccaagactgccattgtcactgctatggtaagtcacagccagccaggccttctggcaaaaggtgatactaccagcactataaacagacaggactggttgtgaggtagctacacagttttaaagatgctgttaatgaacattacggacaattcatggtgtggctagttggtaacacttcagctgatttttcttatgagatggnnnnnnnnnntcagccaagtaagggcacatcttcagttcatttagaagtcagcatccaaggtaaaagaattctctgttggacttgacatcactcccatcctctgatactcgcctactctcttctcaaagaagttagtctttccttccagtgaaatattctccataaagtcaaatgggttctctactctgaaaaccttgctaaaacccagttccagcataagtctgtctgccacaaactcaatgtattgcttcattagagtgcaattcatcccaatgagcttcacaggcaaggcctcagtgaggaactcctgttctatccgaacagcattgataattatttctcttactctctcctccgatggtttgtgtaccaggtgtttgaacatcaggcaagcaaaatcacagtgtaaaccctcatctctgctaataagttcattagaaaatgtgaggccaggcatcagtcctcgtttcttgagccagaatatcgacgcaaaagaaccggaaaagaaaatgccttccactgcagcaaaggctacaacacgttcaccataggtagcctctttgtccccaatccagcgcaaggcccagtctgccttcttcttgacacaaggcatcgtttcaatggcattgaagagaaattccctttctttgggatcttttatgtaagtgtcaataagaagactatacatttcagaatgtatgttttccatggcaatttggaagccatagaaacagcgggcttctgtaatctgaacttcttggctaaatcgctccaccaagttttcatttactatgccatcgcttgctgcaaagaaagccagaacatgggatataaaatatctctcctcgggtttcagggattcccagtgctgaatgtccttggagaggtccacctcctcggcggtccaaaaggaagcctctgccttcttatacatctgccagatatcatggtactcgatggggaagatgacaaagcggcgggggttttctctcagcagcggctcatcctccacgccgggggcagctgctttagttttcggctccgtgggctcctggaagatcctcctcgcggtcttgctggccaggacgcgggtcccgctcagggccggcggcgtgttctccttgtcgaccaagctgagccccttcagcggcgagagctgcagctgctgcgggtccgtgatgggcgcgagcgggacacggagggagagcatagtggcggcgcagcgaagcagagcgagcagccaggacaggacggctgggacaggcctcgtgccgaattcgccacccagcctcgctacctagaccgttatagtacttgc

SEQ ID NO: 138482 - DNA, 421 bp, Homo Sapiens
  misc_feature (281)..(281): n is a, c, g, or t
tttttacctttaaataaaaatactttattcattcctgataggttatcaaaatgtacactgttaaccaagtaaaaatggtatgctgaaatagttaactagggcatatttgaagaattttgtttacttttaaaagaggaaaaatcacttccaatcttcccttccacacattcctaacaagcctgcactatacctgcttaaaactgaaaatataaacaattacatgggccccacttcattacagaatgcattttcctgtactcttaaaggaagctattacattngaagttaccttcctttgccaaaaactttcagacaagtttactgctcgtttatattttgtgtaactttgtaaattatacaagaaatatagcacacaacttgaattaatctaaaaacacatacacataaacacaggataaag

SEQ ID NO: 138483 - DNA, 1182 bp, Homo Sapiens
acatacactttactttcagatagtttttacgggaagaaagctatgttttaaccacttgtaaaaggttaactactgtaaattcagcactttctaataacccttgggtcaaaaaattttaatcacagaattagaagtgttttaagctatattatgttttctgaaacagttgaaagactcctggatcttttgccatttttacaggctgctataaatgcgcttgatggcctcggcttcttccttgtcaaggatgcctttctccacataagcatcagcttgtttattgatgaagtctctcatctttgaaaggtcataatcttctttatttccctttttgtcatgtttcttcaaccattcaatattttttctgatggcttccaaataggcttctgtttttcctttgggttcatctgtctttcctcctgggttggagttatcatcttttgtggaatccttcaagcttccatattccttttccatcttagctgcttcttccttggtactgtctgtttcttcatgactcttctctgatggtgctgggaaaagcttgcttatattgtcagtagcatttttttctagcttgtttttggtctgaagagcaatcatttcatccaagttttcaaggtaggaaacaccttcttctggagatattgttccatatttcaccatcatcttcacaaagtcaatcagtgttttcatgatagtaatcagtgtttctttctcttttgcttctttttctgaatcaatacttttcagtagcgcatagaaatttgggaaatattggagttcctcaaagttgtcttcactgtaggttttagttgctcctttccaagccatttgtcaaggttaatgtgttagatactgtttcatcgttttctcccttagcaagaccatcttgaattgctgccattggagtcactttctctggtatttttccagcctgattctcagtccagcttgtgggcttattgggatcctcctcataattgttggcttcctttgagattaatttttgtaaaacctctgctacttcatcttccagtgtatgtgcttggctttctgtgataaggccgagattaagtagtttagaaacaatcttgtcaaacacggctctgtcattttcttcataaatcctggcagcgattttatggacaatgtcttcagcggttaaaggagtcccgtcta

SEQ ID NO: 138484 - DNA, 896 bp, Homo Sapiens
  misc_feature (789)..(823): n is a, c, g, or t
agacattttttggaccattaataaaatacctaaaaagttcagaactgcttgaaaacaaaagtttatataaataaagcccaagagggctgaaaaactatcaaatgtattaaaatcatctaaagccaaatataatataactgaatatctaatttggaaacaggtttcaagtgcatttctctttgtacaactggactatcacatgtaaaaaactggcaattaattaaaatgcaattaaatacaggatttgcaagccttctggccattatgtaaacatttaaaaagttaacctgaattgccaattgaaaaataagagcttacatacgtatcttaagaaagcacaaatggtgaaagatgcactataaaattgtgtgaggggacatatgcataccaacaaagatctttttaggcacttgcattcagaaacattccttttataaataagcacttataacagttccactccaaaaaataaacctgattttcccaaattgcacctattagttgagactatatcatatattagggatgcattcaaatggaccatttggtggggaaagtcaactgaactttaaaaaatacgaatccacctatcttattcacaactttaaaaatacagaatttaaagataattccagtgaggcacaaatgtgaccctatcaaaacattctaccattcagtattaccaacagaggataaatacaacaacaaaggcaaacccatgatttggcagtcctataccccggccgtaatggccgaattcccgggcatatgtccggtaccgtcgactgnnnnnnnnnnnnnnnnnnnnnnnnnnnnnnnnnnncggccgcttcctcgctcacaacttcgctgcgctcgtcgttcggctctgaaggaggccctatatgagtctataa

SEQ ID NO: 138485 - DNA, 449 bp, Homo Sapiens
cactgttctcaaattccaaaaaatgcctgtttcagaagtttttgaattcagtgcatttcctcttgatttgtctgggttaaaaccattccttttgtatgaaatgttttgacttaggaatcattttatgtacttgttctacctggattgtcaacaactgaaagtacatatttcatccaaatcaagctaaaatgtatttaagttgattctgagagtacaggtcagtaagcctcattatttggaatttgagagaaggtataggtgatcggatctgtttcatttataaaaggtccagtttttaggactagtacattcctgttattttctgggttttatcattttgcctaaaataggatataaaagggacaaaaaataagtagactgtttttatgtgtgaattatatttctactaaatgtttttgtatgactgtgttatacttgataatatatat

SEQ ID NO: 138486 - DNA, 878 bp, Homo Sapiens
tgggtttaaattaaaaggtccaggtgtttcccttccatgccaaaaacgttttaaagtgtaatggggtttaacgtgaggctcccaaaaaagctgaaatgaaatagattatccgtaccctactcagcatttgctgccctcgactgctaaatccctttgggaaccttaagacttctggaacgttcagagatgtattcatcaataaaaatattacatacaaaaagcatttaaaaaggaagacaaaaagccaagcaggaattttcctattgtaaataacagtcttagaaatggaagaaaatcttttcaggaacttccttgagaattggttaggccagtccgaagacgaagatgagacatggagttcatatgtttatttgatggcttcaatggagtgttggaagtgagagcctggggaaagcgatggtggtatctatctagtcgtaaatattttactgtaaccaatttcccatcaaaccaagagccatgcaatgctttaaaagcctttccagcatattctggagacagacatttaacatatacacaaccctcacgtgaatttttgtctactgcaatgtgaacaatgccatcattatcactgcatttttctaaaattgcttcttgaattgccaaatgccactgatcccctatttccataacgggatcaaacatattccgaatctttagacacggtgtcaaactatttggtggtgaatttcttctatctaaatgaaatgcttgaccttgccatactttagaaggtataactaatattttgtcacaggatgcagaaggctggatccaccgccaaaccagaaaatctgcaccacctattcttcgtgtttccgtgcgaactctagactcattagcagcaaggaagtcaa

SEQ ID NO: 138487 - DNA, 1267 bp, Homo Sapiens
  misc_feature (68)..(68): n is a, c, g, or t
  misc_feature (401)..(401): n is a, c, g, or t
tggatttttgtggaaagtcaggaacatttctgctgtacatgatttagaagttctccaaatttttcaangaggtcctccacccattgtgacattgtgtcatacaaagttgaacaatttcctcctgtcctaaatcttcattgttttttctgcaccgaagaaatctcatccttacatatcagataaacatggtacttataatgatggagtgaatgataccaagaatacaactgtattttctctggatcgacagcaaactcttgtgcagatttggtggttgttttagaagtccttagagttttcttattataggctttgccattcattttgattttagaaatagcagttcctccactctttgctttagaatctcggagtaattattgttagttcaggaaaacttntccaaagcattcttgaatgattgatccaaatgaagattcaaaagaagtctctttcggttatcatttagcatgccatctattttgtttcatatgaggtaaaagtagctcatcattgctcttctctaaggcttgcattgtgtcagggtccaaggcaatgctaacaagcaattccatgtagctcttaaaggtttccttcattgctcttgtgttcaaaaagcgagtgacaaagggagcgggaggttcaaattcctcatcgtcactactactagtatggatctcaggagatgagtcagattgggatgatgaaaattcttctttccattttttccgtttctttggtggtggctcagcctttacttttggctgtttaactttgggtttcacggaaggggcttttgtagttgtagtttttgatgctagaggatcagaagttttactgctactacttggcttagcttgaacagttctgatagtttgtgaaggtttatttcttggctttttagaacacactctgacatattccttcttgtttgcattttcaatgaacttcacatatattcttttgtatttactctttgcatctccaaaatatccaagataactatttgtagcagcaaattctctttgaccatctcgaatttcaggaacaaatttctgtaataaagctttttgtactttccaaatagctggaggttcttttcctgtttttaaagcctccttaaaagtctctatgtcttctatctttaccacaaattcatcacgctctctgtattggccttctcctccgctttctgtgtcctcctcatctgtaaaaccttctatggcaacagtgtcctgtccttttgcaaactggtctgaaggaagac

SEQ ID NO: 138488 - DNA, 574 bp, Homo Sapiens
  misc_feature (184)..(184): n is a, c, g, or t
  misc_feature (377)..(401): n is a, c, g, or t
agaaacagaaaaaaatcaaagactaatcctacaaattctcctttaatcttagagcttccagacctagtttctctttcatctaggacttcgaagttatctagttattttatgggtagtgaaacccacaggacgaagagagggtggtgggggggagattaaattaatgagcaggtaagcaggtttnattatttcgtctgatccttccttcctgctaatttctctgagccaatttgggaggcagagcctaacatgttaactcagagacagagtattgtatccatgttctttctgaagccatttatctgaaggatattaaagatccaatttacatagacattatgggcattgtgaggagggtgtgtgcatgtgcacaaatnnnnnnnnnnnnnnnnnnnnnnnnncgctagggtatccatccagttgggcctgtgtttgtgtacatgctcaacctccaatgagtgccatccctcatgaggctctcaaagaagtttgcaatcactcagcaagttagttcaagaagtcattgggccttgacagaaatcaggctccaggcaacggcggaaatgtttattaa

SEQ ID NO: 138489 - DNA, 1516 bp, Homo Sapiens
  misc_feature (1199)..(1207): n is a, c, g, or t
tggaccggtccggaattcccgggatgcggcagcaggtagcaaagtgacgccgagggcctgagtgctccagtagccaccgcatctggagaaccagcggttaccatggaggggatcagtatatacacttcagataactacaccgaggaaatgggctcaggggactatgactccatgaaggaaccctgtttccgtgaagaaaatgctaatttcaataaaatcttcctgcccaccatctactccatcatcttcttaactggcattgtgggcaatggattggtcatcctggtcatgggttaccagaagaaactgagaagcatgacggacaagtacaggctgcacctgtcagtggccgacctcctctttgtcatcacgcttcccttctgggcagttgatgccgtggcaaactggtactttgggaacttcctatgcaaggcagtccatgtcatctacacagtcaacctctacagcagtgtcctcatcctggccttcatcagtctggaccgctacctggccatcgtccacgccaccaacagtcagaggccaaggaagctgttggctgaaaaggtggtctatgttggcgtctggatccctgccctcctgctgactattcccgacttcatctttgccaacgtcagtgaggcagatgacagatatatctgtgaccgcttctaccccaatgacttgtgggtggttgtgttccagtttcagcacatcatggttggccttatcctgcctggtattgtcatcctgtcctgctattgcattatcatctccaagctgtcacactccaagggccaccagaagcgcaaggccctcaagaccacagtcatcctcatcctggctttcttcgcctgttggctgccttactacattgggatcagcatcgactccttcatcctcctggaaatcatcaagcaagggtgtgagtttgagaacactgtgcacaagtggatttccatcaccgaggccctagctttcttccactgttgtctgaaccccatcctctatgctttccttggagccaaatttaaaacctctgcccagcacgcactcacctctgtgagcagagggtccagcctcaagatcctctccaaaggaaagcgaggtggacattcatctgtatccactgagtctgagtcttcaagtttcactccagctaacacagatgtaaaagactttttatatacgataaaataacnnnnnnnnnacgttacacattttcagatatacagagactgaccaatattgttacagattttcatgcttggttggctttttgtcttagctgtatctaaaatttcggtgaacgttaattggacttatttatataaattttctgtttcattatagcatgtgtgtctacggcagggaacttgttgtcaaggttcttagtttgctcgatgtctcgtgggtaagggaatgattgaaaagggacttgaactttctagacgcgtgtactgcaattcgttacactttaaacgcttccccacatggaattgcataggatatttccatc

SEQ ID NO: 138490 - DNA, 395 bp, Homo Sapiens
  misc_feature (108)..(108): n is a, c, g, or t
  misc_feature (174)..(174): n is a, c, g, or t
ctgaccttttttcatcaccagcgcatgaccgtggagaaaactgtgtggcaaactcgctgcataagcgtattcaccggaacaatcaagtacgccacgctgcatctgtcnggtagctggtaaagggtggaaaggcgcgaggagataatgtcctgatgaggcgaaaaactgtcgtangggaagatgtttcccagtccgccagattcatcaccatttgatcggtaaactggctgatttcatcatgcaaacgcagagcattttgcatatctggtgcaatgagtaccaccggaccggcgtgacgttcggcaatttccgctaccagcgttgcatcagtgcgccggttaactcgcccagcagacgctgctcacccgctttgacgggcagcgtataacgatatt

SEQ ID NO: 138491 - DNA, 1079 bp, Homo Sapiens
ttccctccttcttttccttcccccctcccgcggccacaatttggcaaaaacaggcttgtatattcacaagccagtaactataacggtcctaaggcagcgaggcctgggtggcgaattcggcacgaggttttcagttgccatgccacagccaaggggcctttattggatggtgagggcacataggagcaggcaggtggctgctagatggtgttgcacaccttctcagggtgcagtggtgcccggatgtccagtctgcgagtcttgctgtccttgtcgatgatctccagacgcagcttggggaggcgcttctcagcctggggtgagggcagttctgggcttttgagtagctgcttgtctgagtcctccaccgtgatgcgcaaagtacagccccctggcagcaggtcctgctcataggctgctgccagctggttcaccacacggcgttctacctcatgtttgatggagcgggcgccatagtgcacattgtagccgtcgaccagcacatctgccacctcgcggtcccagagcagcgtgatgttgtgcctttgcttggctctcttggcccagaagtttagttccttgttgacgagttggatgagctccgagtggcagaaggggaggaagtagacgatctcattgatccgtccgagaaactcatccctccggaagtgagctttcaaggatagggcgaatcaacattctccttgaagttctttgagatggtgatcttgtcacttatctggacatcccccaggtttctggcatatggttacggctcatctccaaaagcttcctgcctcagcgtgcagcgcgtgctgtgcgatctcggtcgctggccacattgggaggtcatgatgaaggatggcgtccttcctatcactggtcttcccttttccatctgtcatgctggccctcgtcgacagctgcagctgatgggttagccatctggatgggcctttctacttctccagaggagccccagcttgggggcctgcttcccttctggtcagctggcccctccttcgtggccagggtctggtggggtgcccagtcatctgggcacctcgtttctcctggga

SEQ ID NO: 138492 - DNA, 1091 bp, Homo Sapiens
ggctggtaccggtccggaattcccgggatatcgtcgacccacgcgtccgttgaaagtctttaactaaattaagattgcagaatgatagtgattattcaattagattttaagtaaggattgtgatattagaggctggaaatccgttattttttaaaaaatcagataggcataaatagttaaatcactttcattctccccaaacctgtagttacagaaaaagttttatgctagaggtgggatgccaagttttcactatccatgaagcagcgctgcatgtcactaggtaacacagatccatccagatggtgtttacatttgatttatttgggatcttattgacatcaggtatacttggaagacatttcttttattcttcagcgtatgaatttaaagctattttttgtaaatatttctaatcagcgataatttctacctatgttctcaaccaacttagccagtttgtttttcagagcctgtagtcttattggaaatctattttatcagtgtgctttattgagtgtggattttggctactttcaaaacgttaacccccaaataccgcaaagtgcacctatatctcccattaacttatatcccaagtcccttttttcatgtacccttaccacccccagaatatatcactagacttttagaaaaatgctgaaaataactttgctctccaaattggtattgttattactatggaataaaatcttcacatcggtacccttcactccttagcccaacattacttaccaaccgccctattctcttctttgtgcgccatgggcgaacatgggctctccaaaccccattatttcactaccgccttccgaagagcgaaaatatggctctttccaacatcaactggtggcaactggaacggagagtgtaaggcctttaagttatgatcccagaattgacacgtaaacttccaaaaccccttcaatgttacctcttcccgcaacgcatacaatcgcttcacctttcctcccctcctcgacgagaaacgactatattcgtccgacttgatcccatgactttcgttacccgaaaatcactggccctcgtcggagttccacccatctaag

SEQ ID NO: 138493 - DNA, 397 bp, Homo Sapiens
gaccatttttttccaacagcatgtgctcacttcatgtttctgtgtcacatttcggtaattctcacaatattttgaacactttccatgacttcaacacatcaaccttccgtctcaaaagaaaagcatcccatgcacaaacacaccatgtccaaggttgttctgggcttgttcccacgttattttaggagcctagaatatctgcttttcaccagtcctaatctgacatctccaaagtccagtctcctacctttctagatttccctcaaagttgcagtcccttgtttattattttgtgaggggaagatgaaagggttcatgatctttagtacaatggcttcctgacccacagaaaaggttcaatgttttcttgcactttattctacctgagctaaactgg

SEQ ID NO: 138494 - DNA, 382 bp, Homo Sapiens
  misc_feature (223)..(223): n is a, c, g, or t
  misc_feature (277)..(277): n is a, c, g, or t
ctttcgcaattcttgcaatatttcaaacttcttccttattatatctgttgtgaagctggttctcccagacgttccctgcaggctgtttatgcagcgcccatccgagatgaacccacaggacactcaggatcccagactgcaggagtcgtctgggatcacaggcggggcagagcaatttgtcaatgtttatgaggagtcctccttggcagcccagtctttatcnctcactcacgtggaaatgagattcgacctctcctaatcacctggtgcccgaggnagcaggtaggcgcctgtcccaagcctgagtttcctgggaaatctacatttcagcacagatggttcccagcacgcttagtgctctggctgtccttaggtcactgaa

SEQ ID NO: 138495 - DNA, 793 bp, Homo Sapiens
tttctttgtcaatgttagaaacatttacttctgacgataatccatatagctttctctgatgttacacagcgattacatctccttgtgtctaaattaaagtcaaagtatgaattttaagatgatttttaattatttaacaagtagaaatacgatcagtgacaattatcaattaaaacattaaacaacccagttaccttttcttaacagtcatgatgaaatatccctttcctgtcttatcagaagccttaattattctctaccacacacaccacaaaagcttcttaatagagcatcagtgtccatcacacctttgtgtagaatctctggcaacaaggtgctgtctcctcttgccctgcccccacatctgcttaactactcttctttctggaatgcctcttttgctcccattttgtgagctcctgcagatgtgtttaaggtccagctcagtgactacctcctagagccttgcttgaccacttaaacatacaaactaaaagcacaatgtggtcatttcggaaagatgattgataaattctcaagccacaatgtctagtttttaaaaaatgcaagcagggaggaacagaagtgacatatcaagaaattaaaaacacaaattatagattgaaaagactatagtaataaaaaaattcaatttcacactaaaatatttagtgttacagagaaggaacaaattctagcctttatattttgtcttaaatataaagaaaagctttatatttatagaaatgtttttaagtttggtaaatattactactaaaatttttagagataa

SEQ ID NO: 138496 - DNA, 610 bp, Homo Sapiens
taaaaatggaagtcctaaaaattagtttatccagagtttatacagtcaaatattcagtaggcatagactggaatagataaattcatggaaatcatatcctttcagtacaccgtataacttcaatattacacaagtaacattgaggagaatgccatcagctttgttctcccttaaattctttggttttctttttacattttgggaacaactgcatttaaaatgttattagtcagtatatagtaaggattaggtgtttgctttctgaaggaatggtccagtgaggtgattgggagaggttattttctacctaacttgtatatgccctatacctcttgggcatactttgtctatagaaaaatattttgacctttaggtacattttgggccagtagtcaaataatcctagggccgatataaaaatcttagaataatttaaggtttgccttttatacctgttttgaaagcctttacatttttgtcaggtaatttttcccaagccgtggatataatctattcaaacatgtttatgctatccattctgtttttaaattgaaaaaaatgttaaaagtgtttatgaagaaaagtttaaataaaatatttttaatcttta

SEQ ID NO: 138497 - DNA, 1041 bp, Homo Sapiens
  misc_feature (982)..(982): n is a, c, g, or t
ttttgcaaaacacataaaatactactttattactatcataaatattttataaattcctatttaaaacatgataaaaatcaacaaaaatacaaggtactatattcttagcacttgtagtatatatctcaatgttctaagtatatgtaccttagaacattgtttaaatgtttatggaatccctgaagcatttcaggaaaatagcttgaaatcacggctctagacctattcatcttttaacgtaggtccaacatgcggacaatatttaggatttaattatcctgagagctttcaattcaacattaatcatgcaaaaaaatcacatgcacaaagaatattgattactaaaattggcaatatatacatagtcatggttaattaagcaccacatttttattatacatttttcttatgttccctaagaggatattatctttgggggaaaattttagagaaaatttagatctactttcccatcataaagatttttaataattcactatttaaatggtcttttgtttcatgaagttttacaacaatactaaaaagttctggaaatatcactgttttggtttttggttactatacagttttccatctctatgatctcgtgatgtttggtatctagtctctctttcctaatacgaatagagtactattaggactccaattgtcaataccagtcctcaggacctttcctaactttctacctagcacctcaatactctctaggaaactgcaatctgacaaagggtttagaacatgtatgcaatcctcatcttttttcctcctctctgtcattcattcgttcattaaaatttagttgagtcaaatacttgcccagacaggcaaaagatatgttaggaacaaagcttttctatcttatatttcttatcttaatcttctgcctcttaaatgaaggtcttaacttccttattaaaatataaaatccaacttgaggtttatataagatacatatcttganatggtataaaaagtaataaaaatttccaggtacatacatactaaaacaaacctggaaag

SEQ ID NO: 138498 - DNA, 582 bp, Homo Sapiens
  misc_feature (21)..(21): n is a, c, g, or t
tatagagaaacaaggagatanaattacataccatctcccagcaaatggtttaagcatcactgcaccaaacaatttagtgagaaaattttacgccaacagcttaactgagtacaaaaccaaaacagaccaatgagctgtttcgaaaattgccgtttctactcaccattgacgttggcgcaatcctttctcaagaactccaaggcatgtgggtggtcgtgctccacggactgagacacgtcaatgatatacacgcctccaccgtggtacagcatgttaaattcactgagatctgcatggacaagtctggcatcctgatacattcttctcatgtactgaatgacctgcaggtacaactcccgagccttggattctgataactggacatttttcaagagtggtgcaggcatgtcatctttaccgatgaaactcatgacaagaacatgacttcttagcattattggttctggacatggtatctctgctgtgtttagcctgattaagttcctcatttctttttctgcccaagttttcaccattttcctagggtttcctttacaatagccatgacgaaatctgaattct

SEQ ID NO: 138499 - DNA, 611 bp, Homo Sapiens
ttctcaggagatacactctccttttttttctgtgggagtagtaacggttttctcaggtgagaattcatgtctcagcattactgtccttctctgtatttctgggctgggcagcttcatggctgggctctgggctgggcctgtctgtctcttccacaggctctttgggtgccactttttggtcttcagcggtttggctatttaaatgaacagctgaggaggaatttttggagtccttggcttttttgtgcatagaagtttgactgttatgactggaggcgagaggggaagacattttctgggctttgcttccctccgactgttcttttcgaggcggtccccagataaagttctctgaaggcgtgtagtgtttctgggcgaaccgcaggagctttctcctttctcttctggtctctaattgtataaacaaaatagtctagagcactctgcttaatattgggaatagtattctccacaagagcttcatgaagaataaattttacaagaggcgatttaaaactttcatatccaagctcaccaaggtttttaagaatacgagtgattcttaaatagttgtgctgggactcattcagatgctgaaatctttcctgcca

SEQ ID NO: 138500 - DNA, 1045 bp, Homo Sapiens
aatgatatttttcacattttcaagatattttgtaagttcagtagggtgatgattttccaaacccattaattatatagtttattgatctgcttggactttttacaataattaaataattatagatttaagtacataattttaataacatttaaaatgtaagcctcttttcattttacattagtcataaaagcatttgaatctttgtaaataatagtaaattattaacaaatatggagaaatcaattcagcaatctgtgtgaacacaagaggttttccttttacattttaaaaaatgccgaaaatgagatatcaaaattaggaaatgacatcttcttttcattaggcatgtaattattttacactatgtgttgacttccctagatcacaacagcttaaaagagggttaagccccaaaacacaaaacaaccaaaagattgtaatgcccgtactaatactttctaaactggctttgaaatagtcaccacttcatcacattccattttgttttattgtcttttcatgaaaataaaagtcttcccctaactggtaacatccacattataaatataaccttcctactccagagctataatttcagttttgactgccactcctgctattcaactgtcatcttctttatatgatgaagaagagcatctttttccaagtgagcctctgcaagagccattttagctttagccagttcctgtttaagagattcattctcttccatgagctgttccctagtgaagtcaaaggagaactcaggaaagttagctgactgagaaggccaaggaacccctgggcttgtctgagtggcttgcgtgacactgcgttgtttcttcagatcatcctttccactggtcagcagcactgaatcgcttttgacattttctttccaaatcatttccagtgttaagcatgtgagaatctctgatatgaaaaagagccatcgtcacttctctctaccacaagatgatccaatatgtacagttccaggagctggttcaagggattctgtcctacttcggggactatcattctt

SEQ ID NO: 138501 - DNA, 494 bp, Homo Sapiens
  misc_feature (409)..(409): n is a, c, g, or t
  misc_feature (433)..(433): n is a, c, g, or t
  misc_feature (437)..(437): n is a, c, g, or t
  misc_feature (464)..(464): n is a, c, g, or t
ataagcttagagtgtatttttcccttgcttttgggggttcagaggagtatgtacaattcttctgggaagccagccttctgaactttttggtactaaatccttattggaaccaagacaaaggaagcaaaattggtctctttagagacaatttgccgtaaattttaaaatcttcctacacacatctagacgttcaagtttgcaaatcagtttttagcaagaaaacatttttgctatacaaacattttgctaagtctgcccaaagcccccccaatgcattccttcaacaaaatacaatctctgtactttaaagttattttagtcatgaaattttatatgcagagagaaaaggttaccgtgacagaaaacaaatctaagggaaaggaatattatgggattaagctgagcaagnaattctggtggaaagtcaaacctntcantgctccacaccagggcttgtggtcctnccagacatgcataggattggccacaggttt

SEQ ID NO: 138502 - DNA, 438 bp, Homo Sapiens
  misc_feature (418)..(418): n is a, c, g, or t
  misc_feature (420)..(420): n is a, c, g, or t
cactagcggacacggtttattggtttctctcagcagtgaagtctcctcctcttgggtggtttgcactgtgactgcagctgcgtacctttggtggtatcagatatgctatttaacaaggcacacatcatatctccctctaagtggtgagggtttagtatatgagctggcctctgagtcttcttaaattgattctctagctccagaaaaccttgatctcctgagaggatggtgaaaggaatttgcttgggtagttgttcatctagacggccacgcatgcatacatatggcaaaatcagcagcatcttttcttttactacagcgaggatgaaggaagaagcatccaatcctgttcaggtagttataaatcttacagttgagcggaggcttccaattggtgtttcctccttgaaagccccananaaatgttccttggtttag

SEQ ID NO: 138503 - DNA, 716 bp, Homo Sapiens
  misc_feature (169)..(190): n is a, c, g, or t
  misc_feature (230)..(242): n is a, c, g, or t
cttgcaggattaggctttaatgaatttgaatacaaggcacaggtttccaggtgtatgtaaatacatctccattttacgttctttaatcgcttaatccttttggaccgggataagagaatatttgaaatttcttattaaagcaataacttccttaatagggctttagtcnnnnnnnnnnnnnnnnnnnnnnaagagctgatcatctgaattcctagtacttgcaagtaaannnnnnnnnnnnnccttttctgtccacctaccattaggtggttcctagatcctggcaaattgtctatggttaaatgatgcttttaatttctgtgtcaacacagaccctcttcgttggtgtctccaaattagtattgtcttcctctagtgtgtcattacagtcccttttggcttttgtttcttcctcatggaataaatgtgggtgctcaattcgtcccctacgtacaaaatgctggatccgggattccagtccttggcatttaggacggtccatgaggggcttatatgtgcgcatcttcactccttctacaaaggcactggtctgctttatgacagagggcttaacatttccccattctgtcattccatccatctttggtcctattccacagggtactggaacagtgtccagtccttgtaagatactatacaacatgtgagttttgacagcatgattagcccacagttgttgtaggtgggtaatattg

SEQ ID NO: 138504 - DNA, 580 bp, Homo Sapiens
aagtttgtcttacctttactcatacagaatttcttttttattgcattttaggacagtgaaaaaaagggatttataaataaaatctatgccatccaggaggtatgtgtcagtgtccagaacatcctagatgaagtggcttcctttggcgaaaggataaagaagtgagtgacggtgacctgtgagccccattcttctgtgggataaggtgtccatttgtttcttggagggtgaaatgccacattctttttggcaggggacactccttctgggtgctctattgctcagtttcatcattatttactttatttctgccagtctttggctttatgaaagttctgtcaatttccttccagagctgtcagggaagatcctcctccaagttagttcagctggagtttgtgacagggagtatgacttcactgaagtccccccctgaatcataaagtgtttaccacacgatggcacgtagaacatttataacataacttctcacagttgttttcccaaggcatgtctctcatgagcacaagcaaaggagtttgtgcatgtcttggacatatgctgagaagagctgaacata

SEQ ID NO: 138505 - DNA, 2500 bp, Homo Sapiens
caaaagagaaatgatttgtcagggagccattcttcaacactgacccatttatttgcatgctttcaatcagattcttgactttcacacgtggggaaccttcagctcgtgcaaccacactgccaatcacccaggcttcttccttgtgctgctggatatccctcagaatctgctctgtctgctcctttgataccacaaggacagcgccaaccccacagttaaatgttctggccatctcttcctcagggaggtgtccttcctgctgcaaccatgagaagaccctggggatcctccaggtctgggcatctaaatctaccccaagtttctcagggaggactctggggatgttctctagtaatcctccaccagtaatatgggcaaaggctttgacatgtcctgaacgtaggacaggtaacagtgaatggctgtagattctggtaggcgtgagaagtaagtcccctaaagtctggtcaccacacccatcaggtgctggagaggagtactggagggaagattttgccacgattttcctcacaagggtaaatccattgctgtgaagaccagatgaagctattccaacaacaacatcaccctcagtgattctttccaggtgagggagtttctgatctcgctccatggcaccaacggcaaacccagctaggtcatactctccagggggatacatgtcaggcatttctgctgtttcacctccaaggagagcacatccagcttttccacaagctttagcaattccagcaacaacagcttcagttacactgaggtcaagttttccacaggaaaagtaatcaaggaagaagaggggctctgctccttgtgccagaatatcattaacacacattgctaccaaatcttgaccaatggtatcatgtttattgcatagctgggctatctttagtttagttccaacgccatctgttccagaggccagaaggggatctttgaaaccagctgcttttaaatctaaaagaccagctaaacctccaagatcaactttacagcctgatctggaagtggcttttgctaaaggctgaattttcttgaccagcatatttccagctgcgatatctactccagattccttgtaagtcaaactcctgggctgctggaggaaagctatggcacgaaagccgacgtctttcctataaattgctccctcaaactttatagcagttagtcctttctttggcttcctcaaggggctgatatgagattttcccggatggctgtgactgcaagaactctacccccatgagttactactttgccatttttgagggcagtgcctgcatggaacacctccagtcctagagcttgagcctcaggaaaccctgttatctctacacccttggtgtagtctccaggataacctttacttgccatgacaacagttagggcggtgtggttttctagccaaacaggcagagatgtgcagagcagtccatctaaggtggactgaatcacttcataaagatcacttttaagaagtgggaggattacttggcactctggatcaccaaaacggcaattaaactctagaacttttgggccattcttggtcagcattattccagcatagagaatacctgtatatggagtaccctcttgctgcatgccatccactgtcctctgaagaacagtatctttaatttttagtaatagatcattagaaacctgaggggctggacaataggctcccattccccctgtgttagggccaccatctccctccagtaatcgcttatggtcctgtgctgggggcatgggggccacagtcttgccatcagtgaaacacagacacgacacctcttctccgtcaagaagttcttcaatgacaattgtttctccagctgccccaaaggctttctcctgcatgatctcttgtacagctttgcaggcctcttctttgctctttgcaacaatcaccccttttccagctgcaagaccactggccttcacaaccaaagcagggaagtctgcactcaaaatgaagctgcaggcttcttcaggtttggtgaaagccttccattgtgcggttgggattccatgtctgtccataaactctttggcaaaccttttgctggactctaactgagccgcttctgctgttgggccaaagcattgcactcctgcagacctcaggttcccaacaatcccagcagccagaggtgcttctggtccaacaactacaaattcaattttcttctctttgcagaattgagcaagggcagtgtggtcactgattgagatggcggtatttgaaatcttttcagagcaggcagtgcctgcgtttcctggggcaaccaacacttgtttgacatgatgagactgtgcaagtttccaggccagcgtatgttcccttcctccactgccaattataagtactcgggctgccattgttctgtctgtaaagcagaaattccaaaggaaaatgaaaccgacaccgggtggccacctggttcccgcttgcccgctcgccggaccc

SEQ ID NO: 138506 - DNA, 247 bp, Homo Sapiens
ggcaagactgtggcccccatgcccccagcacaggaccataagcgattactggagggagatggtggccctaacacagggggaatgggagcctattgtccagcccctcaggtacttcccgaagactctgctgaagtcttgtagtagtttggttttctaagagaactcttagatgatactttctattttgttttgttttctgtttgtttgttgctatgaattatgttactaatcagcaattaacccacag

SEQ ID NO: 138507 - DNA, 209 bp, Homo Sapiens
ggctgtaatttatgcaattgctttttgtgatttttagaaaatggggcacccgtgttattactgtaaaatgttcttaaccaaaatttggtgaatttcactagtctacctcacattttgttaatgattcaaaattgtcttgtgtctactgttatatttttgtcctttgatttaatttgcttactgtattaaagttatctcccaccccctcc

SEQ ID NO: 138508 - DNA, 437 bp, Homo Sapiens
agccacctttgccaggttttgactcctgccttccggttgtgccagattattcctgtgttcccccctggcatccagttggtacagcatatggtggttcttctcaaattcatggtgctataaatcctgggccaattggctgtattgctccatctcccccagcttctcattatgtacctcaggaaagtaaaaccaagagcctttgcttctggataactcccttaatattaaattaaagagctcttcacgtttcttgagaattatctgaagccagttgcattctgtgatatcagttttgaaggcacatggttctctgctttagatttatcccatatgctattgtttaatactggatgtatgtaagtgttttactgccctgtattgaattggtgtcttttgcacagttagccgtcaataaaaattagcatttaaaattgaaa

SEQ ID NO: 138509 - DNA, 302 bp, Homo Sapiens
  misc_feature (233)..(233): n is a, c, g, or t
  misc_feature (236)..(236): n is a, c, g, or t
  misc_feature (246)..(257): n is a, c, g, or t
gttccttgcagcagaagctccacagacgtttaataacaacaccgggaggggtgggggagagagagctggacagtcagatgggggcgccatagccagacaccaaacgtggggacaccgggggaaggcaacttaactatagctaaagtcgggggttttgcaattctcagttccgatggggccgctgagtggggtggggagcggtgcaagggctcccaggggctccggcctggtgnttnctgttggaannnnnnnnnnnnaaagaaagaaaactagggcgatgcaatgtccagacagaagccggg

SEQ ID NO: 138510 - DNA, 157 bp, Homo Sapiens
tttggagatggaaactttgggaagtaattaggtcataaccctaatgagtggtattagtccccttagaggaagacacatgaaaacatcctctttctctgctctccaccatgtgagtatacaataagatagccatctgtgggtaggtgctggctcacac

SEQ ID NO: 138511 - DNA, 973 bp, Homo Sapiens
  misc_feature (104)..(141): n is a, c, g, or t
  misc_feature (861)..(861): n is a, c, g, or t
ttttatagtgtggttttccagggtctgaataaataatcattaaagtttgacacacgcagacacacgcaccaatgatggggatacccccaaatgatttaggaggnnnnnnnnnnnnnnnnnnnnnnnnnnnnnnnnnnnnnncagttagttagagttaaatgtacctatagcccctgaatacatgctcaggtagagaaagtctccatagtataagtaagtaatatgaatgtggaatcttggaaagtgatatattttgattggaataattttaattaaatttaatggattttaattaagaattaaaagccagctagccaaattttctttaaaaattggaaactcattatggtcttaaattgtcctcaggcagccttttcctcatcaacccatagagtggtcttttgaactggtatctaaacatacctggttatgaattctcaaaagagaaagcaggtctggggcggggtggtcaggagacagattctagggaaagtgctgaagagattttcttctgaagatgatctaggaaatgcatctttatacatgattgttagctgctgtagctttctgaagaagattgtagaaaagagactaagatatatgcaagggtcaccagtttagagatcagtcaaattggaaaaagtgccaagactggatgtgcagattgttctatgtattatccagtatttttttcctcttaagaaaaagatttactctctctcctttgtgagtaaatgcctccttaatgccttttaagtaaggtggcaacttttaactgtcatcttgtgagaggcaacctcaaactctaagcagactccctctctccctttctggtgtcttaaatcaagaactagtttgaancaaggcaaagcaaggtttgttcatcttcctttcctgtcatttaaggtaaaacaggcaatgaactcgctcttcaaataccatagttcaagagtagctgttggccctggttcca

SEQ ID NO: 138512 - DNA, 676 bp, Homo Sapiens
  misc_feature (586)..(586): n is a, c, g, or t
  misc_feature (591)..(591): n is a, c, g, or t
  misc_feature (629)..(629): n is a, c, g, or t
  misc_feature (638)..(638): n is a, c, g, or t
  misc_feature (647)..(647): n is a, c, g, or t
  misc_feature (664)..(664): n is a, c, g, or t
gcacccctcatatttaataaacctttccattacagagtaagaaatcctgcaaaatagtcaaacaaattagcaatggggccaccaagagagtacattcaacctggattcaaagatgtctcagtttattagttttctgtcaatcattaaaacaagaaagatgaaacatgcaattagatacaaggagacagaactcctaattctttcatcctagctgaagcagaagagttttaattgcttggaaaaataagattttcgttttctctcaagagggaagaggaagcaaatataaattgccttagagtctatggctggaggtacaatgctccaaaccatgcaaatgagaggtggaaagacaagtccatcatctgtatgttttgtctttacaatggccaatatccagatatttagaaatgtgagataattggcagaatattccttttttcattagaatgtttagagtcacatagatttactgattctcttcttcttaatgagagtgacactgcactaaaataccttgaatatgttgtcagttattccagagccaattttccatttatgtgagttatcagtgccccttggttcncctcnaagtcctaccagctactctatcctaggagccctacacnggttatacntatttaccngagggaaagtaaggacnagagaggagata

SEQ ID NO: 138513 - DNA, 304 bp, Homo Sapiens
ctgtcaatcttcagtagcccttaagacttttctctagctcctacttaataaccagtttcttagaataataacttttaaaaagctacacctgcctgcggatttagtaagaagaccatagccttcaaatctccaaatgctccaaggcttaattctgaagcgtgtggtggctagatgttgataagaggaaaagaaagggaactgtttacttggttgggaatacttatttgggggtaacaacaatgtggacaatggcacaaagttattagaaggaaaattaaaccctctgtctgggcgtggtggctca

SEQ ID NO: 138514 - DNA, 275 bp, Homo Sapiens
gccttgtaatgttttttgttgaaaagccaggcatgatgtactaggtaaatagtcctttagggtgaacaggtacacaggccttcaagctgaggttttatgttcatctggttagaagttaggctgtgtttattgtctgttgcagctgcaaatgtaggtatcagaggctaaactttccttgggtgtccttgtttttgtctccttcccttgtcttcagctttccggattgattgattgattgactgactgatttgagacagagtctcactctgtcactg

SEQ ID NO: 138515 - DNA, 278 bp, Homo Sapiens
aacattttagctctttaatgagcaaagatcatgtttcttagcattggactaatagtcattatccagattatctttatttcacacaatgaccagtgacatggccaagatgtacaaagttggttccatcaagtagtatacaattttttgtataataatctttcattcttgaaaaagagtaactgaaaagaaaggtttctgttactgcagttagtttgtcagagaaagttctttgcattatcttataaactatcaaaattgctagtcatctgaaaaaatgt

SEQ ID NO: 138516 - DNA, 335 bp, Homo Sapiens
ttattttcttgaaagaaacatttatttatgatctttattggtgaaataatttcaaacaaatccagaacaggttctcacactttgagcctttagtgcaaaaacactatgccatgcgggaaataaaatgcttatccagtggagcgctcccctgatgcattgaaatattaggatactcaagcagaagacgacttatgtgacagaaatctgctcataaatctgcttgaaaaagggcatgataaacctcatattaaggtttctcacaacataaatatgcttaagcaacttaattccaacttaatttcaaaacaccccaggaatcaactatccctttaaat

SEQ ID NO: 138517 - DNA, 1084 bp, Homo Sapiens
  misc_feature (976)..(1010): n is a, c, g, or t
  misc_feature (1013)..(1013): n is a, c, g, or t
tggaagagagagaataggtcatttacttcagtagctacaccttctgtccccaatcacagggacgaaatgacccgagggtgggtgaagctatgcagtaatacagccttcaaaagataatcacatttgcattctcaatagcacagacacaaccatttaatttaacttgacaatcatttgaatgtatcataataaataaatatttctctactaagacatgagagaagcaattctgaagacagtgtctgtggctcacaaacactagtcagctgggaaatacttccctaactgaggtaatctttctagggaaaaaagaaatcactggaatttcatttcaaaggttagggtctctaaaaactgggggaaaaagcagtacagagaatcattttactttataattttattctaaaatacaacaaaactccttagaattatgtcagcataactccttgatgtatttttgtctttaaattccaaatgtgaaagtcataaatattaggcttaaagctgctgacatttgaatcaatactaacagcacacaaagaaaacattttaaaattatcagttatgtaaaacaagcacttactaaatacaaggatttctgaattacaaagcttatgaaacaggtctacaattaccaaaacctcaaaggccaaaaaagacactaggaatttcttaaaaagaaagatgttggaagcagaacacttactaaatcaatgaaacaacttggacaagattctgatacaaaaatcactattgagatgaagttgaaagaatatttgaattcagtccagttaagccactatgccacctaaaacctatttccttttctaattgaaacaaaacttatctcaaaacttttaggcatttaaacaatctgaatttcctttatttttccacagaatataaaaagaatattctgacagcacccggccgtaatggccgaattcccgggcatatgtccggtaccgtcgactgnnnnnnnnnnnnnnnnnnnnnnnnnnnnnnnnnnncgnccgcttcctcgctcactgacttcgctgcgctcgtcgttcgctcggcgagtagcgccctataggcctcgatc

SEQ ID NO: 138518 - DNA, 1184 bp, Homo Sapiens
cagtcgacggtaccggacatatgcccgggaattcggccattacggccggggagctgttatgtaatgttttccttcttttctcttatagctgtcccagaaaatacttgacaaattggaggactaccagcaaaaagttgataaggcaacacgggatttattatatcgtcggaccttgtgatttggattgtcacctagcctttgtaaccgcttggtgcctcttaggacttaagactaccctacaggaaccctgtactcaaggccgatttttgtaactgtaaatgatgtgtacaacattcaagctctgcattctgcacaagataggagggcggaagagtcagaggaccctgtgcttgctggtggtgctaacacaatttctggtgttcaaccttggtctcaaatagctgcttttgtatatgattcaccgagcttttttagaagtttatatttttttaaactaccgaagacattcattatctgcaaattaagactcaccttcactttccaaaatagctgagggttgttggcttgttgtagctgaccaccaaaagcagtcactgcaaatcttttaattcttccctatcaccttttgtattttaatgcaattattttggtccagaactgacctgtattttctgtattgtacacaaaagctaataattttgtgtactttttatttattttggaggttttatatgatcttcaattgagtattaaataatttgcctagattaagcctaaaatgatgaccagctaattaaagaagatattttgaatctggttctgagctaaagttgagtaaattcttagctaagaaaaaattggaaatccatcatctatattagcaacagattctcagagtaaattgttaacttctatgatttatgataatcaagctggacttgatcatacaagttagtctcataatgtattggaccaaaatgtaaacttcattggtcagatttagaagcattcatgctcacaagttttgggaaagtgaaaaataataaaatcatcttggattttattctgtatattaaaatttatcttttaaggaaacaatctgtatactacttgcttgtatagccttttgacccttcttgagtttttcagaagcctttaatttttatactttcaataccatatttacattatatactttaattaacaatgtgagtttctctgtg

SEQ ID NO: 138519 - DNA, 318 bp, Homo Sapiens
  misc_feature (210)..(233): n is a, c, g, or t
  misc_feature (278)..(278): n is a, c, g, or t
tccaggctagtctcgaacctcctggcctcaatgtatctacccaccttgacctccgaaaggtgctaggattgcaggcatgagccattgcactccggccactagcacagttatagttcactgcagcctctacttcccaggctcaagcaaatcctcccacctcagcctcccaagtagctggaactacaggcatgcaccaccacgcccagctannnnnnnnnnnnnnnnnnnnnnnngagacagagttttgctctgttgtccaggctggagtgcagtgggangaccttcagcttaatggaaactccggcttctggggttcaa

SEQ ID NO: 138520 - DNA, 1130 bp, Homo Sapiens
  misc_feature (30)..(30): n is a, c, g, or t
  misc_feature (59)..(59): n is a, c, g, or t
agatagtaggtggataaactgatttggagnatcttcaatccaaagtgatggctcatccngtaaaaacatagttgaacttttgaattgacctgccccttgagatattggaataaaatggagatactgcaacaggatgtgtcgacggaaagttactgtcactcagtgttaaatccatcagcttttcacttgttaaaaattttgcaaaaatatacatgtctctcctcctgttttcaattcttcccatcttttttcttgaggcctgagtatcatctaatttataactcttaaaaacagctaaaacttcttcagaatacttgagaaaagttttccatgaaatcttctcatagcattgcacagggttcctgaagtaatcctgaagtgaccagaattttcgatacaggttgtaatcaattggaatagagcacgttgttggagcttcctcatctcccatttcgccttcttctacatccattccttcttctctatcttcagtgtgcttctgacccagggtgctttcctgctcatttgtattgaaaacagtgacattttccagattaaactgactctgcaagttaagacctgatttctcagacagagggaaaagcctggccaaaaagagctgaatccgtccacagaagactgtattctgggatttagacaatcttcttaggagatcattgcacatacgtagtaagtaatttttcccagcagaatagaatgtatttgatttccaagtagcaacatttttttccacaaaagtgaatattgtgtcacactgatccaaaggaagacaatccaaaacatctcccaacaatacaaaaggtgtagatgcggtacaaataccttcagttactcccccaatagcaagagaaataatagctaaaacgttttcacatgatgaatgatttataatttcttcttctagaatacctctgaaagcttggtcaagggtacattttttttcattttcactgccaggtacctggctgaaggtacttaacaatggcttgatgtttttgttgttcaaggcctctctggtagacttcgtaaaccgcgtccgcgcttcgggcaaactgaagagcggcggcgtcggagacatcttctcggctgcgcgtgcccgccactgcccc

SEQ ID NO: 138521 - DNA, 664 bp, Homo Sapiens
  misc_feature (52)..(52): n is a, c, g, or t
atctcttcttcttaatgagaggacactgcactaaaatactggaatatgtggncagtattccagagccaattttcccatttatgtggagttatcagtgcccttggtttctcttctaagtcctaccagctactctatcttaggagccttacactgtttataacatatttaccagagggaaagtaaggacaaggagaggagataaaatactaatcaatccatttagtaatgatgaacatctacaaaattgaagacgagaaaattaaaactcttggccatggagaggtatagacgttaactgcaggtgtctgcctgttccttgacctcaactcagaagtaaaattaagagttaagagtaattaattctaccatttaagccagaaattgaaatctctaatactatttcctaggataaaattgtgaaaccaaatagtgtgtatcagcaattctgaatttgaaattccatatattgatttttccataaaatattttctgcactcagagatatacatcaaatagatctgctaatgtaggaaaaaacaaagatacaaatttgcttatataggattcacaatagggtaagaattactagcagcatctttttgtttgattaggctttttcctttcctttttaaagaggtcaccagccatagggatgtatgaatca

SEQ ID NO: 138522 - DNA, 1220 bp, Homo Sapiens
  misc_feature (12)..(12): n is a, c, g, or t
  misc_feature (24)..(24): n is a, c, g, or t
  misc_feature (120)..(120): n is a, c, g, or t
  misc_feature (303)..(303): n is a, c, g, or t
  misc_feature (307)..(307): n is a, c, g, or t
  misc_feature (328)..(328): n is a, c, g, or t
cccccatataantcctttctttangattttctagaacagcaaaacacagtagtcccaaaaaagagagtaagagagagcagcccatctaatagagtgtcccggaggcccagcgccagcggntgctgtaaggagcccggcggcggcaggtgggaattgattgagctggctgcacttgtgtaccaggatgcagagttctccaggtaactggacgctggggactggttggaggtcggagggtgggcatgagggtggtggctgagcgagcgggacgaccctggggctcccacaccgctggagactgcnggcngagttacacgccaattgggtngcttggagcttgggacttgtgctccgggggcatctccccggtttttcatgatcttcttgatcttggattttttgtttctgaaaccagattttcacctgtgtttgtgtcaatcccagcgaggcggccagctcggcgcgttccggcaaggcgaggtactgagtcttctgaaaccttctctgtaatgcggccagctgaaagctggaataaatagtcctgggtttacgaactttctttggtttgccattcaccattctcacctcgggctcggtcacttctttctctggctggttggtggcgcttgggacgcggttgtaggcgccgccgtactggtggtaggagctagcgtagctatagtcggcataagctttggctgggtagctcccggcggagccgttcacgccgtgatactgatactggtaggggttgagagctttgccataggaagccgaggtaggagagcagtagccgtgcggggctccccccgtagggctgtagtagtcagaatcggtagctgaagactcgggcaaagttggcgattcctgagacggatggtgcatagctgcggacgtctggaacggagcttggaagtcgccggatcggatgctggggacccttctgtcaaacactcctggtcctcgctcacagatcgcacgggcagcgggctgatgcattagcttgttcctccacgaccgcccagacataaccctagttcatcgtggtacaggctccttcggggtctcacgcacacacgcctgggccagcgaccgcggagcagaagcgcaggaggagagaagcagccgcccgcggaccgcgcagaggagcgagcaccgggagctccgtgaagtctgccctcgtgccgaattcacacacccaggcctcgtacctagccgta

SEQ ID NO: 138523 - DNA, 1100 bp, Homo Sapiens
  misc_feature (12)..(12): n is a, c, g, or t
  misc_feature (28)..(28): n is a, c, g, or t
  misc_feature (63)..(63): n is a, c, g, or t
  misc_feature (103)..(103): n is a, c, g, or t
  misc_feature (123)..(123): n is a, c, g, or t
ctgccaaatttnaaccccggaacctaantttttgggctggaattccggggctaaataaatggncctggtaccagccaggaagggtcctggataacccaagganggatgtccaatggattgggnattttagatttttccggtaacctttctatcaattttgctgataacatttcctgagccatcccagactgggccatttttcttcggagttgttgcaccatttaaaataacctatcatgtagttttctggtactagtagctccaaagtgcccaataccatatttaaaaagattgtccctcaggtatctatagttaggctgactactttcaggcatgaaacagacagcaaacacaccaatggcatttaatccatccccataatatcccccatggctgataccttttttatagggttcaattgccttcatatcaaccctgtggtcctgttctccaatcctgaacatacgccagcgtcgtccatcttctttttcctctgctgctgtgtattcagtaattgagcctttcctaattacttcagtagtcttgggttttggaagatcatcttcccactcaaactcattactattctctgacggtgtgtctaagccatctaagtcaatctccccactttcatccaaatcatctgacaatacagagccatcactaggatccagtgtcaggctaatgtctggagccattagtttctttctcactttatttccattaacttctagtgagccaggctggtcctctggtccagttatagctagtatatctgcttcaatactatcatcttctggtaaaggtatcggaaaatcttcatcttgccattcttctttaagttccacaccttccatcctcagcctggattcaatgtcaactacaaactcttgataatccagggagccaatgtccccggaggaagccttggccccctcgtcctcttcgcccctccaggccggcgacgtggggctgacggccaggtcgcaaaaagcagggccgagcggagcccgctcccctcggtcggcggtggagaccccggcccaatcccccggccgcagcggtacggcgtcggcggcagcagctgacccggacacccc

SEQ ID NO: 138524 - DNA, 1026 bp, Homo Sapiens
  misc_feature (73)..(73): n is a, c, g, or t
  misc_feature (963)..(963): n is a, c, g, or t
ttcagaccaaaaccattagtgccttgatcattttaagtgttttagttatgtaagaaatgtaagctcatgtttnattactccagttatatggtactgtgccatccttaagaagtattttgaattttgaaaaaagttctcttttcctagagaacaattacgatggatgtaaggtagtcttctggcaaaggatgagaaacatcagaatatgcccatgtgtaatagttagagaataatgagagttttgggaattacagcgggatacagaaaaataatgtttaggtccaaaatttgctaccataattaaccttaaacaaattcaccaaaagccgtgattaataaaatctgttcactttatagaagtaactctaacatgattatggaatggttaaatctgggggcacacaccctacctaagtaccatggcaaaggctcccagctgtaaggctggtgtgcaacatctactttaacagactctgcagcatggctgttgcataggtgggccgagcctgtctgctctcaatcgcattctgaaggtactggatgcctccacagcgttcccagatttcttcaaactgtcttggcaagatctcagcaccacgcttccgagtcaggccagtctcctcaagattcagctcacacatctccatgtcgtccttaccagccacaagtaggatgggtggcttgtcaggatggagttccatttgccgggcaatccatggtccatcaaaatgggcataccaccagccttttttcttactctgaggggtctttgtactggtcggcagggcggatgaatgggatgcggaagaagcgttgctgtcggttcatttcaatctcccgctgcctggcaggaatctgagctgctgggttttgctgagcataatcagtaacagactttggagcacgttgctctgtttcagtatttctcttcttgttcttagatttccaagcatgatacacttntagtctcctatgaaattcttctctgcaagctgccaggagctcaatatcacaagaagtattgat

SEQ ID NO: 138525 - DNA, 417 bp, Homo Sapiens
ggggaaagttgcatgagacttccgcatgatggtgacccagtttgccagagtccctgatgactctacagacagaaatgatccaggaacatggcttttggggcctgatgtaccacctgcactatagctccaagaatcatgaactcaaagtataaaattgaggcaataaataaatctcaatggatttctaagatataaatggtatagaattggatgtacgtccagactaatagtcatacatgagcagttttatgggacatggttttgatttttatgatgatctggagaaggaattgtttctcacagaagcagtaagagcagtggtttggaacttggactctggaatcagatactgtattatatttctacctctgccatttactatgtcttctttgggtgacttcctaatacctttggact

SEQ ID NO: 138526 - DNA, 646 bp, Homo Sapiens
  misc_feature (135)..(151): n is a, c, g, or t
  misc_feature (222)..(223): n is a, c, g, or t
aattccacaccccctttgttcacttgtccccggggtttttcctttggggaaaccgacctttttgggcccagggttcccctttcctctacgggggccccgcgcccccaaacaaaatgttttagaaaagttttttcnnnnnnnnnnnnnnnnnccccacatgtttttctctcttttctgcgtctgtggggttgattggttggtgttttttattgggttgttgtnnctcggttgtctcaatagataactttatttgaaatgaaatgcattttgaaaatatgaaaaataaatcacatctccccaaaatcatctaagagacatatttacacaagttctgaccatgctaaaaaattcatgaatgtgatggtgtataaagcatttggtacatgatgatacttgctttccagaagctggcatttgcatattataaaacgttaagaagaaggctgacctcggaatgtaacagacaatagttttatgtttcttctcaatatacagtgacctggaaggactccctgttgttaaaacctgcttccccactgctcagcctgccatcagccatccagctgcagagcagtggagagtaggtctcaccagtttttgtgcagatgcttctaacccagagtccttctgcttacttcattggacc

SEQ ID NO: 138527 - DNA, 1069 bp, Homo Sapiens
ttttcagactgaggttgttattatatattttacatgtatatatatttcaatatacatgctgagtgcccaaaagatgggaattgatgcacactacttaaaaaacaataatcctcaaaagacaaacaataatctgcaaaacaacatttatttttagtttcctttttagtaagttttctacttcttaataatgagattaaaactagtcattaaaagtattataattaacaatgttaaatcctaagcaagatacaaatgtcaattttagaattagaagggaatttaatgcacaaaggaaagatgttactgcattttatcccatttctgaatgttagctttataaaaagcatttctattaaaatcatacatgcagtttttctaatactgaagatataagcagtaaagtgatctggtcattttctccaaggttgaattcttccccctatcattgagaaatatagcccacagtatttggtgacattttctgagtttatttgcatgatattcaatgtaagtaaataccaactttttattctgttggtttatcctaccttaatatttgttaaaatgcattcataattgatttattgtaaggtcagaaaatgctagaaaattgtatttctcttatatgaactacaaaattaggaaattctctcaggaagacattataaaacataatagttataaaaagtcacccacactacagataaaagcagctaagtataatcgattactattttttcctacctaagatagatctgctttaaccaagtcttatgagactatgatatatgagaattctgatatacctgacagataagctagaggtggttatttgctttatgaaattattcgtaatagttcacttataaaaagtaacttctggcgcttttaacataattgatttatacataacttttcagaaatatatgtaccatgcacaattatatctccattttaataaatttctctttttgtttaaaaccaagatttaaaaatgtgttccccaactatcctgagctcagagcataaaccttccagagtggagcatgtgaaagacacagtgctgtcc

SEQ ID NO: 138528 - DNA, 721 bp, Homo Sapiens
tttttcaaggataatttttattgatgaaaaaaatcttgcagatatgaaaagataatttttttattcctatgacattttctgtttttacgattttcttttcagcaatgaaaacctctgatgttctcttttgggaaggtagtttatccaacataaggatcccatccttttccataaatgaatcgattaatcatgtcaaaagctctcagaggctggtcatagggtaaaatatgtcctccacctcgaataattacctgatggaagtcacccgcttgccggatgtaaccagccacttcactgtcagatttaaagatcttccaaacttttttttctgccttcttgtattcctgggatcctttccagtccatgcccatcaaggagcgctctgtcagggcagctgccacgatgatgtccagttggccattgtagatcagaaccttataattattcatgatttcagttaaccatggcttaactgactgtactgtatcttctcgcaagtacttttcaactatagttccatcattaaaagtctgattccccacgtggatggcttgtctcacctctgggagtgacaaaaatttcaccatagtaaagctgatcctcaggttccgtgcaccgcaaaaagttatagtaattactacatcctgtaacattctggaagtaagaaggatcacttgttaagtcgccatctagtagtttatccagtatttcaaaggcctca

SEQ ID NO: 138529 - DNA, 717 bp, Homo Sapiens
  misc_feature (663)..(671): n is a, c, g, or t
aggagatacattctgtttctcttttgaaattgcatgcattttcaaccaaatatgaaaaagtttaagtggatagataagactgaagaataaaagggtctgtaaaataaaagagacaaaacgttaaagaaagaaatgaatgaatgaaccaaaaattctagggaaaatcaatttatctttccaatttagacatcttgagacagcctagcctagtgctaccctataccattttctgtgataatgacagtgttctatgatgtcccagtcccatggccagtggctaaaagtggccattgagcacttgaaatttggcctttgcaactgaaaaaactaaatttttgattttattaaatttaattttgataaccatcctgttagataatgcagatctgtcccattctcacaagtaatgtgtttaaagaactcaatttgccttttcttaaagatctatataaataattaccccattatatatatgtagtagccctttcttaatgtaattttaacctgtttatttctaatcttctctccctaaagaggaaagtccgtactgcagctttgaagaaggtgagtactaatcatcatccttcatctctttctgtctcttgtaacacctttcatattgtttctgttgtttttctgagtgcctttactatatcagttacnnnnnnnnncttgttggactgtgtacctcatattaaaaaagcaaaagtgtgtgta

SEQ ID NO: 138530 - DNA, 1117 bp, Homo Sapiens
ctgggaacagagtttttgacgcttttgaccagagaggaaagcgagaatttgaaagatatggtgggaatgacaaaatagcagtcagaactgaagacaacatgggtggatgtggagttcgaacctggggatcgggtaaagataccagtgatgtggagccaactgcaccgatggaggaacccacagtggtggaggagtcccagggcaccccggaagaggagtctccagccaaagttcctgagttggaggtagaagaagaaacccaagttcaagagatgactttagatgagtggaaaaatcttcaagaacagaccagaccaaagcctgagtttaacatccggaaaccagaatccactgttccttccaaagccgtggtgattcacaagtcaaaatacagagatgatatggtaaaagatgactatgaggacgattcccatgttttccggaaacccgccaatgacatcacatcccagctggagattaattttggtaaccttcctcgtcctgggcgtggagccagagggaggcacccggggaggccggggaaggatcaggagggcagagaactatggacccagagcagaagtggtgatgcaagatgttgcccccaacccagatgacccgggaagatttcccctgcgctgtcttgaaagaggcctgtttcccagcaccgcggagctgcactgcacacctgtggggagactttttccgctgggccaagggagtcagactctaagaacaatagatgttgcttttccccgtgtcatgtaaatttgttgcacttttttgggctgagctgttagaggggcttctccagaggctcgagagcaggccatttcccaagaagatgaagaatggtgactgtgtttttattgaaggaatttcaaatgaagaataatgtttaaaatgtgtatatagagatagtatagactcctccgcggaagcatggagggaaaggaggttgtaaaatagactccatggagactcttaggaagcagtagattcccgggggctgtgcctttagcgttagaggaaacacatagagctggaactgttaatggaaagcagtcacagctgagtttttggagaccaagaaattaaaatacaattgcacttactg

SEQ ID NO: 138531 - DNA, 419 bp, Homo Sapiens
tactgattgtactgtctgatgttgtgaaatagccaatctccaccagtcctgtatactgttcaaagaaatgtcagccatcttggaatgtcacaggaactggttgaacacctgaagcaaacaaaggaactttccttctatttatgcactgcttaagaaccgtcaactcaccaacgtgcctagtcagcaaatgaatccacttgggaacttgaaaaacatcttaattaatttttgtttgcataattttgtgttctgtgacatgtttttattatatggtatgcttttaatttggagaacctacttttttaaaaaacggaaagaaaatctatcttattttgttgactcccaataacaaaaagagaatgatttgtatagtagttaataaaggctgcctattgaaatctcttctactttaaacctag

SEQ ID NO: 138532 - DNA, 826 bp, Homo Sapiens
aatgaaccttgtaaattaagtgaggcttatggtaatagatagattaacatatgtagtagacctatcttgtgctaacaccgtagtgtatcacaaggttatttcggtgtccctttggaatgaccctattgtgttcagtataccagacttgggagaataacccaatgtttacaaggtcttttgttgtgggttgttctgcccaggttgatgtttcaacaaagtagttttaagttccatccattcagattttaagcattttgatttatttaaaaagggattgttcatagaaaaaaattactttgaacagtatacaggactggtggagattggctatttcacaacatcagacagtacaatcagtatctgccatatggctggtctctgtagacgccctttgctgtcctcgctgaaggtgccttgtgtcttgagttagtccactcttcttgcccgtaggaatcataagtctcctcactgagtccatgtccgtaatcatagtaatcagcaccaatattctccataagtctcttgtgtcgggggtggcggtggaggtctgtacccagttgtggggactcctcttgctctgggagtgagaagtcctcttccccgactcactggccctcgggtggacatgactcctctgggagttggcgtccctcgtggtactacaactccaactggccgggctgtaactcctccccttcccctggttattgctggggctggtacacctcttgtacgcaaggtgggtttccctcgaaccactggaacatctgcattttctgaaccaccattcaaatatgttaactcctggagctgtgcttgcctgatc

SEQ ID NO: 138533 - DNA, 1009 bp, Homo Sapiens
  misc_feature (430)..(452): n is a, c, g, or t
  misc_feature (751)..(768): n is a, c, g, or t
  misc_feature (936)..(955): n is a, c, g, or t
ggacattaaataggtttaatgaatccacttcctttattgcagtaacctctgtacaaagcagcaactgcaatactcaaggttaaaacattagaaaagcatttgtgtgacaggtatattacagtattatcaaaatattacattttcagacttacttagcagataatcatccaccagagcttaaatctttaaattatttccatagtcttaaaaaatatgtaatgtcagaatgcatataaaaagaatgtaaaaggaaacctaaaatacaaatggaataatgtaacaaataaatatttgatttcagtaactgttaataatcagctcaacaccaccattctctctaaactcaatttaattcttataggaataatgaactggtcaaatgccatggcataattatttatttccaagctatcatcaatgattagaactnnnnnnnnnnnnnnnnnnnnnnntcacaattcagcataaataaagctatttttagcttcaacactagctagcatctctaagaattgttgaaataagtactataaccttgaaaattttcgacctggtgtctagtgttaagtgaaagtaatgcattttttttaagtgaaaggcttcttacattatttcacagacagtattacccaccccacattatgaatagttagatatattttatgtactttatacccacatgtatggacgcatgacattttgttcctgtagtacagatcacaatgttgttttcctgaatgggaaaaacttnnnnnnnnnnnnnnnnnnggtaagtgtacctgtgcacatttcaagatagcagcactcagtccatgccctattatccatcttaaaagttcacacattattgtttactgaataatatttctactgtctttacccccaaacattgcaaaacctgcaatggaacaatgctgtgagttataatgtagaaannnnnnnnnnnnnnnnnnnnagaaaatcagttacttcattttcttaatattctgaattcaagttatcagatctc

SEQ ID NO: 138534 - DNA, 387 bp, Homo Sapiens
cctcaaatccaacccagggaattactcaactagggattatcctcataaatttttcattcccggattccaaaagtggttaagccatctgttcactgcctttctccttatatggtcatatcaattcagttattactcttccttatcgagtcttccctttgtgaggattgcattcctgtgtttatagactttaaataactaatgtataatttctttatgtgccaagaatattattttaaatgatatgtgtatgtctatccttatttgaattcaataagaatggcttctaaacacagtgacatgacagttttctcacaagagccatacacattaactatttaattatagtgaagcagctgatcgattctggcatttaaatgtgttactatt

SEQ ID NO: 138535 - DNA, 1929 bp, Homo Sapiens
  misc_feature (1196)..(1196): n is a, c, g, or t
tttgctttttaagttttatttgcaatacttatatgatagatgttttttaattcctggaaaaataaatacacattattaataatagttatctggtagatggataacggtacatttctatgtaacattttcattttttgtaatcagaatgtattacctttacagataggcaaacacaaagatttgggaaaatgcatgtaaaatctaagaaaaaaggtaaattgtagatataatacattcacaaaaagaatataactgtgttgagctatatttacagatataaaaagatgaacaaattacattaggttttttaaaaaaagacaacctaacagtatgtatcgatgatagcacgtttgttctttaaaaaaatttgtgaattggtcaggagcagtggctcatgcctgtatttccaatattttgggaggctatggtgggaggatcccttgagctcaggagtgagctgggcaatatagtgagaccctatctatattaaaagaaacaatttgtaaatagacactgaaaaggtatctatcaaaatatctctaatgaagtttgttttacaattcttctacattttacattttttctagttttcctatgatctttataaaagcttatcacttataagaaaaaaagttattttcatttttgaaaaatatctataccctttactaagtccctttacattcaatgaccaagattcccacaacactctgggaagctgaaagatctgaaagtaacacggccattacatagatgaaggcagcagaccttggaaatgtaaccccgatggactgactctgggctggcattctcccacccctgcggctactccagactcagaggaatgtggcaagtcagatgccagctttggccaaaaaaactcctgtcattttaggagtctcaccatgcccagttacttcctctgagatggtaacagcaataggggaacacttcaaagacaaagctttcaagaatgattcatgctgcaccacctccccctgttggcaggttctggaaattggcttgaggataactattgccattggtccaaaatttttaaaaatatattttcgtgtcaaaatcacccttatttttttaaatcatcaaacccactttttcttttgtcaaggattcaggtattgacaaaagacacaaaaccaggacctggtgtcaaccagacaatgctttggatgatncaagggcagtgtggctctttgcctcttgtccttgcttccccacctctttaggtccacaatagaggaaagacactatgttcttcagcaccgtctttcctgttgtctctctagctccatccacttccctgagcctcagaaaaggggcaaggcatggctcacatactctcagccacggcctggcatgctgcagctccaaaatcagacatctaggcgctaatcctccccaagacccagtcctaaggttcaaggcactgatgtttcaaatatgtcagactgaaatactgacgtttctttagaaacatcagggttcagaatgtcagtcttcaactgtggtgcccgtggtctccagatacgcatagcttccttactcttccaggaagaaggaaacattcaataggatatcttgtacaagatcttggtgttcgtcttttgaaattcggtcccaggccttgggcaaagcttgtatgtttgccaagtctccccactgaatagacgaaagaagatactttctcttcaggtacctttgactttcgataatgtctctcaatatcctgcaaccattccaacatgtcagccacagaggggctcactgctgaaggctgcaggacagcatcaatgccaactgtgtctgcgtgttgctcatagatctgaaacactcgctccacatggctgctgaccatgtcggacgcgtgggtcgacgatatcccgggattccggaccgtaccagcctgct

SEQ ID NO: 138536 - DNA, 621 bp, Homo Sapiens
  misc_feature (513)..(547): n is a, c, g, or t
tttggtgtttcaattgttttattacaatccaaaagttggggcgggggttcctgtgccaccacacaccatccaggatgagagggtcagaagtcaaaggtccaagctgcaggagggtcagcccctgcctggcatgttgatgtagactttgccatcttcttgggcggggctgcggcgtgggcgtgcgcacaggaacaccgcccccacgatgagcagcgatgccaccgcatcagcagccacgaggcctgccaggagcggcagagagagggacccacatccggaacaagagcctgaagtgccagggtaaaaggcagggagtgatgatctctctcctggagtcgtctgagctgcagccactgggagcaaaagcaggaagaggatgtgacccagatggatcatggtggactggggtctggcaggggtctggcagaggactgtggtccagagaagtccagaggaactgtccccggccgtaatggccgaattcccgggcatatgtccggtaccgtcgactgnnnnnnnnnnnnnnnnnnnnnnnnnnnnnnnnnnncgccgcttcctcgctcactgacttcgctgcgctcgtcgttcggctacaagacgggcgccctatagatcatacat

SEQ ID NO: 138537 - DNA, 703 bp, Homo Sapiens
caattttaacttgttcttgtttttcctgttgtgcaagacgagctgcaacttcttcaggtggtcgctcccttatagaagatgaggatgcttcttctgaaagtgcaggtgtgggttttccttcaccaatttcagggtgatcagtttttaaagattcctcaggctgaactgcaggggctgggaccgacagggtatcacctgctgttgctgaagctggagtatctcccttttgtttttggagttgtgaggcagactgtttagattctttcattacttctgatacactagagatttttagtggacccgactgaatcgatttctttggcaatggaacattataggctgcaggaccaagaaccatctcgaagagtttgtctgagtaaggtatggttttctctacactttcccggaaatgggaatccgcatttggcatataggatcgtgccacccttacctccgccaacaaacaaaaggccagttccagcaattttgccagtagtcaacccagagctgcctgaagtagcgtatctgcggcatggtcgcaatggacggaggacaaacttccgacagagccaactctgggcggcggcggtcacacccgataactgacaggcccgcgccatctcggtcaagcggacggcgctgctggtggactcgagctgccgcggcggcgcgagttaagtggaggcgtgcttgcgtgtgtcac

SEQ ID NO: 138538 - DNA, 1726 bp, Homo Sapiens
actgcatggctttgaacagcttgttcgattcttctgagtctggcataggcagtattatatccagagtaaagttgtcaacttgctcttgactgagccgacgaaattgtattctttgttcagagagtttctcagacaggttctgctcaaattcagactcaaattcctggttcttgtaccctaagggacatctcgcaagtgatcagtgtgggcagctgcctgtcggcgaagctgggttctcatttcattttccatggcatctctgacttcttctatctttctgtcctgttcagcctgtatttcacttctgtgatgttctaatgcttttgctactgcagagtcaaatgcccgcttttcttccagcttttgtttctccaaggctaacgtgatgtgctgcttttcggtggccttctgttctgccagctctctgttcagctgatcaatacgacgatgtgcatgagcaatgagggagttcagatcatcagtagagagcttgtcagctaagtctgaaacactcattcctttccacccaggaaggacttctggagtaatactgtccagctctcgtttaaagtcatcccgagcttggaccaccagctcatgatactgagatacaaccttagcctcagactgagctgcttggacctttttgaccacattatccagatcaactatcatgttgtgaagtttaccctctgcagcagttatatgaggcttggccccagcaacctcttttttctttgcattttcaatcacacttttcatcttctctaactcttctttggctttgagaagggcatcggcagcttcatctactgcctttctgcgttccttcaatgcaccctccactgtgcgccactgagcagatttcttctcgcctgcaatctcagaattgtccatggcggctttcaatatgttggagtgtgcattgacagcctggaccgcagcattctgagctgcaatagcctgcagagtgacacttgcagtttgcctcagagcatcttctaagctcttggctagagactcaattttaacttgttcttgtttttcctgttgtgcaaggcgagctgcaacttcttcaggtggtcgctcccttatagaagatgaggatgcttcttctgaaagtgcaggtgtgggttttccttcaccaatttcagggtgatcagtttttaaagattcctcaggctgaactgcaggggctgggaccgacagggtatcacctgctgcagaaataatttgagccgcttctgtaggtgctgttgctgaagctggagtatctcccttttgtttttggagttgtgaggcagactgtttagattctttcattacttctgatacactagagatttttagtggacccgactgaatcgatttctttggcaatggaacattataagctgcaggaccaagaaccatcttgaagagtttgtttgagtaaggtatggttttctctccccacgtatgagcagcgatgccaccgcatcagcagccacgaggcctgccaggagcggcagagagagggacccacatccggaacaagagcctgaagtgccagggtaaaaggcagggagtgatgatctctctcctggagtcgtctgagctgcagccactgggagcaaaagcaggaagaggatgtgacccagatggatcatggtggactggggtctggcaggggtctggcagaggactgtgtccagagaagtccagaggaactgtggggatcccggga

SEQ ID NO: 138539 - DNA, 613 bp, Homo Sapiens
ttgtaatgatttacagatgatggtttttcagtatatattatgcaatagaaccaccatgcacaaattgttaatgctgcaaaatgcacattctacatgggtgtaagtagttttataacaagtactcacatttgcaatttgtaaatattcaaaattttattaaattcttccgaattttttctttcagtgttttgtttgcaattatgaattgtcatttttaaatatttttttttagataagcttgagctgtgccttaccttttgtgtgtaataattatgtactaaataatgcattactatttgtttatcttcaaatatgagactaccatatagctatgccaatttacgtgttccttggagtggtggtggaaaaatacctcttctttcagagtttatgtggatttacatagtatgagtgttttagctatagggtgttttaaactgtgcttaaaataatttgttacatgttttgttactgtgttactttattgaggacagctagtccctttgtgttgttaaacgtttaaagacagttgagaagcttcataactctgttcattgtaaatcttagctttcttgtaatatgtattttaataaaatatttaccttgcaactct

SEQ ID NO: 138540 - DNA, 473 bp, Homo Sapiens
ttgcccattcaatgattatttattaagcatcaacaaatacaatgatgactactctcttatggagactatatcccatggaagtaaacagataataaataaatatactatgaatacaaacacgtacacacagtttcctggagatgttcagtcagcaattagattaagcaactgaggctctgtagagacaagtgaggggctaaaaatatagatttgagggaaaatgcaaaggagagagtacattccctcatataaaattgtttctcctggtgaggtttcctgcaattttggcacaaggcatgcattcgttttcaggtctatcggttatttactgtggtaatactgtagatcggcagattactgcagaatccaatggactgaagccataagcattcacatcaggcctctgagggtcagtgatttggcttggctctgctgggtggtccttctgctccagtctgttccgccgttctttg

SEQ ID NO: 138541 - DNA, 455 bp, Homo Sapiens
ttttcatttagtaatttttacttccaccttagagaaacagtatcagctaaactattaacaagggtgttcctgacagaccattctgagcatatatgggtaatgtggctcggatctaatccctgtaggcagatggtgcctctccaagcaagatctgcctctactcagcctctgaggcatattaaacacagatggaaatatatgctattaacgtaggccctggagttagataccagtaggatgattagttctgtcttcagccaatcagtttactcattttgccgcttcatagactcacagggccttccttctgtcctagggaaatgatgttatagaggaagaggatggatcacccacgcaggaaggtggtaaaagatctggtcctttacttcctttagttatctttctttcctgggtattctttaaggggtaaagaaaagggtaccggtatgacgtgg

SEQ ID NO: 138542 - DNA, 541 bp, Homo Sapiens
tttttttcatttagtaatttttacgttgcgccttatagaaacagtatcagctaaactattaacaagggtgttcctgacagaccattctgagcatatatgggtaatgtggctcggatctaatccctgtaggcagatggtgcctctccaagcaagatctgcctctactcagcctctgaggcatattaaacacagatggaaatatatgctattaacgtaggccctggagttagataccagtaggatgattagttctgtcttcagccaatcagtttactcattttgccgcttcatagactcacagggccttccttcggtatgacgtggtggcgctgctcagttgtatggggctgttagaggaaagatcgtcttcttaatggtacatcaaagcaagcagagcattgatgatctctatgacctcctcagctctttctgggcctcagagccatggatgtcaggtgcgggtgtaaaggcgtggtcaaggagacaggtccaagtttcttcaggagctcagcttaggcaagtattttaaaggctgttgtaa

SEQ ID NO: 138543 - DNA, 1169 bp, Homo Sapiens
  misc_feature (657)..(667): n is a, c, g, or t
  misc_feature (971)..(983): n is a, c, g, or t
  misc_feature (1058)..(1089): n is a, c, g, or t
atggactctgtgggttacattctctatcaacatatctatgcagagggtgtcttctttggtacaacagccaatatttcatgtctcctttgagtgtggtttactgcattaaggccagatgcttaattgagctctagggtggctggttagtattaatacattggtgtgcttaccgggcatataggatgtggcttttgtccagctgatagtagttagaggcttacaacttaggagcagcaccaactgaaggtgctaattgcttggatctccttcattgggatagttggagagggattggagtaccactttccttccactgttacctggtacttaatgccctaaagatacaactaggagtaacagggccaaagttatttctgttagacgtcaaggaatggtatcacagtctattgacctcagcgatttgtgcttgtttgtgctagaagaacatcccaaataggagaacctctcacaagctggggcaggtcaccttatctttgtaagatgaggatatcatctagatcagaaatctgactagattggattctgaggagaagaacctactacaaggcaaggagccgttttttggctttgaaaagtcttgctgtcttgggtctacattttagggaagagcaggtacatggatccaggcttctgccnnnnnnnnnnngagaagaagatgacgatgatgaccagtcgtactatcttactgagccacagtgatgcatgcttttcggggaaaacttcattcacaagtattccagacaccaggcttcaggcatggccatgagcaagaccagcaaataacagctttttgccttgcagccctgaccccaatgtctgctgtttccaacactggtgatttctaactacggcccacagcagatgctgttgaataacaccatggcttcatcagaggatgtggggttgtagtacctctgggtgatgaagttgttttagtaaatccatttttnnnnnnnnnnnnnggacttgtttttacttttttctaaatgtctctgactactgactgttctatacatagattatttttccttttttannnnnnnnnnnnnnnnnnnnnnnnnnnnnnnnttactgttaccagcagcatatgacagagtttcaacatcaaaaatccatttgggggcttgctttttcttttttgctttaaa

SEQ ID NO: 138544 - DNA, 755 bp, Homo Sapiens
  misc_feature (257)..(269): n is a, c, g, or t
  misc_feature (344)..(375): n is a, c, g, or t
  misc_feature (453)..(463): n is a, c, g, or t
cagtgatgcatgcttttcggggaaaacttcattcacaagtattccagacaccaggcttcaggcatggccatgagcaagaccagcaaataacagctttttgccttgcagccctgaccccaatgtctgctgtttccaacactggtgatttctaactacggcccacagcagatgctgttgaataacaccatggcttcatcagaggatgtggggttgtagtacctctgggtgatgaagttgttttagtaaatccatttttnnnnnnnnnnnnnggacttgtttttacttttttctaaatgtctctgactactgactgttctatacatagattatttttccttttttannnnnnnnnnnnnnnnnnnnnnnnnnnnnnnnttactgttaccagcagcatatgacagagtttcaacatcaaaaatccatttgggggcttgctttttcttttttgctttnnnnnnnnnnntcccattccttctttgtagtacaaggagttagcactccctcctccatcccagcctgaccagatcttccattttgcttttgttcatatagataattatatgtcctttgtgtgttgggacttgtccctgtctgttgggaaacttggtctcactctagtctgtgctggctcttttttcttttgtgtgtgaatgtttgaaactatggtgctgtgtcctcttccctcctgttgtgttctctgttcttcttaaggtattaggtaagctgtatgtaaactcttattagaaggggactaa

SEQ ID NO: 138545 - DNA, 732 bp, Homo Sapiens
  misc_feature (72)..(72): n is a, c, g, or t
  misc_feature (124)..(124): n is a, c, g, or t
  misc_feature (593)..(593): n is a, c, g, or t
acatctcccctcttggagaaaccactaggggcagccgtcagtgtgatgggtgggcgcctggcccagagcggntccacactcggctgggcacctccctctccagggcctgttccagcactgagtngccatttggggatcgtgcaccgtgagcagcacagctggaccccaggtgagggcacttcacctcccaggcctggtctccacacccgggtcacagagagacatgtcagctgaggaagcagggcaggcggcctcttccttcaacacctttaacttcctttaaatggagaagggaggctgctcctggggaacacagagggccgctccacttgtaaaaccacagcagctgtgcaccaggatgggcctcagggaccagccaagcccagggattgccggtgcccccaccctctgacaaatgcacccaggagtcaagcatgggggtgtcctcggcacctggattggaaggttcttgccattgtggatggggtctaacctcctggacttcagtgggtaaccgaaggctccagcacgcagcttcagaaagaccagagccaggcccaggtgccctctccagccgacatccgggctgtggnctctgggctgcttctccttcctgtggcttccaagtcccagggtacaatcggtgcccttctgtgtcctggcagttttagagaaaaggaatgaagcagctgtattcacatacatgtagtaaatgtgaaattttcacagcaa

SEQ ID NO: 138546 - DNA, 412 bp, Homo Sapiens
  misc_feature (201)..(201): n is a, c, g, or t
attttaataggttgcttcttcaagtggaagaagtatttgactgggggtcagaagacctgggttggaatcctagttccatctttctgtaataatgtaggtctgctctgcccatcctctgccctcctccctcagaaaaatctctgcaaacccatgatgtccaacagacatagctcatattggtcacagctaacggagttaacntacctaaccaagttgggcctatctaactggctaagaaaaccaataacttctgggacttggtcaaaatgatgcattgtcttgcaagagtttttaattgagagacatgaggaagttgctagtgggttgtgtatgctacagctgaaatatcccatagggcagcaagattaatgtacagaagaagccagtcatggctaggcatggtggctcacac

SEQ ID NO: 138547 - DNA, 728 bp, Homo Sapiens
  misc_feature (62)..(62): n is a, c, g, or t
atcttcctacttcctacttctccaaaaagactgagagctgacatatttgattgtaagctctntgaggcagagttcttgtaatcgtctctgtataaaacagtgcccaccccagtgacctgtacttggatgcttcaatcagagctgtcctgttaaatagagcaagtttttcctagacccacattctgatacaagaaaaatcaaaggaattatgattgaaccaattcaacacacactgttgcattttgtgtatgtgtttttggtgaacctgctttggaaacaatgtaaaagtcacatctgtggagtgtttttagagcacttttatgttcatttatgataatagggacctgcccaggcactgggctaggtgttccacatctactgtgtcattatgtaaattgtttttcacaagaacttgagaagctagcagtgtagctattattatccttggggtggtttgtttttggttctttgggttttttcccaggggaagaagctggagtttggacagcccctggcctacatgggctcccttttgcagaggctgctccagcggggatctccttgagctcaggtaaataagccagtgccaggccaggtcctctgcactcctttgtctattttcccctttgttccttggacctgaaaacccttcaaggcttcagaggaagctcagtgagttgattctcatgtaccgggagaagataatgtagaggcggcggaaccagagg

SEQ ID NO: 138548 - DNA, 262 bp, Homo Sapiens
agagcacttttatgttcatttatgataatagggacctgcccaggcactgggctaggtgttccacatctactgtgtcattatgtaaattgtttttcacaagaacttgagaagctagcagtgtagctattattatccttggggtggtttgtttttggttctttgggttttttcccaggggaagaagctggagtttggacagcccctggcctacatgggctcccttctgtcgtcttctcgcagccgtatagtagtaggcggccgc

SEQ ID NO: 138549 - DNA, 786 bp, Homo Sapiens
  misc_feature (532)..(588): n is a, c, g, or t
ccagcttgctttcaaccagagaactgagaagaagcagtcactgtaatttccacactcagccctgctcctactgggaaaacagaggctttgtcccagcttaggaatacactggatctgacagatgagaattagggggaggggtgtcagagggacaaaggagggaaaagccttggactcagttgtaaaacaccagtcagaacctcaaagacaagaatcactagacttctgttgctctttggtcattcagttaatctactctgcaggccaatgtgcgccaggcactgggaccaatcccaccactccaggccctcagctgggggcctaacacaatctgcagattcaaacagggagggagaggcagcaccccgaagccatgcttcaccaggaagcagaaccaagccctgtctctgaccctggctgcttgcaggccctcctttaagttgctttcctgcctgaccccgtttcctcctctgacaatggagtaacacgatgggcaccatggtgaatgcttctcacctcaaacttcatttcnnnnnnnnnnnnnnnnnnnnnnnnnnnnnnnnnnnnnnnnnnnnnnnnnnnnnnnnncgggtgctcagtggtggagctgggctttgagtccagacagtgtggcccaatcttgcttcttagtcctcattaaaggcacagaaaggcatggccaagccagccccctcggaccagacctgcctgcatacttgtttcatttggcccacagaaattttaaatatcctcgtgccgatttaaccaggctcgcacgcttatgcc

SEQ ID NO: 138550 - DNA, 960 bp, Homo Sapiens
atgaattataaattatattcagccctgagtggagacctatcagattggattgctggcaaagcacagaatgcctgtatatgatgtaactgtatcaaaaataaaaagctgtcacatattttgtaaatttttaccttgtaaagtcacaaaaatagtttttaaaggaaaaagtacagtattcttttaataaactggctcacagtctggtaggtctacaaccccatagcacaacaggtttatagagatgtatatagaattatagtccttatttttttcctttgcgtgaaaccttttataacagattaacaatcaactgcataaatattattaatattttaaaaagagttaagttgtattttgataattcacaaactatcatgcaaataacgagtaagtagacaagaataaagtggtttgagatgaaaagaacctaacattatttacagtagatgtggttttaatacaattactgccctaaaatgtctctggcaatgtacagaaatattgtatatacttacatatgtaattgttgtaagagttaaatacaaaatcatggtgacacttccaattaagtgcactaaatgaaaagttaagtcacttattaacttttcagtttggtttgcaatgagaaagagtggaaatttgtattttgttttgcttatagaattacagacatgtttgacggaagtgttgagcttttattttgctttttcatagagggcagaaagtagggaaccagatagagatgaaaaggggccactgaaaagtgaatttgatagctcagcatttaagcatgattacatattcagatagctctttttgctttctataaatatatgcattgtgtgtgtagtaatagatgtaagtttacactttgaaaggaaatcttgtttcaatgtttattataaaagccttgctaatttagtagtgatgctttccttggttgtacaggtgtacatttgt

SEQ ID NO: 138551 - DNA, 1042 bp, Homo Sapiens
gcagggtccattcctggtggttggtcgttgctgggcgttgggggttccgattcccggatttggctcctgaagtggctctatcaaattttgggttttggtggtgcattcgcgggggcaaactggtggccccccctggatgagcctggccaggtgtttctgcgaggggctggtgcccgggagttccccaaggggtggttgccacccgaaaatcatgccggacatgagctgctgaatctggggatggttcattaggttcgaagccatgctcatgaagccagggttgttcagcaggccggcgatgtggaagctgcccacgcctcccgtggggcgggggccctcccgcagcttcagctccgctatcttgaggttggacttgtatgtctcgttgtcggggtccagctccagagccttcttgtagtaagccacggcctccacgtgcttgttgaggctggagagcgccaggcccatcctgccgtaggccttgctgtaggccgggtcaatgcagatggcccgctcacagtcctgcaccgcgcctgcgtagttgccgagtttgctgtaggctgcggctctgttgcagaaatagacggcgttggctgggttgagctcgatggcttttccgtagaaatgcacggcagcttcaaagttttccactttcatctgctcgtttccttcggttttgaggcgctctgcctctgctgagtcctcctcggaaggcggggttcgcgcggggctcctcaggtcctgcggcatctccttgcccgtggcagccgcttcaaatatctccggcagagtctgagggagcgcaaggtcactgtcttctaccgtcaccccaaacgcagtctccaggcactggatggcgacttccaagctctcctgagcatcggacgagaggcccccgtgccggagctggtcatgcaggaactggatgatggcgtaggccaggcgcttcttgttgtccatcttgagcccagaagaggtgatacctctcaggcgaccgatccccgacccaccctcgtgccgattcaacccccggcctcgcacc

SEQ ID NO: 138552 - DNA, 1429 bp, Homo Sapiens
  misc_feature (42)..(42): n is a, c, g, or t
caagacccacggaatgggggccggggctgttaaagcctttgnaagccacacgatccgccacaccggctgaacgtgaaacctgccacttctctgagagcggccccgggagcaccccaggattctagaaaacactcaagtgaccgagctttctgggggcttgaagggaggtcgctgctggtctgtgctcagcttgctggctctcgtttcaagaagggtctgggggctgtaagggagttacaaaaagggagtggaggagggcagagataaaaggggaaaatccatcttgacatgcaggtccgaggtctctctcttcccctctctcaggcagtccaacaggaggaagtggcagacaaccagaaggcttccttcgggtcggccagggaaggacgcggtcacaccgggagcaggcagcgtcactcctgctggtcgtcgttgctggcgctgggcgtccgactccggatctggctcctgagctgctctatcaactctgggttctgctgctgcatctgctgggcaaactgctggcccgcctggatgaggctggccaggtcgttctgcgaggggctggtgccgggagttcccaaggggttgttgccacccgaaatcatgccggacatgagctgctgaatctggggattgttcattaggttcgaagccatgctcatgaagccagggttgttcagcaggccggcgatgtcgaagctgcccacgcctcccgtggggctgggggcctcccgcagcttcagctccgctatcttgaggttggacttgtatgtctcgttgtcggggtccagctccagagccttcttgtagtaagccacggcctccacgtgcttgttgaggctggagagcgccaggcccatcctgccgtaggccttgctgtaggccgggtcaatgcagatggcccgctcacagtcctgcaccgcgcctgcgtagttgccgagtttgctgtaggctgcggctctgttgcagaaatagacggcgttggctgggttgagctcgatggcttttccgtagaaatgcacggcagcttcaaagttttccactttcatctgctcgtttccttcggttttgaggcgctctgcctctgctgagtcctcctcggaaggcggggttcgcgctgggctcctcaggtcctgcggcatctccttgcccgtggcagccgcttcaaatatctccggcagagtctgagggagcgcaaggtcactgtcttctaccgtcaccccaaacgcagtctccaggcactggatggcgacttccaagctctcctgagcatcggacgagaggcccccgtgccggagctggtcatgcaggaactggatgatggcgtaggccaggcgcttcttgttgtccatcttgagcccagaagaggtgatacctctcaggcgaccctcgtgccgattcaacacccagcctccacctagcctta

SEQ ID NO: 138553 - DNA, 686 bp, Homo Sapiens
  misc_feature (430)..(462): n is a, c, g, or t
gactgtacaaaccagttttattagggaactgccccaggtgcacctctggttcatgctcttgtcacacctgtttctcagatcagcccaggctcagaggcaagttactagctaagcaaagaggaaaactgttctgcaaaatagcaactgtcagcttaaggcattactaacattgcagaaggaagcaagatttactagggacatctggatagcccaggacaatgacttctgggaacaggaagctccctagggccagatcgtgctgccatccaacttgggagatgacattatcgtgctgggatggtgggtaactccttcaaaccaatccatgtcacagaacactgtctattccttgagcttttggatttagaaattagttatataaaaagtactcttggcccagaagccccaacatgtgcgtgggtctcggggnnnnnnnnnnnnnnnnnnnnnnnnnnnnnnnnnaggatggagatacatggaaggttggtcaggctctgttttagaaatgaagtcacgactaggaattgggagcgagggggcagagacccctgctgcaatcacatgctgaatcattgtccttctgagagcaggctcctacggttccttcagtccacggaagtgctcagagcagggcaggccactgcggccatggagctgccgccccctcactgcgtgcccctcgtgcc

SEQ ID NO: 138554 - DNA, 352 bp, Homo Sapiens
catctatagctttttatcagcattcatcagtttataactttcctatcaagcaagtcctttaattagccattccctcaaaagctttaagagctagtctgctgctgcctcctactgaattccttgctccttaaccctttctgtgtatttcccatgcagccgaccatttagacctagacaggataccccattctaaatctttattccacacctgctctgcagtaggcccttccttatgtaatattttctttcctttgcttccagtctcttatttcatactctcttatgacttttggcccagcaatgctgtcttaccttcctgttgatgtgtgtcattccttagtgaccaactcct

SEQ ID NO: 138555 - DNA, 493 bp, Homo Sapiens
  misc_feature (75)..(75): n is a, c, g, or t
ttttaaaaatccttgcggataaatcttaccattctttccagtctcggatttatttgttacttttaaactatatanttaaacacaggaacccaggttctaaataaacatctaatgaagaacagtttcagtgttaagataaaactagagagtctaataatacaagttatacagaaagtttcagtgtgatttaccaaaattcagaatttctgtaatagtggaaaacttttagcttaatattcaaaaccagcaacttcccatgaaactagatagctgagaggatccaacagatttaaatactgccaaacttcttctaaagcgatgcactcttttacccttgaagcagtcatcttgagtaacaacggaatttatcagtctcttctctggattaaacagacaagataccaccatttgtatgcttcggtccacagatttctcctttgctccccaacatgggcactgcggtggcatctggtaattgtatacatggaactga

SEQ ID NO: 138556 - DNA, 223 bp, Homo Sapiens
ctttcgttcgtcccttcgttcattcattctttcttcatgaattatcttatgatttatttgtgtacttattttcagacggagtctcgctctgggcggggcgaggcgaggcgaggcacagcgcatcgctttggaagccgcggcaacgcctttcaaagccccattcgtatgcacagagccttattcccttctgtcgtcttctcgcagccgtatagtagtagtaggc

SEQ ID NO: 138557 - DNA, 627 bp, Homo Sapiens
tttgactgaataaagctttattttaatgtaaaatatgaaaagaaaaatttatatactcatatataacaacttccaaaatgttttctgtggtacaaatggatcatcttaaaaagtctgtaaagaattcatcctccacccccatatgccaaaatatgatttcacataatttatcttcagaacttatgaacagacttggaatcacaaaagcacaggaaacaccagaaaaagtgatggtacaaacaacaggttttgttttaggttccagtagtaagcagccctacagatggaacaggagaacactttctgaaggagcccagtcaggagacaggttagaagagtctttggggttggttcatttcctgtagccaagcttgtctttaaaagtcaggctgtgtgtgattctgtgactatttaaggacatgagggagaaaagagtttcacttagaagtcacagctgtgtgtgagattctaggcttattttagatatctaactttttttcccacagttttatcagagtggagactttgtagggataccttaatggcgacgtcctgcattctggtctcgctggtggcatggtgtatccagctaagatggcacggagactgggagtgatgaggatactt

SEQ ID NO: 138558 - DNA, 425 bp, Homo Sapiens
ttcttcccttcctttgttttcataagcctttggtatctttcctgcccttttcctttgtgtactctatactggagttcccttcttcctcttgctgtaggctcaatcccataccgccatctacaactaatctttcccatcaactctgtgtgaaggcaggttgcaactagaaattcagaggggcttggaatagagaaacctaaagaagcatcatcccctccatccccaacttcctcaaagcccaaagccaagggaaggataaatcaaggctcaaggcttccccagcaaagattagggaaagagacttgaccccaggactgtactacgactcttaagagaacactgcacagcactcaaagtcccccactggactgcttcctccttagccccactggtataaatacatctctctccaatttggcttcaaa

SEQ ID NO: 138559 - DNA, 107 bp, Homo Sapiens
tgaggggtgtacattttattggaaaccttaaatactgttcagaaagaatatatcttcaatagggtcatgactttcatcatatacatgatttgatacctacgagctcg

SEQ ID NO: 138560 - DNA, 1144 bp, Homo Sapiens
  misc_feature (63)..(63): n is a, c, g, or t
  misc_feature (404)..(404): n is a, c, g, or t
tgagtgggatactatttccaccagggattaataggaaccatttttgccatcagcactctggcnaacaaaagaatcaagaggaatcatctcatggaaactctccttcggtaatcccactgtcttcaatgtgaagaatggctgttgagagttctgcacgtagagcagatccacctcctccaggtcctctagggtgagtgggaccacagcacagctgcttccacaccagaggggccaagtggaggtccagaggcttctttgtgcgaatggcagcccccattaaaattcctaaaaacttaaactgcattaagtgttcatcgaggcaggcagaagggttaaaaaggaacctgtccctattgtaacccacttctgcggtggcattgggagagggtataagaaggtcaacnataccagtttcaagttcctggcacatctctgtgatggtgtcatcaaacactcctccagcatcatcagccccttctccaaccagcttaaccttccacgctcgggaaggcaggcggaggtctgaagcattcagcttaactacttgtctcgctatttggacaaaaataggcttacacttccgtcctctggttgatatcctctttacagttatctgaggtccatagtttttgccttgaaccatggtttttcctatggagcgcaccattggcagagtgtagactcttggggctaacaaaggccgaagttgtccctgtacaatgtcccaagttccagcattataatgggatgtgctgttctggttgttggggctaaggttcagcagtctccaggatgagtacatgaggtcagagaagtggtagagcagccggagcctggcccgcaccgtgtgaatgctgacttctctcagcgccccatactgggggggcactgtgtcaggcaggcccagctgcagaggtactgacacacctggtgctcttggtgggacaggtggtgctgtccatgcagcactgtggcagcggccagccgagatctgccgaacatttttcccttgcatgacctgttaccagggttggttctcgaacatggttggtatggcctaagccgagctgcccttctgaattgctcccccaggcatacacatctccatttgatgccaaagcaagtcgtgtgttcagctccaact

SEQ ID NO: 138561 - DNA, 1871 bp, Homo Sapiens
  misc_feature (151)..(169): n is a, c, g, or t
  misc_feature (209)..(225): n is a, c, g, or t
  misc_feature (329)..(355): n is a, c, g, or t
ggggggacaaccccgtatgcgccaatttccttcgggaggtttaaaggcgaaaggattcctttaaccccaggaagttgaggggctccaggaaactatgttttgtgccattgctttccaggcttggggggacagagcaaagacctttcaaagnnnnnnnnnnnnnnnnnnnggatcacgcttgggtaacacaaggattaccctgtctttcnnnnnnnnnnnnnnnnngtgagggcagagggatcgcttgagcttgggagatcaaggctgtaatgaaccatgcttgcccccactgtactcccactggggtgacagaacgagaccctgccttnnnnnnnnnnnnnnnnnnnnnnnnnnngaaggtttgtgggtcaactgtacacaggtaactgaagctgagaagacagaacagagggtcaggatcttagaaaattctcacagtgagatcagagctgggctgaaaaaactcagaaaaatatcttatcagcgagacagaaaactcaaccatatgggatggcagaagtgggataaaaggaagagagagagccaatgggtaagagatgctctgtgctcgggccaggagcgatctggggtggcaggcttaccacatcagcccttccccactgtgggcagacctgctccggcctcatgatcacagcctccttctgcgagctccttcccaccgccactcaccttgatgggtgtgaggtgctggaagtgacggtgagggtgcgggatcaggcccagggggcagtcccactgggaagcagagtaaactcggatctcgctcttctggtccgtggtcaggagccgggctccatcgggactgaaacaagctgcgttgacaggatgcctgtgcggcagcgagtagaggaagctggctttccctctaacctggcgcaggtcccaaattttcactgtttgatctacggaggctgtggccaggaaccaatcacagcatgggttcagggccacatgcgtcactttctttttgtgcattctgagattccaaagctctttgccgtccatgttcagcaggatcacgttccccacgttgtctcctgtgaccaccattcggctactagcagacacatccaggctacaaaaccagatgttgatggtgtctgagctggcaaaaactcgtagaatgttgcctttaaagtcttgcagcctagttgttccctccattgaggaggcgtaaaactggttggtattgagagggttaaacttcagcccagtgatgctccctccagctccaatccctttgatgaaggtgggtttgtccttgatgccaaaattccagagcatgatatctccccctttggaacccacagccacggtgctggggtgagttgggtgccacgccaaggatgtagccctcctgtcaaagggggcagccttttgtaatatccggtaagaatccagagtgtgcaaaaaggactgctggagcccctgctggacagatggccaggaagctctgcccagcttatgctggtggagggtcctgacgatgctgcggcatggtggcaggatctgtgggccagccagccccacccagaggcagtctgagtcacatcttctgctaggaccggagcccttcgcacagagcttcttggcctcgggctccagctccaggggactcctgctcctcttgttcctggggcgtaatacaatctcggaggtcttctgggtttctgggcgtttcttgggagccatcgcgtcctccgtgtgaaggggtactgtgctctatgcgaagatcatggagggaggattgagaggcctctggggagaaacaaggcggggactactaaactgcggggccacaggtcctcgtgccgaattcaacacccagcctcgtacctagccgtagtttg

SEQ ID NO: 138562 - DNA, 387 bp, Homo Sapiens
  misc_feature (287)..(287): n is a, c, g, or t
  misc_feature (368)..(368): n is a, c, g, or t
atttatgcacttggttcccatttggagcctctggtcattttctgggataagtggtgtctgccgagacatctcccggttgtcagtggtcaggagcagctgagctctagtctgccagctgctctgctctttctgggaaggaggtggcgcccgcccatcagggtgtctccagggctcagcttccggggtggtagagctggggagccccaggggtggggggacagctgggagatggaggtggcacctgctcccctagatcagtacttggctctgagtacaggtgagcagtngggaagaccgatagaatgtctggcagcgcttgccagggtttggaaatgggggcaagatcctggggctgtgtgccctggggnctccctcacctgtcttggt

SEQ ID NO: 138563 - DNA, 375 bp, Homo Sapiens
  misc_feature (359)..(359): n is a, c, g, or t
tgttccaaaatacatattttctttttataccactgtatacattatatataaattacataattccaggtgacataatggaatcaaatgatcatttgataacagagttaatgacaataatcaaagttcacagaataatcagagtgtattttattataccttacgtgattgaaaaatgggttggttaactaaggttagtcttatagttacctatcttgatatcagtcttgaccaatgccatctaaataggacagccatttgtgttgggactgtatcagaaatgaactacattgtttcactggagcttaatctagtaactcagaatgacaaagaaaagaccacactgttcacatcactaagcnctattcttaaccagta

SEQ ID NO: 138564 - DNA, 1268 bp, Homo Sapiens
  misc_feature (78)..(112): n is a, c, g, or t
ctgatagatcactatagggcgctacctctccgcagcgaacgacgagcgcagcgagtcaagtgagcgaggaagcggcgnnnnnnnnnnnnnnnnnnnnnnnnnnnnnnnnnnncagtcgacggtaccggacatatgcccgggaattcggccattacggccgggataggtattaaaaatagcacttttaggaaactgattattgtaaatgtttaattttgtctcaaatatagttggcattggaagtttagcctttacttgaatgtatactgtagatttttaacaaagcgagttctatatttattatgtttagtgtggtttgaaattacctctttcatatgttttaaataaagtgaaatttatgtatgttttgtacatagatacacatgattatgttaagaggctttaagatttaaaagtttcacacaaccataagtatagtatttcatgccagtaaaatttttttagtggtattctgtttacagatgtattaggaccattgatgcattacatttaagaattctctttaatacatctgggcaataaatattgaaaggtattccatgaagctgagttctttagataatcaacactactaacattacatttttgagatttttatgacattagattctatttggtatatgtagaatattataatttttaaaaggactattgatgatggaagaataggggcaagacgacaaaagtacctttgaataaaacaattttgagaaaattggtttaagatattggatgatagaagatatttaagatatctagattggtgatattttccttacaagatgggtaccagtatagtaatatctgtatactaactagggctttgtattgtcaataattttttaataattttttaatgaggtatttaccacgtgaagaaatatgataatataaaaccatcaaattttataattgagatgatactctgggaaaaacatgtcatttcattttcagaaaactcttaagctctcttcagtctctgtaatgtttctgattgcatgtttcttcatgaaaagtatgttgttgttttgatagtaataataataaatgtaggctcagctctttcccaggattttcatcaaaaagctttaagtgcctaaccctgcttgtctctgtacatagaagcctgcacagatccaacccttgctaggtatcatagtttaggcccatttaccttcccctgtactggcagttcagccgcttacatgcactcaccctgtttgtggctattttaaattcatattatt

SEQ ID NO: 138565 - DNA, 1107 bp, Homo Sapiens
gttttccaaatattccatgtaaaatattaaaaaactaattgtttatctgaaattcaaatctaactgggcaatctttatttttatttgctaaatccagcaaccctaaatgtactgaaaaattctacgttggtaattatgggtcatttatgaggcctccttagcattttcctattaaatgcttgtcacatttaccatagttttatttatattacatattattacataaaacgctagtttgagagacttagaacattcacttttatcatatatgaatttgataatccttttattcaatattaaactttaaaatttgtaccacattattaaagtattacttttactcacagtagtattatacatagacttaacacaatttttaaaaatgtgtttacttaaaacaatataattctcctttacaaaagcaactttatataaaatgtttggcttaagactgtcattgctattatgcctttgaatgaaattccactctttcgcctccattgtccagaaacaggcacatatcagcttgttttctttaatgaatattctgtaacaagttcctgaagttttctaattctttcacacttgtagaaattcttccaaatgcgttgaataatgatactatttcttgtctggttagatggaattcataactaggtccactttctggcatatttgctatcaatttctcagaaaataagatcttcagagcagtgcccaaaccctgagtctgaagctttccccacagacgacatttaaaacaaccaacacaatccataattcttgaaatatttctaaaatgcagtcgaaagtcctcctttagtttgtgtgcttcttttttatccccagcaaaaaatgaattctcatcaaaatgcaaaggaaatgacttgatttcatgaagtatttccagaagtaaattttgttttcctcatcctgaattttatttccagtaaagagttgaaaatctgggcgctcgaagaatggtacactttggataaacccttagttctattaagtagagaatacagttcttaagcttcttggacttctcttcagtcaaattcatcaatcgctgttgaattctgtatgttggtcccattcttttct

SEQ ID NO: 138566 - DNA, 436 bp, Homo Sapiens
tgccatatataaaactgtttatttctattgaatttatatttacaaacgtggaaaaggatacagatgagaagatccaggagaagtggggagagggacaggaaggatgcatttgaattaggtcatgagcatctcagggcaggcaccctgtcttttagactttgcatacccaacaaatggcacagatgtgcacatactatatacacttaagcagttgttgagtgaattgatggtttagaaggacagacaaggaaccttaaaattggggatcagtattatggtgcagtggaaagaaccttggcccgtgagttgggaaaattaaattattggcctacctctggcctagaactcactcttttgcactacactttatccatacaatgaggagataaaacaaaatgagctctaagatctcttccaactctgacctcgtgccgaa

SEQ ID NO: 138567 - DNA, 456 bp, Homo Sapiens
caatatttataacatggccagtgactcttttccatgtgctactggggcaggctggggactggacacatgcccagcagagggcactagtgtctcatggcaggcctgcttccctttgtgtggctagagcccacctagccggttctcctttccccagagttctgatctcatctcctccaaaacagatgcagtgccccaaagatttcttttctatccccatagcccaggtcagattaaatggccaccctagccccttaagcttcagaaagaggggacaaagtcaggcctggtgcatcaagcttttgttgagagggggagagtctgaggtttatgtacagtaagaggaaagggaggtggtacatgtacaaaaaagtgggcccccacattcccttccaggggcagaggagaaacgggaaggtaagcaaatagccaagaccaccatgctccttgtcccctgcc

SEQ ID NO: 138568 - DNA, 170 bp, Homo Sapiens
atttttcaaaattagcaaatgagatgcaagacacttcacagaagaaatcattggtcaatatacatggtaaaatattctcacctttactaataacaggaatacctattatcatatctaaatgtttcacctatcagtttggcaaagatttgtttttaagaacacaatccttg

SEQ ID NO: 138569 - DNA, 668 bp, Homo Sapiens
  misc_feature (16)..(16): n is a, c, g, or t
tttttgatcacctttntgtgccattaaacttgtacagaaaatgtttttatggccattttcaaagggagaaagtttaaaatggaaacagcccaccctttctgccctatagctgtagttagaattgagtacctgtagcaaaacagctgtaattggtggttgtagtgttagaggtgttagcttgctagtgactagctttggagagtaaatgcatggtattgtacatcacatttcttaactcgttttaacctctgaaaagaatatattcttctttgtagtccttcttcccacccccttgccctctccctctccctgctcccagttgtcttacagttgtaaatatctgatttgaggcccaataactcttgccaagtaaagtcagcaaacaacaaacaaaccaaaatgtggggaaaaggcatttctcaaccatctctcagcagttattgatcatttcttaaggaacagcattgtgatcaaagactcaactttacgtaaaaatcagtggtaaattggggttgtatttggccatttgattacatttcaggattgaatagttttcagaatcacatgtaatccaaagacagtaggtagtgatgtcccttatccctgcagctgttttaagatagagacctcagaagactctgcttgaccgatgaccaataattatttga

SEQ ID NO: 138570 - DNA, 552 bp, Homo Sapiens
atgtttgaaaggtatgtattttattactcttgcaggtattttggacaaaaatattgaccagctaattatgctcttccacacatcatgttcactgagtttactaccacagttttagtgcaacaaaatatctttgaaaagccactctacagtaattatggcaaggctcattaatatgcagaggtaaagatttcatttgtatagaaacttagaaaataatgtttgaaaaggaaagccattccatcaggctaaatattttttgtatattaaaaaatatatataaatatttcttgaattagttttatagtcaattttgatgcagtgtcattgagtggtgataaattttgagaggtatatgttaaacaaacatcatacttgagattatagtcttaggtaaacatttaatacacaatgtcaaggtagttccctttttaaaaaatttttgtaccaagtaagtcatacatttaatgttgacatttcttcttacctgtgtgcctcacaccaataaagtactctgcattaaaatttaaatcttgagacagtagtacagcattg

SEQ ID NO: 138571 - DNA, 834 bp, Homo Sapiens
ttttttttaaacaataaacagaatttattagctcatataacaaaaaaagtccagaggtaaggccaatctcaagcaaggcttgatcctgtacttaaacaatttcaccaaggacttgatctctttctgcctctcaactctcccttcagtggtgtcagcttcacgtgattcctggtcatgatcccaaggcccaaggtggtcatcataaagacccaggaatactactacctttttcacattcaacaggggaattaaaacagcttctacccagcattcccataagtcttgaaattccctctggcttcattgtcttaactcacaagatcatacctaacccagtcaccatagctggaaagatggaaggtgtcattggcttagtccaggacatgtattccacccctggagaggctctggcagatcatatgaattcccaaacagaaatggggggttgctgggaaaggaaatggaggaatgaatgtggatgcaatcagcaagacctaccacttcccccattttatggatgggaaactgagactggagatgggaaaagctttgtccaagatggcagataagagctgggactacaacctggcctttcagctgacgactctacattatttccactctactttatccccaccttgttcagaccaactcacccaatattgagtggtgataaataggaagtcagacgaatcaatttctccctatagtgaaatgaacccctttggagtcatcacatttcagatacctccaatgggtttccgagcaagtcagcagaaaacaaacctgtgtcccaagaattcttgcagtcgtaacatcaacctcagcacttct

SEQ ID NO: 138572 - DNA, 415 bp, Homo Sapiens
  misc_feature (291)..(302): n is a, c, g, or t
cccctccctttctaatttaaatagacaaattaagcaaaagtgtgtgttcacaaccaaatgttgatgcccttatctactgataatatcctctcaatgttcactgaggcatagaaattatttcagagtagaaattgcagcatgaggataaactcacctctttgttctgaaaatagaactttatcactatgctttccggtggttttcccttttacaatcgaaatcttgtgcctcccaagtgcattggaaaatgacaaaagcctgtctctccaaattcctatttaacagtttgannnnnnnnnnnnaatcaccatctttcaaatcttagctcaactctcaccaagtgaaaattggctacttgggagaaagttaactttctatggtgggatggtgaaggatgagggacagtttacatagg

SEQ ID NO: 138573 - DNA, 683 bp, Homo Sapiens
ttaaaagtctcatcttcaatttcagactctgaatccccttcttcagcatcactcccctcaccctcaggctccaggaaagaccagccaccttgttcgaagaagccctcagggtcatcaacaatggtcttcatgattttagtccagttgagggactgtactccttctgtgtatttcaggtcgcaggaattcaaccattccttgatggggtcaagagaggctacaggaatggcgttgatcatggtcactttcttgctgtagtccttgtagacgattaccatatcaaagttcttcaggtgaaactggacccgctcaaagtggatcagctctacctcatccaatgtcaccacaaaaggtggccattccgtagcatttaccagcgcactactagtgggctgaaggaggcaggtactcctatagggagctccgttaaatcccaagtccctaaaaggcacttcaaattccagttcctccttagttagagcctctactttctcaatgaaatttttaaaggctgttttcagtttgtgcctcatttctcgttccatctgctcagcatagaggtcatctcggtcatgcatatgctgatgtttccccaagtccgtggttatctctcccacttctgtgtagaactgcacatccgtgtgccgcttcttcccaaacatgatggcattcttgaggtgaaa

SEQ ID NO: 138574 - DNA, 1383 bp, Homo Sapiens
ccaccctgtacgctatcatcggtggagatatctttgaaaatgtggactatgttcagtttggtgaggattcatcaacctccagtatgatgtctgtgaactttgatgttcaatcaaatcagagtgatatcaatgattcggtcaagtcttctcccgtagcccattctattctctggatttggggcagggactctgatgcatatagggacaaacagcatattctatggcctaaaagagcagattgtacagaaagctaccctagagtccctgttggtggggaattgccaacgtattttctgcctccggaaaacaaaggactcaggatccacgaactcagcagtgatgattattctacagaagaagaggcccaaacccctgactgttccataactgacttcagaaaaagccacactctgtcctacttagtcaaagaattagaggttcgcatggatctgaaagccaaaatgccagatgaccatgcacgaaaaattttgctttcccgtattaataactatactatcccagaagaagaaattgggtctttcttatttcatgctattaataagccaaatgctcctatctggctcatactcaatgaagctggactatactggagagcagtaggaaatagcacttttgctattgcctgtcttcagagggctttgaatttagctccacttcaataccaagatgttcctcttgtcaacttggccaaccttttgattcattacggccttcatcttgatgccactaagctgctacttcaagctttggccatcaatagctctgagcctctgacctttttgagcctgggaaatgcttaccttgctctgaagaatatcagtggggcacttgaggcctttagacaggccttgaaattaaccaccaaatgtcctgagtgtgaaaacagcctgaagttgatccgctgtatgcagttttatccttttctgtacaacatcacttcttctgtttgcagtggtaattgtcatgagaaaaccctggacaacagccatgacaaacagaaatattttgacaactcacagtcactggatgctgctgaagaagagccctctgagagaggaacagaggaggaccctgtattctctgttgagaattcagggagggactcagatgcccttagacttgaaagtacggtggttgaggagagcaatggttctgatgagatggagaattcagatgaaaccaaaatgtcagaagaaatactggctttggtggatgaatttcaacaggcatggcctttggaaggctttggggggtgcactagagatgaaagggcggcgtcttaattattcctttctgtacccctagtgtcttttatggttttcagccccttataacaggtgctcaataaatatttttaaaatg

SEQ ID NO: 138575 - DNA, 761 bp, Homo Sapiens
  misc_feature (69)..(131): n is a, c, g, or t
  misc_feature (547)..(580): n is a, c, g, or t
gcattttgggccgtgaaagtaggtttttaaacccctcattttctcaagatgagaaaaacaggagactcnnnnnnnnnnnnnnnnnnnnnnnnnnnnnnnnnnnnnnnnnnnnnnnnnnnnnnnnnnnnnnntgtttgactctaacgtgtatgttcccaatcaacaagctatttaaagctacaaaaaaatttaaagctctgtttattaatatccttcgtaagtaccaccttttgggtgtgggccctttacttacatcaaatccccaagaaaagagcagaactgtcttgtctgggaagggttttctgaatgagttataatggaataggcaggaaggagaactttagttctgtatagcgctttttatattataggaatttacgaacagtagaaaactgtttgaggtacaggcaggggtttagattgagattttaacaaaacagaaaggaacagttttggaagagtttcaaattaactctgtttaaattaataacttaaataagccataattttcacaaaaaatcttaattttcttttacatttaataatnnnnnnnnnnnnnnnnnnnnnnnnnnnnnnnnnnaaggggctgagaaccataaaagacactaggggtacagaaaggaataattaagacggcctgctcttgagctcacagtctagtaaggaaggtaaacataaacaaatcattacaatacaacaggaaaagagctagagcgaagatatagaacaattgcacagaggaaagagtaactaattctgcc

SEQ ID NO: 138576 - DNA, 566 bp, Homo Sapiens
catttgaaaaattttattgagcacctgttataaggggctgagaaccataaaagacactaggggtacagaaaggaataattaagacggcctgctcttgagctcacagtctagtaaggaaggtaaacataaacaaatcattacaatacaacaggaaaagagctagagcgaagatatagaacaattgcacagaggaaagagtaactaattctgcctgaaggtaacaaggaagagatggcacttgattttgaagtttaaggatgagtgatattttagcacggcagagggcagagggggcacagggcattccaggcagagggaatagcatgtgcaaaggcactgaggtaaaaacatgagcatggttggttcagagaatggtgttgaagggtacacagaggcgggctgtaaagggtcttgtacaccacactaggaagtttgaattttatcctgtaggcaatgggaaggcttcaagcccacatctctccatctggttcacaaggatatcataagaggctctgttaaatgccttgctgaaatccagttacattatgtctatggcactttcctgg

SEQ ID NO: 138577 - DNA, 640 bp, Homo Sapiens
ttttgatatttacagtatactttattcaaagcatttcagttaaaattattttgggttcaaatacatgaacatataattatatataaaatactatagttctcaatagtttacagtgacatcttttttagaattagctgcttataatttgagtgtaaatgtattacagaaagctgctaaattgtttatatttctacttatttcaatttagctattagatatttagaacactcataagcccacctacagtatagttattatactttaaatatttatattcaataggggaatcaatacaatacaaaagatatttgaacagctagtcctttgtaacacccccccgctgctgccgagagggctagataagggggtcttacctatttcctctgtaccacactcacattttaccagagtccatatacagggccagtgtggagtcacttcatgcaaatgagatggtactttcagtttccccaaaaagatgactgcgaaatccagattacaccccaacgttatgcctcaccttggagacctattctaatgaatgtcaattagtgaatgttgactaacttgtggttagcatgactgcaaaaaaatgaggcctgcttcagtgcaatcactaaagacaggagtgaggctcttg

SEQ ID NO: 138578 - DNA, 596 bp, Homo Sapiens
  misc_feature (574)..(574): n is a, c, g, or t
tgggttgcagtgtttttaatcagagctaacagggtgagaggagttaaaaaaccaagttggcattttctgtagagcagcaggcatcaatttcgcatcacgatagagaatcaacactgagtccactctcaggctgttgcccaacccacccttcagcgctggggtatggggccagctgcacacttgagcccctcatctgtcaccagtgcccacatggtccacatctcgagggggctgaggcggtgaaccagcaggagccccctatacaggcaggggtctaaggggtccaggggccgccggattccaaatgtcttgaagccagcatggtgcatagggctcagccccagcctcctcaggcacatacccacaaagacatcatcaatggggaagagttcagcatcttccatgatagcctggaggcgccgcactgtggctctggacatgacatatcctcccccaccagcatagggtgggtagtgggtggccctgtacattgagggtgggatgaagtatttgaccttagtgttcctgttgggcagggcttggcggatgacatctcccaccaggaggtcctggntgggtcccagccatccaggaac

SEQ ID NO: 138579 - DNA, 922 bp, Homo Sapiens
  misc_feature (68)..(127): n is a, c, g, or t
  misc_feature (193)..(251): n is a, c, g, or t
aaatgtaccacagtttaatagttttgtgatagttcaataactgtcatttgctttaatctacagaattnnnnnnnnnnnnnnnnnnnnnnnnnnnnnnnnnnnnnnnnnnnnnnnnnnnnnnnnnnnngagatataaaacaaactgtacactattacaaagtagtggttctctgtatgtctatgtgtatatatnnnnnnnnnnnnnnnnnnnnnnnnnnnnnnnnnnnnnnnnnnnnnnnnnnnnnnnnnnncacatatatttaattttaaagttaatcaaatggttatcaaaaattaatatacaacaaagattcctgggaaggtaatgcttatataaaataaggccatgtttctaaaaatccctcaaatcagtccaagataagatttttaatgaagaacataaaggttaaagaaattctttctctccaggttagctgtttttccctacttgttttcttcttgctttttcctgttgttgtccatattaaacttctttgtgctcttaaaggcccgccatcatgtgaagtggccacgccccttatggacaaagtcaagccaccaactcccaaatgtatcagtgcagctgcttcagaggaaatcactgaaaaataaagaaaaaccatccaatgcatggctgcatccagtgtacctgtaatcctgaagaaaaggtcctaattccttccatgctgaaatgctagctttggtttcagagagagactttattgcaactgtgaccaccgtcactggtgagcactgctgttcggcccccagcggacttaaaagactggaatgtggtagtggcggtcgttctcggtcagcagggagatctccggccagtccctgagaggctcctctgggtagcagacttcaaagtctctggagttaaacttgaacagtctgaacacttttatctttacttcaa

SEQ ID NO: 138580 - DNA, 1130 bp, Homo Sapiens
  misc_feature (1092)..(1092): n is a, c, g, or t
  misc_feature (1103)..(1103): n is a, c, g, or t
ctctacccttccgaaggatccagtattgaggaaaggtagaggaagaacctacaggctgatgcacaggcttaggttcttcctctacccttccgaaggatccagtattgaggaaagaaaaactgcaggatctgatgactcagattcaaggaacttgtaactttatgcaagagtctgttcttgactttgacaaaccttcaagtgcaattccaacgtcacaaccgccttcagctactccaggtagccccgtagcatctaaagaacaaaatctgtccagtcaaagtgattttcttcaagagccgttacaggcagcaattcccccaggcaagcaaccgtcttcactagcttctccaaatcctcccatggcaaagggctctgaacagggcttccagtcacctccagcaagtagtagttcagtaaccattaacacagcaccctttcaagccatgcagacagtatttaacgttaatgcacctctgcctccacgaaaagaacaagaaataaaagaatccccttattcacctggctacaatcaaagttttaccacagcaagtacacaaacaccaccccagtgccaactgccatctatacatgtagaacaaactgtccattctcaagagactgcagcaaattatcatcctgatggaactattcaagtaagcaatggtagccttgccttttacccagcacagacgaatgtgtttcccagacctactcagccatttgtcaatagccggggatctgttagaggatgtactcgtggtgggagattaataaccaattcctatcggtcccctggtggttataaaggttttgatacttatagaggactcccttcaatttccaactggaaattatagccagttggagttccaagctagagagtattctggagcaccttattcccaaagggataatttccagcagtgttataagcgaggagggacatctggtggtccacgagcaaattcgagagcagggtggagtgattcttctcaggtgagcagcccagaaagagacaacgaaacctttaacagtggtgactctggacaaggagactcccgtagcatgacccctgtggatgtgccagtgacnaatccagcagncaccatactgccgtacacgtctaacct

SEQ ID NO: 138581 - DNA, 710 bp, Homo Sapiens
tttttaaattaaaataaatttttattcaaagcatcttttaaaattacagcatgtttattcttatgctgttaactctgccaaactacaacttagccatatgaagcataaaacacttcaaaaatttgaatgtaaaccattttttaaaacaaaaagcagtcttaacacacctcaaattttagataccaatgtatttttccaagtatatagcttatatcaaaaagaacattttaaatgtttctaaatagttgtgataatttcttaaactgttgcaattatacaaataaaaaatgtttatgaaaaaactattagagttgacaaaagctgactggagaaacaaggaaaaacccttacttttgaaggccttaaatgttatcatctgtgaattggcaaatatttgtatttgaaaaattcttactacccttccttctttaggttaaagttgatcaaagttcaaatttcccaagactgatgagtgttgtttttagttcattaaatcacatatttgagagcaaaaattctaggaggaaatgctgaaacataaaccaagataattcagatgctatagtctctcttaccagcttataagtgctccaaattaaaattctatataccacattacaaaaaaattcttagaccattacaaatataaattctcttattacaaaaaaatccctaaagatttgtaatttactgtacagaggaattacatt

SEQ ID NO: 138582 - DNA, 482 bp, Homo Sapiens
gtaatttaaagaaatttattctttaaaaatattttcatgtacactttcatgactattttgaggggaacaaggagattatcctacagtcaatattagcttaaaaacataagtgacatgtataacaatacattttggaaataactggcataataaaaatgcaaatgtttgtagtgatttaaggctgcaagatatttaagatctcagattaaatgaacccacattagagtaatgcaaaccaaaacttgcaattttatgatttcttcatactataacccttaatactatgcataaagaagttaccccattcccaagtcataactagaaaggacaaagggaaagtctgtcagaaaaaacagtgataaatttgaatgcatagtacaatatgcatcctcctcctacttcaatgtttaacatactgacaacaaccccatttaataaaagagaaccatgagttactatttaagcaaaaattatttttatgg

SEQ ID NO: 138583 - DNA, 781 bp, Homo Sapiens
  misc_feature (289)..(352): n is a, c, g, or t
  misc_feature (730)..(730): n is a, c, g, or t
  misc_feature (739)..(739): n is a, c, g, or t
tcactgggaaagtcagagaaatttattctttagtatcaaatcaaaccgaggcttttgccatctttggaagaaaagattattcataacccaatgcacaaaggtttaatttgagctgctgcatacgtcaccaaggggacactaggtgaggccttcaaatgattactacaagtctgtggcctgaggttattttaaaattaacaatttcgcatatagcctatatgacaacagagtgtttatattttatacaaatatctgctaaacatgcacacatatactcacacacacatannnnnnnnnnnnnnnnnnnnnnnnnnnnnnnnnnnnnnnnnnnnnnnnnnnnnnnnnnnnnnnnggctttattccacagggcacagtggctgtatagcctcaaaattttaatataaaaaagtgtgtgcatatatacacacacaaacatgcacaaattatttaacttattttgggttaaaatatattttgaatgacaatatatggagtagcaaaaacagttaaaatgacttctctttaagagttatccagaaaattaattgtattaggtcaaaatgccctttatttcacaggtctgtaagttaaggctatggttgctctattaccatatgccaatcaatactttaactgcattctgtgacagactgttaatatgaggactgcagacaccaagtggctctcctttgcagtgtttatgaattacatgcatttgagctatcaattnttttttctnttttctcaggtgggagtgaagctgacagtacagtagattttg

SEQ ID NO: 138584 - DNA, 145 bp, Homo Sapiens
tttttgtatctgaaagacaaaaataagaattgaaagagaaaacatctccaggtgaatatgtaaatgaagctattataactaagaggaaaaaacgatgatgattattcaaaagacttagcaataggccgggcgtggtggctcacac

SEQ ID NO: 138585 - DNA, 1719 bp, Homo Sapiens
  misc_feature (40)..(40): n is a, c, g, or t
  misc_feature (66)..(82): n is a, c, g, or t
cagtgttcctttttgaaaccaacaacacatctttaatacntacacacacacacatctctacctgtnnnnnnnnnnnnnnnnngtgtaacttcacagatagtacctaatcttcaagcttaaaatttaagttaaaattaatctctattttgtgggcaccctttagtgaactaaaatctacatgaaaccttttggcttttgtgtagcaggaaatacccacgttttgggtcaattagtgcagatgggagcagcagaggagctacaccagacagcaaagcaagactagagcaaacgagaaggaccagcccctagcccctctgtgctcccgggaggacctgggctgttttcacctaattacacccaactttgcttaaaagtcgtataatcagacactattctcagcacaagtttgataaatatacaaaaaccaggttcaatttcatcgtgagtttctttccattctgatccttgtatccaattcaatagttacatccctctttatcatatagtatccaggtttaatgtctgtgcttgtttgtattttaggacagaggcgggctttcagattcagaatcaactgcactcttgaaaagtagggatggaagtttttaagccactctcatccctcccaatagtttgaaataaatgttgtgtataaaaaaaggcaaaccaccaaaacaggtcagcagaccaatgccagctcagcctagggaaagcacatggacaattcttgtaacaacatttaaaatacaaactccaaggtgaaacttgctgggagggctcaaatacaccaaaaatgttgtccctgaggttttatttggctgtttaattgttctgttttggtttgttgttgaggattagatacaatttaaaaaaagaaattttggtgacttcctttatcttgtcagaaagctttagaatactactgactgccctaagaataaagatttctaagccatgagtccatttgaaacgattcctttggtttcctttgcttaacatcccatggaatactgccaagaaaatctctagatggaggagccaattgctgtggtctcttcagtctattggctcggcctccatctctgtccctgccttccacacacttccaagaccacaggggaaggaggagccagaagcaaccgctttgcccattcactccaccctgaagaggcttcccttctcttcccacaggcgaatgaggtatttctatgactagtcagtatcttccccttctgccctttaactacactgaggccaattctgacaagacttgcacatctatatacataacaaattaacatataaatacattacgtacaactgaccattcattacatgtcaagatgaagaagcagatctactcaagaactaaataaaatttcaaatataaattaaaatgaaaatacagtgattccacttttgcaggaaaaatttgtaaaacaaactaaaaactcccccttccccaaaggtccattgcttgtggataacatgtgcgccccgctgagatgcgacagctggcccaactgcaggatgcgtcaactcctggctttggtttcattgcccagactcaggattccttgattccaggaatggcaaatgctggaatccacagggcaaatgcttgtagatgaggttaaagaggggctgctgcgtggatatccatggattttcctccactgtcacccctccaccctccccacgtctgcctataggataatc

SEQ ID NO: 138586 - DNA, 402 bp, Homo Sapiens
ttttaaaatttaaaataaaattttattttatcttatactcaagttcagacaatagcatgtggtgtacattcaaaatttttgacaggtacagagcacattaaaaaatgaagacatgatcaaggagatgtaagagacaaatagacaacaacattctccctgaatctggaaaaaagcaagcaataagatcacgaaaggcagctgtaaaacaggattattctgcatgtgttgcccacaactagggcaaggttatctctcatcacaagtacaaagccattgatgttagtgtgtaacagagagaaaacagaggatttgtacagctgaggaaataaatggcagatgttacacaggaagcaatataacatggtcattaagtaactgtattcaaccctcaaatttaatttt

SEQ ID NO: 138587 - DNA, 763 bp, Homo Sapiens
tttaaaggcatgaattgtttatgtgttacatgagaccacggtttatattgttggttatgaacgtgcaggtatagctgaaaactgagacattttgtgaaaattaaaaatgctgctcttttgtaatttttatcggttggcttcatgcattatcggtttagtgatgctgaatcagattgctttattatgggaagatctctctgccagtgtctttattaatggtcaaggtcaattcttctggactgaaattttccacggacagatacaagtcagttgggttagaagagggaactccatataggctctggttttcctaacggtttgcatgactgcattcatgtgcaagctaagttattcctggtcatggtcaatgtctgcatcccccgtgatgactattcgcttctcaattcttgtctctgaaatgccccctttcacagttttggtgatgtgcgtagtggtggtggtactggtggtttcagatgtgatcgtctgtgcactcatcagcacgcctggctccagatctgtgcctggatcgacctgtgatgattcatatgtgatggttttggtttcggtgtgaactactggcacttccttcgtggaaatttctagctttactcctcccggtgaaacactgccaaaactgatggtttccgtcttcaccgttgaggactcaaaatgaggtttttgttccaaagtttctgaaatgtggatggctgcaatccggacgcgtgggtcgacgatatcgcaggaattccggaccggtacc

SEQ ID NO: 138588 - DNA, 1386 bp, Homo Sapiens
ttttttttcagtgcatttgccatttttatttcgctatgcagaaacatacattcaccatgggctgtgatgcaggtgatcgtgtaatggagaatctctctttttgaaggctatttataactaacactaaatagttttaattacagtggaaattctgtacagtttaaggcttggctctgaactagaatgtaaatatggaccagatttgaaaataaaacactttcttttcaagtaaaagaagaaaaatcaattaaaaaatacacggcacggaaaaagtaactaagaaaacaaagccacaggaagcccagcagtttctcctgaagtgaaatttcataatattgtaaactaacaaaaatacaggttttcttcccaaaataatgacaatttaagctctctggattgaacacagaccaaagcaaacaacaaggaagaaatcgcattaatatgctaaaatcagtactaccttataacaaattaaatgagatacacaaagcaagattggaagcattacatatttccagagggtcagagagtcattactgtttatgggtgagagtaataaaaccagatgaaacaagtacaagttgtttactgaataaacttggttattggcacatctaatctgaggaaaatctgacacaccggacggacctagacagcttctagcatttgagggtaatcttcatttattgtaaatataaggttacctaagaaattgcaattttgtttagactttaataataataaactatgaaaggcatgaattgtttatgtgttacatgagaccacggtttatattgttggttatgaacgtgcaggtatagctgaaaactgagacattttgtgaaaattaaaaatgctgctcttttgtaattttatcgttgcttcatgcattatcggtttagtgatgctgaatcagattgctttattatgggaagatctctctgccagtgtctttattaatggtcaaggtcaattcttctggactgaaattttccacggacagatacaagtcagttgggttagaagagggaactccatataggctctggttttcctaacggtttgcatgactgcattcatgtgcaagctaagttattcctctggtcaatcctctccatcttctggtgtgatctctgtctctttatggaccactactttggtcactgacatgtcagggtgctgctctttggcctctttaattgcctgagccagcgcctggtcatggtcaatgtctgcatcccccgtgatgactattcgcttctcaattcttgtctctgaaatgccccctttcacagttttggtgatgtgcgtagtggtggtggtactggtggtttcagatgtgatcgtctgtgcactcatcagcacgcctggctccagatctgtgcc

SEQ ID NO: 138589 - DNA, 1343 bp, Homo Sapiens
aacctttcaaaatatttttatcattgtgaattggtaattgtattacagtcagtatcctttggggaaaaaagtctcaaaatttaacttcccttgttgaagaagctattttacagtgccatattattcattaagcattaattaaagaacagcaggataattagtaggatcatcaatattacaagaaacattagatcgctcaagaaggaaataatttaactagaaacactttaaattttctcaagtagtgcagctgatagattagggagaaaaaccaaccaactccgcttaggggattatagactttaaatcattgtttagaaataggtacttctgtatttattttgttaagttaaaataatagggctcaattagggctgagtaactccctagaggcacagttgtaatagctggtctcagagaaggcaaaccctcttagttctcatcagaagggaaatgatctgtcattagtcctaggtaactgattaatatctcacagtggactggaaatcgctgaatgttctctgcaagttttatactcaaggtgtgaattcataagcaaccatcctatttgaaagttagccattgcttagggttctctattagaatcttatcaagcacattctcagttatgcctctcagcaacattttaggaacaacattggtgagtatatgagaatagccgtgacctccatatttcaatcagccgggtgtttcgtatgtatgtcatgtgctaccagaattcgatcttcacagccctcttccaccaggagacgcacccttctaattcttttgttatcatcaggcatgtcaatatctgggccgagttggtaatgaagtagttcagtaccaaagagatcatattccaagtagcagccaagctgagcaaactccaagagctctttcttatcaagaatagtcctatccaggtgtgacatgactgttttggagatgtctgcgcctgcttcttgcaatattcggataatctgaaatggtgccctggagctccgtccaggatggataataacaggacaaccaagctgagcctgggcatgagctgtggcctggagaacctttctttcactctcagtcaaaggccaggagcaaccaatttctcccaataatgccacacttgatactggttccatcagctccatggagaatttcattcataaggacatcggtaagctgtagtcgcagctactcaggaagctcaggaggctgaggcaggaagttcgcttgagctcaggagatcgaggctgcagtgagctgtgatcgcgccaaatgcactctagcctgggaagcagagccagacctgaatctcggtacaacgcgctgccttctcc

SEQ ID NO: 138590 - DNA, 1010 bp, Homo Sapiens
  misc_feature (334)..(334): n is a, c, g, or t
aagatccttatttcaaaggtagcaggcccaagggtgaggcaaatctcccaagaggtttttttcttattcaaggaatagtccctatcccaggggggacaatgactgttttggaagatgttctgccccctccttcttgcaataatcggattaatcggaaatgggtgccctggagctccgtccagggatggataataacaggccaaccaagttgagcctgggcatgagctgtggcctgggagaacctttctttcactctcagtcaaaggccaggagcaaccaatttctccaataatgccacacttgatactggttcccatcagctccatggagaatntcattcataaggacatcggtaagctgctccactgacatggccctggtctctgaggagtgagttgcatccacataaaacccggctccagatatgatatggacgccagtctcttctgcaagcctcttcaacgtctgtgtgtctcggctaatcccagtggttgtgttttccaccaaagcccctccaccattagctttaaaatacaacagttcttcctttatggcttctgtctcctgatttaattgaaggttttctttatgggaataggcgtttttctgaatccaatataaatttttcatcacgataggttctttggaaatagcttcctggcacgggggaggtggacagtaacagcagtcaaaggtcatggccaggtgttcatgggtcagggtacggcccagtttgcttggctctacaaggcccaaaacggtttggacttttccacttaaggaagacatttctgatggtaccaccaagagatgttctaaaaagaggatttcttttttctgtagtcgcagctactcaggaagctcaggaggctgaggcaggaagttcgcttgagctcaggaggtcgaggctgcagtgagctgtgatcgcgccaaatgcactctagcctgggaagcagagccagaccctgaatctcgggtaaaacgcgctgccttctccctgggaacttccc

SEQ ID NO: 138591 - DNA, 404 bp, Homo Sapiens
ctcagatggttttgtcatactaaaactaaatgtggactttgaagaattctcatctttggtttgctctgaattcccaagggaaaacactggttgacactttggctctccattgtcagctttcttcccaaaaactagggaagtagaagtgacaggctcttgctgtttctcttctgtccttcccaaaacaaacactgagccagatgccagagaggcaggctccacgttgccaaaagagaatcctcctttgttggcaggcatttcttcttttttagcttctgatgtctaacatgtgaaaggagccactgaagcactcttggtttctatggttccaaggttgaagctgctcttgttctcagagtcactatggtgtttgggaacaggtggagatcctgctagagtcaccc

SEQ ID NO: 138592 - DNA, 822 bp, Homo Sapiens
gtttctggtactgcaagcaggtgatttgttcttggtccctctcgtcgctttaattctgttctgttctggttcaccgactacgaacagctttcccctctgtcattgtgaacattctgtgcagatgaacggtgaactctgacagttgtacttggacgattaccatgtgatttagggtcactgtactgagaagattggcgttttctaggtcctggtgagggtcttcgttcaacaggtacaggcatggaccagacttctccctcagaagctggaaggtcatgctgtgccgctttcaagggagtgctgtctagtttaaagctctctagtgttttcatgatatctttaacatgtttagcttccacatttatttcctgccaaacctgttgccatttctgctggaggtatgtatctttgactgagtacagatacttgttcatttggtcaagaactccctgataatagaccatcgcagagtcatagtttcccagcaatgcatattcacgagccaattttacattctcactaatcataagaagactcatgttcaactgtaagctgcggcggcccaagctcctcgggaaaccgcccaacgccaggcacaggggattggcggagtggagatcccggcagcgaggaaggagggcctgacccagtccagcccactttgctctccgctcacggccccagtactgcccagttcaatcgtcaacaccacctgccggcgcggctcactgctcgcacgagaatattgaagacaaacccgccagggtcacttccggtgccggggacgacctcggcgactctggcgcacgcggggcgtcgccc

SEQ ID NO: 138593 - DNA, 877 bp, Homo Sapiens
ttttacaaacaccaatatgattttattcaaacacaggcaagaacaatgaccttcagagctgggtaaaaataataagttaaaagcatggttagaattttagacaatcagataaaaagtttgaaggaagtgatttccccttcctctcctaattgattaattcaacacagcataaaaataatttgtatctataaaatatccttgttcccacacaaatgaactggaggtggccctaggatttccttgactatgcacaatgcacacaatctacatgtccctcctccccaacttttaaggcaaaaatggtcctgcatcttcaggcagagggtgggctcatgccagcagtcagctgtgtcaaggacactggggggcgtttctccaccgaaagatgcctgcttgggtcccacttgggcgcggattccattttatttctagcctttgcctcaccacagaaaaaaggagctgaaattctggcaagtggacactggactggtttggggcactcctccagtctgggctgaccgggtctcttgaggcatccgtggcctaggcaagtggtggtttcaggactgtgacagccctgaaggagccagacctggtgcctcctgcaagctggacaaagctgacggagggtgggcaggtgtctccttccccccagcccctcaggctgcgtcagtctttctgggagtactgagaagaaaatatccgtgcaatcctgagagtttcttcctcaggcaggttgagggggagcgagttaggtctggggcgacaaggcctttgggagagagctcccccttgtggcttcgctcttgtcctgatctgttgtggctgctggtggcaaagttgctgagagtgaaagcatccgcagggaagcctccaa

SEQ ID NO: 138594 - DNA, 971 bp, Homo Sapiens
  misc_feature (700)..(700): n is a, c, g, or t
  misc_feature (756)..(756): n is a, c, g, or t
  misc_feature (843)..(843): n is a, c, g, or t
  misc_feature (907)..(907): n is a, c, g, or t
ttttttttagtttctaaaaatattgttttattaaataactgttaaataggatttttacaaaataaatggcatagaaaagggtaaaaatgtttatgttcccagaactttctatgccttttcaacagaaaggaaaaggcacagaaagttgtcagctgctattacttctggagagctgccacaactggacggtgttggagtatcaccagttctctctctcatgggaaagaaggggatcaacactttgtagagaggtagcacgtcttcaggtaacagctgctacacacagctggcttcaactttagctcccctgttgatgactgtcagcttcaaggtgtagcatcccatggcactcaggaagaattaaggagctgcacgaggttttcaagacatttcaaataataggcatttagagggtttgcttctgagtttgggaaagttttctttgctaaggagtatgcttcatccactcttctttttactgatgggcttttcaaagctgtttttgccttctgataattgtaaatcagagcccaaagggcagctgctccaatcctctgagcattttgattctcactttccagacaggcagcaagcacagtaatgactttttcattagccaggatcttgggtttatttgcaggactgaagcaaacattatgaaagataagaagaggcaataaagggctgctcttgggcttgnatttgctcatctctgttagtaagtctagacagccatcaagcctcagaatcatttgntgcccatcttctccagatgatatattcaggagtaacttcaaccaaagaatagtccgattactttagatgtttatttcctcccttttncaatgcttaaaaagaggaagttctgtaaggaagttactctttctggaattactccctttacagncatggcaacaaggcccaggtttgaaagaaagcctaaaaacccatctgcttggacacgtggttgt

SEQ ID NO: 138595 - DNA, 555 bp, Homo Sapiens
  misc_feature (191)..(191): n is a, c, g, or t
gtagaggtggccccttctgtccacacgccatgaggtcgttcccactctccagcaacttgaccggtttagtaaaaaacgatgagctgaaaaaccacatgcaataaacaagaaggagcagccaacaaaatctcttaaaatctcagaaatgttcaataaacatttgcagagcgagaaaataaataacatcgcanaaggagccagtggctcttcttttccccgcatgttccttgggtcaggggtgcatgtgtctcactagaagtcacatgtattaaaagcaggtgagttccagctctctacaaccccactggcccccacccaaatgctcccaacgggtccctgacaccctcgctggtagctcctgcctttgataagctcctctagcctcaactgcttcttgatcctggctcccttcccagacaggctgcccagaaccctggttcatctgctcactggagccgctttgccagccagccagagaccccctcccagccatggcctaaagagccaacagctgggaacttgggctcatccccagctgcgtctggtcggcttggc

SEQ ID NO: 138596 - DNA, 393 bp, Homo Sapiens
ataagttcaaggaaaaaaacaatttgaaatacatgacagagactgttgtttgaatggtaatggtgagtgcagattgctgtggtgtttaaattcctttggctatatttaaaggaatttttgactattttattttaaaatgtcaacacttaatgtccctgggaatcttatcctttgtaacattttaaatgtataagaaatgagatgttatctttgaaatatgtgaaggggtttatgggcttttagcaatcttttatgggaggcagaaacaaaatttgaagagcgaaacagactgtggaagactgtgctaagggcaaggaatccacctgggcttaggagaagtgatgtttggctgattgcattatataagaaaatgctggccaggcgcaagtgtct

SEQ ID NO: 138597 - DNA, 429 bp, Homo Sapiens
  misc_feature (170)..(170): n is a, c, g, or t
  misc_feature (365)..(365): n is a, c, g, or t
  misc_feature (389)..(389): n is a, c, g, or t
  misc_feature (410)..(410): n is a, c, g, or t
tgaatttttttccaatcttttaataaggaaaatgtttttttcaaaataatggcttatatggagtgtcaacataaaaacaatataatttcaaattgataagtaaaatatagtcagcaatctcacatacgtcaaaatttggtatataacacacattcctggagaggtgttgncttttggtcttactttttttccatttttaaaattgtaaaacacatacaaaatttagcattttaatgacttttaagtgtacacttcagtgtcattaaattcacattgctgtgcaaccatcacgaccatccatcttcaggccactttggcatcctggggtaacagaaactctacaccccattaataactcccctttntcccctcccttccaggggtctagnaaccaccattctactttggcnccatgaatctggactaatc

SEQ ID NO: 138598 - DNA, 908 bp, Homo Sapiens
ctatttttataacattttatataactcataaaacagtgtttgtataaaaattcacacaaagttgctagagagcatacaatttccaaaaatgtcctgggtttttgttacattcagtttcctaaggatgcactccaatctatggtaaaatgcagacatgatgcgagatttcattatctttggtaaaactattctcattattttgtctcctcacagtattaagtctgatatccactttgtgcagggtctgctattactaggatgtcagaaaaacattaaggctggatctacgagaggcaagtatttcccaacagcagtaatagccccttggccctcacccccacttcatgtatctatacagtcgatctacacagccaggcggggtgcaagctcacgacctccactcgggagtctcgagatcccctcttgactgggaaagaagcaaacatttgtggggaacgttggaaacggaggccatctctaaatgaacccagtggtcatgctgtggtgtggtcagaccagcaacttttaccaattaaatagccaatctattcaccactaagtagatcccattggttggttggttgatgattgctgctgatgtggttccccactccccacaaacataaaaggaaaggaaggtttggagccaacaccgaaaggggaggggcacgtagcgcaaatgacaccagacacgactttattccctgtcaaacatttgttgtcctgtagacacagccaaggtgaactgaagggggatgcgaacactcagtacattcgtgactatcttcatacattctttaaaaacttacagagaaatcaatgaagactaccacctactgtgacttactagttcattcaacatcaaaacgtgtctgtgctaatcttttagtccttgggatacaaggcca

SEQ ID NO: 138599 - DNA, 352 bp, Homo Sapiens
ttttttctgcctggagctataaggtcataaacctgccactactggtcacaatcttcctccccataaaatgaaagtaagcctcagaataaagccagaacagaggcaggaaaaacagagacatcaggagagcagtggtcctgataacatcatttgagcccctgattccagatatacctgaagcctgtatatcccttggcttttagttctgttaagtaaaacttatggggatgccattggtttggactgagctcctgcgctgggccccaacagatcagaccaaaccagaatggagtcactcatgctagcttgttacgtagtcaaactgaacttagaagtggatcagttttccaaa

SEQ ID NO: 138600 - DNA, 202 bp, Homo Sapiens
  misc_feature (74)..(74): n is a, c, g, or t
tgctgtgcagtagtatttattgttacagtgttaaaattcactctcggggaagcgatttgtggccacggccctangaaactgcatctttgttcagagccaacccatttcctctgcagccacaaaatgcctttgtgtgtcagggctcgggagattctcctcgctggccagccattggcaagaatgccagactcagaggttgcca

SEQ ID NO: 138601 - DNA, 708 bp, Homo Sapiens
  misc_feature (65)..(98): n is a, c, g, or t
ttttttatttgtgggaaaataactttattcatgactgtgtttaccacactatcttatggagaagnnnnnnnnnnnnnnnnnnnnnnnnnnnnnnnnnnagcagttacaaaacacttgattcatatggaattaatgttggttctcaaagtgaaaaattacaaacagcactgatattcagccagtatacaagtctggtcacagcagttgtataatactgaaataccccctgccactgacctttggcccccagatgcctcccactgccactgctctccccactgggaacccctgaagttcccacaggctcataactaaagggctaatgtcttgcacagcagcgagcacccaggaccgagcagccacatggccgggtctgctggtgaaagcatccattctgactgatcaggacctgaggggcctcatggttacatattttgataatatccctaattataaataaggctcagttatatagtttgaaaacaatgcttctcctcattgcaaaatctcttagaagactccgtagatccaggaacggaaatggaaaatgacagcgtgtcaatctctgaaggttttgggcatttccattagcactccatcttcatgtaaaccagaagatatgcagtttcctgccagtggtagttaggatttccgtaggtacactggatgtcttcccaggacaccaagcaaatattggagtcattgaag

SEQ ID NO: 138602 - DNA, 913 bp, Homo Sapiens
gttggtccgcacgtggaacctctcctggtcctgttgacccgggcccctcggaacctccagcttggtccggtctgggactggaagcctgccatggcggcttctgcggcggagacgcgcgtgtttctggaggtgcggggacagctgcagagcgcgcttctgatcctgggagaaccgaaagaaggaggtatgcccatgaatatttccataatgccatcttcactccagatgaaaacccctgaaggctgcacagaaatccagcttccagcagaggtcaggcttgtaccttcctcttgccgtgggctacagtttgttgttggagatggactgcacctgcgactgcagacgcaagcaaaattaggcacaaaactgatttcaatgtttaatcaaagctcgcaaacccaagaatgttgcacgttttattgccaatcctgcggtgaagtcataataaaagacaggaagctcctcagggtgctcccactgccgagtgagaactggggagctctagttggagaatggtgttgtcatcctgacccctttgctaataaatcacttcatccgcaagagaatgactgttttattggagactctttcttcttggtgaatttaagaaccagtttgtggcagcaaagacctgaactatccccagtggcagatgtgctgtgtttcttctgacaaccattgtaacattggaaccaaaggcaaataccaaagtaatttgtaagccgttgcaaggtaatgttgggagagaccgtgtcatcagaaaccaccaagttttatatgacagagataattattcagtcatctgagaggagttttcctatcataccaaggtcttggtttgtccagagccgtgatcgccccagtgtctggtgcagctctcctctgctagaagcacttttagattcacgattca

SEQ ID NO: 138603 - DNA, 1451 bp, Homo Sapiens
  misc_feature (428)..(542): n is a, c, g, or t
  misc_feature (1377)..(1391): n is a, c, g, or t
ttctttaaagagacagtcaccaaatacttggtttaactcgactattgacttgggcattgagagagatgatatatacatctttggaaagtgaagtcaatgttcaagaggtgatagaagctttactttttagtgatcagaaatatttagtgcatcttttcagacaggaagaattttatcatcaagtattcccttataaaaccaagtaacacttctttatcagtaacttttagaacttaaaagaaagcaaaaagtaaatggaattgtaggcaatttatgaatcctagtagattttacaatatgtaatttatgttgtttacagtatataaacactaagttttgtgttaaatgtgatcaggaataaaagtatccccacaggcatctgacaccaattccagaattagcccaagaattgtttatttgaggccagnnnnnnnnnnnnnnnnnnnnnnnnnnnnnnnnnnnnnnnnnnnnnnnnnnnnnnnnnnnnnnnnnnnnnnnnnnnnnnnnnnnnnnnnnnnnnnnnnnnnnnnnnnnnnnnnnnncagcgaaaagtttgtttgaataaacaatatccgaaagacaattagtttcttcagatgtatttgaaattctcctaaagagctagtgtttctattcattttcacaatttaaaaacagctcttaacattgctgaagttgggagaactttccatctcttcttaataacagtgcaaagattttgtacaattcttttttgtgtttaatgtttcactaaaaccgagtatttaagcttaaattactggaaagtacctgggagaaagtaatgatgtgtactttcaaaaaaatggaaaatgcttttattttattttctataatttgttaacatgatatgtaaaattaaacttcggagcacaatgaaatgccgattatttttaccttgtttgggcttaaagtaggtatttaaggtttatgtgttcaaaatgccttggtaaattggatgacctctaactttactgtccatatggagtttgtcattctttatggataagagaacttaaggaaaagttactgtttttcttcagtctttttatatctatctgatttaaaatctgttactttattaaaaggcttcaacaacaggttgttaggatgtactcttacatcccaggttcacataataacccccttttgaattccaatttgcgtaatattttccttatgcccagcagtattcgctatcccaattttaactttagggtttgtttttcttggagcattaacaattttaaaccttatggccccccacattttatcgtgccgcgctaaaatacacactttggtcgggccgcctcttcgggcccttctcaaaaagctttttcaaaacccattttcgttttnnnnnnnnnnnnnnncccccccaaagggaaagtgagacacttgggcccctaaccttgttgttctccccgaggacg

SEQ ID NO: 138604 - DNA, 520 bp, Homo Sapiens
ctctgtgcttgcgaaaaatatcaaaaaagaccaattggcacattctgaatgtgttttctgaataagtatataagtagagagggaggccattttgcaaatgcggataatgctgacatgtcgtacttctaaataaattataatttgatttaaaaaggttgcctgcatgtacatttgccattttacaaagagcaaccgtactcctacctccacccaagttggtaacaaccttatcttacaaacaacccttaatattttaaaagctgcagaaaaaacaaatacatgaataaatgaataaacaaaaaacacatagggaaagggtatgagctcttgctgcaaggagtagatgaaagactgataaatgaagctgaggtccccccagtgcttccctttcaatagtttatgctaaaaatatttgttttttaaaactctgcgctttcttcatttttattggaacgcaatttgtgaaccacaactgagtctgtatgcaggatctccagaacgcaaatcagaaaaaaatttg

SEQ ID NO: 138605 - DNA, 568 bp, Homo Sapiens
  misc_feature (374)..(414): n is a, c, g, or t
tgatgagctggcccgacgttctctctgtgggggacgctctctctgtggggtgcgctctctctgtggggtggctcccaaagtgctggtgatgacaggcctgagcccccagcctggaggctttctttgctactaagggactagggcgtttcccaagcccagaacagacgaaaccccggaggctcaaaaactcatctttattgggaagactctgaacaaccaacctaccccccaccttcaagtctggggagggagggccaggaatctgccccctcctcccatatgtacaatcttttccgaatcctactggagaaggtgcccccacatgtggggacatgtggcagctgtaacaagctagtgcacgggagccatgtccnnnnnnnnnnnnnnnnnnnnnnnnnnnnnnnnnnnnnnnnnctcaaggggaaacccgtgcaacggagcttctcgccaaggctgaatatgtccacttcataagcatgaggaagggccaaggggatgggggtgctagacatcctggttgggattgcacggctcctccacctccctccccacccagtgcccctcctct

SEQ ID NO: 138606 - DNA, 716 bp, Homo Sapiens
  misc_feature (78)..(93): n is a, c, g, or t
  misc_feature (99)..(99): n is a, c, g, or t
  misc_feature (101)..(101): n is a, c, g, or t
  misc_feature (107)..(108): n is a, c, g, or t
  misc_feature (112)..(131): n is a, c, g, or t
cctacaggaacatcccctggttgcagattgccccaaggccccttggaagctccaggggcagcatcattctttcttccnnnnnnnnnnnnnnnncctccntntaaggnncttnnnnnnnnnnnnnnnnnnnnaaatcccgctgatttcttttccagtgccaggttgcatgatcaggtcccatctcctggggttgttgtttcttttgtccatctattgattattagtttagaatagataacatgaaccagttctggaaccactactaggaggaacacaagctcttcactacaagcacacagcaggaaagaaagagataactcaattcatcccctggtgctgggcctccaaaattgaaagaacttggcacaactgggagcactgaatttgtatcctccatgcttctccaatcattttggattcatgggctgctcttctttgatcagccagagttgctatgtcctgtaactgttttctttgttcttcattaagaccgtgaggtcagtgcctgataccacacaggattacgattttgaataggtttgaaagatagctttaaatatctgatactcatcaacaggggttatcttcatcatcaatgattgtggaatagccttccagagcagtctcttcagcatcatcttcttcccaatcttcatcatctccatcttcaccagcctgcttagccagaatctccaaatattcttgcccatcttcat

SEQ ID NO: 138607 - DNA, 1403 bp, Homo Sapiens
  misc_feature (85)..(148): n is a, c, g, or t
tttcccccgcgcgtcttgccgttttctgccccgtctgccttggcctctccggtcctgtttttctcctttgtcttcctgctcggcnnnnnnnnnnnnnnnnnnnnnnnnnnnnnnnnnnnnnnnnnnnnnnnnnnnnnnnnnnnnnnnngcacctccaaggttttccacaccgttatccctgttgaagaggggttaacccgggcctctctgccctgtatgtcgttgctcgtctatgcttgtgtcgtgctccttcctgtttggttgaatgaacccttggtgcttggattctacatgaggggatgatggtgcaccaccctatcacaaatggcataaaagccaagatgcagaagtggcactgctgtgacccaaagatgacacaggactgtaggccaactacttgctgtgttggaacgtgttatgcagagatagagacccagtgcttccaccctgcatgagggccatcatcttagaaaggtctggtcgcatcttacgggcccgcttcttgctgctctctggtgcaataggccctggcaaaacccggttgaacaccgtttcagtgtgatgaccctttttcccatttctagagttagctgtctgtactggttccattcccaaacagttcaattctgccttattattttttttacatctttgccacttctgttttctgcgatcctccatatacgctagaaatcggggatcaacagcaaactctggatgaccctgtaaccacatctccagttcagcccggcgaggggcatcctcacccaccagcaaagtaccatccaccttattgatgacagggatccgggtctccaggtccacatcaaggtgattaggctcttccatgcactccacctccagctctactagcttctttctgttccccttcttcttatgaaacagtggatgtccatctcccattactccattcgccatcaacttgtgcttctggaatgttaacttcaatccttcctcatctttgatttgaactgtaaactccttttcatccatgcctcggcgaagtttggtgaactgggctgccgctgtgctgactgcagatgcttcctcctctgccatggaagctgcactactacttcgtggtgtggggactggagagtcaccatattctccaggagtcaatgagggactgtctagcaagtggttgcctggccccaaaattcctcctgttaccatttcctggctcctacggctagaaggccacttccctgagagtacagcctggcagacgaggtcaatacggtttatcaggacacgatccttgggccactcagaggctctttgtctttcctgcagtagcagaagctcaggggtcatttgttctcacatcttcagtttgggcctcgtgccgatttcaacccagcctcgtacctagccgaaga

SEQ ID NO: 138608 - DNA, 1198 bp, Homo Sapiens
tctcattgttacttccgtggcttgctgcagtcctgcgcctcctggtttgctcgagcttgtgctgttctgttcgtgtctcatatgtctctctcgttcgttgtccttgcgtctgaatatgtctgcgctgcgggataaatcgactgccctggttccgtgacctggttgtccgggctctccgctttatttttgcccctgtcgcgcactccctctttatttggcgtagcgccacctgctttttcggggcaccgtgtcgctctctcgtccacagcgtctagcttcatggcgccatttccgtgggcctattgtgtacgtttcccctatttcttgctccccgttcccagggcccctctgttatctcccactgtttctgtgcacaatacttaccattaattagcagttcactttaatattgccaacaaaaaggtggcaagaagaaaattagagggctcaaccctttattatatttatttgacttccttagaaataattgttaaatataaattagtgacaaggaataaagttcacatctgtaacaattgaaaatggaatgtacgaacaagaccggacagacagacaatgctactggcagtacgatcggcaaccaacgcacacacactgaatgaagctcagctcctaatgagagtcaggaactcttcccgagtctttggatcctcccggaacacacccaacattgtgctggtcacagttttgctgttcattttctgtacacctcgcattaccatacacatgtgtgttgcttcaaccactaccccgactccagcaggccgcaaggcttccgtgattgctacagcaatttgttttgtaaggcgctcctgaacttgtagtcttctactatagatttctacaatcctcgcaagtttgctgaggccaaggacttgcttgttaggaagataaccaatatggacctttccaacaaatggaaccaagtgatgctcacacatggaaaacatgtctatgtccttcacaatcaccatctcatcatgatcttcatcaaatatagcatcgtttaggacatctgagatggtctcctggtagcccttggtgaagaactgcatggccgaggccgccctccagggcgtcttgagcagcccttgccgctgggggttctcgcccagcgagctcaggatggacgagtaggcggctgccctcgtgccgattacaccggcggcctctacta

SEQ ID NO: 138609 - DNA, 562 bp, Homo Sapiens
tagagtctgttgcctttgttgtttattttaaagcaagaaagagcaaagcaatggaaatataggactgggccacctgctggaggtgcaggcaggggggcagtggagaagaggcccccaccgcatctgcctctggccagaactgggaggataggccatcagcagaagccaagcgcatcaaacacactctccaaatcacagggcgagcagacatgaaggtgctcctggtcacaggggtagcagggagccggactgagagctgagcatgcgggtctgcgctgttccctgaagcgagccgtgacaggtgcaagcagaaagacaaagccacagcacaaggcctccgagctctgaggccttttctggctctggcattctgaagtgacatggagcacgacaggcagagagcaaggattttagtccaagaaaggcactatcaacacatcccaaagcagggctgagccaggccaagtgacgaaccaagccattctgtaatggctaagctctctgggccctctgctcgttttcctggtcaggaagcttcaacattagggatttcagccctgtg

SEQ ID NO: 138610 - DNA, 477 bp, Homo Sapiens
tttaatttttattcatctactttttccaatccccaatgtgattaaattcagaagaacagtatctttcaagtaaatgatgcaaaacttcctttcacatcatctcacgtcctttccccctttgtattagtagataattatactatctacagccagaacgatcttcctagacgtgatcatgctatgtgctatgaaaaaaaccttcaatggggacctccactaccgaaatgatgtggtagtactggcagtcgctcccaggtgcagtaactaggaaaaaatggatcaaatgcaaaatacattacagatacgaaagagctgtggaagcgcttaagactagatgtactaaaagtctttgtcttttctacatagctgagactaccaactgttttctttcctggcatcatttgccaattctaggcatggattaaagatcaggctttgtgtggactaaagcactttacttgggaaaaatcagcaggg

SEQ ID NO: 138611 - DNA, 2086 bp, Homo Sapiens
  misc_feature (78)..(112): n is a, c, g, or t
  misc_feature (1454)..(1467): n is a, c, g, or t
  misc_feature (1488)..(1625): n is a, c, g, or t
  misc_feature (1693)..(1740): n is a, c, g, or t
  misc_feature (1808)..(1834): n is a, c, g, or t
cccatgtaactgactcatatagggccacgttcatagcgaacgacgagcgcaggagtcattgagcgaggaagcggccgnnnnnnnnnnnnnnnnnnnnnnnnnnnnnnnnnnncagtcgacggtaccggacatatgcccgggaattcggccattacggccggggtactttccttcatcgaatgattatttgcctggaggaagaagttcttccgttcattccatctgcttcagaacatatgctcaaagatgtgaagcaaaagatctccaggagttcattcctcttatcaaccagattacggccaaattcaagatacaggtatccccgtttttacaacagatgttcatgcccctgcttcatgcaatttttgaagtgctgctccggccagcagaagaaaatgaccagtctgctgctttagagaagcagatgttgcggaggagttactttgctttcctgcaaacagtcacaggcagtgggatgagcgaagttatagcaaatcaaggtgcagagaatgtagaaagagtgtggttcactgttatccaaggagcagttgaatatccagatccaattgcacagaaaacatgttttatcatcctctcaaagttggtagaactctggggaggtaaagatggaccagtgggatttgctgattttgtttataagcacattgtccccgcatgtttcctagcacctttaaaacaaacctttgacctggcagatgcacaaacagtattggctttatctgagtgtgcagtgacactgaaaacaattcatctcaaacggggcccagaatgtgttcagtatcttcaacaagaatacctgccctccttgcaagtagctccagaaataattcaggagttttgtcaagcgcttcagcagcctgatgctaaagtttttaaaaattacttaaaggtgttcttccagagagcaaagccctgaggactggatttccctgtgcctacttcatgatcatgaattccagttaatttataaagaggcgatttttgtgtgccattcacactggtctttttcacattgttttgagcttattgcagtatatgttttgggatttttctgtaaaatgggtgtaattttcctaatacaggtatgtaacaacaaaagaagttgcctgcatgccggtccaaattgttctgtataaagatgctcttaaaagacacaagagttatcctagaaccttaattcttttttatttgaaattttaagtcaagtcctttataaagaccatagcagtggaaaacagtgtactttttaaaaaattgctgaatataaaatctttgaaaattttctttatgtgtgaagacacaaagtatgggggaagacagcaatcaaaactaactttttgtagatagccatttcatttctttaaactgtttcaacgccaatatgtattctacaaaagagaatggttttaggctccagtgttatactttttttnnnnnnnnnnnnnnaaaataaactttacgtagtgnnnnnnnnnnnnnnnnnnnnnnnnnnnnnnnnnnnnnnnnnnnnnnnnnnnnnnnnnnnnnnnnnnnnnnnnnnnnnnnnnnnnnnnnnnnnnnnnnnnnnnnnnnnnnnnnnnnnnnnnnnnnnnnnnnnnnnnnnnggtatttaaacctgttcttagggggcccgcacaaaaacgggaccagaacaaggcttgaaattcccccnnnnnnnnnnnnnnnnnnnnnnnnnnnnnnnnnnnnnnnnnnnnnnnnggcccgcgggggaccataaaggttcaacaccaacccggggggccaattcagggggaatttcagggaannnnnnnnnnnnnnnnnnnnnnnnnnnggccttaatgtttttaatttccccccggggctttttcggcctaaatagggaaaccccggccgaaaaagggttttaaaatatatcccggggaaaaagtggggaagcccttccccaccccggggcggtcttagcccctataatctcccgggggcaaggaaaaaacccggggggccggtggaaaattgtctattttggggcacgggttaaaaaagggagccccggaaaaaatccccccccagggggaaaccgttt

SEQ ID NO: 138612 - DNA, 1459 bp, Homo Sapiens
taactcctccgcacatctgcttctctaaagcagcagactggtcattttcttctgctggccggagcagcacttcaaaaatagcatgaagcaggggcatgaacatctgttgtaaaaacggggatacctgtatcttgaatttggccgtaatctggttgataagaggaatgaactcctggagatcttttgcttcacaatctttgagcatatgttctgaagccagatggaatgaacgggaagaactttttctctccaggcaaataatcattcgatgaagggaaagtacggactccacttctgagaatatccttttgtaagggacaactgagggctggcaagaatgtctgtaaacagtccagataactttcggaacagccacattgtttcacagtctgtttgttgctgaaagcttttactggttcgacttgcaaatccaacagcatggttaagacagtctgctagagaggcttgcctttcttcatcttgtgccagcatcaacttttctaacagaattttaaacttctccattagtggagtcaacagattcctcattaaggcttgtttcctttctgccggatattcactattaacaatcagcactccagctgtcttcataaataaaaagttgatcatcgctgttcagtaaggaactggtggccattctcaggtggagaaagctctaataaatcttgtattctattcaaaatatcctcaatgaaaggattcatttgcttattgagagatttgacaaatctagaaaacaggtaagccgtcctgctccgaacttttgcactggaatgccgcagacctctgtgatctaagaaagccattagtacacatggaatgtgctgaggttcaactgtgaaaaacttttcatatctaacaacagtttcgaagaactccaatgtcacagatgtatgctgataggaactgactcctgatgttaccagagttcgcatcatatcctgcaaagcactagcttttgaaacatcacctgagaagtgagcaccatgagatactggaagagcttctgccaacatatacagcaatcttattgctacttcaacttccataaaccgtgtagtctgccaattctgcagtgtagaactaaaaactctgcgaacagaggccagtagtaactctggtgaaacttgagcaagcctgtccaacagtaacttcagttgttttctatattctacaaacatggcttcatcttcaccctcattttcaaagttatattcttcatcgtaagtcaattttttcataacggccaacatgattgcctctacattagctttttgctgatccgagagcactgtaagctgtttcaaaatatgaagataatcgtaacaaaatccaataatattagaagaaatatcatcatcctcatgaattagtagctgcaaccccacgcgtccgcggacgcgtggtcgacgattcccgggaatccggaccggtccag

SEQ ID NO: 138613 - DNA, 982 bp, Homo Sapiens
ttttcatggggaagtagcaatacaggtattttatttcacattttattagtagacagatgggcagaaaaagacaaaataaaccactaaaggggaagtcaacacaaaatccgtcagataatcttttctcataagttaaactgaagcaaaacatctacaatttcagctaaaactattaaagtcaggtgtgtcctgctggtttcagaatagttgaaaattgcatctgaatccttttagttgtaaatgtaaaccttgtttgttttatcaggatgggaggggtggagagttcctttccagtggagagctgcacatttccccttccaatcagtttcttacaacatgtgccccaaacgtaaggaaaccagcaagtaaagaagcaatttgccagggtaagggaaagaaggttctacaaaaaagtttgactaatagaaaataactctggaatgattgataaaaggagaaggggggaagactgaaagaatcaacagcagaatcatatacttctccacccatttctcaaaatacacagaactgaagagcatctattgaggctgggtggagaagtatatgattctgctgttgattctttcagtcttccccccttctccttttatcaatcattccagagttattttctattagtcaaacttttttgtagaaccttctttcccttaccctggcaaattgcttctttacttgctggtttccttacgtttggggcacatgttgtaagaaactgattggaaggggaaatgtgcagctctccactggaaaggaactctccacccctcccatcctgataaaacaaacaaggtttacatttacaactaaaaggattcagatgcaattttcaactattctgaaaccagcaggacacacctgactttaatagttttagctgaaattgtagatgttttgcttcagtttaacttatgagaaaagattatctgacggattttgtgttgacttcccctttagtggttta

SEQ ID NO: 138614 - DNA, 1277 bp, Homo Sapiens
ccacgcgtccgaaggtagtgagttatctcaattgaaaatgatggatgtcaagcaattcattgataaactcctacctccaattgattgacgtcactaagaggccttgtgtagaagtacaccagcatcattgtagtagagtgtaaaccttttcccatgcccagtcttcaaatttctaatgttttgcagtgttaaaatgttttgcaaatacatgccaataacacagatcaaataatatctcctcatgagaaatttatgatcttttaagtttctatacatgtattcttataagacgacccaggatctactatattagaatagatgaagcaggtagcttcttttttctcaaatgtaattcagcaaaataatacagtactgccaccagattttttattacatcatttgaaaattagcagtatgcttaatgaaaatttgttcaggtataaatgagcagttaagatataaacaatttatgcatgctgtgacttagtctatggatttattccaaaattgcttagtcaccatgcagtgtctgtatttttatatatgtgttcatatatacataatgattataatacataataagaatgaggtggtattacattattcctaataatagggataatgctgtttattgtcaagaaaaagtaaaatcgttctcttcaattaatggcccttttattttgggaccaggcttttattttccctgatattatttctatttaatactcttttctctcaagaaacaacacacacagttggtaccccccctcttatggtccttcatagcaggccaagtatggcctactctgcattagaccagctacggtcactaccttgcctgtcatcttggacatccggggctcacacgatctcaaggagacattcacacaactcctatttcacggcctatcatagaaggaagacccagaactttacaaccttatacttgccatacagtaatgagcgagacttcacgcggtaacccattatccccaaactttaacacccctttgagccttaataccaggggacgtactttcaacacccaccgggcatgaaccaccggacacatatacttcctcggggatgcattcaccacactcagctccctgggcttacccccagccacgagtcaaggcatctaactcagagctcccctatgtccataaacctagttgctcaatggacagaaccgctgttgtgaccaaaccgtgtcctttgacgagacgcttaaccttcatgagaatgtgattccagatgtcgcaattcttactctg

SEQ ID NO: 138615 - DNA, 857 bp, Homo Sapiens
aagtataaaaatatttattgataaaaaataaacttataattcagcaacttgaagttccaggagcatttctgttgttcctatgtcagtaagcccttgatttttcacattaaggagggaaagctaagcatgttacttgaagtaattttttccccaagtcaccatcatgttgatcctgtgcacaacgatatatgcgaggaactcttaagcttagtctttgattctgacagaggtattctatggactgctgcattgaaaagggcttgctgttttcatccaacacctctgtgttgtgtggtcttgcttcatattaaatgcttgagatttactctcaacttcacatgtttgtgcatcactttctttgcagtaactttctgccccaactgtatccataatattgcttccacaattctgcgtattatagccactatccatctgaatgttgctgctttcacaaggaatgactctgctttcagcaagaggtgacatgcacatatgagagttttcaatactgaaggcaatgccacttacaaaatcagtcatgggtaagctgccattatcaaccggctccttaatccaagtggtctcatctgctatctctataggatcaaccatatccacagtgttattgtctttctccctttcaacatcctgcaacagtgctaattctttctcagaagcactggactgattttgtgtaacagacatggcagtcacaaccaaatgtgtaccatgggtagaagcctcattactaaactgccgtaggtgtattccagcagcatccatggcgggtgatgagacatctgtggaaggaatattctctttatcttcctcatcttcaccttgagtctcaagagtcc

SEQ ID NO: 138616 - DNA, 309 bp, Homo Sapiens
caaccttcattcatcctttattgaaaaggcggggagaggctatcaagtcctttgctgaattttagtgagaattaattcagatacataccaaatgcctcacacatgcgtggcttgagctaagtgttatacacagctattatttttaattctattacacataaactccctgaggccggtgacagtgctttgcaataataactaatcaacaacagtcaatgcagtaagtgaagagtagaattccagcatactaaagggttaggatctagggatgagagccccaaccacctctatcagaaacagagctgctgg

SEQ ID NO: 138617 - DNA, 1945 bp, Homo Sapiens
  misc_feature (65)..(65): n is a, c, g, or t
  misc_feature (468)..(493): n is a, c, g, or t
  misc_feature (727)..(744): n is a, c, g, or t
  misc_feature (1463)..(1487): n is a, c, g, or t
  misc_feature (1776)..(1796): n is a, c, g, or t
ggataccatcgtaaaaggaaacaaaagcatttctgaggcgtcctttcaataaccggagggaaggncggcgtcaggagggtgcttcctcgggtcagagcagagagtttccagacgctcaaaccctccaggagttcctcgaggaaagaggagagaatgatcaaggtagtgtttaactgccacattccaaaaagtgaattctgatcagccttttggctcagctatttggcgacagtcttttaaaaaacctctttctctgggctttaagaagaagccatttaatatttgttggggtgcaacccaatgtctgagggaacccagatttaagtcgtcaccaagaaagggatttcctttgacttccatgcaggatgctcagacagggaacaggaggtaccctccgagaagggcaaacccctctgccccacggccaggcagtcctgcactctgagtcacccatcagccagaaactcnnnnnnnnnnnnnnnnnnnnnnnnnntaagaaaagtaaattcatcttgctcacagtcctttctggaagagtttagaaagcaaagaattcaccgactcagcaggaagcagaacgagctgttccttcttttgacacgcacaagctaatcccctagagagtggggatgtgggaaacggagggtaattaattctttggtcactggttcactgctgaatagccttggtcagttttggctctctcctattttagggggaaaaatannnnnnnnnnnnnnnnnnaaaaaataaaatgttcgcacaatgggagaaaattgctttaagtgttacaccttagccaacagagcccaaactccgtgtttccgttctttctctttcggtttctgctgagggctggtgacacactggcctcttgtcagtggctgccggcagggccaggaacagagtagaacctgcagcacagctcagtccagaaagcgctggcaggccttcttccaccggcacgccgtgcaccactggtcccggtgctcgatgccatacaccttgcggcacttcttagcctcccctcgggctttcctggcaccactctgggcccggggtggagaagtgacgatcagatgagatttcatcgcaggtgctggctgctggggctcgctgaagcttagcgacccggctccggaccggagagagagagcaaggcggcggagggggccaaccagcccagctgacacttggtgtagatgtttggtgagactgggatctggaaaggatggcagagccctggtatgcatgatctgccctgaatgttgccagaaggccccaggagctgactttgctgagagcccctgaggggcagggaggactcccgggccaggatgttctgggccggaggactgggctttgtgcagaggtggtggaagagcagacagaggccaggccagtcatgctgggggtgggagctggctcggaggtgggagtcccagggactggggtgcctgcgnnnnnnnnnnnnnnnnnnnnnnnnnattcctctttcagctgcacctctgtgtagtagaaatcctcctcccgcttgaactgatcagagtccactgtgtcccccagatggagggctttgacgtgtcgtttgatgcccacaatggagcgcagaactttgccacagtttggccacaggcacttgtacatcaccttcacagagttctttctttttcgtggagctggttcgtccagcaggaaagggtcaggatcggtctcaaagccatgatcagtttggggagaaccaaaagcatcccccaaatacttggggctggcctnnnnnnnnnnnnnnnnnnnnntggagacaccactgctcccactccagtgaccgctggtagtgctgctgccgctgtccgagatgtcaccactctccttccatgggtcgcaggccgcacgggaagcagagaagttggcctcggtcccgggaggactctgtacaacagggccc

SEQ ID NO: 138618 - DNA, 2286 bp, Homo Sapiens
  misc_feature (494)..(508): n is a, c, g, or t
atttaagccctagctaagttttcatttacaagcaaatattttcaggggaaaaaatcacataagacaatattttcaaatgttattaccatctacctaaaaattaaaacttgcagaattttccaaattaatattttgagcagcccgaaaatattattcatccttttgcaaaaatccagtcaacaacttttaaaaatttcatacaggcacaacccaagattagtctctctatacaatctacctatttacatagcttttcccacccacagatgataatagctctcatcatagctaccaaggttcgcaaacatagtatatttaaaatatatttagcagcatataaaaaattagataaaagggaaggaaatactactattaaataaaaacaaaattaaatggtcataatagaaacaactccataggaaaatagatcaaaatatatttctgttaggacatcaacaatgtttcccatcacagaatatatgcacagcactggnnnnnnnnnnnnnnnttaacagcattttagtcctgagcacagaatatagtagagctgcaaaactttggtcaatacaagtaaatgccaacatttaacacaaactgtctacccttctctgttagtagattaagatcaattccaccttatgaaaattcatcaataatattctcatatcttatttttgtccattacattaaaagagctttgaaatttgggaatccactacagactgatataaatacctgacaagcaaaccaccaatttgactaacattttcaatatttagtttaaatacataaatcacttgaataaactacatgaatgagttaatggtgggctgcatcgtattccaggtgtgttttctgactgtcacaaaagcagacgtcttggtaattcaaataatttgaaagtgtgttttatagataggcacaaaaattcagccacaataaaagtgtgaataaagcaatatatcaattgtaggatatatatctattggttgatcttaaaactaagcacacaggatagtacacaattttattagaataccatttatagtcagcagttgaattcagatatattttccagttaatccgattcatacgttttgcctagtaagtacaggacaacattttccataaagaatacagagtattatcacagcattcagtttacaacctatcttcattcatgtttaattactggcaatatcttcccccagatctcctgtgtcagagatctgaccatcttgcaaattgcgagccttccaaattctcacagttcgatcatcagctgcagtaaaaatgtgggtggaattaacacatatggcattgataggactatcatgacccttcatctctcccactggcataaaagtatccatgttccagactttcaaaatgccccctctgcagccactgagcaaaactgggtggtctggcaccactcccagggcacagacccaatccttatgtgcatttggaacttgctgaagaaggtctttttgagttaagtcccatttcttgattccattatctctagacccactaaataggttatccccttgaatggttagtgcttctatgccatcataatgagggggttcaaaattgtgggtgggactcacagtcccaagagctccttctgtaacatcaaacattttgatgtaatgatccttggagccagtgatgattagatcttgtccactggaaatctgatccacagtaaggcacataacagggcctaggtgtcctgttaactttcctgtagactgaaaccttttaagatcccacatcctgacagcatttccagaagcagcatagaggaaggtgccagttgggtttagggcaatttgattgatctggttctctccagaaggaatagctactgttcgactggtacttgcagaacaagcatctccaagagtaacttgacctgaagacgttagtgttcgaatgcactttgctgaatctctgatatcccacaccttaatataagatgttgatacagtgaagaccaaactggtataattacagtattttacagacacgacattgttgggatgaccccccagtgacattatttcctgcccagtcaccagattccatactttacaagtacgatcttttgatccagtgaagaggagatcatcagtagaatccacacagagcacagcttttgtatgcccttcagctatgtgaatacactgaagtggaaaagctctgattccttttgaagcaggaaatgggttgattatgcggacgcgtgggtcgacgatatcccgagaattccggacc

SEQ ID NO: 138619 - DNA, 459 bp, Homo Sapiens
tttgcatcataggtagcttattttattggattgctttgccaataacactttcttacattcaagagacttccctcagacatgtctagaagacctgagagggacaggtcccggccacaagttcaaactttcctcagtgtctatcatgtctttctcaccaaaagtgaagccaagatttctcctctcatccccacttcccaggggagatcagtccttaattacggatacagtgaactcaaatggaaacccgaacaaccaatcacttggtaaggggaaggctgaggaacgctaagacacacggttccacttatcctgggagccaaagacaggtctccagtgtatggtggcacactaatggaggtgaccaggtcatcgttggtcagaggctggcttcggacacgttccagcatctccaggcctcgagcatgatgataggagtcctggctccccacacaacaaaac

SEQ ID NO: 138620 - DNA, 512 bp, Homo Sapiens
  misc_feature (203)..(211): n is a, c, g, or t
  misc_feature (391)..(404): n is a, c, g, or t
tttattttcattctgagtttatttaacatttcatccagttgaactgaaataatacatggcctccaacactggcaagacgctgtgctaatactgaaataaaagctgccagtcagtaaacacttacaatcatcatcctttgtatcatgttaatagaaatattaataactacttagctttataagcttattgcacttcatgtggannnnnnnnnctccagaaaaggtatttctaaaagatcggcaaggattgccaatcttgatttgttctttcttataaactgtgatcaacatacagttgatagctttatataaaagcattaagagtctgaagcatcaaaaaacaacgtttaaaaagatgcagctccatgttcatcatcccctttataatctcnnnnnnnnnnnnnngagatggggttcgcccctgttgccaagctggagtgcaaggtgcgatttggctcacggaaacttcagctccggattcagcgatctcctactcagcttccgagtagctgg

SEQ ID NO: 138621 - DNA, 469 bp, Homo Sapiens
ttcatttcagtcttttactcagacaatatacagtaaatatattcaaattgcttcaatatacagacataaacacacatacacacacacctgtgaagggtgaagtctgaacaactagatgttatcctgaaagtcatttaattactatttgttattgtatttgtttattttgtgtatttcagggaaagatgaaagaagattgcaagaagcatcagaagtctagttcaagaacaatccctgactgttcagcaccaacccggtcaggagtggagaggctggtacctgtgcagtgttttgttccaggaatgccatatgaatggcctctcatttatggaaggcttcagatctagtcttttgatgttaattacaaataaggctgcacgtgtgcagccaatagtttggcatgtgagtggtaacacccctagatgtaaatatttttgtcacagtatagaaaccatgcttcaccatttcc

SEQ ID NO: 138622 - DNA, 494 bp, Homo Sapiens
tttaataatttttttctattttattaatactttattttcaaaaatgcttccatagttaaagtagttctggaaactgttccattaggtataaggacaatgactccttttctccatttttatttggcttgttgtgatgtttttctagttgtattagtttttctttaaaaagtagagaaagatggtccagtacatgacatgggtgagagtcatattttttccctacccatttaatgcaagatataaagaagctttcctagcttctatctcttttagaattttctgttaaaaattcttactctgtcttatgatgaacagattgatgaagattgtggcctaccattaagtgtaaaagtaatgtgcttataagggatgagtgcacatttaaacaaaaaaatgttaagagggccatgagatcggatattagatacacagttatttacctagttctgttaaagaatattttacaatgttctgcatggtatgtcaggttatag

SEQ ID NO: 138623 - DNA, 213 bp, Homo Sapiens
gggtaaataaaagagttcccatctccatatcttagggtttaggagacctaactgggatttagcaacataaataaatgtcagtaaagaagagtaattcatagtaagggctctgggagtagattctagctgtactatttccaattgtataaagtgctttgcatttgaattattaatattttaagaatatacagtaaaggccgggtgcggtcgtca

SEQ ID NO: 138624 - DNA, 758 bp, Homo Sapiens
tttttcagatgcaaaatgacaacatttaatgggatgataaggaaataagacttgtcaagaaaccatagcccactgcagactgttcacgatgtcagatggttcatgatttttttccaggtttgatacagaagaatcagtttgttaaaagaaatgcttctccacctttttcgtactaatcgtagaccatgcctggggctggctgaatgttgaacacaaggttgctctgctcagcagaaaaagtgaaactgtctgctcgaccaaaaacattttccaagtagaaaagaacatggtcattcttgacttcagtcttcatcacttggcccttgttttcaagctcttcaatggatgacatggttggagtaaatcctgatagcatttttacatctataaccaccatactggatttattgcgaattccagtgtatttgaggttcactgtgaggtcaaaaacagtcaaagagtagttctttactatttccaaggaaagagaaaatccagatgccttcttaggtaggagaacattgtacttaagggtggcctggaggactgtgggtatggggtgtccaagaagaaagctcagatctgcccacggcaggtaccttactgggatttactatccgacaggggtccgaacgcagctcgggatcagaaaaaaagcaggtcatttgcaatctaccagagccagcccctcttcccccccttgctcttaggacctccatcgcagcggggcaggcacacacctgcatacccgtcgtgcc

SEQ ID NO: 138625 - DNA, 567 bp, Homo Sapiens
  misc_feature (276)..(326): n is a, c, g, or t
caattactagaagaggtaaagaaattttattacgtcataaaccattgaaaacacatctagtaagaaaatgaaaacctgaataagataggacaatagttgaagaaagaaaagtgtctggtacttcattagacttgtgtagctgtgtactgcatgagtaatctgataatcattaagattatattaatttctttaaaaatagctttaaagaattcacagctatatatgtaccttttataaatctctcatttttgttttgtaagttgacaggtcagtaannnnnnnnnnnnnnnnnnnnnnnnnnnnnnnnnnnnnnnnnnnnnnnnnnntgcctatatatgcatgtttttatttctaaatatctatttatatatacatacaaatgtgtttattgtttaaatgatgttttaaatcccagttggagaagcatttcttttaacaaactgattcttctgtatcaaacctggaaaaaaatcatgaaccatctgacatcgtgaacagtctgcagtgggctatggtttcttgtcaagtcttatttccttatcatcccattaaatgttgtcattttgc

SEQ ID NO: 138626 - DNA, 1486 bp, Homo Sapiens
tttttcaaaatgacaacatttaatgggatgataaggaaataagacttgacaagaaaccatagcccactgcagactgttcacgatgtcagatggttcatgatttttttccaggtttgatacagaagaatcagtttgttacaagaaatgcttctccaactcttctagtaattgctttgtctcactcggaaactgaactactgtcgatgttgtaaaaagctagggcatattcttctttttcatagtaatcgtagaccatggctggggctggctgaatgttgaacacaaggttgctctgctcaacagaaaaagggaaactgtctgctcgaccaaaaccattttccaagtagaaaagaacatggtcattcttgacttcagtcttcatcacttggcccttgttttcaagctcttcaatggatgacatggttggagtaaatcctgatagcatttttacatctataaccaccatactggatttattgcgaattccagtgtatttgagggtcactgtgaggtcaaaagcagtcgaagagtagttctttactatttccaaggaaagagaaaatccagatgccttcttaggtaggagaacattgtacttaagggtggcctggataaatgtacaaccgtgtccttccacatctactgtgtattgtccaggtgcctgtgttacttctgaacgttggaccagtaggcggttatgaccgttaacctggaaaatctcactggatccttcactgctggaggactgtgggttttaggtgtccaagaagaaagctcagatctgccgacggcaggtgccttacttgggatttactatccgacaggggtctggaggactgtgggttttaggtgtccaagaagaaagctcagatcttccagcagaaggtaccttacttgggatttactatccgacaggggtctgagtgcagctgagacaatggtcggattcactgaggctcctgcgtgtcccggatttcccgctgggggagggtgttccgctcagcggttcccacacctgctgtttccagcctctgtttccctcttcacgccagggatcctttcttgtgtttccaaggtggagagctgaactgagatcatgtatggacagggtgctcggcaggtacccagcaccttagtaccaattccccagtccctggtcctgccgtctccctccctcattcattcagcaggcatcggcagaatcccatctcctatgagctcctgacctcctaccaaatgctctgctgccacctacccccacctgatcagagggccaccccctgtactgggaagtcctctctccagtccctgcaacacaacctctgggagcagcccctttggggattcttggtcctggaggacccagctgtcttcctggtggaagggccaaggggagagcccaacttggaagctttcgctcctgagagccggaaagctcactcccttccaccccacctagcctcctgcctcgtccgattaacacggc

SEQ ID NO: 138627 - DNA, 400 bp, Homo Sapiens
ttttttggatttcacgaactcacatttattcacagacagacaaagggacaaggacagacctttgctcactggggacccccagggtctggcagttccaaagaggtgatggtgtccagtgtgtgaaacgggggacagggaggcgggggcgtccccaccagtctccatccctctggccaactgtccgccgcctttttttccaagtcgtcctgccttaagacacatgttggggtgagcggttcctaaccagcatcaggggttctgggggcgggcgatgggggaggaaggggcagtccagggccccccactccttagtgtcaagggcgtgaaggggacgggtgggtagacagaggaggtggctccttcaacttccctcctccattctgcaaaccggggagctcag

SEQ ID NO: 138628 - DNA, 264 bp, Homo Sapiens
ccgactcttgtctgtttgaatgctaagttctccatagtggtttttgtccataagtattaacttatcaatttttgagagtgataggtatggttgctggttgattagccataagattatgtagccttaaactagctagaagagtttgcatgggtgaggcaacaggctgttaacaaaaagaaactggaaatacagtttcccctgtttgtttctcctgtttgtacaatctgctttaaaaacaagtgaacatgcaccatgtcagtcatg

SEQ ID NO: 138629 - DNA, 522 bp, Homo Sapiens
gtgtgagccaccctgcctggccagttgatacttttaatggatatgttagtgatgaaaaatcttaaacatgggtgtctttaagcaatgcagaattttaaccaggcaatattcttatccggaaatctggatttattattatatagccctttattctctcctaaatcaagcatgctagaaaaaacagactatgaagaacaaaatatacagactaaatagaaaatataactgcatgcaacatattattatgttacagaaatggatgtaataatgcattcccaagagctacattcaagaagattgtgctgtcttccccaaatttgttacctgtcacagaaagatcttataacctagtacacatgtttctaacagtactggggttacatacatgaagcctaacatttctgtcagacaactagttgtctgacaggaatgtatgcttctgaccaaaatggtgacccacattaacttctgtagattttagtgggccacaattggctacatggttatactgtaagtcaaaga

SEQ ID NO: 138630 - DNA, 525 bp, Homo Sapiens
ttgagtttaaattttattttacaaaaagagaaataaagaaaactgataggcagttatactgacttacaattgttctgtttgcttttttttaaaaaagtgacatgaaacacaagtaaaaataaatacgtcatagaaacagccagttgcccagtctctggggcaggagcgcctgccctgctgagaggagggaagcccatgatcacaccagcagctggatcacccagccacagatgctcctcgaagccaggcacaggtcccaggcctcaggggcgtcctgaggaaagaagacggaaaaccaaagccaggtgccaggaccctggggccacctcattatcccccactcctcctggcagcagtctggtcttagtggttatccatagcgaccccccttaacccacctggaccctcttcccctgacctctctgaagatggtacaagggaaaaacctgtcttgggcaggctgggggggattcttctggtgagtccccagcccaccctgagtaacacaaccagataacagtcatt

SEQ ID NO: 138631 - DNA, 547 bp, Homo Sapiens
ttttttgaacaaattgtcattgacctttactgagcatcaatttgagttaaaaatgaaggctgtgtcagcaacgtggtacattggtggacttgggagggggcatcccagatacatgacgcagggttcagaataggtgagaataatgaagattctgccatggtgtcttacaacactaacaacatacatcgactagtgtgacaaaaccactaggtttccccaaccgaggcaggcaaaccttgctttgtagaaataggtattttactgcgaagttttagtctgttcactaggatgaaatccaaagtgggctgtatttgtctaactctcaaattaagtgttctcactcattattcttcagcactggttcctgaagggttacgtggccacagtggcagccctgcttaccttcactgatttctcgtaagcatcctatttagagaccaaactggactgcaatgagtacacctcaaacctcccgctgctctcaccatcaagcctataaggattgagacttctgctggccccacgtaactcaaaagagctgatttct

SEQ ID NO: 138632 - DNA, 882 bp, Homo Sapiens
  misc_feature (248)..(278): n is a, c, g, or t
  misc_feature (683)..(683): n is a, c, g, or t
acaaaaattgattttatagcctattatttttttcttaacacaatgcagataacatcaggaaattacatatttcaaatagattgccttcaaaagcaactaattaatgacaaatttcaaacatacactattattttcaagaatggtgtaactgaaagactcatttttctatacaatcaagccatccatttctgcattatgaagagtttaactactgaattttaattttatagttaaatatatttgttagnnnnnnnnnnnnnnnnnnnnnnnnnnnnnnntttgaaattatttttcaactgcaaaatctcagcaatgcagtcaagatctggaaaatggtttacttaatttcacaggagaatttctgtacaaatttagttacaaatgatctaaaaagcccaaatgtatcactttttcattcttcacgacagttaaatgacagctaatatttatccttatcagaaataattatgtaatgtattttgccaaggttcaattgcagactttatttttctacatcagggtcatgctgatacatattttccccatcctcactttttaaaaatgtagtatctgaaaattttgattacatttttgtaccataccagtcctcagaaaatactacattctttaaattttttaaaaaatggacagtaatttttaaacaatagaaatggtaagtatgnttggtttttaaggtataaaataactaactgtaccataaacaaataaataactgctttccttttccatagcagtacatatagcaatacattctcctaagtcatatagttatcatttacaatagacaacttaattttactaatgatgcaaaaataatagaatacaaggcacaatcattaaatggagtttttctttagggtg

SEQ ID NO: 138633 - DNA, 400 bp, Homo Sapiens
cttttttcttcgcttctagggcatctgctttttctctttttaatttagccttttcaaaagccagtgacttcatttcttcttgtttcaaaagtttatctctttctttagtagctttgctcctataacttgcaagagtctgtttattagcaacattgtcctcttgactaatatgtattcgtttgggaggtctccctcttcgtctgttagcaggactgaagataaatgtgggtggatcatcagggaagaaataagaaaaatcttgttcctgctattttatacgttgaaagagatgatgcctttattttaatgactccatcttgtggttcacaagtgttgctttcagaaaaagctctagtttatcacgagaaaataggtggttcctccggctgatttgggtgct

SEQ ID NO: 138634 - DNA, 449 bp, Homo Sapiens
tttgtttgtttttttctagtttgtattctaaattaaggtggtacctgtgtaggcttcttccaagagaatattgagggatgccaaggtttggagtacagtggaacccatcacacaggtagtaagcataggacccaataagtagttttccaaccctggcccactctgtccctccctgttcttatttcccagtgtctattgttcccaggtttatgacaatgtgcacccaatgtgtagctcccacataagtgaaaacatgagatatttggtttctgtttctgtgttagtttgcttaggatagtggattccagctgtatccatgttgctgcaaaggacatgattttgttcttttcttggctgcatagtattccatggtatgtatggaacattccaatctaccttggattttcaatctgccttggatgcacctggattgactccatgtctttgct

SEQ ID NO: 138635 - DNA, 510 bp, Homo Sapiens
  misc_feature (104)..(160): n is a, c, g, or t
  misc_feature (421)..(430): n is a, c, g, or t
gaaaataatttaaaaagcttaaaagttacataggcatcttcaaaagaacacaatgggattcattttattgttgacttttggacaccagtgtcagactttattgnnnnnnnnnnnnnnnnnnnnnnnnnnnnnnnnnnnnnnnnnnnnnnnnnnnnnnnnntattttatataaaacaaatcaataacttaaaacacactaatatacaaaaggtctaaccatctactgtacaacatgggaatcggttaagagagcctcccctcccccaaagcaagtcactgtaaacggaacatcacatggtcatggtcaaagaggtggccccaaaccaacggaaaaggcttctcttctggtggaagaaaaatccagtcctgtcaaagtctccgttagcctaacttaggtactggcggtgacttacaagtgagnnnnnnnnnntttgtttttttaaatggccaagaaagaaacctgaacgatgtcactgaaaggttgtagaaaaataggatccagccattaga

SEQ ID NO: 138636 - DNA, 2990 bp, Homo Sapiens
ggccggtgttgagtaagagccacatttatttcttaattggacagagcctcaagtgcacgcacagtacaggagcctagggctaacactcgggtgtaagacatcgggacaggcgtcgtgacgtcgggacggcagctatgacatggggtctggggtgtgcccacagcaatcacatatgtacaagccagggacgcggcctctgagccacaggggaaccaggggacggactaactacaggaagcacaggcccagggagaaacgcaggtcgccacagctgctgtccgtctgggggaccgcacggcccggcaccgggggtaagggagtgtgccttccgtggtccccacatgggtgaggctggcataggaccagtgcagcagcacagtaaacacctgtgacatcagccccaccagggccccaggtgctggggactccagggaccagggttgacagggagggccacctcatcacagccgtcctgggtgggggagtttgtgcctgtgcagccggtggatgaaacattggcatcttctcagcgatgactcccagtgggaggccttggacttggcacccctaggcactggccgtgtcccatcagatcccaagtgctggtcggcctggagcccggcatccccatctatctggagccgcagcggaaggagctccccctttctggtggaggatggctgcccccaaaccaaaacaagcccccagactcggcagtataaagcattaaatgaaaccatctgagggagacggctttccagatctgtctcacctcccccacttagcaggaagcagcagccaccctgggcctggctgtctcccaagcaccgcaccccatgagcacctccacaccagccctccacctcacagatgtggaaaccgactcctggggagctcaaggaaggcagctaacgtggtccctaggtggtttctggcagagcgaacttttcaagaagccaggtgtcctgactcaggcggcctcctctcaccatcaactctgagtttctgggtcctggcttaggcactcctcactagagcaggcccggaaggagggagtcggcggaggctgcagtgtggctctgggtcctagccaaggccaacacggcacctggctgagaggacacagccaggcagtctccatggcagtggaggcttctgaatttaggcagctcccaggcacctccactcagcccacccacgccgcgagtgctctgcaggttggctggcctcagacacctgcgacctggggggtgcgcccagaccctttggaggccacagcctcaggctggctgacctgagttggccgtggcagggcctgtgcctcctctagcctgcctggggcccatggggctccccctcatctcagaccagcgtgtcctgccctgcctctccttcctgcctccaggcagcgctggatgccggagcaggtgcttctgcaagaagctgttctgcatcctctccttgctgcatcttggtccactgcctccagaggtcacccatggggagcacaggccaccctggcttctgaattttattttgggatgtgaatcctcacctgggagatttccaaagaaagctgctgtgtgcgctgtgtcctgccttgcccaggcgtggccttccgcgagccgctgattgtcccctcacagaacccccccatcagcccctgggagagcctcccaggcaggggatgagggtggcggtggccacaccgcacctgagcccaggtacgaaaaggcgagcccacagtcccagctcccaaacaggctggcccaggcaggcagccacaaagactgcagccagcatgggccctggcctgccctgcacaccactctcggagatggaacttcaggggcccaaacaaccttcccaaaggaaaacctcatgccagagccttcccatgtggtgtagaaggcccgtgctcccccactcctgagccgctgtctctcccccaggcatgggattggggtctctgaggctcatgtcagcatcacgtgggacagcctgggagggtaggggcctcagaaccagtggggtgctgcgtttcccccactccaggaggcaggatctgatgaaagtgcatgggccctaggtctggagcaccagacccgatgtaactgctcccacggtgccagcggcgggagaggggctctgttgcttggctactgtctttccttgagctaaaaagagaccaaatcgacctgtgggtgtgggtggggagggccgctaaaacctcctctaggccctctggacatgactcctatgaccagactctcagcttggggctgacccccgtcctgtcctgggtggccctcggacattggtgtctgcagagggggtgaaatgggacaagaacaaagggacaccgcagatgcagcagcgaagagctccttgaagacaataaccaccaagccagccaccctccattgccgaccgaccaggatacccccaccccatgggattttctcagtgggactcacagaaactctctgccctgggaacaaagagaggaaagtctttgcaagaaacctgctaatggcagcatttcttcccagaagctaccttgactcactccatttctcgccgcagctgaagaggctgcgccacagccctcgacacctagaccgtcgccctgaattccgatcttccctgacttcctggtctcaacccaccaccctaccctgatggtccggagacagcacgcagtcccagagtctgcacactggcaggtgatcccgaccccgctccctcctggtccccgcccaggacagatcacagcctgggtgccgtctgcctcatctcagagccagagccgagtgtcacccctcaccctttcctggggaaagctgccggaactcttcttggagtcactcctcaggtggccgcccagaagagatgtgcgttctccctcccaccagaggaactcacaccaccctccatgccgcgcagacttcaggcaccaaagacacccccatcccgggaattccggaccg

SEQ ID NO: 138637 - DNA, 763 bp, Homo Sapiens
tttaagataatatcagtaagcaatttattaaagagtctgccatccatcataggaatctggaacagtaatgatgcactgaaaataagtattcaccccaggtttcttttcctcctcccaaattccttcaatatcaatatctctttggtaaattgttaatagtattttgctctttgtccttttggaaacaagcccaggaatgagaagacaccaacagcagctgtcacaaactcaacggtacttatcgctcggttggcctgctctgaaactccttctccatagcgaagcaatgtcacaaaatgttcacagttgttgacaagtaagttataggccacctcctgtccaattacaaactctgaccgctttatgatttcttccacagggagaggggggtacgtttcatcgtatttattgtttattctgtatgtgtcatttcccacaacatccttcaagagctgcattttcaccagggccttactgctgaatacagacttggcgcttgtaaaggacgcaggaatgccatctacaggtgctatgttgataacgtaaccatcacccaagtacagggcccagtgctgatagccaggacggaacacttcgatcaagtcccctgggcaggggttgccagggtagttcaaactgaagcaatcattaaacgccatctcactctcaagccggggtcttcttctcgcaccgggaggcagctgtgtgtgtcctggggtctctcttggcctcgcagctgccgaccttgccgccggcggccgca

SEQ ID NO: 138638 - DNA, 942 bp, Homo Sapiens
tttttttaagttttccaaatcaatttattatcctgacagctggcatcattaatactttaacaaaaccacttaaaattagccaaatatctaagacagatacatatacaaaagatatacaaattaaaaccatttaaaaagtaatagataccataatttgtacttggccacaacttctgtattcagaaatgattgtaaaattaaaacctaagttaaaaactgtacaccatatactttgagtgatttacatcttagaaaacaaaggcagtctttcattgttacagatttagtgtctctggtgggttgaggagagaaacaccatgatactttgaatttttgtacttttctcttattgactgttgtgcatgctgtggtgctttgaggtaggtctggtgaaggtccatgagacaaggcttaagactttccagggtatatccagtctttcgtattaatgattcaggccagctttgtcccgtgactgtgtagagtgctaaatgaaaggcagctccagcaataactgatggcaaatacttgaggtatgggtcagcatctatcaaacttaattctcccaaaaacattgctaagctttcaactttgcagtttgcaggctggtgatgcagaaagtattgggtaagaaactgatttactggttggagcagctaagtcaaaagtaagggactttcaaaactagatgctccattctcagaacttgtttcttggtgtaggtatcatctgtaatgtacacaaactctgctacttctggggggtatatttcttcaaactttgaggctaacagcatagcagcagtgcccacaagctgaagtttttctctcagcactgacatggaagacaggaacctatcaatgtagttcacagccaaatgcagggtctcattctgtagtttatattcttctcctacttcaactaaccagtccacgaggatcc

SEQ ID NO: 138639 - DNA, 181 bp, Homo Sapiens
ttttcaggatacataattcagaaatttattttaagcttttcagttaagcggaaagtggggtgggcacatttgtttcttgtttttgttgcacctgctaagtcaaataacaagtgaaagtaaacctaaagttagaaaccaaggtgaaatgaatgatccaggaagggataccatctgtcaaagg

SEQ ID NO: 138640 - DNA, 532 bp, Homo Sapiens
tttttaattcccagaaagtgctgtggagcctgaggagacaatgacactttggggctatctgcagattttacatcttgaattacttgtccccaacacttgcagcaaaagttcctttcaggaaggtttggcaatgattatattccctcaccagggtctgacatctgtcaattctattacactgtataagctgtgactgctttagagaggtgaattttggctagtggaatgggtcccatgactgcctagttatatctcttggatttaaaatcctttaaagattagaatttctctggattgcagaacaacgtgtgtaaaagtcattctctctatctcgatgttagccgaaaactgttttttaccggtgattgtagtctgttgcaggactgttttagcttagcttcccttttatattttagaatttcttttgatttcaaatttagtattacaactgcattagcataattagggtccaaagacaacatcctgacaatataaattcatatacgactaggcttttattaatttggcaatc

SEQ ID NO: 138641 - DNA, 666 bp, Homo Sapiens
ttttgtatgcagtatattttactccccatgaaataaaacacatttgtttcatatttgctgaaaagtaaaacaataatattgtacgaaatgttatacacagggtaggttgtacatagcagtttcagaaacatcattgcatccaccagagaaactattctaaaactgatattcacacattttttataataataataatatgttagaaacatacagtgtggcatttagtatatacactcccttgctcgcaagcgaaaaatcctaatcgcttctgtataacatgctttattttaaagcctaacctttaaaaacactgttgtgatattactaacaactgcttttataaaattaatttgacatttcgatatatatacatcctttcagtcatttaaatgttaacaatgctaaacttaaaaaataacaagcttatagtaatgttaaaatgtcatatccagtcaaacatttgtttgtgtatgtgtccttgcaactgttagaaatacttgtagtgaaagatgtcagacactgaggacatccctttgaaatcaaaggagctctctctttgattcagtggtttccttttctctatatagcttctctttctctccctttctttagtgcccacgaccttctagcataattcccagtctttcaagggcggagttgcccccc

SEQ ID NO: 138642 - DNA, 1059 bp, Homo Sapiens
  misc_feature (274)..(323): n is a, c, g, or t
ctccagctcagcttgcgtttattggaaactgcttacccagcactccacaaaggagcttacagcggggtgacacttaggactcctatggcctaatcctgggattagcacagggccatgggctggtggacaaagggaggggtgggaccgggcatgatgggagggtatgctgaaaacccaggaagaaggaaccagtgggtcactacagatgcttcattttggcagggagctgtctgtgggcttgtttgcaggcctttctcttggccctggggtggannnnnnnnnnnnnnnnnnnnnnnnnnnnnnnnnnnnnnnnnnnnnnnnnncacaggcgctcacgggtgtcatgtgagtggtaggtggagggaggacagctgaacagttggcatcaggcgttcttcatcttttccttcactttttgaggctcaaactggatcagtcgcagaatttccttattggccagtgtcccctcaatgaattctttctctgtaagtttatcatcatcattctttccaaagtacttccagatcttctcggctcgcttttccggcgtgttttcatcgtctggaaggagcttcacgtcctcgggagtgatcattttgaaaatagccatgacgatctccagcacttcattcttgctgatggtcccgttaccgtccacgtcgtagagggagaaggcccactccaagcttctggttggtcttgcccgcggtggtcatgtgcagggcgatgacgtactccttgaaagtccagggtgccgtcgaggttggaatcgaagctgcggaacacatgctgggcgtaggctctggggtcggtgtccgggaagaacttggcgtaaaagctcttgaactgctgctgggtgatgcggccggtgggacagtccttcaggaaggactggtaccaggagcacagctcctcctccgagaacttggtgttcagctgcaactcctccaggatctccttggacaaggccccaattttgctggtcccatgagtgaagaagaattggcaacgcttgggaatcctcggttggttggacattctggtgcccctgcccacagg

SEQ ID NO: 138643 - DNA, 770 bp, Homo Sapiens
ttttccctttaaaacacatatatttaatgtacagaattggaaaaaggacttcttgataataaacatatttcatgtaaacacaagctttcaatatctatgaatatttcattgcaaatacaccctaagttacttcttctctacataaaggagaaactccaagttctgctctttaggaagacatggagggcaagcaataccttaggaacaaccattgctatttctcccctttccttgggtgacctaacattttacagggactaacgacataaagaaatattagattccattgagtttaaacacaaatttcccactgagggcattaaatatttgatgcttatgagtgtgaataaataaatattaggtataaggcagattccaaaaccaactgaagtatgaaaacaaattggcatagatacctaacagtcagtaaaattaaatttcactactgagtatatgctacatgcttccttttctactccagtgggttctgctttttttgtctaaggtcttctgctggactctaagacagtcaattgcttaacatcaccaggttttttgtcaggggatttattttggaaataaaccaacttcttttttattaaagatcaaggttgtcttttttgctacatgcttctttccactacatattgactccctcatgaaagaaaattcacagggcgagagcaagtactctatgttggctgttctgcagtgtaatgactggttaataaaagagccactcagcctggacaatatagtgaggcctcgtt

SEQ ID NO: 138644 - DNA, 395 bp, Homo Sapiens
ctcccaattcttagctatttcctcaagcaatgattggccaaggacctagcataatccaccacattggccaaggggacgtggtgcaccccaaggccatttctctgcattggaggctgcgaatctcctctggaaaattcccaacccgaggacccaccatgagcccagctcagcctgaccagacagcctctgcctggagcattcacatcagatggaaagaagctgctgtgtcctccagcatcctgggaccctgtcctctgcccagtgacacagcagccatggctagcttgatttctggtctccaaagctaagcataaccttcccggggtttctggtttttcagcctgtacgaaacatgtctctgttctaattaaagttcccatggtatggtgttctca

SEQ ID NO: 138645 - DNA, 901 bp, Homo Sapiens
ttttcagagatgcacacaattatgattttatttgttaagttacaatagccaaaagagctttacaaaaggcaaaataaactacacatccattttagaaaagtcctttttatttctttaaatcagaggccccctctagcgtttgaaagcagtcacaggcaacacacaatgcaattgaaagtaaacagtcacagcattttaccgcagaccttccaaaacataaggcttgcttctgttccattcaagtggcacaaaaatcaatgagagaaaaatagctaaccataattaatattgcaaattcctgctatgattcagattcattatcctctcattcagtaatttctttattatttactgctgggttattttttactagattaatactctgttaataaggaaaaaatatataataaatatagggactttaatttccctaataagaaatatacctcatttgaaatgaccgaaaattaatgttaccatatatcctactctgctttgatggaagttattggtaacttcctaaagtatatacttaattttaactttattatatttggaaatcagaactttttaaagtacatatattttgaaattcaacctaatctgtgactttgctaaaactttttcagtactcagtaaaaggaggtgggaaacgttgctttgaggacaaatgttggctctgaagaatatgatataaaggaactcttaagagtttttatacagacagggcactgcataaatccaatgagtgaatctcgtgcgcttttgaaaacgattgattgaaattagcgggagtaaaaaatagttgattttcactctattttttcagctaatgtctttatgtgtctgtttccatgttctattacagagggtttaagctgacagctagtattactataac

SEQ ID NO: 138646 - DNA, 869 bp, Homo Sapiens
  misc_feature (320)..(328): n is a, c, g, or t
ccataaaagaaattgttagttgccggggggggagttagaaattgggaaagtggcaagtgtttttcgcggggccggggagagataaattatttgacttcggtttttccgacgccccttttaaaagagggtagggaaaaggcactttaaagagggcgctttttgtacgggggcggttggggccaagaaaggcgaggcgccagggggcctttatataggccaaccccctgagttttgagtgaaaaaatgcgcaagcaagaacccaaacgtggggcactggtccgtaaaaaccaaagagttttacaagccaggattattgaatnnnnnnnnncagggaccctgcgcccagatgcgccaggtcagggtggaaggaaggccaggattgcttgtacaggacattggcccagggatgggcccctgccgtggggaaaccccggatgccccaagcagaaaaggaatgggccttcagctttgcagacagcactgtttccagatcaaagggtaaaaggagaagcaaggcactgagaaaaaatgggaagcattccagcttttggtgcacaaaaggattctgagtacccagcgataccccacatcatagtcatcgccagcatgagcctgttcctgtgtggagacttcatcgctggacagcaggtaggagccggcctgaacgaattaagtgatgtacccagaagcctgcccattgcagaagcctcttcccaaatcacgcggcgcacacctcactcacatgcagcgcacggtcacgcagtgcgcacctcacacacacacagcgcacgatcacgtggcctgcacctcactcacacagcgcacgatcacgcggcggccacctcactcacacagcgcacaatcacgcg

SEQ ID NO: 138647 - DNA, 648 bp, Homo Sapiens
gcagggctttgatcattcaaaagtaactaaagtagctccagaatcccaagtattcgtgtaaattacggttacatgttatcatttgctgttcttacataagcactcatgaaaatatggtattctgtaacttgaattccatccattttccagacgtctactcatgtctgaggtaaatctagaaattgtcttagttttaggattgaaacagtctataaactgtatttttggtccatccaggaagctagtcccttgtttctcctttctacatgacattgcagtggtggtttctgtaattaaaatttgtttgcctcatgtccctttgtctgataaaccttcactctaccgattcagttgtgagcattctttttttccttctcaaaacctactatgatttgttttactgaacaaaggttatcaaccacacatccagtcctgacatggagcttttcagtgtttggagacatttctcaatcccctgctgtggtaggaactccagtggtgaacggcttgcgcgcctgcagccagagttgcagggaaagctcgtacttactgcgagcagcatgtaatcttttttcttcctggacataaagatagcttgagtaaactgttctatttcattctcttcactctttttactgtcttgcaaaa

SEQ ID NO: 138648 - DNA, 858 bp, Homo Sapiens
  misc_feature (184)..(192): n is a, c, g, or t
tttcaagattaaatgtgtttattttgagttagttagtgaatacaatggtatattagataccagcactccaagctacacctatgtatttgcctctaactttcacacgttgtcagtttccttccctctaatattccaccactgggccttctatttctagcaaaatcatggttcaaattagtaaagnnnnnnnnntgatagcaagattggtcaccgtattgtgcttccagtgcccccagaaggattttaattgtctcaaatagatgtttattgttttcattaaaggggggaaaaaaacattatcactagtaatggcacaactagtagaggaaaccgtatgccgattataagaagcattttaggctggactagttaatttcccctcagttaaaaatcgacataatatcacggatatagacttcagggttaaattgttcaattcatgggccacacacttaagcgtttttggctagtacatttttgcactgaaacatgagcaatacaagttttatgttctaccattacacttccagatttttcacttatgcatttacctgctagcctaatgattcttgcatgcattaagagtttgcttttgtagagttaagtttattttccccatccctcccactcccataaatattgcgccaatgcgaactctgtgcccaattttatgagaatgttgcaaaggacagctctgtgccaccttagtacaggaatgtcctgtctccttcccaggctacagatggatcagtagtattgatctcatctcatcttacatgcaaacagacactgttcccttaatttccccatgccagaggatacgagctggcaggtatgcatacaaaatgggattaaaaa

SEQ ID NO: 138649 - DNA, 501 bp, Homo Sapiens
taaaatattcatgccttttcctcatgacatgatatacaaatatcatgaagttaaagatagacaaattttactaactaaacaaactcatttttagcaaacaattgataaataccattaaaagacaaataacaaattagaagaaaatatttacatggtatatataacaaaaaattgatattcagaatgtatagagattatcacataataaagaacttgcaaatcccagtgggaaaatgagcaaagaatacaaagaggaattgcacagaagaaaaagtatgcattatgtattaacaaatgaaaagttgcttcatctgtgtaatggccaaaatgtatgttaaaatataagacagcatttctcccatctcattggtaaacctaaaaatacatatgcacctcataaattcataggtcacttcagcatttttacaattaatatcacttttgttattcttaaaaagttgaaaaattaaatgagttaaaagcagtatgagagaaattatt

SEQ ID NO: 138650 - DNA, 1073 bp, Homo Sapiens
tttttcgtcctttcggctagaagtgaatacttttattgagtgattttagaagttgttttcggatattccaagtatttaggatgtggctgtggtggaaacaagtaatggaaccaaagccctgtgtgtaagtagtcactgaagctaaccaggtagctgaaatttatttcccccaaatttactgaaagaatgtgacctttgtgctctcaaactgtggttcaggcactccagaatttttttctgtaccttcaattctctcagatttaaaaaattatactagagaagaggacttttgcctatgaatacaaacaacattgcaatctgcatctgcaaacattcttttcaatagacggttaggtcatggatacaagtaaacacttggatataaggcaaacatttaaaagtgcatttcaggtattaagtcatgaatgatatggaaaagttgccactaaactttccactgaatagtgtttcacagcacaaaaataatctattttcctgatacttttttagtatggataccaagacagcatgacatcagttgtctaatttttttccaatttgatttaaaaaacccacatgttcaggcttaaaagatagcattatgtttaatgggtgctaggaaaccaggccacatggaccaacagacctaaatttactctaaccctgaattttgttagcacccaataaatgaattaattgaaatctggatttctctatacggagatgaagaaagtcttttagtgtagttattttaaaacaagttgctcctatttccttatcagaaacaagaccatatcaacaacccaacatttaaataatgaactgaaaatacttttaaaaaccataaaactcatctctatcccattcttaagtaaaaatcaatcttcactttctacttagttataagcaatcccacagacatttgaaaatcagtgggcaaactaaaattgttgaataaagccaaactttttcaaaccaagtatttgttaaatctcgtatgtattgtctactataaagtgattcaatattttactatagaggatagcatctatttttcaaaaatgtgagaaatt

SEQ ID NO: 138651 - DNA, 378 bp, Homo Sapiens
tttgttgtagcaagtcctcttaaaatccacttttagacacttcagcaatacagacctgaagtccaaacctagagctagcagcagggcaacaaactgcccttatttgccaagacagggctttcctgggacataagactatcggtgctaaaactgggagaatccggggcaaatcaggacagttggtcactccagatgtctaacaaaatgactcttaatagaaagtagctgtcacattgatgcattgttaaaatataaattttgagtgaaccaaataatgaccatatcccataatatttgggttgaaaatgggggttaatccaactcttggaaaatctgtagccatatatgcatgtttgttcagaccagcttaaatagaca

SEQ ID NO: 138652 - DNA, 540 bp, Homo Sapiens
  misc_feature (520)..(520): n is a, c, g, or t
tttgcttggtctttcaattttatttatcatatcaatctacctcccattaccaccatccgagtccaagttaccatcacctcagacctggacaaccacagaagcctcctcactggtctctctgtttccatcttggccctccttcagtcaattttctatatggtagccagagcaatttggaaaaagcactgtgtctttcactctaaaataaccgatgtcctgtgtatagttgcttaatagtcacgtgagacagttcaaagaaactctcattttgcaaataacgaaacccgaggccaaacatactgaaacttcaattccagaactgaggtcagaatttggaattcataattgcacagatgagcctcatttcaatgggccatgctgcttctcccaaacaggtatttcattttctgttatcaatgaaagacaaatgaaataatttgaattgatctagagcctgctttcagggctataaaatatgaaaaaaactgatcaccaggggacaaaagggatgacaacctgnactgaactgatacatttaag

SEQ ID NO: 138653 - DNA, 599 bp, Homo Sapiens
ttggatttgtctatgtttattcacacagatatttttgttgtagtttcctttaaaggaataagcagctaataaagatgggttctatttatagtagtgaataaatatatttaaacatttaaaatttggtttctaaatttctatgtcttattctaatcactgatttgtaatgttatttattgtttcttttttcctacttaggtgaaatctattcttgaaagaagtaaagaggagctgtcccgaacagtgaagtgtcgtaatgcggccctgaaagagagtcagaagttgaaagaagacctcgaggctgtggaggacagggaaaacaagaaggtgggaaactttcagcgacaattggcagaagctaaagaagacaactgcaaagtcacaatcatgttggagaatgtgctggcttctcacagtaagatgcaaggtgctctggagaaagtacaaatagagcttgggcggagggattcagagattgcaggcctcaagaaagaaaggtacctgtggttttttttccctgtcattggtattgctggattgtactaaggagcagtgtcaagtcaataaatgaagtcactttatgtagcttcctttacaaa

SEQ ID NO: 138654 - DNA, 498 bp, Homo Sapiens
ttttttctccagcatccataaggataattttaatttctgtatcttcagcatccatatggataattttaatgctaatagtccccactgggatgtcattaacttaagaaatcatttttatttttatagtacaaagcaaatgaatgtataggcacatttatttcaatcaagtcataatctgaacctaaaatgcaaagcaaaacattaacgtgcatttaatacgtatttcaagtctttgtaacagagaataaaaatcattacaaaattaaggtatgagacatcaagtcactaatgatagagttgattagacaatggcttccatgttccatctaacgacatggaacaatgtacatttgacaattcagccttaaagggttaagtagaataaactgcagccagctccttacactcaactgcctcagtaacaatgactcaaagaatagatattttccctatcaatgacaatatttcagtgctaacacttgcagtttaatattggat

SEQ ID NO: 138655 - DNA, 1105 bp, Homo Sapiens
  misc_feature (1091)..(1091): n is a, c, g, or t
ggaaaaagtttttctcaggtgaatcttttattatttccaactgagacaaacatttttccaaagacagtagcacagtcattgtcataagcatgttaatatgtctattttgcagaaaagaatatgctacaagtcatgcaattcacattttcaatagcattctgacagaaattaaagacaattccaattgtgtcaaacatttaatgaatagtaagttctactttctgcccttgggtatataaatggtgtctttcagtgaagtggtgaaaaacagatcatgtgatggctgcttcttaacagtgcccaccgctccaatgacagtcagcccctttggctgaatttctcagctatcttctgtagttccaaatccattgcagccaagttttcgagttcttttttctcgtcctctgtcaggactgtctggtcagccctgtccttttcattttctgcctcctggtgggtgctcaccggctcctcagaatcatagaagtctggaaactcagctgacttcttcctgtagtgaaggagctggtccagttgggccaccctgtcatattgccttttcaggtccagcttggggaccctggcgaggtttctcttctcatacccccagttcacatcctcagagaagggctttttctcccaccagtcatagttgtattctgggaagaaattcttctcgttcaaaggtcagctcattttccttcttcacccttgagaatattgtcattcatgttgtctcttctttcaaaatggctgctcttccactggagagggtcgtagtatgggttgaacagttcccctaatctcttcctcttttcagctgtgtgatgggagctatattgtttatcttgaaacctagcttcctccctgttttctttagtgtcctgcaggtctccctgctgctgccacttccctggggctccttcctcaccgtagttgagataatttctgtccagctctttccacgcaccttgtggatgcctccttgccttgtccatctggttttcttggacacggtggtgtccttcacccaagaaccttttctcttctctggtgtcagacatagaaataggcacgtgcctcgtgccgantacagccggcctca

SEQ ID NO: 138656 - DNA, 858 bp, Homo Sapiens
  misc_feature (543)..(543): n is a, c, g, or t
tttaattcaaataaatatcctttattaaagaaaaagaggaatattgttaaaagcaccaaaactgtaggttgttacattgcatgtacaacaagagaaaggtgattgcaatacttggtgtacaagtacttaactctgaagtcatgagtgtaaaaaacatgaaatacaaagcaatacaattacaatgcagaaaagctgcactaaagagcaaaaggcaacagtcaaaacgattactggagatttcatggtattgctataaatgcttgcttagtttttcctctgtacttttaatactttaggatgttaattgaacatatttaagtattgtaaatttgcaagagttggcatttacaatacactgtgcacactgtccatttaatgtaatggtactaaagccatccttacaagccaagcaaagcacaatgtgctagtgttttgcttctaccttttataatattgcacaaagctagtaaatggtgaatgagttttccattaaaattttcatttacccagaaccgataaaaatcatgtcagtctccttagccntaatgggcaattaattattcatgcaaaataatctgcagccttccatttttcattaactacatattatagtttgcacacttggaaagacatataatacaatgagaaattcaatgaaacaatggagattctgtcaaagttaaagaactcagaagtcactgtatgggtagcatcatttacccctcttggttcacaaatgaagggaaaatgccacctagtgattatgcagactttttaaaaccaatataattagtattgggaaaagctggaataatttgttacaccctttgatagctacccatagaacatgcaagtaaa

SEQ ID NO: 138657 - DNA, 919 bp, Homo Sapiens
ctggaaaaaacgattttacagtaaatggactttttacaaaaaggggaggggcagtctgaaaaagtaaagtttaatttaaaaatcatatacataaagcttctgattcattttcagctctcccactgtgtctttcacaggcgagtcagtttcccattgagtggaggccagttaaagatgccgccacggtggacagtgagccagcccttcctcaacaggtgagcaagagcggctgccactcaggcttgaacaatgcccatgacctgagtgacttggcagagaggctggcttcaggcgaggttcagaaggctagcttcttcatcaggagataaactctggagtccacctcgaatccatgcaggttgttggcatccccctgcagcctcatgagcaggcccccataggacacgtacgcagagaggcgtgttgctgcttcagtagaagtttcatctccctcaatcctgtacacttttccatacattacatactcaaactggtcagccctggaaggcctatcatcagtggggttgtattcaccatcatccagggtaccatcttcatacaaggtactagctatgaccaaccgaaacttgtcacccaagtctacagggtaaatttgaatgtttacatctaagattagatccatcttgaaagattcactctcacaatgcagtcgagacactcggtcaaacttcttgccctccgggtcaatatccttcacatcgaaaatatcctcaaacaggatgcccgccatcgcgagggggccacgagagcagcagaaggggtgagagcgcgaccacagttgggagtacgtgcaccccctagcgtggacaagaccggagagaaccaaaagcacctcctgaaagcgcggcggccagacgcctcgtgccgaattcgacaccaggcctcgtacttagcctaa

SEQ ID NO: 138658 - DNA, 542 bp, Homo Sapiens
tttttaacaatttttccagatcaattttatttaaaaaataagttgacagaaagaagcaaaagcaacttactaatatgtcaaacaaaacacaagtaccaaacctaattcagcacaggtaacataatataaatcaacaaaaattcgattaaatatttcacactagataaaaagtagggtgttctatttcccctacaaaatatggaagctgacttttcaattacattgttttacatgctctaatcacaagtactaccatgtgactattcactgtgtgcttaggtaactatggttatattttcagaaggcttgaagcaaaatactagtgacccactattcagatgtacagagtcaacctgaggtacactgcctgcaactatcttaatatagttaagaaattacgtataaaagtgaaatgagaaccactgaaactaatctatcagatatatgacatcaccatcaaacaattcttcagctccaaaagagcaaagcatctgagagttagtctaagaatgcatgtactttaacaacacatgtataacaga

SEQ ID NO: 138659 - DNA, 761 bp, Homo Sapiens
ttttttgccatttatttaaaacttttattaacgcttgaagaaaaataatgcaatgtgacaatgtacaggtcctgttgcctaaatccgtagtagaaacagatattatcacttagcaagctcacgtggtgccaattctgagatcagacggggttgttcctccttaggaagtggccactggaagcattgtttttccatgctatttccgtgaagccttttgcttggttcgagtttaaatttctccctttgtgtgagtatgactatagttctggcctggtgttttctatttatttagttttagatgtcagcattttactatacttggtcctctcacttcagaataacagggctatttattgatacaaaggagaggtgttcagatcatcttgttaagatgcagagctcaaaataaacactaaatctttatttggagatccacatccttcctcaaaggaaggctcatgagtaaatttgtatgcagtataaagcccaagtagagggtgtatttttaatgactactttgcttacattttagattgtgcaaatgtctcaatcaatgcttgcaggaatgtggaccttcctcagttttaagcagaagaccctgagcaataaatactgttgcatgcttccaataacgtgagggatgggatagaaatgctatctacccgacttctgaggagaaaacaaagcagtggcatgaaaaatcggacgcgtgggcggacgcgtgggtcgacgatatcccgaaaattccggaccggtaccac

SEQ ID NO: 138660 - DNA, 513 bp, Homo Sapiens
cagatttttttccccttaaaatgaattatctttccaaagattagactcagtatgagagtaggtgaggaacatagtttgtgtaatataatctttatttgcttacctgaccactttttattaagctgttttgtttaaaagcttttggttataggcatgaatattgttttgatggttaacttcactgacttatctgtaagtgtcattttatagtactttacagttgtcaaaaaaaatcttacatatattgatctagttgatcggtagaggaagcttgtgaagtaggtaggacaggttatgatgtcttcactgtatggacgtgaacccagggttctaataggttggcttgcccaaggtcacctgctagcttgtaaggtaggaatagggctcaaagtaaaacttttggttcagaagcttgactcataaactatactatatattcccaaaaatgtcagtattgacaacacagtctaactcttaaataaaattatgctaattagttacattcaaaaaaaa

SEQ ID NO: 138661 - DNA, 458 bp, Homo Sapiens
ctgtgtctctttaggtgtgcttatctgggagggagttgtgtgtctgtttccatacatcttcctgcagctgcaggcatacccccaggtctgcttttagcttccctatcttagtgcacctgaagggaaagaatgtgcttattaaggcccactgttatactggggcccaatgtatgagggtgaagtttggcaattacccaagagactttccccccacctccctctgtgcctgagctgtctcatctatgttttactgtctgctctttctgtctgcttgttgttagaagagaagtgattttcttgaaatgcatgaggctggaaagggagctggcacttaaagtggcggtgtttgtccgagaggatggtgctcctgctctgtcacagtgggcatggggattcagccactgccaccgaatttcaagagcccaagcacagagcccagaactaaattgtgagggttt

SEQ ID NO: 138662 - DNA, 1065 bp, Homo Sapiens
tggtaatataaaccagcgtgtacaaaaaagcaggctggtacggtcggaattcccgggatatcgtcgacccacgcgtcgaaaccttatactcacctgcgttttcattgtttgacattgtctattattggatttcattatcatatgaacttgtcagtgggaaacaaactgtctaaaaatttttctcttacgtttaacatacaatcatgtgaaatttaggcagagttcgataaattactggcaaaaacaaaactcttttataaagattttctaatgttgactttaatactctaacatggtacaaaccaaatggtaaaatcccaagtcatttcttttttcatctctatttagcaacagaattaagtggatgaagatattctactatgcattaaatcttgaactttataaaacatgtacaaaaattgtacaagataagttccacctggtaatgtctttccctaatacagggttgcgcttgcattggaccctagggatttgcactaaaattatatcaaggtctcagatgagcttagtgcacaagcactatcactttaaatactattatttgctaccacagcaactatatatttccatagcttttggctgggggcgggggacatttttattacaacttgaaattgctttgctggtttcatatttatttgttgtatttaaaaaatacattgttgtaagagtgattttttcaaatatatttttattcctgggggggatcatgctacactctcaaaagaaaattaagaaatcattcagatcatcccccctttttaagtagtgtgaattgcaaaacccaacatattttttttactgtcagttgcggtttatttattctttaactgtctgttttagtagtttaatgattatgaaaaatgtatctgtgtgtgatttgctatttattaaattttaagtactttgctgaatgtcattttaaagcatgtttgaagtcttgtgtatttgtctgtgttaatgctgtcaggaggaactgactaagatgttttaatatgtatcaaaaattaaaatgattttttttattgccttgaggtacttttt

SEQ ID NO: 138663 - DNA, 1526 bp, Homo Sapiens
ttttcacttttacaaatttaatataaagcaagtccagtcttaaaaagacaaaccatatcactccttgctgcggcaccctttctgggccaggtctcgctgggaggtagaagagggcgagctggagggggaagggacacactttgcccagtgacactgagcaaagcccacaacagtggccccatggctgccactttgaatcccaagggctcagaagtacccagcaaggcctggacctccaggcagggcgcacgggtgaacgagcagaggctctaacagtctgtgggggaaggggacagaggtgccaggagatgccctcagggttccaggaatcgctctgacacaaagtcgaagtcccggaaggcggcctgttggcgggcagtgaggaggctgtggggtgcaggtggggtcagggcaggcggcagccctgtgaactcgccctcaaagtagcgcaggtccgcagggccacacagggtaggcacgaaggggggctggatggtgcgggcgagcagggcttgccagttggtggtcctgaagaatggctggaccttgatctcctcggcatcctgctcacctgcccggaggcgctttctccgggcacttctggaggagctttttgaattgacctcaagcccttgcaccggacagaaagccggggtagggggcgtccatgttgacgatgcagtcaaacacctcttcctctgtgttcccctgggaacgggcactcacccaccagcatctcgtagagcagcacacccagcccccaccagtccacagcccgtgtgtatgcctcctgggtcagcacctcgggagccaggaactccggggtgccacagaaggtgctagtccggtccccgaagccgatcccttccttgcagagtccaaagtctgcgatcttcaggaatccctgggcatccagcagaaggttatccaacttcaggtccctgtaaatgatcttcttctcgtgtaagaactgcagccccaggacaacacaagccacgtagaagcgggcctggggctcggggaagacatcctcgtggatctgcatcatgaggtcaccaccaggcacaaactcagtcacaaagcaggcatggctggaggtctggaagcaggcaaggagggagagcaggaaagggtgccctgtgcagcccacagcctccaggatccgcttctcgcagtacaggctctctatctcgtcccggctgagcacctcctgcttcttcagtgctttgatggcgtagtatttccctgtccccttgaactggaccaggaggaccttcccaaagtgtccccggcccagcacagctaagcagcggaagtcctgaagccgagggggtttcctggtgggggaggctggtggagatggcccacgtcgagtcctaggctccatatggggacgtttggtgcgcggagtctcctcggatgttggctccctgggggaggtagaggccgtgggggcttgggctgggggtgtcatctcttcacccagcctcgtgccgattcaaccacccggcctcgtacctagccta

SEQ ID NO: 138664 - DNA, 1878 bp, Homo Sapiens
  misc_feature (28)..(28): n is a, c, g, or t
  misc_feature (1855)..(1855): n is a, c, g, or t
ttccagcctaggcactgacgccataaancggtgcctgcctgaaaacagccagaaatcagttgtccatgatttctctcttaaggcttgagttgttgggcatggaaatcacagtacagaattgaatgaggtccatcaggagcccatatttcatgtacagaggccaagcgtcttctctggtcttctgctataacagtgaaatcattaaacatctattgttgcttatcacatgactatgaggtttttcaaatagacctgacaagccctttgtttctaacaaaaaaaggggatgataactcgtagagcttctcattattttcagccacaactacacagaccaagagatcataatacaaagcttttggccaaataatttaaaagtattacagcaaggacagggaaagatgaaaatcaatgacattactggaatgatgtaaacatttcatcatctgcataatacataattttttattcttgtttccagggagtttcacatgatattttaaagcagaagcagattctccacatgtagaacttggcagacaataataacgtattatctatgccctgctgggatacaagcacgcattcacacctcaatagcaatcctcgcaaatcgatactgcagagaggcgggaggcgtcagtagcactaagcccctctgcgctgcaggctggctggacaccatatccagcaagcctgtcaagctaacaaaccccagggcttctccacagccaacagccatggaaaaatctccctgagtcacaaagcctaggagagttctggagcagtgcaacgtcacacgcggcagagggcctgaccacagccctagagtcagagcttcctgcccagccacgggctcttcccccgcggggccatcagaagaggcacgtcctgggcttctgcttcttctgccttttcttcttctctttctgtttcaggatcttgctcctgaatgggtcactgtgtttggattcctggggcccacagtaatgccagtcctcatggagctggaggaagtcctccttggctgggacacagatcatggtgtgaggctcggggctgcccttgctgagcagggacacggctgacccaaaccagggccctgggggaagtggcccaagatggacaggcaagcctctctggtcaatccttgctggcctctgccgggagctcgccggcctccccgactatcctcagaactgggcccacaccaggctgacagttgcttcagtaattttctactcctgagaacgcagaggtgactccctgtggcagcaacatggttttcactggcctcctggtctgtgatcctctcaggccctgccgattcttgacaccctgcatccattacctcctctgcctccctggggtgctctatcggatgtgcccacttcatcagatggctgatgagttttctttaggcatgggagcacaaggcacctcagatcttcttaggtcactctccttaccatttggagatgaagctacagaaggttcttcgtaagcctggactcttgactcccagtcttgagttaactgctcccagggacagcagaaaggtgccagagtgccaagcttaacgtagttgggccgttttgcacggagggcgtctctattgtacttttcaagaagattcttagcttgctcttccgcaaacagcatcccggcagggcagtctggaacatcgcctgggacattaggcgacctcttatactgagaatgcactgcagactctttcaaccctccgactctcacacctcgataaataaatggaatccagaaagccatgccccagccctttgggagtaggacatcccagccacttccccagcctagttccctcgtgccggattcnacacccaggcctcgtactagctt

SEQ ID NO: 138665 - DNA, 1122 bp, Homo Sapiens
tttactaataaaacatttgaaaatttacttcagcaataaaatataagctgacacaatcacgtcgtgtcttaaaaataaacaggtcaaagaaaagagtatttttacatcagtccaggaaagtcaaaagcatatacagaggaagaggtttctccaaaactcgtacactccagagggctgaggggcccgggaaatccactggctggcggcccttccggatgaatctttagggatttccagcataagtacaaaggccacaacaagtgagctcaggctcttcagcagcctcatccttcagctcactaggttttgtttctgcctcttcggggattttccccactttttctgcaggtgccgggagagggcttgttggtatcgaatcatgctaaaaacctaagtttttattggaggatgtttcctgtaagtccatgttgcttggcaattaagtgattttgccccaaggagagaatcaagctgctgagtggctgatgatgtcattttcttctgccatcttaaatcaaacctcagtggggaacagactctcactctaaattctccttaccaaggacactgtgtaagtcacctatgatacatatggtcagattctcatattttaattcaaataggggttatcttttttctttgacaaaagcaggtggcctgacctacgatggtcctggggcattctcatctgattcatatatgaattcttccacgggatcctctgtgcaaccacttgcccaaagtgctgaatccctctgcagagagaaaggaaaacactgtgagcgtcagaccatgctgtgtcctgtgtatacaggtcttttcttcagttgctgacattaggaaaccagacaagaaacagtgctcgaggtaatggccccaaaataaagcctagaagacacttcgacaatggcaatgacttgctctgaggactccccaggaagctctgctgccacaggcttgacacctttctcaaagctaagatccttccttagcaaatgggagatcccagagtgcatactgtagagctgaatcgctgagtgtgtcttcaccttcaccacagcagcagaggctgcctcccattttggtgagcagtctagctggcagttccaacacagcagcccc

SEQ ID NO: 138666 - DNA, 427 bp, Homo Sapiens
catttcctgtctctttcaccccagcccttcctgcgtgttacccacccatgcccagatcatccaacccttcctccccccaccctggcccctgactcataaacattcatcagctcccccatgaacaccctgcactggcccccaaatatcagctcccacatgtcagcgaggctttgaccaccagccgctgccccccagtcatagaacccaaaagaggtgacagttgttttgctcactgcttcctctgggcagggagggctaatattttggggaatgggcttcctgaattgagggcctggggcccatttcagagactggaggggcccctttttcctgataccacctcattcttctacagccggaagggggcagggaagggccgcgttggaggccgctggaagtgaggatgccgccccggacagtggcacct

SEQ ID NO: 138667 - DNA, 1139 bp, Homo Sapiens
gcatctcaaccataataacatcagagaacccagcgggtgtctgaggggagcgtttatttcaagctaccgatgggacaaacactcccaggcttcccaggtgccactgtccggggcggcatcctcacttccagcggcctccaacgcggcccttccctgcccccttccggaacttctgggcgtggctgatgcggttgtacagcacgttgatctcatatttctgctgtttcagcttcgccatcaggtcgaacttctcagactccagctggtggatccagtccgacagctcctgggctttctcccggagctgttcctcccccatgtagtcaatgtccagaggcttcttacgctcggagaggatgcgcaccttcatctcccgccccgtctgccgcttaccacgcttctgttctgccttgaccaggtagccgccaaaatgggcccccatgttggacagcaccttctttttcttggcatcatcctctgcccgcttcttggcctcttcctcttccttcctcatcttctcctccgccagcttagcctgacgttcgcgttccttctcagttctgaagcgctgttgctcggctctctctgaccggcgccgctcaatgcgctccttcaaggcaaccagctcctcttcctccttcttccgctgctcgaaatgtacatcgatgagtgtctgcagctccagcaggtctttctccatgcgcttgcggtggatgtcatcgaagtcaacgcgctccccttctgggatctttggcgggatcaaaggaggcaccacggggcggcttggtttggggcgttcctcttcttcctcctcctcctccgcagcctcctctggagatgggggcacagaagagaaggcgttaggagctgggggagggatgggggcggtggccagagaccagggttccagtctctgctggacgggggtccctctggcctcggctgcgatgggcacgttccccctggcggtgcagggatggcgcgaggagacgctccagacccggagagggcgggcgagggcccgagggctgagccgccccttccccgccaaagtgccacactcctccctcgtctgagaacgccacccaggctcgctccttagaccttttcggccagtaaagaaagaaaggaagaaaaga

SEQ ID NO: 138668 - DNA, 1344 bp, Homo Sapiens
  misc_feature (260)..(329): n is a, c, g, or t
taggccccagttaatttttgtttttaaaatttttctataattgggcataaaaaatggggaggaaagttgctttaaaaaggtaaaagaatttcaaaaaccctagtttttctcagtggttccatgataaggtccaaaaatgctccgaatatagtgatattagggttattcagcccttcctagttgtacttttaataggccattgggttacttataattatattcaattatcactaatattgtgatatttgtgcccagggtannnnnnnnnnnnnnnnnnnnnnnnnnnnnnnnnnnnnnnnnnnnnnnnnnnnnnnnnnnnnnnnnnnnnnataatcaggtgggcagagctgaacatgaaccccaggtctcaaggacccaaggtccagtgctccttccattagttcaagactgactgtggttaagcagttaccaagagataggaacacagaaatagtaatccctctttccccatgagagtcagttcctgaacaacccccaaggtaagaaagtttcagctgaggagatcatgatatcgggaaggaaaaaaaatgggcaaaaatgaggtctcaagtaaactgttgaaaaccctcataaatatttttatgcaggtaaacaataacaacagcacattacataaaaagaataatgagtttacatagtttaaatcagtaaaaatgataggctttatacagtttccatttagatcctgagatgatttccagaggtgatgaagatgtatctatcactcattatggtagtggcaaatgggggtgacagagaagcaatgaacagaagtggactattcattagttcaaattatggatgtctatactcttagagtcagtgaagtcgaatcctgaagttataacaacttgcttgaggctttatttctatcaagcaagtgaatttaagtggcccttctaaagatgctttcatcttctcaagtcctttttgaagacaccttagcagttctgtatggagttcaatttaatcattcaatctttgtctgaaggtagcttattagctgtccagtaagagtatttaaatggtactacttgataatttagacttttctgaggtttctttcttcccaatatagtcttttagaaagtctcataggaccttttattagagtctaattaaatcaaactttgtcagaaggtagttttatcagctgtccagcaacagtattaaatggcacatgatttaagttctattgaagattgtttctgtccaatatgattatgtttgatggcatcatagcacctctttatagaactctaagtcactcaaacttgaacaggcggacgcgtgggtcgacgatatcccgggaattccggaccc

SEQ ID NO: 138669 - DNA, 751 bp, Homo Sapiens
  misc_feature (85)..(154): n is a, c, g, or t
  misc_feature (156)..(156): n is a, c, g, or t
  misc_feature (183)..(183): n is a, c, g, or t
agggtaaatttttgtattttttagtaggaggaggaggttttcccccatgctgggccagggtgggtcttgaactccctggacctcnnnnnnnnnnnnnnnnnnnnnnnnnnnnnnnnnnnnnnnnnnnnnnnnnnnnnnnnnnnnnnnnnnnnnntncatagtagttttgatttacacttcccntaatgattgtgtccagcatctactggccatttgttagtggtttttttcttcttttaagaactgctgagacatccataaacattttcaaaatgcagggtatgtttttcagtgttaaggcaactgttctgatgtgtttttcctttgctctctatcaccaaatactgtacatataaatagtaagactgggctttgtgttgtccattgttaatcctaaatgcaacaaaacacatggagactttgaaaatccttcagaataatgctatagttaagattttgctaaagcaagtgttttttctaactccttgagctgcatattgccttgagtaatcatcatccggattgtatcctcttcggtggcacttttgtttcttctgaattcttctcttgcccaatctttcaggtatttgcgatcagaatcatttggaacttgccgaattgtttgcaaaatccttctgtagaggagaagaacttgttgccttcttacgaactgctttaacgttagcgtcgctgggggtaagcgggaagcagccatgtccaccagaggtccgccggagcctcagcgcgcccc

SEQ ID NO: 138670 - DNA, 539 bp, Homo Sapiens
tttttaacagtattcataagtgtttaataaaaacaatctataacttaaaaattacaaatttatatagttagcccgttttgcatcactataaaggaataactgaggctgggtaatttataaagaaaaaaggtttgttttggcttacggttctgcaggccatactagcacggcaccaatatttgcctggcctttgatgaaggccccaggaaggttacaatcacaatggaaggcaaagggggagcagactcttttaagccaccagatctcacacgaactgagtgagaactcactcatcaccagtggctctaagccattcatgagggatcatccaccatgacccaaacacttcccatcaggccccacctccacccccaacactggggattacatttaaacatgaaatttgaaggagacaaacatctaaacaatgtcattctacccccagccccccaaatctaatgtctttctcacattgcaaaatataatcatcccttcccaaagtcttaactcattctagcatcactcaaaagtcctaagtc

SEQ ID NO: 138671 - DNA, 1098 bp, Homo Sapiens
cgtggggatttttatgtccaaaggtgtgttataatgtatttcaggctgtttccggaaagttttaggccttatatcccattccctttgggaatctgcccatcggggattattaaacccccagaaccctcttggttggatccggatactgctgtattaaaactctgtgactttggaagtgcaaagcagctggtccgaggagaacccaaggtttggtatatctgttctcggtactatagggcaccagagttgatttttggagccactgattatacctctagtatagatgtatggtctgctggctgtgtgttggctgagctgttattaggccaaccaatatttccaggggatagtggtgtggatcagttggtagaaataatcaaggtcctgggaactccaccaagggagcaaatcagagaaatgaacccaaactccccagaatttaaattccctcaaattaaggcacatccttggattaaggattcgtcaggaacaggacatttcacctcaggagtgcgggtcttccgaccccgaactcccccggaggcaattgcactgtgtagccgtttgctggagtatacaccaactgcacaggcttccagtgtgtagtcgtctgttggtgtatacaccagctgcggttaacatggaagcttgtgcacattcattttttgatgaattacgggacccaaatgtcaaactaccaaatgggcgagacacacctgcactcttcaacttcaccactcaagaactgtcaagtaatccacctctggctaccatccttattcctcctcatgctcggattcaagcagctgcttcaacccccacaaatgccacagcagcgtcagatgctaatactggagaccgtggacagaccaataatgctgcttctgcatcagcttccaactccacctgaacagtcccgagcagccagctgcacaggaaaaaccaccagttacttgagtgtcactcagcaacactggtcacgtttggaaagaatattaaaaagagaaaaaaatcctgttcattttagtgttcaatttttttattattattgttgttcttatttaaccttgtaaaatatctataaatacaaaccaaaaa

SEQ ID NO: 138672 - DNA, 428 bp, Homo Sapiens
tgaagctgccattaaacaaagagatggcattataacccagctcactgctaatttacaacaagcaagaagagaaaaggatgagacaatgagagaatttttagagttgacagaacagagtcaaaaattacagattcaatttcagcaattacaggctagtgaaactctgagaaacagcactcatagtagcacagctgcagacttactacaagccaaacaacagatcctcactcatcaacagcagcttgaagaacaagaccacttattagaagattatcagaaaaagaaagaagacttcacaatgcaaattagtttcttgcaagagaaaattaaagtatatgaaatggaacaagataaaaaagtagaaaactcaaataaagaagaaatacaggaaaaggagacaatcattgaagaattaaacacaaaaataa

SEQ ID NO: 138673 - DNA, 509 bp, Homo Sapiens
tttaatgttttaactggcatgtttcttctttgtccgctaaaatgtattgacaccacacatggaataatgcattatgacaataattaactttttgaagtttggtgttttgagagtatgaaatgaatgaataagataaaatatccttgcatatgcatgtaagacctataaggaacgcagtattgaaaataaaggaatcaaaatttttacccatggaattttagggttgggtaaatcattcatttatcttaaatctatggtttgctggcagttatcaatctgctcaattttagcattgttgtatacaagaaagtaaaaatttaggtataacataagccagcctcttaagttctctatagtgattatctgtgtactgactgaatcagtgaatgagaacactagacataccagaaactcgtgcttgtcatctccaagccaatggacttaactgtttgtggcatttaagtccataaaacatacttcactgtcaaacacataggcttataggtttc

SEQ ID NO: 138674 - DNA, 941 bp, Homo Sapiens
tgattagtcggaaaaagaagcatcaggctgaacctaaagacaagcacctgggacccgctacggctttcttgcaaagaccgtattttgattccaagctaaataagaacatttactcagacataccaccccaggtgcctgtccggcctatttcctacaccccgagtattccaagtgacttaagaaacaatctggaccgaaattccttcgaaggatctgctatcccagagcatcccgaattcagcacttttaaccccgagtctgtgcacgggcaccgaaaagcagtggcggtctgcagcgtggcgccaaacctgcctcccccacccccttcaaactccccttctgacagcgactccatccagaagcctagctgggactttgactatgacacaaaagtggtggatcttgatccctgtctttccaagaagcctctagaggaaaagccttcccagccatacagtgcccgggaaagcctgtctgaagtgcagtccctgagctccttccagtccgaatcgtgcgatgacaatgggtatcactgggatacatcagattggatgccaagcgttcctctgccggacatacaagagttccccaactatgaggtgattgatgagcagacacccctgtactcagcagatccaaacgccatcgatacggactattaccctggaggctacgacatcgaaagtgattttcctccacccccagaagacttccccgcagctgatgagctaccaccgttaccgcccgaattcagcaatcagtttgaatccatccaccctcctagagacatgcctgccgcgggtagcttgggttcttcatcaggaaaccggcagaggttcaacttgaatcagtatttgcccatttttatcccgtcgaaatgtctgaacctcaacaaaaaggcactggtggagaatggtacttgtgggaacccccatgcccct

SEQ ID NO: 138675 - DNA, 1691 bp, Homo Sapiens
  misc_feature (41)..(45): n is a, c, g, or t
  misc_feature (54)..(54): n is a, c, g, or t
  misc_feature (63)..(63): n is a, c, g, or t
  misc_feature (65)..(66): n is a, c, g, or t
gaaaggttttttgaggggccgaaggcggccgaacaagggannnnntttatgttngcagggggngnntcccaaaacatatttcttaattccctccagagaaacaggctttagtactgaggtccttgtaaacatttaccaaaactgttttaagaacaaactaaaagcatctatatccttgccctgtgttgctggggtgagtttatacaaggagaagttggaacaaatgcagtgggcacaatgaccttcttactcagttcaaagtaggtcttgggatgagagtttcccccgggccagtacagctgactttctgtgatttccaaggggtgccccagacattaaacgcccatggtccttgggaaggactgatgatgtttctgctcattgttgatcagggtcaaaccttttcactaaccgggactgctctttccaagaagtcagaggtcagaaagctggtagcgtcgtacaagaccgtctcgacagcatgtgtagatctgcttctcccatgtggctaccttgtacacagggtcacagtcagccccagtgagctcagtgacatagtctaagtcttgctggacaataaaacagcttccatcaccttggctagcaatgaatccatctctgacacttagcagggatagaactggtgctcctgatctgtggatgacttgtaccggagcccttggactcctcacatccagctgataaatgtttccatcttgagtcccagccaatagcaagaagccagagagaaaagtacagcagttgaaagcgtctgagccaataaagaggaacaccagctgcctgctctgtagtcccaagcactgaagtttcttatcttcccgggccaagagcagcattttggcctctgttccaacctcccgttcactgggcatctgctcaggggagccaaggtttatggagttgtcagcagcacccaccgccactccattgatagaagaaccacaatctgcaaggactcccaagcaggctgagcgcccacaatcccaaagtcgtgctgtcccatctcgagaagcagacaccacattcctcccccgatcaacgatggctgtatccaggatacctcctttgtgacctttgaaggtcaccacgcagctagcatcttcagctgaccatatcttacagctgggcatccattcccccactcaggaccacaaggcctgatgggaaaaacctgcaacaattcacatcaaacacatgtccttccaatactctcctgagttctccattggaagcctgccagattttcatggtcccgtcagtaactagaagacacaccaagacctcctctgactggaaatgtccaggcatgttatactctttgtatgaattgctggaaaaagtagtatatggtgccccaaaaacttagaagatgcattttcctttggacatgaaatatgaatgctttttcttgtttatgttcagttcacagtaaatccttcctgaagctgtaaccttcgtgggatgccatctaggccaattccttgacaagtcaggctgccatacaaagatggctttctctgggggatgacagtctcagccaggcctccccttcatccttcctgagggcttgcgcccagtcgctctgaatcctcaaaggcgccgccatctcgaccccgcctccaccctcgtgccgaatttaccacccagcctcgtacctagaccgtatagta

SEQ ID NO: 138676 - DNA, 673 bp, Homo Sapiens
  misc_feature (508)..(572): n is a, c, g, or t
gtcgtgctgtcccatctcgagaagcagacaccacattcctcccccgatcaacgatggctgtatccaggatacctcctttgtgacctttgaaggtcaccacgcagctagcatcttcagctgacatatcttcagctgggcatccattcccccactcaggaccacaaggcctgatgggaaaaacctgcaacaattcacatcaaacacatgtccttccaatactctcctgagttctccattggaagcctgccagattttcatggtcccgtcagtactagaagacacaccaagacctcctctgctggaaatgtccaggcatgttatactctttgtatgaattctggaaaaagtagtatatggtgccaaaaacttagaagatgcattttcctttggacatgaaatatgaatgcttttcttgtttatttcattcacagtaaatccttctgaagctgtaacctctgggatgccatctaggccaattccttgacaagtcaggctgccatacaaagannnnnnnnnnnnnnnnnnnnnnnnnnnnnnnnnnnnnnnnnnnnnnnnnnnnnnnnnnnnnnnnnaggctgggggatgacagctcagccaggcctccccttcatccttcctgagggcttgcgcccagtcgctctgaatcctcaaaggcgccgccatctcgaccccg

SEQ ID NO: 138677 - DNA, 696 bp, Homo Sapiens
tttttccaaacatattttctttatttcctccagagaacaggctttagtactgaggtccttgtaaacatttaacaaaactggtttaagaacaaactaaaagcatctatatccttgccctgtgttgctggggtgagtttatacaaggagaagttggaacaaatgcagtgggcacaatgaccttcttactcagttcaaagtaggtcttgggatgagagttccacacggccagtacagctgactttctgtgatttccaaggggtgcccaagacattaaacgccatggtccttgggaaggactgatgatgtttctgctcattgttgatcagggtcaaaccttttcactaaccgggactgctctttccaagaagtcagaggtcagaaagctggtagcgtcgtacaagaccgtctcgacagcatgtgtagatctgcttctcccatgtggctaccttgtacacagggtcacagtcagccccagtgagctcagtgacatagtctaagtcttgctggacaataaaacagcttccatcaccttggctagcaatgaatccatctctgacacttagcagggatagaactggtgctcctgatcgtggatgacttgtaccggagcccttggactcctacatccagctgataaatgtgtccatcttgagtcccagcctatagcaagaagccagagagaaaagtacagcagtt

SEQ ID NO: 138678 - DNA, 566 bp, Homo Sapiens
aaggaaagatgattaagacctagcctcaggacacagacaaaactaagggcacgttaaagtctctaaaggaattaagacacccccacctcgccctaccctaaccctagtaaatccttttagttgagcaaaattgctacaggaaaagtgattagtgacatggtctcacagaaacctgataagctcaaagtggcctgtaattaaatccagaaggagagatatgtctggtaaatagttacctcaaaagaggtgtaggtgtggctactggcccagggagtaactaaaatcaaatggaaataaaaattgatcattgtttagcatgaatgatatccccaaaagagacaccagcctggtctaaaagagactgtgaccacaggggacctaaaacaacttttggcaccccaaattgctataagcagggaagtagcctgagaaagctaccaagtccccaatgaagatatattctctaatactttttcaggtgtgtccgaacaggatgatcaaaaaggaaaaatctcccagagggagaagtcaaaagtcagagagaggccaggcgcggtggctcacac

SEQ ID NO: 138679 - DNA, 2142 bp, Homo Sapiens
  misc_feature (48)..(87): n is a, c, g, or t
  misc_feature (318)..(370): n is a, c, g, or t
  misc_feature (394)..(425): n is a, c, g, or t
  misc_feature (441)..(452): n is a, c, g, or t
  misc_feature (473)..(473): n is a, c, g, or t
  misc_feature (493)..(493): n is a, c, g, or t
  misc_feature (506)..(510): n is a, c, g, or t
  misc_feature (516)..(557): n is a, c, g, or t
  misc_feature (561)..(563): n is a, c, g, or t
  misc_feature (565)..(567): n is a, c, g, or t
gacccaccccgttttcccggtccgggggttcaaaataattcccccttnnnnnnnnnnnnnnnnnnnnnnnnnnnnnnnnnnnnnnnnagataaaattactaaaccgagcggccgtgtaagaaaggggccatcgccggggggcgccaatatggttttgtggggagggtccccctgcggttgccttgggggggaaagggccccgagggcgcggccctttacaaaaaaacaccccagcggggggttttttgaaaaaccccccctgggtatggggcccgggaaagcttctttattagggggcgggagtggaatttcttctannnnnnnnnnnnnnnnnnnnnnnnnnnnnnnnnnnnnnnnnnnnnnnnnnnnnacaacgcttgtgggcgccggcccnnnnnnnnnnnnnnnnnnnnnnnnnnnnnnnntcctgttgttaggttnnnnnnnnnnnncacaatgggcgaaagggagtntgggggggtattttttgggntggtgtggggggnnnnnaaaaannnnnnnnnnnnnnnnnnnnnnnnnnnnnnnnnnnnnnnnnntttnnntnnnttatggtctaatatgggctttagttaatatttccaataagtcaatttcaactgtcagtgagaaaaataaagtttatttcttgtacagaagtaattccaattcaggttttaagtctgaaccttcaaacttgggaagtttttttccaagtcatcagcaagcgccttatcaacttcacgtaggattttaataaaatcttccaccacagggctatagaaaggaagaaggttttgaaatgcagaggaacacttctgtttgctcaactggccttcctttactccctgagccaccgtctcctttgttaatgcctgaaaaatattagaaagaaattcacataaaatatcctttaagattttcaagtggaaatcatcttgggttaaatcagtccttttagtttcctctgtgttagactctgccgagttctctggttttttctgacactgttccatattttgtaagacccgaatgaggctgtcaattagaggaagatctactttttctatctttagatactcttgctcagtctgtgaggcatagatggcagacaacactgaaaaaacagaggctagcactgttttctgttcttgaagaatgatgggtggatcatcagactggcagaattcatggcagaccaggtcaaaaagtaaattccaaatgtcttttccagtgtcaggacaatgtacaattgcttgaattccatcatccactgtagtaagcagttgtaaaatgtgcatgtaaacatcaagccattctggattttcagaacgtacttgtttggcagcttcaagtatacagggcacaagccgaaacactggctgctcttcagactcttcctggggttggtccagaggctgagcagccccatttctgacccattctaacattagtttctcatccaaatcaaagagcttgtccacaacctcccccaccttcaccagcaagtcaacatttgttgaacttgacataatgaagcaaatgctatcataaatagctggatgttcctggatcctttcaacccaaacactggccacttctgcctgggaaaggcaagtaagcaacaacctgcttgtttccagcagagtaggtgggtctgaatcatacaaacagtgcaataacacctgcccaagatttttatcactgctgatggacacacatatctcctggaaacaggccatattacctaaaattcccacacagatttctcttaatcgaggacacttggacttggccagtactcccatgaatatatcaggagcattaaattcttggagaaataaagccacgtcctcatccattgacatatcccatactctgcaaatttcattctccatttcttcatcaagctccgtcagctgctcctcatcatctgagctagatttggtgttttcagggctaacaatctggatgagtccgctgaggacgccgaagagccagtgtttgctgtagaccgtgctccctatgcagtctccaccggccacctcctcctcctcctccttgtcgcgacccggcggcggcggcgaggggttgcggtccatgactttgtcgcgtcccgcgcttgaaggccgtgcccctcgtgcc

SEQ ID NO: 138680 - DNA, 1326 bp, Homo Sapiens
tgtctattctgcgttctttgctgcttgtgcttcctcgtttcctccgtgtctggttcgggtgcgtcgcttatgttcgtttctgatggctgctttttcggttcactcccacctcagtgcttcccgtggcggtgctggctctgtctactcgtgtgatcgtgcgcgcctcggtctggggtggttgtcctcatttttttccgtgggggctcgtcctgtcgtttttctctctcctcgtcctctcttcctttctacccacgaggctcctttgccagctatgtgtcggacactgcttgggatcttgtcccagcgtgtgtactggttactacattcgggttgttctgtcctgatatgtgtcataactcctgcgtgtaatccccctctaaatgggtttttcttaaggccccatttctgctagaaattctctccgttagaatatgtcgttcctccttgcggcctttatagcgactttctaccacttatattgtccgaaggggcccccattctccgtgttttcccccatgagcaaatgggctccccatttgggccacagaactgggttctttcatccggccatagatggccctccaagctcaagactcgtttttgttctcgatcatctttagttgttcccaggatcttggcgcctgtttaatttggcataaggtgtgtagcagggtctttaggtccttatgggaaattcacttttgcatgcttcagtttctctttggggaagaccttcatgaaaatgtggatatccagaagaattctgtctaggttaatgctattgatggtatcaggcaacagtcgaaccattctccagagacacttcataacaagctctgagaatttgggagaactggctgttgctagcaggctgtcttggagcaaaacaagtagggcactcaggatgttggtctggtctgacttctccagaaccttcaccaccaagaggttcacagagcggatgacctgttgtccttcctcaagatcttcaatccgagaatccagcattaaggtgatgaggccatgcattaggtcttttagtactccagtggaggcctcccgggcaaggctctctatctgaaacagcgaaatcatgttgccaatgatacagctatacaacttgatgatctcgtccttctccaatttctcatctgccatgtgtgtgttgtagatgagtcttagctgcataaaagtggctatcagaaactgatcaatatggccggacatggcttcagctttgtcttcctgtctcaggacctcatcgatctgtgtcagagcttggatacttgtgttgatgtcaccactggctacttgggagataatgaa

SEQ ID NO: 138681 - DNA, 265 bp, Homo Sapiens
gttggtgctgttgttatttattattgtaatttcagtttgcctctactggagaatctcagcaggggtttcagcctgactgtctccctttctctaccagactctacctctgaatgtgctgggaacctcttggagcctgtcaggaactcctcactgtttaaatatttatttattgtgacaaatggagctggtttcctagatatgaatgatgtttgcaatccccattttcctgtttcagcatgttatattcttataaaataaaagcaaa

SEQ ID NO: 138682 - DNA, 391 bp, Homo Sapiens
ctcagctctaactataattttagtcaacataagaagacgttaaaatgtgtcccactggttcattcaactgttaatagaaaaaagtggctttaaattgtgaagtctgaaagtatagccattctaatttacagataacaaaggcaagtcctaggaagaaaagtgaccacccaagggcatccatccattcagagatcaagcaatgtcactgttttcaaatctgcctgatcatcaatattttgctttgttttgttttgttttattaatggttctggagtcccagtccctacccctggaaattttgctttagtaatatggggtgagatcagaaatttcattttttaaagagatcctcaatattctaaggaaccacagatcataccagactacttgg

SEQ ID NO: 138683 - DNA, 799 bp, Homo Sapiens
ttacgttacatgcatttttccacaatgaaaaaaatacaagggggatgatgttcatttttccttctatcttcctcttcctcctacccctggattccggtcactttctccagttctttcagggccgtgtcagtgtcctggaccaggatggtgaccattcccaagtcacgggctggcttcagattagccccgatgtcatccaaaaaaacgacctcactggggctggccttcagggtgtccagcagaaacttgtagatctgaggttcaggtttgaccattcccacctgacacgactctatcaggaagtcaaagtgcatcttcagctcacacatcagctgggccaggccatctctctcagcacggtcgtccagccaggtgttggtgaggatggcagtagtgaatcctttcttcctgagcatgagagctgcctggagcatggggcggttgatctttctggctgaaatcgccttgtcaaagatttcttttatggagaaattcttggggaggcagactttagcggtctcggagcacttcctgcagttttcttccatgagtggtatccactgggaaagtgtgatctctcctttcataagccgggtagtggcaccctctggtccccctttctggaaagcatcattcagaagtcctctgggcagcgccagggcctcctccgtgcggccgaggacgccgaacaccgctggcagcgccagcaccccgtcaaggtcgaagacggccgcgcgcagcgtcatggcggcgggtctgcagcctagcacccggacacgcagctaacctgggagatgcg

SEQ ID NO: 138684 - DNA, 725 bp, Homo Sapiens
  misc_feature (45)..(45): n is a, c, g, or t
  misc_feature (246)..(246): n is a, c, g, or t
  misc_feature (254)..(255): n is a, c, g, or t
aacccttttggccaggtccagcaggctcccacaaaggtttccttncggggtcctccctggtttttgaaaagaagcggaatatttttcataattacggttggaatccggtttccctaagttcttccaaataaattttggtcgtttttccagattccctgaaaacgttatcttaatagttggccctagattttttaattcaagccaactttatcaccataaactgcttttggctggtcttctccatcntcatacannccatttttcagtatcttccagtttcaaagtaaaaactgttacgatcatcttcactcacaaactttctcatattcaccactaagcttgtctctcatttcatacacatattccgtcccactgcgttcttagcatcattccgctccttctccagttttatcctgcatgatcatcttaccctcattttcaatgtacaagttgagcatctctctgtctatctgccataatagctgattctcgattggcaggtccacagtactggtcttcacttttgccttcttggcttggggtggttggtccatctttttatccttggatccagcttgagaggtctccatttcttcagactctgccttattttctgctggtgtctgctgctgttgctcttcaacatgtggttcctcctggtccacttgcatcttctcttcctcctttgcattctgatctgtttccattggctcctcattttcccc

SEQ ID NO: 138685 - DNA, 576 bp, Homo Sapiens
tgattttttaattaaaatttatttaattttaaatgttctttccaacggaagaggtaggtatatttccacatatgaaaaatcaggaacagccataaatcaaaacaaggaaagcctgataaaaatcaacatattctaacagcacataaatgtaactatcttatgatgttactaataaagacatgagttgtttcatgtttcaatcagacaataatcttaattttcataatatatttctgctactaacaggagtattcaaatgctgccttttcatcacaaaaaattgtttccccacagtgatttgtgcctcaagtcatggtgatctctgggtcaccagacaagactttactgcaattctttcttattttcaccaacaccatcatcatcaagcctctaagattctacagagatcagcagattttaaaaatttaattacaaccaaaattatactctgactagaggtggagagatttgaccattccggtcagcaaatgaattcaaatgtgcacgtttaagtgtatacacattttcagctttggacaagaaaatgtaacaccactgatttcagtcagtagataa

SEQ ID NO: 138686 - DNA, 893 bp, Homo Sapiens
cccccaaaggtttcccagggttttcccccggaaaaatttttgggaagggccccccttttcggggttaaaaaaacccggggtctttccggaaaaattggggagaaccccaatttccccggaaggggacccttttttgggtttaccccttcaaaatggcttttaggggaaaaaaattccccggcccatttatttgggatgttaaagacttcccccaaaatttagcctttcaaaaaagggaataagggtgaatttcttcgggaaccaggatgtattaaaggtcggggaaatggggcccttatttattccagggccaaaccaagtacccgggaagaaattctggggggaaaccagatcttttcagcgcgcatgtgggtggctctgaaaagagcctttggggtatgtaatcagtgagtccttgagactcaagccctctcgccgcggatacgacgtgcgagctggatgtccttgggcatgatagtcacccgcttggcgtggatggcgcacaggttggtgtcctcaaagagccccaccaggtaggcctcgcatgcctcttgcagcgccatcaccgcggagctctggaagcgcaagtcggtcttgaagtcctgcgcgatctcacgcaccagacgctgaaaaggcagctttctgatcagcagctcggtggacttctggtagcggcgaatctcgcggagagccactgtaccaggccgatagcgatggggcttcttgacaccgccggtggccggagcgctcttccgagccgccttggtggccagctgcttgcgcggagccttgccgccggtggacttgcgagcagtctgcttcgtacgcgccattgcgaacttctaaacctgcctcgtgccgattcaccacccaggcctcgctacctagctaat

SEQ ID NO: 138687 - DNA, 272 bp, Homo Sapiens
tgtcaatcccccttcgtgcaatgtggggccgcgtggccctagctgaggaggagggcaaatgggatagtgggtgggggatacagagaggtgatccccaaaaggggaaaacccttatccggttttccccctcttccccggattggcccaaccgtttgggacctgaagcacatcctctaggtcagagtcgtccgaatcttccccttcttcccagacatcttcacttccttcctcctcatagtttccttcctcatagatgtctgggacaaaggggg

SEQ ID NO: 138688 - DNA, 464 bp, Homo Sapiens
ctaaaaccattttcatccttttagatatgtcatgtgctgctgcttcccgaagtggtcttgctttctgtttcgtaagatgtcttgtttacacactgtatcaaggatttggtgatacttgaaaattcctttggagaaaaaaacaaatttaattgccacactgcctgtcccacatgagggctgttaatttagaacccaagtttgaacccaacttgtgatggacccgcaggtaaccacagagcttcctttttgaaggcatatggttggagagaaccattttcccagctctcggttccggaagattccacgtcttggaggctgtgttcaccactagaactttaataactacccagggagggagaagctcgttgaaaggaagacaaagatttaaacagttcccacctctctccaccacatacttacagggcatgagtttaacccagtctaggctttgagtgtggctgata

SEQ ID NO: 138689 - DNA, 817 bp, Homo Sapiens
ggcaacaccacaagatgacattgtccccgagctaccgcatggacgatgggaaaatggtgaaagtgcggcgcagccggaatgcgcaagttgctgtaactcagtaccaggtgctcagcagcactctctcctccgccctcgtggagctccagcccatcactggaataaaacatcagcttcgagttcacttgtcttttggattggattgtccaatccttggtgatcacaagtactcagactggaataggttggccccccagaagctgtctgtgggcaccctgaagaagctggggctagaacagtcgaaggcccgctacatcccccttcacctgcacgcccggcagctgatcctgcctgccctggggtccgggaaggaggaactcaacttggtctgcaaacttcctcgcttctttgtgcattccctgcaccgcctgcgtttagagatgccaaatgaggatcaaaatgagaacaatgaagccaagtgtctgggagcacagtgaagaccatgggagcaccctggcacctgggagcacagtgaagaccctgagagcatcctggcacctgggagcgcaggttggcccctgaactgttctttgtttacaggactctgctaacttctcacttggaacagactgcgtaagagccaggtgggataaaggtagagcaactcagctgctacaggggcttttaatggagaacaaagtctatttactggatagttggctgcactatggaaaaagcctggctgggaagtctccctggccgtggggatctcatttgccaatatgggaacagagccccaggggcccaggcagaactg

SEQ ID NO: 138690 - DNA, 347 bp, Homo Sapiens
ctcctgtggtttttctgagcgtgcgggcgccgggaggggatgctgaggctgatggagctgcctccagggctagggccactcaccggaggagggcggggcctgcacttgaagtcaggccgcacctgtctgtttttggaagggtagccgacaaatccttccagagggaaagttctttgtttaagtgttgtacttgaaaaggtcaatcttcagggcttcctgtttgaagtcaagtcagaggtaaaccggtcagttacagaagcaggatttctaggatttctaactccagctgttcccatactgtctagtttaaattatggctgttaaggccgggcgggtgactcaggcag

SEQ ID NO: 138691 - DNA, 749 bp, Homo Sapiens
ttttcttgtgagtgtttttatatttgtctttgtaaaaaccacaaagctaggccatttgcttaaatcatcgttagaaaaaatgctgagtgcccagatgggatttctagtttctgtgcaaatgaaatcacattagtccagattttattcactcaaaactactagggaagcagtaggatttggtttaaatgctgccaaaaagcaggaattcacttaagttttaactcagaagcaatcctgttgttaatgttgtagccaggttcgggcagcatggagggtggggcccccattgtgcttgctgaggaatcccggatctctcccagttcaggctcactttcgctagaggtagacccactgttgatggtatagacgctctctgcaactccctgagctgaagcacagccatccggctcgttcttctcccttggactcgacagtcctgggaggacagccatctttccagtctgcctatttggcagcaaggacatggtatagtctgcaatgatcccacccacatctaagttgcatgcctggtcaaaggctaggaagccaacattagcatttgcctcacacaccacaaaggagccatcgtccatgataaggagatcaatgccacagaagtccatgcctaggatgttggacacctgaatagccaactgcttgccttgttctgtcagcggacacttgacgcccacgcccaccgagagagcagttgctcttcatccgttcctcagtggagcagcgaagcatag

SEQ ID NO: 138692 - DNA, 201 bp, Homo Sapiens
ggtcagcatttcatagttttgatgctaaatggtattttaaaatttcaaattctaaccacttgttgctagtaaatagaaatacaattgatgttgaacttgtatccttcagccttgctaaactgtgagttctcatggtgtttttgtaaattacatcaacagtcatgtgttctatgaataaagagttttactccttcctttcta

SEQ ID NO: 138693 - DNA, 938 bp, Homo Sapiens
  misc_feature (177)..(406): n is a, c, g, or t
  misc_feature (435)..(454): n is a, c, g, or t
  misc_feature (860)..(894): n is a, c, g, or t
agtcaaactgtcactttagattagaatggaattcttggtccggctttcttatttggaacttcagtcactcactgcgtatcacattgatgaggttcacaacccatgatattttgatctttcaggtgaattcctaaaacatgtttaaagttaaaaaggcccggcccaatggcttacacnnnnnnnnnnnnnnnnnnnnnnnnnnnnnnnnnnnnnnnnnnnnnnnnnnnnnnnnnnnnnnnnnnnnnnnnnnnnnnnnnnnnnnnnnnnnnnnnnnnnnnnnnnnnnnnnnnnnnnnnnnnnnnnnnnnnnnnnnnnnnnnnnnnnnnnnnnnnnnnnnnnnnnnnnnnnnnnnnnnnnnnnnnnnnnnnnnnnnnnnnnnnnnnnnnnnnnnnnnnnnnnnnnnnnnaaaggagaccgagtgtggctttgtctccnnnnnnnnnnnnnnnnnnnngttaaatataaggccaataccactatgaagaattttctgaaatgaccagtatatatctaaaagatttaaagacccaatgtgaacttcaggcctatggttttactgggagaaaagccatagattaatacttctagtatccaaaaccttcttggaagcttaggaacatggtcttttaaaacttcctcatgaaaactgtacttaaatatatatttattcatttctacatatatagaacttgtaggtaaagtagaaaaagttcccactaggaaggtaattaaaggttgttaatgttctttttatcacttagtagccagaagacatgcttatttctgctctccagaagcatgttagctaccccggccgtaatggccgaattcccgggcatatgtccggtaccgtcgactgnnnnnnnnnnnnnnnnnnnnnnnnnnnnnnnnnnncggccgcttcctcgctcactgacttcgctgcgctcgtcgttcgc

SEQ ID NO: 138694 - DNA, 507 bp, Homo Sapiens
cagaaaaaaacatgtgttttgtcttttgaaatgcagtcaaatctcacatagcttcacaaaagttgtttaaaccaaagtggatcaagaactcaggaaaactgccatggggcctcctctcaagggaggggaccctcaagcggtggcggcccttccccacctcccttcttcccctggctgccatctgcccccaacgctctgggcacagggccaagtggcaagtgggccctgcccaagcctctctgggaaatgggatttgcaggccgactggacgaaggcactaaagatgctacaggtgatcagaggaagctcctcacgcagaagcagccagcacccacgttgatagggggtggagctgggaggcgcggcagaagagggctgttcaagcaaaactttggcactgcaggtagacactgagcatccccccgaaaaactggctttgtgggtccaaaagtatctcgcctgatgaacactgtgaactggagatctctggggcagggcagggtgggg

SEQ ID NO: 138695 - DNA, 1221 bp, Homo Sapiens
  misc_feature (141)..(141): n is a, c, g, or t
  misc_feature (149)..(149): n is a, c, g, or t
  misc_feature (334)..(334): n is a, c, g, or t
  misc_feature (470)..(470): n is a, c, g, or t
  misc_feature (624)..(633): n is a, c, g, or t
  misc_feature (825)..(837): n is a, c, g, or t
gaaatatagagcatggtgtccgacattcttccaacaacgcccaccttcccctcgtggggggcgagaggttgtctcgccaccccaggtccgtgtgggagtgatttaacaacccgctggcgccccccgaattatggtgagacnccacactnttgtgttgtgtggcacgccgcgccgtttttctttcccagcctcaacgtggcgcgcaaagaaattatcttatgttcccgacgccgaagcgcgcgggacccagagggggttgggctcgtgaaatctcccccgcgctgggggcgcgaattctccaggaggtttctccaatctcaacgcgcccggcgtnttgggcggagtgaggtgtttctcaccatggttggcggcgccagagaatgggcctctataaatgggaagctttctccacaccaccctttcctctccgcgcactgaaagcgtggccccaggggcgccgggggcgccgngtgatatgtcgtagagttaatcgcgcagggcctcgcgcggtctcggaccttcgcctcgtttgaattaagactcccccaagttaagtggaccccttccaggaaccctcccactcctggggatttttgttcccaagagaccgcctcccgcgtttgnnnnnnnnnngggcggttgtttttagttgggtgagggaatcccaaagcccgctaggtcatgggccccagggatcctccctaggaacaccaggctatggcgcccatgtttcaccttaccctacctgggcccgccgccccccaaacggaatgggtctaggaaaaccttctccgagggccggaggcgccccgacatgttccctgnnnnnnnnnnnnnccgctttttgaataacaaggaactgagtatatgtatatttcatcaggggaggggctaggactcccacttggaggcctcaggagttctgctgggcgtcgcgaaggagcttctcctcccgccgcttccgtaacctctctttgaattcctctatctcttgaagcttctcaggtggccacagctccctcttgcgctgtatgacatcgtcctcaaaccactcggcctgattggaaacccagaacatagccacagggaaagtgaggtagattatcatccgaaatatctccagcttcacccccatctcgtttctcccggtcaacaaagccagttccgcccccccggccgtaatggccgaattcccgggcatatgtccggtaccgtcgactg

SEQ ID NO: 138696 - DNA, 896 bp, Homo Sapiens
ttttttttgctttgtttcactttattggatacaccgggtgtgggatttacaaataggaccaacaatgtgtgcggggcacagacggctgcctgtgggtctgtgtgtaacaggggctgtaaaatgaatggacctcatgtgcacgtggtacagagagaagcaaaccaagaccaactggatcccaacgtgggtaacataaacagttaaattactaaagtcatcttaagaccaaaatacttcaatgaaaatggcatattaaaaacatataaattacatttaagctctgtacatgattcttaacaaaaataacaataccgtgttctgtacaatactgcttcctctgaacattccaaacccaagaaacactttcccttgaattcccaaaaaaagtgggcaaaatacacatggagtataattaaaaccatttcaccaaatacaaagctgtcagtttctttcgaaggcacacattttgttgtatctcaggaactcccatttcagaagccccttgtcttccgaccccagacagcgcagcacgaggagcatgcctccgttccagtcgaatctttgcgcgtgctaagagggagaatattctcagcagggaggcagcagaaatggagccccttcatcctcaaaccaacagaccagatcggttgtcaggaacctcgagagccgaggtgcctcctcgtctgccttttgcaggcccttattcccaacgttttgaaatattcactccagtatatgacatggcagtgaagctgacacctattatcgtcgaaaggcatttgctgctcactaccagtctaccaccggaatcattgtatacagccctggggatgaccaggtgtcctgctcccgaggacgccgtgctgccagaggccctgccgtggcttgggtgctcc

SEQ ID NO: 138697 - DNA, 503 bp, Homo Sapiens
  misc_feature (26)..(26): n is a, c, g, or t
ccacgggatggtccagccccctctgnctggaggagtggtggaagcccaggactgggccttcaagccatgagggctagaataacctgaacctcttgcattctaacactgggtcattaatgacacctttccagtggatgtgcaaaaaccaacactgtcaggaacctggccctgggagggctcaggtgagctcacaaggagaggtcaagccaagccaaagggtaggtaacacacaacaccagggaaaccagcccccaaaccagctgttggtaagatgccttgggtttggcaactcacctagttttagcacaaattgcccaagactcagttttcttcaaccgtaccaagctctctgacttcctcagcatccccgtccctggcatcctctccaggattggagtgcccagtgcaaatccccaccagggccctgctgtggctggcaggaccattctgcacagcctcaccctccacacccaccccacacagcaggccaccaggggacagct

SEQ ID NO: 138698 - DNA, 313 bp, Homo Sapiens
accgcgcccggctcgggagcatgtactttcatgttatttgaaagccacactaacagaaaacattcttgtaaatattgtccatataattatcttcgttggcaccaaatctgctttcgcagcatagctaatttagtgcttggacagagaaggtgaccctgcccattgttaccttcctgacacctggttcccattcggccaggtggacactgacacactccagtcactgggtcacactgtcctgagccacaggaacgccattgaacacagttctgcccatagtgatcttcaggacaagagcaaccaatgtttaaat

SEQ ID NO: 138699 - DNA, 1054 bp, Homo Sapiens
cctcgccaacgtgctcacagatctgatcctaaaagagtctctttttcccatgctttgtagctcggattgtatttctgctgggtgggctgctcctgtctcggccctcctccctcccacccagcctgcctggcccgctgcacttcccggtgtccccgcggctttggagtccttggcccaggtgggtcctctgagtctctagggggacggggcaggtgggaagcgcccaaggtctaggagcactggatggacatgtaaggccagttgaagctgctcccagacagtaacatatcgcggatgagagtttcgatgggggttttacctaccaaacggacgaagaagagctgctcgatgacggaggaggacacggtgcgcagcgagggcagtcgcagcagcagtttgccaaaacggctgggctggttggggtactggctcctcacgtactcctccagtgcgcactgcgacttctcctgcaggctctcgatgtgggccgcatccgacaggccacaggcgtctgacgtgaacagcacgatggctttgaggcagctgtactcggctgagtcgacgtgtagcgccttgagcttctccacctgctcctggaagatgcggatgtggtccatgaaggccacgacgcggtcggcagacatgggcgaggcatgcaggccggcggcggccagcaacggcgccacgtgcagcggcatagagcactgggccgcgttgagcacgaacagctcgctccaggtgaggcgtagcagggacacctggtcggtgatctgcagatccgggaagaaggggatgttgcgggcccactcgacggcgctgaagagcaggcgcgcggccagctcgcagatgttctcgatgcccataatgttgttgggctgcatgcactggctgccgtagcgcgacgtggggtagggctcggcgcgcagcagcagcgagatgtagccggacaggtagcacgtggccgttgagggggtccccgttggtgagtgcgtactgcctggattgggctggttggagcattcattcctcgctgacccctcgtccgattcacccg

SEQ ID NO: 138700 - DNA, 594 bp, Homo Sapiens
agattctgtctccccatgccccccacctctcaaaatagatatatggtggttgaagtaaacaaaaacttaaaacacagagttgaggagttaaagaagagactagatgcaattgaagacagagtaatttggaagatagagcttagggaacttcacaaaatgggttacagtgagacaggtagaaaatgtgaaagaatagttgagagcatagaataagagtctagttggagatccaggaatagaaagcagaaaaaatcctggagagaaaaatattcaaagagatggcaactgagaattagcctgagaaatgcatgcatgaggtcttaaattgaacaagtacatcaagttttgaattttcaagtttaatgggaatgataaatcctcagatccaagaagctgaacaaaccccagtcaggatggacacacacacacagtcacataagttaatcaaattactgaaaactggttgtattgagaaaaatctttagccagaggaaaagccacaaattacatgggaacaaaactgatgataattgtagacctcttgttggaaaaaatgctcctggaagacagtggaatttgatctttcacttggta

SEQ ID NO: 138701 - DNA, 1184 bp, Homo Sapiens
  misc_feature (173)..(182): n is a, c, g, or t
  misc_feature (399)..(454): n is a, c, g, or t
  misc_feature (704)..(712): n is a, c, g, or t
cttcagaaaagatctgtcaatttttaaatagtacaaaaataaacagacatttatttccagacttatcttttacataagttaaatacacatttgtctgaggcactgaaacattcgcatacacaacccaaattcccaggttttgtcagcagatcaatgttaataacaaatcaagnnnnnnnnnnaaaaaaaacagtgaacagtgttttatacaagcatattgactatttctttcttaaccttaaacattctaaacgtaaaattgtaaagaagattctcctgagttatctttaatgatatttatttcattttctccctcttcccaaaagaaaatttttttcaattatttatataaatactattatctgtaatcagcgtttgatttaaaaatattaaaacccnnnnnnnnnnnnnnnnnnnnnnnnnnnnnnnnnnnnnnnnnnnnnnnnnnnnnnnngcatccacagatccctcaaaacattttaaaaggtcagtcttatggcacattcaggctaatgagacaatattctttgtgggctagcacataggcctatcctaaggacaaacattcaaccttaaatatctcaatatgccaatcagatttctaaaaatttattcacaaatcttaatacaatcatttctttggattgtttacataatattcagagaggtaaccccaaagaaaatatactgattgtgacataacnnnnnnnnntcaatgattgtaggcttaaacacagtttataaccatagtgtcctaataagacataaataataatcttcaataaattaagtaatatacagtaccattaaatgtcagtgacaatgagatgtggaaaagaagtattatcgtcattattattattgctgagaactacttagatatcatttggttttgtttttaaataagaaagggcattaattagaatgggaacgtaactttttccagtcacaaaccccgtacagttctctctgaggcactagcctctttgcatccatcttggttacagatagctgaaattagctataaataaaattctctgctgttcacttaaaataagtgtatactatgtttaaaagggccttttgttgtctctgttaatcttcttaagaggagctaaatagcagtcctgagctgaggtttaccgtgaaacgtgcgaaagttcatgtgagaaaatataggcaga

SEQ ID NO: 138702 - DNA, 564 bp, Homo Sapiens
  misc_feature (83)..(111): n is a, c, g, or t
  misc_feature (142)..(235): n is a, c, g, or t
  misc_feature (237)..(270): n is a, c, g, or t
ggggggggacccaacccccttggttttgtgccgggttttcttttggaaacaggtttttgccccttttccctttccctttgggnnnnnnnnnnnnnnnnnnnnnnnnnnnnntttttcgggggccgggggggccgcccaaagnnnnnnnnnnnnnnnnnnnnnnnnnnnnnnnnnnnnnnnnnnnnnnnnnnnnnnnnnnnnnnnnnnnnnnnnnnnnnnnnnnnnnnnnnnnnnncnnnnnnnnnnnnnnnnnnnnnnnnnnnnnnnnnncagacatcagtgttacttgccaagaccctcatttttaaactccaacgagttattacgttcctttccactcttgctttccaattcctacaccaagacaactctgtattttgagtatatgagtcaagtatggcaaaaagtacagtaccttaaaaacttttattttagtccttcctggcccatgctaaaacttatatctagaaatacggcaaaacaaaatgaaacagatctctccttgtacataaaacagctaaaaatttggcctctttattgatcttatgtcatgtatttggcttg

SEQ ID NO: 138703 - DNA, 436 bp, Homo Sapiens
ttttgttgtggctgctgttctattgatggcaggtaatcatcactcttcactagctgagcattcggtccactaacctgagtcatatccggcactggtttctctagaaagggctccgacggggaatgctgatgcacaggcactttctgcggggtgttctggggtgatgggtggagctgtgcccaaggctggtgatgagggtgtggaggtgaagactggtggtgcaagcccgggtgaggctgcagtggaggacaggttggcaactgctgaaaagatggctgttgaccaggatgttgttggccaggtatcagtcgttcctggattgcttgtgggtctccaaggccaacaccaggacaaccatttggcctcatgtgcccagtcaattcccttggtgccgaggacatgccctgaaccagccctggggccccacatggagctg

SEQ ID NO: 138704 - DNA, 976 bp, Homo Sapiens
gagtgttacctgactcctccagaacccttcagggcaggcattttattcatcatttattttaaaaataactgggagtcagaaacagatgctaagaggaggcacattcttcaagttttctaaaagaaccctttctactttggataggacaaaaatgagctttggctgaatgaactgagactagacataagaaggactgagctgctgatgagttatgaatggaagactaacacgcagtctcaaggcaggagaagaagaacatgtgctgttttcctgggagtggggcaactggtggtggctgtgagaaggcagagctcttcagaggggacagccaagaacaggtagtcactgggggccctatttagcctgagaatgcaggagggattgttttatggggtcctccctgcccctcaagacacccttccgccccatccccacaccagggtgctagagaagataggaatatagattttaatcattgtgctgctgctattaaccagagtgcaattaatccatcttttgtggattttgatgccacagtgtaaatgagagggtttcacacagaaacactctgggggccttcggtgacaaaagggctaggcctctggtggggagggggtggcaaaaggtgaagtggaattaggagagatgtggggagcagacccagggctgggagactgctccttccccatcacacatgcccatcaaggaccccaagaggaagggattcttcctgccatggcctgggctgtccaagtgagcctgacttcccttccaaggcagctgcctctagcttcatgtccaattctcgctgagtagatgaggtccagggtaggcccacagttgaccaccaaatggtgaagagatataagccaagggagaagaaagtggtttggaacccccaatcattctccatttttcatcctaagctaccttaaaactagttcagagctggggaaagacagcaacagcagtctat

SEQ ID NO: 138705 - DNA, 687 bp, Homo Sapiens
aattttacttctaagtcattcataaaccttgtctatgaaatgacttctttaaatatttagttgatagactgctacaggtaatagggacttagcaagctcttttatatgctaaaggagcatctatcagattaagttagaacatttgctgtcagccacatatctgagatgacactaggtgcaatagcagggatagattttgttggtgagtagtctcatgccttgagatctgtggtggtcttcaaaatggtggccagccagatcaaggatgtagtatctcatagttcccaggtgatatttttcttattagaaaaatattataactcatttgttgtttgacacttatagattgaaatttcctaatttattctaaattttaagtggttctttggttccagtgctttatgttgttgttgtttttggatggtgttacatattatatgttctagaaacatgtaatcctaaatttaccctcttgaatataatccctggatgatattttttatcataaatgcagaataatcaaatacattttaagcaagttaagtgtcctccatcaattctgtattccagacttgggaggatgtacagttgctgttgtgtgatcaaacatgtctctgtgtagttccagcaaatcaagctgagctttgaaaaagtttgtcttagttttgtgaaggtgatttattctta

SEQ ID NO: 138706 - DNA, 569 bp, Homo Sapiens
tgctgtcagccacatattgagatgacactaggtgtaatagcagggatagattttgctggtgagtggtctcatgccttgagatctgtggtggtctttaaaatggtggccagccagatcaaggatgtagtatctcatagttccggactaaatactggctttccactttaggtgatatttttcttattagaaaaatattataactcatttattgtttgacaattatagattgaaatttcctaattctaaattttaagtggttcttcagtttcagtgctttatgttgtttgttgttggtttggcatggcattacatattatatgttctagaaacatgtaatcctaaatttaccctcttgaatatgatccctggatgatatttttatcataaatgcagaataatcaaatatattttaagcaagtaagtgtcctccatcagttctgtattccagacatgggaagatgtacagttgctgttgtgtgatcaagcatgtctctgtgtagttccagcaaatcaagctgagctttgaaaaagtttgagtcttagttttgtgaaagtggtttattctcaaa

SEQ ID NO: 138707 - DNA, 121 bp, Homo Sapiens
ttttttaatggtattgaaggaagaagagctcagggaagagctctctcacagtaggtaggaggacccatccttcagaagattcttttattaaaactgggtaacatcaataaggggacagtac

SEQ ID NO: 138708 - DNA, 367 bp, Homo Sapiens
attttattataaatataatatatgattttttaacctgttttgttgcctcatatgctgtcaggttaatttgttttccttcgtgccagaggtggggaggaaggcactctgtctgctgggtaaatgcctaaattcactcaccttcatggtttgggggcagcatggtcattgtggatattggttttgtggagttgagggaacttaggatataagttcactccctctatttttctttgtgattcagtttttcaaaaatctttttttcttccctttctccccattgtggaaattacaaatcaaaggcctttttctttaatgtaaagtgtatttatttaaaaaaaatacaaaataaacttccggtctgtctttg

SEQ ID NO: 138709 - DNA, 487 bp, Homo Sapiens
  misc_feature (301)..(330): n is a, c, g, or t
  misc_feature (410)..(438): n is a, c, g, or t
gcagcaagacaaggtgtttttattgaggtcttaggaattgcaatttgggagacagattcagctagaagccacttgtgttctgaagagagagggtagaggaggggtttttaaaaaaagctgagggtgattagacaagttgacaagttgttttgaaagaggcaactggcttagtacaaaaatccatagtttattggttggtgctgttgaggagttgtagtgctggtgaaataaaattttccaggatgcagtggtcatcgcaatttggcccaattcaaaggttcaaggtaagctcctgtattgnnnnnnnnnnnnnnnnnnnnnnnnnnnnnncaagttgcaggtcatgtagggagtcctttttagaatggcttcctccctccattttagagctctgaaccaaagtgatgtcnnnnnnnnnnnnnnnnnnnnnnnnnnnnnaagatggagtctcactctgtcacctaggctggagtgcagtggtgcagtc

SEQ ID NO: 138710 - DNA, 1785 bp, Homo Sapiens
  misc_feature (355)..(477): n is a, c, g, or t
  misc_feature (817)..(817): n is a, c, g, or t
  misc_feature (839)..(839): n is a, c, g, or t
aagtcttgttggtgaagttcccgggtttacaaacccccgcgttgggagaggctttaacaagtccggccagaaaaccccttaaaagattttttacaaatacctccggttaatcccccgggggtggtttttatttggggaaaaaacacccccttgtggcttcccggggggtttttttccaggaaaaacacttaagaacttcccttttggatttttttggagacccctcgcgctccacaccgggggttttaataatttttagaaagcaagcgcggacggcaaaaccaagattttcctaggaaacaattttaggccaagttccccttcctttttgggcccgcgggccaaaatgaaaggnnnnnnnnnnnnnnnnnnnnnnnnnnnnnnnnnnnnnnnnnnnnnnnnnnnnnnnnnnnnnnnnnnnnnnnnnnnnnnnnnnnnnnnnnnnnnnnnnnnnnnnnnnnnnnnnnnnnnnnnnnnaaacagaaagtagttttattttttctaaataggattttgatcacaaaaatgctggtgattcaaacctttaaaacagaagagcatacaacctaagaaaaatgcaaaacaggctacaaacctgtacatcatgttactgcactgaatactgtaggcaactgtaacataatggtatttgtatcttaaccatagaaaagggtattggtaaaaattcagtattataattttatgagactgccaaccatatacgtggtctgtcattgacccaaaaacatcattatgtagtgcatgactattaaaaattgtgcaaaaccaaaccccctttatcccatagtgtttaaanccataaaacccaatacctggtnatatccatgacaaaaccaaagccatgtaaaataatatgcagcctaaagaattcaaagacaccaaaggtgacaaagtcaggtaaaagaaaggcaattagggacataagatattttttaaagcaggaagctgatgatgtccactgtaagcctggaagaaaccaggagtctgaacacggagcagttactgataggaaggataaagtgctacatctctaacagcaagcaaattaactctgctgaaattgccagaatgaaggccaaggtggttttcagtaaagagtgttctccttgacagcatagccagcatgtggttgagccgggacctgataccagcgaagtggaattgccgctctttgttcaagtttctaagtgagtcactcaagtacagttccaggtggggggtgcccaggtacttgggatagccaggattgtggaagtcagtggttctgatggaagcgggagaaccagtggagcttgccacagagccttgggaagacacagaggaggaagacttcaaactggaagatctcgatacagacatttttgagactggtgacccttctgtagattgagttcctcgaggaaagagaatgttctcatccatgtcagtctgagtagtggtcgatctggaccaaatcgtggtttgagagcttgctatcctggtgatgactgcagtctgggtaccagcacatgctgtggtgatgctggtttgtgttcccacctcactcacactcagccctggcatctcctctcctggctctgtttgagtggcagcgtcaatggcctttctgctctggagctcgtccctgtggctgctgaagtagtcttcctcactaacagtagaggactcacagtcatggggcttgcgctctgccttgccctctgcgggcatctctgggtccaggtccgccttcctgggagtacttgacagcctagccagccgccc

SEQ ID NO: 138711 - DNA, 542 bp, Homo Sapiens
ttttttttagaagtgcacaatcagttttttaataaagtcattacaaatatgtacaaagcgtctccaaggtatgaaattcctcttacaaaagagcacaacgacgtcagaaccaacaacgtcagaacccagaacggaacgtccccaagcttattgcctctctggctaggccagaggccctcactaaggttctccagataccctcccagccgcccctgccacgcacacgggctccttggcgcttatagtgcaaagaccttcaggagaagaaacttgggagttcaggttggagaagagggtagaaaggaggtaagaaaagcttcccgtgtcctaggaaataagtcatacaggccctatttgcaaattccttgcaccttccccggggccttatagaaaccaggaacacagggttagggcatgagtatataaaatccacaacgaaaccaaccagcctgtccttgagtgtccccaaaggtgacactttttccagtagacctaagtcaggccccggctcccagtggggccatgtgctggcactcgccctg

SEQ ID NO: 138712 - DNA, 696 bp, Homo Sapiens
tttgtttttgttttttagcatccagaatacagggtacttgaaatcatttctgtaatatgcttcccaaacaggttttggaaggtagtctaggagctgtaatcacttattgctgtgtgtcttcaggcagtgttctctgtcagaggctcggagaaggttctcttgcttcttgtagctttgtgaggatccacctggcatcctctggggtcttgaagttaattatttttccaaactctctggcatgaaatacagacttcactcgttcctttgcttcaatgcgcaatcttctcccatgaacaatgaatggctctttggtaaattcatcaaaactatactgccactcacacgtgagttgtccaaatgttccctttgttacaaacaatacaccacgtctggttatcattagcatatctgtcttattgatcatgacatgggtaaaatatttgtattttgcaaatcttccattttccatgacctgtaacatttgatttccagtcccatccctcaacctgtacggtctgataactccatcttcattgaagaaccgaggaggtcgcagactctccacttcagaagtctctgtagctctttttatccctgaaatgtactgctagccatgcgacgcgtgggtcgacgatatcccgggataccggaccgtaccagcctgctttttgtacaactggtttatatgtcactatg

SEQ ID NO: 138713 - DNA, 1272 bp, Homo Sapiens
ccagtgaaccagaggaaaaattatatcaaatgagaaatatttttctctaaaataatcttcttaaatacctcaataatgcaatacttgggaaatgtaaattttcaaaactcagacttgaaataggttattattaaacaaatatacataaatcttattgcttggcacgatttttcaaaaattagagaactatttaaaccatcatactgtgcttaaatcatatttcaaacttgtatacctagtgcttttatgttctgaatgtagactcttcaatttaatgacaatctagactgaaccctgcaatattcaaaaaagtcacagttcacttcaaaccaaacaaaatgatcaatcttctgtttttatcaaaatcataatattaagataactataaaatttaactaggatttatctgtggccaatgatggacccagagagcgttgtcttatggcattctgtggaaagtctttgtttgttccttctttactttcagcttcttcttctgaaacatcttcttcatccgcctcttgttcctcctccacttttttcaaaggttgtgcagattctgataataatttttttgaagggtatgggtatggctgtggtctgcgcctttttgaaggacaaaggcaatctgccacaaatatcatacagagtcctaataacagtccggaaaacagagttgctaaagcaaaaacagtatatgatccccacactggcaatccaaggtcttcaataaagtagttatggcacgtcctgatccacatagatagctgaaagagtgctgacatactactcatcagaacagaacctggaccaaccatgatgaaacgggctcaatactcttccactctttatcacttataaagtttatgaagtccttcttagtccttggaccctgatagcgcctaaattcaccatctttacaatgataaatagtaggaagagcagttatgataaaccgtccactcagtcctggctgctctgtgacatctactttcgcaatattaacctcaagatcttctccccattcagcaaactttcccattccggttgaagattttgacaagcagggcaccacggggcataaaattctatcatccagtctccttccagcagttctctccagttctcgtccgtgatgacgcgaacgttgctccgccgcccgtgcgtccagggagcaccccaagcaacagcaccaggactgccaggggaactgcaagactcccggagggcgccatttcccgccctcgtgccgattcacaccggcctctacct

SEQ ID NO: 138714 - DNA, 525 bp, Homo Sapiens
attttaaaagtggaattgcagtgttttttcactgtatcaaacaatgtcagtgctttatttaataattctcttctgtatcatggcatttgtctacttgcttattacattgtcaattatgcatttgtaattttacatgtaatatgcattatttgccagttttattatataggctatggacctcatgtgcatatagaaagacagaaatctagctctaccacaagttgcacaaatgttatctaagcattaagtaattgtagaacataggactgctaatctcagttcgctctgtgatgtcaagtgcagaatgtacaattaactggtgatttcctcatacttttgatactacttgtacctgtatgtcttttagaaagacattggtggagtctgtatcccttttgtatttttaatacaataattgtacatattggttatatttttgttgaagatggtagaaatgtactatgtttatgcttctacatccagtttgtacaagctggaaaataaataaatataacataaagcctt

SEQ ID NO: 138715 - DNA, 804 bp, Homo Sapiens
acagtttacccaaatgtgtaattaaattgagcattttacatcattaagtagaggcttttaaacaattatacatagtgcatatcattgcagtatagattaatggttctgctggttgcaaaccatattctacataagacaacttttggaaaatttattaatccaagcaataaatcattatcagtgaagtgtcaaccatttcacaaaatgtatttaagttttagttccttaaatactaaatgtaagacttacaggaaaatgggtttttgttgatctgaggaacttataccaaccttactcatcagtacccaagaaaaatagctttaatgtgagacagttgtatgatggtacagatagtgccagtatatgcaacgaagaaagttcaggtttcaccaaaattttgcaaaatttcggggtttaaaaatctgtttatcgcagaagtcacattgactgtctcacatttactcttcctcgtgtcctgatcctgctgacttgtccacatgggcaactacgaagctggcacaactatacttctttgttcactttggtcaccaccatttgttctgctgttgggctgcccatgtgtaggcaggtttcacgaaaatatcaggttccctaagcaacatgaactgggaggctcagagagggatttccctagtcactgacttactgagggattgactcaagattcccaggcactagacagaagcagtcgggaaaggaatcatttcctgattgcctgtgggggaaaaagaaacttttttggatagaacagtctggatggactctaacacagtaaaaagtgaa

SEQ ID NO: 138716 - DNA, 502 bp, Homo Sapiens
tcatgctacaaaaataggtctttattcttaggaaaatatagtcagagctagcttccttatgctatacataaaatcttaacatcagaggcagtacagatagtacagatagtttttgaactgatctccaaacaagcacaaacccactacgttgaaaagaacaggtaatttgaggtttttggcaaaagacagtacttcacacatctaatccaaatcaaagggcctgcagacagttttcagtgagatgaaaggaatgaaataaatataaattctacggataaataaaacacaatttaaataagctaacagaactaatttttttaaataaaaatactagtcaggtacaagcttttgtttctcaatgccagacttctaaatatttaccagactactgttaatattaaaaacctaatctttgacccagagcgttagtaataatactggtttgcatctgcaattttccaactgaatgcttcctggtccgaaaaatattttaggtgtatta

SEQ ID NO: 138717 - DNA, 466 bp, Homo Sapiens
ttttattttgtatttttttattgatatatcatagttgtacaaacatttggagtacatgtgatactttgatacatgtgtgtgatatacaatgatcaaatcagggtaatggggatatccatcatctaaaacatttatcttttctttatgttgggaacattgcaattcttctcttctagttattttgaaatacacaataaattattgttaactacaatttctctaatatactatccaatattagaacttactccttctatcaattgtatttttttacctatcaaccaacttctcttcatttccccccaatcctatctactttaacagtggtttttgaagatttaaatgaagcagactgcatgaaagtacctgcgtcaggattttgcacataaacagttctttggaaatactttggaatcaacgaatgaatgtacgaatttattctaactggcaggaatcttatgcagat

SEQ ID NO: 138718 - DNA, 979 bp, Homo Sapiens
  misc_feature (330)..(352): n is a, c, g, or t
gttttggtttcgatctgatgttggtgcgtctgcgtgagtctcgatcatgttgtgttttttggttgacggtaactgtctgtgttggtttcgctcgacacggtgttgtatttgtttattttgtgtgggtgtgtggtcttcccgccgtgtttcgtctctggttgtgccaggggtgttgtctcgctgttggtgaggtccgcgtgttgtggtgcctagtggttgcgcgggtcgcagctgcgatggtggggctgccggtgcggggcacgactcatcattggttgttcgtgagtcgtgtcttgatgtgggtcggagaggggtgcgcgggcgcggtgnnnnnnnnnnnnnnnnnnnnnnnggtttgtttcttgggaatcgtctattggtgttcgtcttcttcagatccctgccccttatgtgtaacttcgtcgtcatcttcctgttgctgcgagcttcattcgccgttcgacgccagttgcctgctttgtgtttctgttgcttgactgtggtaatagcacaggtgtacggtctttgttgtgttagaaggtttcgtttgtgttgtgttgatttagccagttttcttgggtcctttactcttctgttgccatcctccttttgtcctgttcttgttagtttcaccctgcccatcttctgctggctgttcctctgcagcacagatggactgctccttttcaaatacttcagccattgtttgccttgtcaacttaaccaacactgtaactaaggatcctactgtgatgttgttgctatcttcatcatctaacacctgtgattttatatccatggtcacatatggaaaactcccaaggacagccataacctcttcatatttttcatcttcaaggaagtgcagtagagtgtgacgatctgattcttttaaactcaccaaatcctggatagttttaattttataccccggccgtaatggccgaattcccgggcatatgtccggtaccgtcgactg

SEQ ID NO: 138719 - DNA, 528 bp, Homo Sapiens
  misc_feature (315)..(327): n is a, c, g, or t
  misc_feature (469)..(469): n is a, c, g, or t
gaaagggcctggttcgcaaagaagctgacttcagagggggaaactttcttcttttaggaggcggttagcctgttccacgaacccaggagaactgctggccagattaattagacattgctatgggagacgtgtaaacacactacttatcattgatgcatatataaaaccattttattttcgctattatttcagaggaagcgcctctgatttgtttcttttttccctttttgctctttctggctgtgtggtttggagaaagcacagttggagtagccggttgctaaataagtaagtgctgagaggctccagagaaannnnnnnnnnnnncaacttgggagatgcccttgatgttgaagaggctttttgagagcgggctaaaaagggggagcggagtagtgcggggagatggagagtcctgactgacactcgggtcccattcccttctgttgcaggtcccgagcgcgagtangacgatgcagcggagactggttcagcagtggagcgtcgcggtgttcctgctgagctacg

SEQ ID NO: 138720 - DNA, 468 bp, Homo Sapiens
  misc_feature (270)..(281): n is a, c, g, or t
  misc_feature (308)..(324): n is a, c, g, or t
  misc_feature (351)..(422): n is a, c, g, or t
taacttttattaatctttattttaaaacataaccagatgcaccttggttgtttacattctctggttgccattcagtctcaaagtaaacaccgggagcatatgataaatcgtagtttaaggaagccatagcacttacagagttctcgaatggttacaatataaaatctgtcataaaaatcagtaaaagatgcaaggtagaacacagtttaacactggtacaatggcagtagcagctttgcaaatgtttgtctatatgatttccacaggacnnnnnnnnnnnngcctggcctcattatgtagcaaagcannnnnnnnnnnnnnnnngagaaatggagttgtctgttacccagnnnnnnnnnnnnnnnnnnnnnnnnnnnnnnnnnnnnnnnnnnnnnnnnnnnnnnnnnnnnnnnnnnnnnnnnggaaaccacaatctggagaacacagccttcctcactaacctggcct

SEQ ID NO: 138721 - DNA, 1195 bp, Homo Sapiens
ttttttagggttaaaagtgtaattttatttagatgttacttgtacataatctatagtaagatatacaaacagataaaaattgtttaacagttttttttaataccactttaaattcaattttcaacagcattggtaatactgcaagatgacagatactatgatttataaaacaaaaattacttgctactctggctgatacattcccactagtctttaatggattaatatgtatcatgtattttaattgcaaattattataaaacttttacaacctagccacttggagctcagaaaacattttgatgttctaaaaacttactgagatgaaaatgttaatttttgaatagtatccttagtaaagaaaaacatcagtgtagccaagcttacggtctggggctgacagtgcaaactcacttgccttgtgctccgccgcctcctgtgtgcgcagccatcggggactgggcaatcttcccatcccttccctaggtctacgctatgagagaaaagcttaggagacattaaactaaaacagacgtggagaaataatacgagggacaatttaaaattaccttacaatttataactataatttaaaacacacagtttggagaaatgaaatgtgcttttggatgtttcttctccatttgttttggtaaatagtttttgaaaatgaaactgaaaattcaaatcttctctttattcttttcattgtaataccatattagaaaagatctggatttaaatttcagaataaattgaatttgctggaaaaatactctaaaaataatctaaattggatttcagtcattttccattcttttaaatgttatggtacacaacagggcaaaagctttttcgcaagtcataaaattgagttgaaaataacttgttgattcagctacaggaagacaactaacaattaacaggctcatgaatatttatgaataaagtgccactaattttattgtaataagatataaatagaataaatcctgacatggatagtagcttctgtgttctctccatcctgagaacagaagggccataaaaaaacaaagaagcattaccaaaggggagttctagacccacacggggaactcctaatacaaaagcaacaagaaagacaagtaagactttaaaagttgcagaagtcctaagaatagcgccaatgtagtaggccctttttaacaacaac

SEQ ID NO: 138722 - DNA, 533 bp, Homo Sapiens
caggatgggttttggggaatacattaaagtaaacaaaaatctggggtctatacaaaccactcgagctcctcaccaatagtttaaccagagtccctaaggtagaattcacaggttgtatcatgacacacgccttcagaaaacactgtttaagaaagtaattgagaactctcaagcagcttcccctgatgtccagttcaagtgtatgcaatgcagaaggctgtgaaattcaaaactatgtgacaaagaaaattcagtgcgtaccacaggctttgataaattatgaaaaatcaatgtatatattactatttaaataacatctgaaaaacattttgaaataattaacttgtgttcacattccatgcattttctagcaggttaagccctgggtttgcgtctttgtgcctgtttcctacaaagctccattcttttgacaaatccaagcattcctcagactgaaacagaagttcccaaggattctatttaccctctttactgtgtacctgacctcacaggggctactccttattaccaat

SEQ ID NO: 138723 - DNA, 430 bp, Homo Sapiens
  misc_feature (10)..(19): n is a, c, g, or t
cacctttctnnnnnnnnnncgttttcttgttttgtcactgtccagcgaggccagaggggtaaaagacaatgtttatataacacctttgctaccttcagaagaaccgtgagagggaggggctgtggaaaaacctttcagaagctggcaaaatgggaagagaggacacagaatttgtttaggagcacagctctccaaatgggtttaagtacccatgctaaattccaacccaaactaagccaacaagaaataccctttccaacctaatcttgggacttagatttgtactgaaaacatcatgggcatggttcccaaagatgcatgcaattcaatgcagccttagcatggcattgctgatgggagaaactccatctgctgttttgtgtttttgctgccgcggtttgccattttgcaagtcttccacctgccttca

SEQ ID NO: 138724 - DNA, 343 bp, Homo Sapiens
tttttgcaatcctatgtcattttaatagcaaccttctgccgtgagcaggcggccggcatggcagctcctccccacaggggccatcccccaaaacatccactcagagtcaggtgggaaagacaggggcttagatccatgaggaaagctgtgctgagccccagagcccccagagagggcctttgaggggccccttgaggctggggtcaggggtaggacatgcagaagcccaagccgggtccttctgtcttctctggccaagaccaaaaggcccagggagggccacagggccattcagcactggccgccgtaaagctgaaggggagggttgcgggggggcgggtag

SEQ ID NO: 138725 - DNA, 504 bp, Homo Sapiens
ggtgtggagtttgggcccaatgtcacagaccctcaagatgtcacatctaagtgacctgtgaaagcagcagacagacacgcccagaacccatctctagacgcctaagaaagctggatgggtaaatgctagtatgatttccactttacaacagacgctgaggtagagagcatttgttcttattcacagccaagaaaaatacccaattatttccaataaagcaaaaattggaacagactggagtgagaacgggttccaccaccaagcccctcaagacaagatggacacggcagctggttctggggtgcatttctagtggactttattgtcctgctccaacaccacagtagaaagggacctgcaagctccaagcctgtaccatgtgtcaccacagcaaaaacatgacccacttgaacacactcctgtcccacccaccggataaatatgttacaatttaaaaaaaagaatacaacagaataaattaataacttaagtgattaggcacca

SEQ ID NO: 138726 - DNA, 633 bp, Homo Sapiens
ttggcaatagtactaacatagggttttatcttgggatacatatgtattggtctgtttgttgaccttgacatctgatcactgatgtcaatgacctactggcctcattcaggacacctgcagagagtatgcaaagtccgagagaggaaaacagaaatctgtatgtgagatggtcattgtacagaaagaagtggcccctctgcaacatgtcctcacagaaacgaaatggtgtgtagcaatcaacactagaaagtagaccttttgcaaattaatatgtccttgaccttttttgcccttttgtgggggtgaggtggggataaaaagactgtcatatcaagaactgtgacttttctttccctcaaacaataaaactcctttattatcttaatgctcccatgttaacatgtttgctgctaaattacaatgtagaattgataatggtttatagtgaactgtgctcttccctcattaaaatcccagggtgccctgtaaagatgcagatgtttcttcctgaaaacttctttttttacaaagaaaattagatgtacatgtataattcagtgtgctttgtctttctccagattaatatcggttacactgctgatgtttgtaaattaaacagatatttacttcaaa

SEQ ID NO: 138727 - DNA, 790 bp, Homo Sapiens
ttataggaaatatgtttattattgatcatctcaattcaaaaatactcattctttctcagggctggtccatcatagtctctttgaaaatattaaatacgtcgaaatcatgagcaattttaacagcaacagaaacttctgtacagtaagcaagacagggatttctaacaatgacacaagagctccagaacttgccagtaagacaaaggcagtgtttccaatgacaaggcgtaggaacccatggataaaaatctaacagaacacatgctggaaaacggggtcaggaaatggtatcatccaccctcgatctgagtatgctcagtgatggcacaaagcatgtcctgtgagagggacttggagatacgatcgcttctatccagaaatgtgccctttgggaatggggcatatggtacctaagtgcccccaaatcaactgtttttcaacttcttgcctacgcagtcataaccaaggtttcaaggagaaggcaggcgcaggaagtatttagctttgacttcttagcagatgtaacaccagctcttcatcctctgctaaagacaggccggtatgccaaggctctaaagtgtcccacctggccttctttctgttatgacttgttggtcccacgtcttccacttcactgttgctcctcttcttcatcccctgcttcttcttggtatcactttcccatcctcatttagagtactcagaccatctcaattccacttttctgttcttatgagaatttcaatgctggctcactcctttctaatgagttgccactgtatggactccc

SEQ ID NO: 138728 - DNA, 1952 bp, Homo Sapiens
ggcatggttgaatataaaccagtctttaaaaaaagcaggctggtacggtccggattcccgggatatcgtcgacccacgcgtcgctgtaaatagtggccaggctcagcgggtcttgtgtccttcaaattcttcccagcgcgttcctttgcaagcacaaaagcttgtctccagtcacaagccggttcagaatcagaagcagaagcaattgcaggcaaccagtgtacctcatcctgtctccaggccactgaataacacccaaaagagcaagcagcccctgccatcggcacctgaaaataatcctgaggaggaactggcatcaaaacagaaaaatgaagaatcaaaaaagaggcagtgggctttggaagactttgaaattggtcgccctctgggtaaaggaaagtttggtaatgtttatttggcaagagaaaagcaaagcaagtttattctggctcttaaagtgttatttaaagctcagctggagaaagccggagtggagcatcagctcagaagagaagtagaaatacagtcccaccttcggcatcctaatattcttagactgtatggttatttccatgatgctaccagagtctacctaattctggaatatgcaccacttggaacagtttatagagaacttcagaaactttcaaagtttgatgagcagagaactgctacttatataacagaattggcaaatgccctgtcttactgtcattcgaagagagttattcatagagacattaagccagagaacttacttcttggatcagctggagagcttaaaattgcagattttgggtggtcagtacatgctccatcttccaggaggaccactctctgtggcaccctggactacctgccccctgaaatgattgaaggtcggatgcatgatgagaaggtggatctctggagccttggagttctttgctatgaatttttagttgggaagcctccttttgaggcaaacacataccaagagacctacaaaagaatatcacgggttgaattcacattccctgactttgtaacagagggagccagggacctcatttcaagactgttgaagcataatcccagccagaggccaatgctcagagaagtacttgaacacccctggatcacagcaaattcatcaaaaccatcaaattgccaaaacaaagaatcagctagcaaacagtcttaggaatcgtgcaggggggagaaatccttgagccagggctgccatataacctgacaggaacatgctactgaagtttattttaccattgactgctgccctcaatctagaacgctacacaagaaatatttgttttactcagcaggtgtgccttaacctccctattcagaaagctccacatcaataaacatgacactctgaagtgaaagtagccacgagaattgtgctacttatactggttcataatctggaggcaaggttcgactgcagccgccccgtcagcctgtgctaggcatggtgtcttcacaggaggcaaatccagagcctggctgtggggaaagtgaccactctgccctgaccccgatcagttaaggagctgtgcaataaccttcctagtacctgagtgagtgtgtaacttattgggttggcgaagcctggtaaagctgttggaatgagtatgtgattctttttaagtatgaaaataaagatatatgtacagacttgtattttttctctggtggcattcctttaggaatgctgtgtgtctgttcggcaccccggtaggcctgattgggtttctagtcctccttaaccacttatctcccatatgagagtgtgaaaaataggaacacgtgctctacctccatttagggatttgcttgggatacagaagaggccatgtgtctcagagctgttaagggcttatttttttaaaacattggagtcatagcatgtgtgtaaactttaaatatgcaaataaataagtatctatgtc

SEQ ID NO: 138729 - DNA, 188 bp, Homo Sapiens
gtttcataatctcacagtaaaatgttttaaaacatttggagtcctcattactaatagagaaagaaggaaagtttctatttacaggtaacatgattgttatgcttgtcaggcaagaatatgagaagtaataagagtacagcaagttttctggatctatgatcaggcaaaggccgggagcggtggctcat

SEQ ID NO: 138730 - DNA, 707 bp, Homo Sapiens
  misc_feature (342)..(359): n is a, c, g, or t
aaagaatagagtgaaatagttatttcattctattctttaaaaaaagtaaccacattccattttgtttcactaggtcagactataccattaaccatttgaacgtctaacatgatcaatggaatagatttagagttttaaatgaagacaaaatcttaagctttgttggtcacagacaaagatttaaatgagatttaaaatacaagagagcatcaaataagcaagtaacacttgggttgcaaaggtcacttaaaagggatactgcctatttgaacccgataagtccagttttaaagttaataaaaggaatattataggaaaacttacaaatggcaggaacactgnnnnnnnnnnnnnnnnnncccaagttaagcagtaacacctcaagcattagaaacatgaaaaaagatcatactaaaatcttataggcccaggacctaaaaatctcttcaatcaaacttgctaactatgtcatgttaaaaacctgttacaaatatggaccacggttggtgtttggcagtaatgcttgttgtttaaatgaggaaaataaaaagaaatcattaatgcaaaattctttcttgttactcaacaccattgccaagctcacttgaactctgttttagtgactaactacactaagccacatgagtataacaaaaattagttaaagcagtgtataaacttttttattgatctgttgtactgttcag

SEQ ID NO: 138731 - DNA, 360 bp, Homo Sapiens
ttttaaaaaagatttaagatcataaataggtcattgttgtcacaacacatttcagaatcttaaaaaaacaaacattttggctttctaagaaaaagacttttaaaaaaaatcaattccctcatcactgaaaggacttgtacatttttaaacttccagtctcctaaggcacagtatttaatcagaatgccaatattaccaccctgctgtagcaggaataagaggcaaggtattagcactaagaaaaacagcaaaattcctgaacaaaatcatctgtcattttaaaaaagggataaaaaaacaggctaagtggtgagcattttagttaagaaggcccagtgttgttatgcaggactttccatt

SEQ ID NO: 138732 - DNA, 505 bp, Homo Sapiens
ttttcttggacacaggtgtgctgtttatgggtaattggtatgctgcaaagttcccggaaaattcacctcatccattcagaaatacatgttaaaaggctgagcctgtgatggcattaagctgcttcatgagtccttccaaacttgccatttgttcactcagatcatcctgttcatacacattggctgaatcctctgttggtttgtggctctcctcagacacttcaggggctgttggcacagacacaggaagcaaaggggatcttgcttttccagccaacccaagggaggctgttttcacatgggtcttaggaagagtgggccctggctgagacaaaagtggtgtgtaagggactttcggttctattgcactcattggtggaggtagcaaaggattagcaaagctgcggagtgggtgagttggtcgaacacaagctgtggggatggttctgcttggtgcctccatactgctagattgctatggctgacatgggggcagcataggtgg

SEQ ID NO: 138733 - DNA, 541 bp, Homo Sapiens
tgacctctcaatttcttggggagtatgttaggtgatgttcctttcacgtcttaatgatatagcttatcactactctgtgtacgaagtagtgttgtattctggtggtatatttagttaaaaccataatcacaagttacaaaaactgtaattacaatttacaaagaaaaacaggcagacaatcttgtattgacatcctcttgcatcttgttacctaccaatgttctgttccattataaaattcaatactaaaatttcatagctaacattcaatattaatttcaacattaaaatgtatcaaaatcattaaaaacagtcaattagaaaaagcaatacaccaaaaataatggtagtgtttccaggcttcaactgtgttgtattaaccatcacacaggagaataaaagggctgtgaattttagataggccacttggctctggattccaggactatggaaatgccagtgaaggtagtccaagaagcatttcttgttttataatatcagcagaggaccaaaaaaagggatcccagatatgttttcaagt

SEQ ID NO: 138734 - DNA, 630 bp, Homo Sapiens
  misc_feature (296)..(296): n is a, c, g, or t
  misc_feature (367)..(367): n is a, c, g, or t
  misc_feature (517)..(517): n is a, c, g, or t
  misc_feature (527)..(536): n is a, c, g, or t
  misc_feature (545)..(545): n is a, c, g, or t
agaataggtagtgaaatgtttttaatgcacacatgcactcagaccttaacttttctataggatacaatatggtgacttttatagaagaatctaattcctatagtaggaggctgttatttactcagatttgaattccttttatttgacattacatacaaattactaaagccttaataaggaaaagtaccaattcaatcttacagcataaaattactttcattatatgtcttcattagctatacttactaattgatatttaatagaaaaataacgatattcaaagctcagaacagcangggagaaccacaattcctttgcagcctgggagactttcctttatacatgaatacaaaatccaacttcattntcaacatctttatcaaatttactacatttaatgagcattataaggtctcaggctctcatgcttatgctagggaggggatcactattttgaatctaaaccatcattggctccttctacaaaaaatttgaagggcaggaacacacttatttntggtccactnnnnnnnnnnccaaaaaancattttgcactttatcttttaaggttacataagcacccaaatttttttaataaattttcggggcctggcttattaatagtgggac

SEQ ID NO: 138735 - DNA, 443 bp, Homo Sapiens
gggtttatagctttcatatttctttattattgtaaatgggggctgtggaaggtgagaaaacacatgctttcttaaaacagaggctctctccttcattaatttaaatatttttatcggctctagaaaatgcataaggttagtacaagatcagtagagagaaagtcaaagattacagaagtgctgaagcagaccattcttcctttcttcccaatgtctattaagatcacacataggtaaactgttacaaatccagaatggtgaaagagtccaacaatggctgagggaagtagaggttaagatatagctcaacagtgaaagtagcagggaaagagctgggcaaggccaagaccatcttttgtaccgttggtacagtaggctaaaggtacggtgttccatattaaatacagcaatatgaagaaaaataaattaagtcccttatacct

SEQ ID NO: 138736 - DNA, 249 bp, Homo Sapiens
  misc_feature (160)..(170): n is a, c, g, or t
tttttttatattatagtaaatttattttgtataaatacatattaacattatttacaatgctaatttttttatttataaagtatctttatatggacaaaaagatacaaactgttatcattttaagtacaaagtatttctagaaatacattataagccattnnnnnnnnnnncgatatttcaagattggttcttacatgctatgaccaactcatatgaaagagcaagttgctcccccttccccgttccccc

SEQ ID NO: 138737 - DNA, 484 bp, Homo Sapiens
aacattttaactattaatgatttattaattttccttaaaggtacttaggagtgtgtgtgtcacatattcaaagttaaccttaggaatagcaccataaccaaaaaaacccataaaaattattttctccattatctctcagttttatttcataacttgagaagctaccattgtcggctatgcttttaaagacatcaggtccattcttgctgcttctgatgaaaccaaatctgattaaaaaccaaaataccacttctgtatgcaagggtctaactattttggactgaaagaaaaaatggtaattggatggccagtcagtgaccaattaatgcagtccaaataatcagaatagttctattaatgaagcctaaactgtcaaaatattgttttataccaaaagaatgtatgtacttatgaatgtattccatatttatttatggatttttttggtacctttttggcaatgatggtaaacatggagttaaaa

SEQ ID NO: 138738 - DNA, 631 bp, Homo Sapiens
tgatataaagattattggaaagcttcagttgaatatgtttgtttgtggccaaaatagattgagaaagtcttttgattgataagcaattctagctttctgaagtttctttcattcactagttgaagagcaatatatattttttcttatcccaataacccagaacagaaaattctacatgagcatatattgtgttcatacatttccatttataaggcacaaaacccacaaatctcacaaaaaggaagaaaacaaaagatttgaagacaataaagtaaactcggaggaggttcatcaaactggagttaaatcatgtccctttttagtaactaagggacctcatactgacaggaatcattgcctctgaaaagagggcttctgagcccttcttttgacacagcctccttcactggattagtgcagaagtcaatcctcagggagggctgcatggccacaacacatcaatcccaagcaccacctatcccatagaagcttctgggcagcaatgctccaaacaaaccagggtgcctggttcacatgttctcacccaaaggagccttcagggaccaatccacagtaaacacacatgcttgcctatcccagtacttgagtattttatgggttctgctctaag

SEQ ID NO: 138739 - DNA, 650 bp, Homo Sapiens
gggtcagatacgcggtgtcctacaaattctgttgtgaaacccacagaagaactggtataaaaactgagggtagatgtagccgacgttcttatagaagaagtgctgcacgagctccgaggatcctgatgtgatggaaatgccccttgaacaatcagcatcttcttcaaatgcttaaactttgggattgcatagtcgctgttcctggcagcctggcggccttccttgccgatgacacctatgcccacgtgcgcttccagaatcatgctgacatcatttgcaccatcgccaattgctaacgtgattgggtgctcttttgaaaatttgattaatttaacaatctgagccttctgcaagggcgccatgcggcagcagagcaccgcgctgcagctccggcagatttccaggaagagctccctgtagttgccggaactcccgtcttctcgaggcttcattatcagagacagtgcagctccgtcgataattaaaccgtagtcctgcatatctgctgaaagtccggacaggttgtctctggtcaggctcccgctgtggcgcaggaccgtcttgctcagctcgaacaggacgtcgtgcaggctctgctcctcgaccctcttggtggtcagctccagcagctgcgtgttcctgcggaagag

SEQ ID NO: 138740 - DNA, 199 bp, Homo Sapiens
aaatgatcttcagatccagtggcccattcttttatctttatcctgtgaaggtgtttttcaggttttgaaacaatccaaaaatcatttaggaccaagtctaaggaaacattttagtggccaagttggattccgattgtaaaggaatgatactaattttctagcatggctctgaaggtgattttaggtagaagagttttga

SEQ ID NO: 138741 - DNA, 466 bp, Homo Sapiens
ttttattgaaatcaaattttatttttggaaaatgacattacacacatcttgcaaatgtacacagaaatgagaatgcgatgaagaacagagcttgagagccaaaataattgcaagagcagctctttggctgcctggtattgaatgctgcgaatcttcagcactcacagttcacagcaccttacacacatggcaaacttctctagacaaccttgaagtcctctgacccaagaaagccctcattgaattgcggagggggtgggggaagaggggtgttacaggcacaggagatgaaaagggtctgctccagctggtttatgggggcctcaccaaacctaccagtccaagtggggtcagcaaaccaaaaaaggagaatgcctcttgaaatactgcttttgaatcacaatttcagagtaggttaggtattgcctaggacactgatagtaatgcatttgaactcatgcccttg

SEQ ID NO: 138742 - DNA, 473 bp, Homo Sapiens
  misc_feature (17)..(17): n is a, c, g, or t
  misc_feature (354)..(354): n is a, c, g, or t
ccgagacgtattacttntcaggaaggtattcaagattgcccttgtgcttgcctgttttgggatcgcgtcgggcctggtgctcggaaaatggctgatcgcgcttgtgttcggagtcgattatgaacaaagctacattgtctttgtgatgttcatgcttcgccctgcggtggcgataccgtctatcctactgtgatacccattcttgggcgccatgggaaacgcgtctgcagccaatcgaagcgtgcttttcgccggctccgtgcagctcgtaacactcggagtgctctggatctatggatggacatcggcgcttgctgtagtggtcgccgtcctcatcgccgagataaggctctncgcgtggcgcgtccggtatgcactcccctacttcaaactcaccacataacagcggatctagcatgaaagaggtaaagaacgtcgcggttatcctcgcaggcggcaaagggacccgtagc

SEQ ID NO: 138743 - DNA, 549 bp, Homo Sapiens
ttttttatgagtaaatatttcataaacattttattccaatcatatatgtacgaacacatatgtactgagtcatgacataaattttacaattctctagggcaaaacattgctctaaagaaaagcatacttggccgatcagtcccttgagaagacttttgtttttgattttttgttcacttctgagcaatgactctacatcctgagtacacggaagccctctctcctcaacttgatagcagtgctctttagcacagccagttcccggctcaggctgttttctggagggatgtgtcctcctcttgcagccctgtgaactaactgaaggacagctgcagcggtgcatctgaacctgcagcggaggcagctcaggtcctgcctacagcatgcacatgtgatgccaggggctttccaccatgatttttcactgacatgatttcctttcattcaccggtagctctgccttacctgtagagctcaagctcctagcacagaacacaggggctgagtaaaggcttctaaatacatgcattcaacaataagcacattcat

SEQ ID NO: 138744 - DNA, 153 bp, Homo Sapiens
gaaagtcttattttcctgcataaccccagccccctgaggctctgtggggccattgggccttctgaggacacggtcaggacattttggggatcagaggcgagctgagagaagaacatttaaaaagcatttgcagccgggcgcagtgacccacac

SEQ ID NO: 138745 - DNA, 183 bp, Homo Sapiens
ttttcttttttaactaaggaaagcttttatttaaattgtgcaatcaatcagtatttagacagcagtttcataaacattttggcatttaaacttttattcatttttggcatgacctatagggtagtatataaactacccagtggggtgggggcgagtactaagcaatatttactatgatactag

SEQ ID NO: 138746 - DNA, 465 bp, Homo Sapiens
ccctcaatttaaatagactttatttttagagcagttttaggtatacagcaaaattgagctgaaggtacagaggtttcccatatacctcctgccccctcatacaagcacagcctccccccatcaacatcccccaccagagggatatgtttgtgatagtcaatgaacctacatagacacactgatcttatttaggccttagttccagctcccctagaagagtgacagttgccttgtggcctgaccctcctgcctggttttgctgcttggtacaaaggcctttagaaattccctggcgtggttgattggctaacaaggtaattgatgcagggccagtgggaggcagaacacagagtaccactgagtaatatctcctctgttcaacattgcagtggggatttctgaacccaaaacatcaaatctgtgtgggaatcgagcatatggaaaatctctgctcgtgccgaattc

SEQ ID NO: 138747 - DNA, 519 bp, Homo Sapiens
atgaaaggggatctttttaaaaaaactttatttgagaaaggaagagacttataacagaaggcaagaagggaaacatacaaacaatatatttacaacacaaaacaagagatcaccttcaagggtgtaaattataataaatacagtagattttaaaagagacatttatcaattaattctaagattatttaagtccagctttccttttcactggttccaggtagtttcttgattaaattcaaagactatcaaattcaaacaattaacgtccaccaactgtactgatgaaactctctcaaatgacattataaaaaatagttttttttgtttgtgattacatatctttgaagtaatattatacaaaagtctgctcagccacatgttcctccccaaataaaatgtattttaaaagatgcactatcccttttttatgagattgaaaaaagactttgaagaaaatgaatatttatgagatggaaaaaatatacaattttatcttaggcatgccatatttttaatgca

SEQ ID NO: 138748 - DNA, 249 bp, Homo Sapiens
tttactgccagagatttttatttagttggctagagtgagcttggtaatacacagtttcagtgcacactccaggcaattctgatgcacatggtcatgaagccccactctgagagtcatgttttggccacctgatttctagtaaacaaggtctggcagggaaatttcccatcttggttattatttatttagagtgtctcaatctctcacaaggcagcggtgtgatggcatgatcacagctcactgcaacaa

SEQ ID NO: 138749 - DNA, 802 bp, Homo Sapiens
  misc_feature (240)..(283): n is a, c, g, or t
aaggctattatctcctttattcaaaaaataaatatttcactttgattcaacatatttcaaatcacattaagcacagagaaaaaatacagtccctttggagattgtgaacacgtgttggaaagaagcatgatccaaacaatgggaatgaggtgagtgtggattccagctggttcctgacccagaggttccatccctcttcaggtggagctacttatcgatttttaggagagaaaaagaagnnnnnnnnnnnnnnnnnnnnnnnnnnnnnnnnnnnnnnnnnnnntgcgcgcgcgctttgaagtctgaaaggcacatgaagtggaccataaggtgtatggcacattcactgataaaacatcccctattccctcccaagaaagcggagatactttaatcaagtcaaagaccagagaagacagggtgctcctgcttacagctcagcaacatgaacatctctgaatatgaaagccattttttgtttgcgtccccctcccgcgcctcctctccctgccgatggggtccgcagccggctgcggggctcactcggtgatggtggggcgcgtggccacgtacacaaacaccacgatcaagagcacgaccacggccagcgtgggcagcaccactgtagtgatctgctgccgggcctcctgcatggcttgcttccgctccttcttgtccttggaggtctccttcttgggcttccctttgagctgccgcatctttcctagaggatgctaggagggtgtgtccagagggattccaggaagggccacactcctcttgccaggctcctcgtgccgac

SEQ ID NO: 138750 - DNA, 359 bp, Homo Sapiens
  misc_feature (243)..(276): n is a, c, g, or t
tttaaggctattatctcctttattcaaaaaataaatatttcactttgattcaacatatttcaaatcacattaagcacagagaagaaatacagtccctttggagattgtgaacacgtgttggaaagaagcatgatccaaacaatgggaatgaggtgagtgtggattccagctgtttcctgacccagaggttccatccctcttcaggtggagctacttatcgatttttaggagagaaaaagaagnnnnnnnnnnnnnnnnnnnnnnnnnnnnnnnnnntgcgcgcgcgtttgaagtctgaaaggcacatgaagtggaccataaggtgtatggcacattcactgataaaacatcccctattc

SEQ ID NO: 138751 - DNA, 416 bp, Homo Sapiens
tttttttaacaggtcaagataaggctttatttctatagaaatgatgctttgacaatagtttggcttggtgtaaggctcacaaaagaaaatcacatgtaccatgtgtgggttaagcggtttgattcacactgaaccaggccagcccagttgccctctgctgtgtccacccgtggagtggagctgtgtcacagccatcacactggtaaactgctgtagctggtttaccaggctttctcttgccctgacagtacaggtgaagcctgtaaataaatcttctgctatctttgtgaacttaaccaaatcccagttaccttatttaaatggcaatagatctgttttcccttaaactagaaaccttaattacctgtattcctacctccagctcaacccatatatttgcacctttccagtaagca

SEQ ID NO: 138752 - DNA, 1124 bp, Homo Sapiens
ttaattcatcattttttgtttttccaaattttagacattctttttctcctttcacctaaaaagcagcctttctatctgctggttgactcagggattgattttgtatttctggccgttggtgaacagatccctgcatttctgtcatgatgtggttgctcctgcccagcagtcagcaaactggtccatacgctgaatatgggcgagaattttgtgggtcacacttgccacacttcacgtgtccacacttttcagagtatgtgctgttctgttttccagatgagcagaactacattctccgagatgctgaggcagaagtacttttctctttcagcttggaagaatccttaaaacgggcacacgtttctccactctttaaggcaaaatatttttacatcacacctggaatctgcccaagtctttccactatgaaggcaatcgtagagtgtgcaggaggaaaggtgttatccaagcagccatctttccggaagctcatggagcacaagcagaactcgagtttgtcggaaataattttaatatcctgtgaaaatgaccttcatttatgccgagaatattttgccagaggcatagatgttcacaatgcagagttcgttctgactggagtgctcactcaaacgctggactatgaatcatataagtttaactgatggcgtctaggctgccgtgcatgtcgactcctgcggtgcggggctggctgtctggctggcgaggagctgctgcgcttccttcacatgctcttgttttccagctgctttcctgggggatcagactgtgaagcaggaagacagatataataaatatactgcatctttttaagatgtgcaattttattctgaggaaacataaattatgttttgtattatatgactttaagagcccacattaggttttatgattcatttgccaggtttttaaatgttttcacaaaactgttacgggacttcaactagaaataaaatggtgtaaataaagaccttgctatctctaaattatggatgttaaagatttgaaatgttttgtactttgattatttttatttcttacactctgttttcttttatatccctatcttgcccccattttaaataaatgaacttttggaccta

SEQ ID NO: 138753 - DNA, 683 bp, Homo Sapiens
  misc_feature (612)..(612): n is a, c, g, or t
tttttaagttcaaaagtacatttatttaaaatgtgggcaagatatcaatataaaagaaaacagagtataagaaataaaaataatcaaagtacaaaacatttcaaatctttaacatccataatttagagatagcaagggctttatttacaccattttatttctagttgaagtcccgtaacagttttgtgaaaacatttaaaaacctggcaaatgaatcataaaacctaatgtgggctcttaaagtcatataatacaaaacataatttatgtttcctcagaataaaattgcacatcttaaaaagatgcagtatatttattatatctgtcttcctgcttcacagtctgatcccccaggaaagcagctggaaaacaagagcatgtgaaggaagcgcagcagctcctcgccagccagacagccagccccgcaccgcaggagtcgacatgcacggcagcctagacgccatcagttaaacttatatgtaggcttgttgaggaaaacgactttcaaacacaaggcaaaagaaaaacatgaaaccaagggttccaacattcattatccagtttcagagacacccttgaaggaatgctacagcctctttcttacccattcanaccagtcgctctgctgcatacccacatcacaggaggccctcagccccgacacacaggctcactcagcccag

SEQ ID NO: 138754 - DNA, 543 bp, Homo Sapiens
tttttattagttcacagaactccaattctttattaatcagggcttgctcacaatgacatacaggaaaatagcactaatgaagagtaaatatgcaggcagcaaccttcaggagttgggagttggggagaaacgacttcaaaactgcgataggtacttatggtgggtatctggtgattcttagttggcacaaatgccctgcctagcccccttaactgcgtcagcttcacagatggagtgttttgttgttggtgttgttagtaggcaggattgccttacactggggaagaaagaccagcttgagtgaaagtccgcagtgtttttgattttgtttgtatgtgtgttttaatgcaacaaccagctcacagtttccaagtggaaaaatattcagtagcatcatgtacttgtactataggtaagagcttaaaatgaacatcatcaatcatggcatccacaaataagccacctgacacattaattaattcattccatcaaaagaacttaaactagagaattaagcccactttatgaagagcgatttcacgg

SEQ ID NO: 138755 - DNA, 1058 bp, Homo Sapiens
  misc_feature (922)..(924): n is a, c, g, or t
  misc_feature (934)..(934): n is a, c, g, or t
  misc_feature (936)..(937): n is a, c, g, or t
  misc_feature (944)..(946): n is a, c, g, or t
catgtctaactccattccaaaagaaaaatgaggtcagtagacagtctatggtgctagaaaccaccattgcctaatgacctagaaggctttgttgtctctgagcttgactaagaccatacctagatcacaggtattatgactccacatgaaccttcacatttgttcgctcataatctacttactgcctaaaaactacaaaaccaggctaagaaataccaccagtcatagcatttacttctgcttctcctggattatgtgctacaaatgtgctttggctttagaaagggatggatgagaagacagacctgagaccaatctgggtagaagcaaaaagttgaaccttttaaagtgctgaacacaaatccaaattcgaatggttcaagcagccgtgaaatcgctcttcataaagtgggcttaattctctagtttaagttcttttgatggaatgaattaattaatgtgtcaggtggcttatttgtggatgccatgattgatgatgttcattttaagctcttacctatagtacaagtacatgatgctactgaatatttttccacttggaaactgtgagctggttgttgcattaaaacacacatacagacaaaatcaaaaacactgcggactttcactcaagctggtctttcttccccagtgtaaggcaatcctgcctactaacaacaccaacaacaaaacactccatctgtgaagctgacgcagttaagggggctaggcagggcatttgtgccaactaagaatcaccagatacccaccataagtacctatcgcagttttgaagtcgtttctccccaactcccaactcctgaaggttgctgcctgcatatttactcttcattagtgctattttcctgtatgtcattgtgagcaagctgtgatttataaagatttggagttctgttgaccnnnacccctttcngnnaaaaagnnnaaaacttgtccgccgccctccgccctcgaggaagctttctaagacattccttttggggccgcgggccccggtatgttaagtggaacatgggtcataacctggttttcctagc

SEQ ID NO: 138756 - DNA, 488 bp, Homo Sapiens
ggaattataaactaactttaattacatcaacaggaagaatttcaaactatgttgtaattcttattttaaagtttaaatctaattaatatattctgactaacataatcatccaaagataaaagtatttgtgatggcaaatggacagaacaatcatttaggtagcatctaggaatattgctacaattactttacataaatagaaatccacgtctttattagtaatgtgccacacatcttagagtaaaaatttacataagataggcttataaatatacataaatctcaaaattaatcacaaacattaggtacacaattgttataaaacaaatataacctatcaatgtctatgtaaaggcatagtttttacaaaatagtattttgtagacagtctcaaaaaagtatattaatactcctggagccagattgttccagcatatcagcatgtctgtggaaataaggcatccggagaagctgcattcactcttccc

SEQ ID NO: 138757 - DNA, 785 bp, Homo Sapiens
tttttttctggttttgctagtttatttcaaaaattacaattgtttgagtcaaatctatacttgatattcattgttgggtttctttaggtcattctgctgttctctcagtttcccaggtgttttgtgtgtcttccttgtgctattaattttcctgtggccttgttggtcagatccacagaggtaaatgcaagtgtttttccttgcttcagaacatgtgctgtaatcactatatcttctcctaattttgcaggtgacatgtacgttatgttcatatcgacactgactccgggtgctcccctttccgtgcatagcagagccattgttgatatgttatctactaacgtggctgtcaaaccgccgtggagagtgcctattgcattggtatgctcttcttctactttcatttcacaaatcactttcccaggagcagcagagacaagagtaatctttcccaaaactctctcaaaattgcgagccttggtcatggcctttatcacctcccgcagagactgagtcatgctggtcatcgtggacggttttccagcctttgggctttgcgcaagaacgaacttcggaagagctggaaagtccagaagttagtgaaagaaggaggacacaaagggcgaagagcccgcacccttctccgcccctaggagcgcaagaggccgggagtcaggcgagctggcagccccggtggtccgcgatttgctcactgactttcctcgcacccttgtccccggccgtaatggccgaattcccgggcatatgtccggtaccgtcgactg

SEQ ID NO: 138758 - DNA, 857 bp, Homo Sapiens
  misc_feature (16)..(16): n is a, c, g, or t
  misc_feature (95)..(97): n is a, c, g, or t
  misc_feature (100)..(102): n is a, c, g, or t
  misc_feature (115)..(115): n is a, c, g, or t
  misc_feature (118)..(119): n is a, c, g, or t
  misc_feature (122)..(122): n is a, c, g, or t
  misc_feature (126)..(126): n is a, c, g, or t
acaccttaaccttctngggggccccccgccgccaaacggaaatgggtcttagaaaaggcttttcggaggggcccgaaggcggcccccacattgtnnnttnnnttttttcccgcgnccnnccnccgngggctaggtttatttcaaaaaattaccaaattgtttggagtcaaattctaatacttgggatattccattgtttggttttcttttagggtcatttctggctgttctctccagtttccccagggtgttttgtgtgtcttcccttgtgctattaattttcctgtggccttgttggtcagatccacagaggtaaatgcaagtgtttttccttgcttcagaacatgtgctgtaatcactatatcttctcctaattttgcaggtgacatgtacgttatgttcatatcgacactgactccgggtgctcccctttccgtgcatagcagagccattgttgatatgttatctactaatgtggctgtcaaaccgccgtggagagtgcctattgcattggtatgctcttcttctactttcatttcacaaatcactttcccaggagcagcagagacaagagtaatctttcccatacctttcccaaaactctctcaaaattgcgagccttggtcatggcctttatcacctcccgcagagactgagtcatgctggtcatcgtggacggttttccagcctttgggctttgcgcaagaacgaacttcggaagagctggaaagtccagaagttagtgaaagaaggaggacacaaagggcgaagagcccgcacccttctccgcccctaggagcgcaagaggccgggagtcaggcgagctggcagccccggtggtccgcgatttgctcccc

SEQ ID NO: 138759 - DNA, 852 bp, Homo Sapiens
  misc_feature (21)..(21): n is a, c, g, or t
  misc_feature (141)..(141): n is a, c, g, or t
  misc_feature (254)..(254): n is a, c, g, or t
gaaactggtcccaggttatcnttaaaaaactttctggcaatatttttttaaatagcccatcttcccagttttctgggattttgaaaaaaaggtaatttccaaaggttttttaaaggtcttcctgttaattaaataaaaatnttaatcctacatctttttaaattctatatccgcatccctccaggggaaatctgggatgactggtcgccagagccccatcttttgggaaatattccccccgtcatctcttcctntcaatctcccacattctgcaataacgcacaatttagcagttttttcacctttcacttccacattttccaatatccttgccactcctattcctttaattactttgccaaacaccacatgtttcccatccaaatgaggagttggaactgttgtgataaaaaactgagaaccgtttgtgttgcggcctgcatttgccatgctcagtaaaccctcccgatcatgcttgtaatggaaattttcatcttcaaatttttcaccataaatactttctccacctgtcccattctgatttgagaagtctccaccctgaatcataaatttcttaataattcgatgaaaagggcatcctttgaaatggagaggtttcccagtcgtgtgtccaatgcctttttctcctgtacacagtgcacgaaaattttccgcagttttgggtacgatatctgcaaacaattctaagacaattcgaccaactcgctcccctccgatgtccacgtcaaagaagactcgagggttactggggttggagggcttggcttggggggacgggtgcgacatcttgacttgcagacgtgtttagtacggaatatcagagtacctccc

SEQ ID NO: 138760 - DNA, 897 bp, Homo Sapiens
  misc_feature (79)..(79): n is a, c, g, or t
  misc_feature (173)..(184): n is a, c, g, or t
  misc_feature (594)..(609): n is a, c, g, or t
aataacaagcggcgcgggggagagagagatatttctccccgagagaggcccctccttaaagggtgtccccaacggcganccccccccgagggttgtattccctgcttgttggggggaaggcaccagactgtcagtggtggcccccagcgggttgtccccgtcttatcccctannnnnnnnnnnncaccgccgcggcggccccaccaaagggaaaaagggtggtgttggaaaaaaggttttcctggggggtggccgcgaagcgcggcccccccacagggagtgaggttggtgtgcaactaatatgcgggcgggggacgggatgacattgagcggggctagtcccgagggggtaggtgggtttggagggggtagcggaatggtgttgttggtgtgtttttctagataagacatctttattacttaatctttaaaacagtcacttgcctattcaattctgaaactgtttgttttctttccctcccccgcactcccgctctgatacacaaacttgttgtaaaaataatgcagaaacatatacgtcaatctaagtctctgaaatatggccaactctacctcgccgtatatccaacattnnnnnnnnnnnnnnnnggctgtttaagaatagaactcattcccggtttccaccaaattatttccctaattcttaaatcctcaaataagttcttaatctccaaagtctcggttgtgggaaaaacattaatttgtgcagtccaacacttacatactttcttgacggaagggcaatcctgtccctttaaactcaatgaaggcagcggccaggtccttctgagtccccgtataattgcctagaacttaacatttagtattcatagtccttggtttacagacgggtccgacagttagaaactattaccc

SEQ ID NO: 138761 - DNA, 948 bp, Homo Sapiens
ctgggtagttatcccccacgctgtttcctatatacccacgtccggcccccagtggtcaaactcgctgttacaacaccgcgacaagtgtccatgatcgaatgttgcgcctattgggcctttttagttcataagtcacttgacgattgctccggcgctctcattacgttctaataatccgtctcggggcgctatgctgtaacctaggaatgcctgcctataagcctcgagcgaaagtcaaccccagatagggcctatgcgttctaaccgtgtcttggttagttgcctcggagacgccttactgtgcacccgcacacttatgttctacttcctgtctatgaataggtgctcagggtagtcgtcttggcattcgcaatgtagttattaagggctgttcaaccagcctgcattacatgctggaagtcaggacttgggtgctgactatgtacagggcccttgttttcaaaatcgtcacattgcaagtgtaaatgcgcaagaagcctccgttgtcgctttttttcttcctcttcagtaacttttgcaacattattgcatagaagatccctgaccatttactaggaacctggttaagcaagcactaatctcttttcctggagatcaaggatgcaacctcaggttgagaaagaaacagggttccctgggcccattagactgtttgcagggcatcactgcttccccctgacacctcacaactagcaaaaattgtctttgtctttggaaattatagagggatttgggtatccagattgtgcagatgcaaacttaggctgtcttgatgcaaacttagaaccacagaaatgcttttaaaatgcctgttttaagatggaattgttgtttttataatttgattttagtgctaaataaatgattggctttgtacatgaatatgttctgtagaagtgctctttcactagtactacattacatccg

SEQ ID NO: 138762 - DNA, 405 bp, Homo Sapiens
acaagaaaccattctcctctcttgtcttcagagggattgtgccctgccaacaccttgattttgtacttctgtcctccagaaccatgacagaatgaatttctgttattttaagccaagtaggtggtacagcagccacgggaaactaatatatgtggtttgctttatatttatgttggacagcattctcttagatcctacaaccaattcacagaaaacacagggctgaggaaccagttaaacttcaccagggaatacagttcacaaaatttagcccatgggaaattccacagagtaaactatctaatctccacaaataaattgaaatggaagccttctatggatgaaaagagacttagacatatcaaccagtcacaaccagtttggaacctgattaaaacaaaatgt

SEQ ID NO: 138763 - DNA, 491 bp, Homo Sapiens
ttttcacagtacattttttattctgtgttgaaaatgtacaaaatatccccacttcccttgagaaagagtatatctaaaatacactttgatgaacacagaatattaaaacattatatgctatagaagtgaacacaaatacattttctccaaaatttcaatagtctaaggaatatataagcattgataatatgaaggaaaatgtttggatttatttttaaattcaaaattctcctggttgtagaggtgaaaaagtaatcaggttaccaccaaaagaaatgtgtctggcatgttcttgatgtctcctctccagctgagtaaatggattactgcagtttagacctggtgaatcaagaaggtggcattcagtagtgagacttttattatcaaatagttctgactgagaaattttagtttccccttcttctaagatgctattttgtgaagctgtatttttttcatggctactcatcaatatatcttgttatgtaatt

SEQ ID NO: 138764 - DNA, 540 bp, Homo Sapiens
ttttttgcagtgttagagaattttgttttattgttttggtggcatgggcataattggagaaaccattggggtattcactagtaacctacattgttagtttccttggttccagcaggtaatacactgggttccgtcaccctggagatggctacggggaggctgagtgacttcccaaagtaataaagagtttggaatcagaattccaggtctgactcccagcagactgttctatttccttacacacctgcactttcatcaatcttctccagctccaatttcttgtgccccttcaacagcatctgcaggcaggatgatctttccgataaaaaccagttgcagaagttcctgttgcttccctttggtttttcctcagggtagggagaacagagcagctgcattcacatggccccatttccctctgcttccccttcccacttgattattcaggcaagtgggattgtaacatcatggccatcgccatagtaacggagcttgaaagatgctacactgccctggaacagacgtcttgctgggtaccag

SEQ ID NO: 138765 - DNA, 847 bp, Homo Sapiens
  misc_feature (64)..(64): n is a, c, g, or t
  misc_feature (152)..(152): n is a, c, g, or t
ccgcgcccagccaatctttttatatagtagatttcttgcaatgtaacccctatcctctgggctntgtgtaaaaagtgcattcagacaatctgaggagtgtcttaattttttgtgtgactatcatatatattttcatcctgttgaggtgtgtntgctaggtggatattgaacatgaaatcaaagtataattttaaacttgtgttgaaatatatgtgtataagcatatgtgcacaattacctatattgtcaaacacccaacctgctttccaaaggatttgaagcaaggtctaataaaaacacagaaaaagtatggccaagagctgtaaacaccaaaaaaagaagtaaagggcaagtcgcaaacagactgcagttgagcaaagctgcaaaggactataataccaggcctgaagtggttgctaaatgtagctctgagctttctgacattcaaagccaaaaataggtatattttattatttaaacagtgtctactctgaggtcctcaaaactctttcagggggcccacagatcaaaactattttcataataacaccaagacattgtttgcatctttcattgtcattctcttaggagtgtacagtggagttttccagaaggcatatgccatgtgcatcaccacagcttaaatgcagaaacagacatgaggatctagctgtgtcctactaagccagacattcaggacatctaaaagtgtaaaacaatgccactcttctcactaacttttttgttttggaaaatatatctttcataaaatattgattatgttgatatattacgggtttgttgttattattttaaatgaattaataaataattttctgatttaaaa

SEQ ID NO: 138766 - DNA, 401 bp, Homo Sapiens
tttacaaataccaaaagatttattgtagacaattttgttacacaattatacacattatgatacacgtttgaaacattaacacacgtggagactgctaaatcatttaatatttcttttgcaaaaagataatttctttaggctgtgatacctgcaataaccaatctgttctcatttggatcagatctttctccctctgtcctggagatctcacagttcactttgctgaagcaatctatccacttccctatcgaccttgcttatagcagttcaggtatagactatttgagccttatatactaaactgttaagccagtgcgtgccctatgccctgctgagaatagattccttctgtacttgcagccctcagatgctgaattgatcaatcaatttttgagacgggg

SEQ ID NO: 138767 - DNA, 789 bp, Homo Sapiens
  misc_feature (645)..(645): n is a, c, g, or t
  misc_feature (668)..(668): n is a, c, g, or t
tttgagatggcaacactgctttattaggccgggccagccaggagcagacgcacggctcctcagtacacattcccccacccctgcctcggtgctccccactcagggctgggccatggagggggcagcgtaggtctggaagcgcttgtgcgctcgctggtgcgtgagcagtctcagggacatggtgtccacggccatctccagcccgggctgctgggttatctccactgtgtagtcattggccagctgcagggaggccagcatggaacgacacacctcgaaggccggctggccagccaccagctccgcaaagggacaccactcattgagctgggggaaccgtgagaccagctggtccccataggtgtggatgtcaaagggcacatgctgctcctgctcctggagcagaggctgcactgtgtcctcccagtccctgatgcgctggctcagctctgtctcctggacaaacttctgggaggtggcgatgaagagctccacattccttcgaaccagctcctcgtagctcagggacatcggcactgcgtcaaggtcagcggcttccctggggtctgctccctcggggctccatgtactcctcaggctctagaaagtcatctgctgggaggtgggagagtgaacagcacgcangcagctagtcgggcagggtgcanggccccaccccaccccctggcaggcaccacctgctgtccccagtcttccagggaatccctcagtggtgctcctctgcgggccgaaccactggttaaccaccctcctcctctgcagcttccg

SEQ ID NO: 138768 - DNA, 769 bp, Homo Sapiens
  misc_feature (36)..(36): n is a, c, g, or t
cgacaaggccttctttgttctagttgtagcaagttntcatgtgtttataacaggttttactttttttcttaaaatagagatttcttactaaataccattttatttcatttcttcacagatcttctggttcttgatcatcttaattatcaagtgtcgtatatagggaacaagtattgatgttcactatgattcaaactattactgttccatagtcagtggagctttttcaatgtccagaaagaatactttcaatctttatgaacagcctaggattttgcagttgtttctgaaggctcaaattgtcctgcttcaaatttttctttgaattttaagtagtctcttcttttatcaaaatattttatccactgttggggacaacttgattcgaaagagcttcttaacttcttgcattgagaagcatcctctaagttctcatctaaacacttccagtactcatcccgggccccccagcagacctgtctttccttcatagatggggctgccattcctactgcgatgaagctctctgcccgcccacgtccggcttcctttcgatgtcgacgggaggaaactgtcacgcaggccaccaaccggcggtggagggcgcggtgccgagtcctgccactgcagggtcgccccgctggctcaagctctagaagcgtagacctccccagccgcaaaaagcaactcacgcggcgaaaccgcggactcttttgacccttccgcggacgcgtgggcggacgcgtgggtcgacgatatcccgggaatt

SEQ ID NO: 138769 - DNA, 1361 bp, Homo Sapiens
tttttaaattttatattaattttatttaagtatacacgtcatataaaagtttcatctcataattttaaagacacataattacttatatatataatgcttcaaactactttattaattatcattaatccttttggtccctgaatctgcctttgcttcctcttctaaggcttgatgcagaatataactgcccatggagggcaggggacaagaaattaagggtcccagggagacccagtttcagttatccttgatgatgctgagaggcattcagcaccacgaacatgttgttcaaacataaatgagaaaataaagtatctgaacaatcttcatgaggtttttccacacaaagtgtatttcacatttctatagatttaactactaacaagctacatccaaggaacttaactactactgaatcctcggaggtatcatcaatatccagcttccaatttccactctctaaaatatttctccattgtgctcctagatttccaggtgcccacatttacagtaggtatgattttctggggcttcagccactggacaaagcgcttcatttctaggtagctgctgtgttcactgtaaggaatttccatatatttgaaatgtttcctttggtctggggaataacatctgctatttctagtgaaccttgtttagagtgtgtccatcctttgaggtcgaaatggccaaaatcctgattgtttttcccaccacacttctttcaaatgactctgttaagcccttaaaattaatttgcatcattgggagaaggtgaaccaatgaactgcacatgtcggtagtgatgagtgaattaatttctggtatattgaggcactgtagagttttatatttttcctgggacatgcccacttttgaacctaaaacatcagcaatggctaggaagactttctcttttccaatagagtaagtgccacagacaacaagagcatgtgggtttagagttacagcctcaaaggcagtgttgatggcaaaccggataacctcttgctgagatggaaaggtgtattctgggctacaatatgtggtatctaagtacagcatatggactttctggtccgcaagaagagaacgttccatgctgggatctgctctgaagtctcccgtgtgtaatatgacagtaccattaggaagataaaagaggatcatgacagcacctggacagtgattggcatcaagcaaaacaactttgacaccattcacaatacattcagtgtccagtggcaatgggtgaatatattgttcttgcacatgaagcttgttcttcaacaaattgccagttatctcactacaataaactggaaatgtgaagtgtttagacaatccagcataagatcaga

SEQ ID NO: 138770 - DNA, 628 bp, Homo Sapiens
  misc_feature (40)..(40): n is a, c, g, or t
  misc_feature (83)..(83): n is a, c, g, or t
ctgcaaaatagtgactatctgatttctggtataaggtggnaagttcaacagctgtggcttacatttttctctagcttgaagcntaggtagaattctatctgtgagatccaggagatgttcgcaaggccctggatttttgcaggagagctattgaaattgtagagtcagatgtcaaaagccagactattctcaaaccactgtctgaatgtaaatcaccttttgagcctctgattcccaagagggttggtcttattcacatatcccaagtcatctcagaagttgatggtaacaggatgaccttgagccaagaaggagcacaagattccttccctcttcagcagaagatcttggtttgctctttgatgctcttgatcaggcagttgaaaatcaaagaggtcactctggggaagttatatgaagcctacagtaaagtctgtcgcaaacagcaggtggcggctgtggaccagtcagagtgtttgtcactttcagggctcttggaagccaggggcattttaggattaaagagaaacaaggaaacccgtttgacaaaggtgtttttcaagattgaagagaaagaaatagaacatgctctgaaagataaagctttaattggaaatatcttaaaaaa

SEQ ID NO: 138771 - DNA, 1266 bp, Homo Sapiens
tttacaatagcgataaatagaatttattttatacaactgttaccgacatccacacggccacaggggcttccaaaatgggtattggggccaggaggctggcttttggcgtgacgcctaaaaagtgtgaccagacacacaagggctcccagcagctgtgccgggctgccccctccatggcggtcgggggaggcaaggcctggactctcggccagctgagactcttggcctggagggcccagcatgggatggcaggggttaagctgggtgctggctgaggagccaggtaggtccccatcccccatgagggggttacttgtctgtcatgtgtaggcagtggacagggcatcggcagacctgtggcagaactggagggtccaggaggcatactgggcacagccggctccctgcccctcagcctgacctggtggctccagggacctctaaagaagcagaggtagggtgatacgggaggtccctgggaagaacaatcctaccattactaaaagcaggtgcaatgtaatcacatgtctttcaggtgacctctgaaagataatcttggtccatttgctaggcaggacgattgccccagaagaagggacgagttgacgttgcacccaagaaggtcgacaacaggcagaagccgcaaaagtttggcaaaccgaggcacccgggcgtacaccaaaccacagtgcatacaaatcagccggcgacagtaatccacatccctccctctgttgctgaccttcccaaggagggccatagagaggcatcataccaacgacggggagagcatggttccttcgaaaccttcactccatcgttcgccgacccattagttgcccactacatggaaagttcccagaacacggggaattgcatcaaaagggatgattgaatatgggagggccccacaagggaacggggatggcacacgcgcgaggaacaacgccacaggtaccctgcgtatacccagctgaagcctaaatctgccgagaccacacagagcggcagcaaaaaagcacacacaaggcgccatagacgggagataagagggaacgaacatgcacaaagacaacaattcccacatgaagtcccacagaggacacagggaacgggcatcggtgagccaaggcaagaaaaaacacagcccaaagacgaggacagcgaccaatggagagaaaggattcgaggaaaaggcaccggggggaagggcccaacagaggcagaggaggaaggacaagccagaggccaggaagtgtcgaccgg

SEQ ID NO: 138772 - DNA, 263 bp, Homo Sapiens
ttttagatacatttttcaaaagagtttataatgtaatattttcaacccttctgtattggaaatacacttaatgttggtcaattatgtatttagttcagtgagtcactacgttaaaacagcaaaacatatagtttgtccttaaatattatataactaataccatttctgccattgttctcttgtgataacgttagcatggcccaattcttcctcactgactgactaaaactagactattaaaaagaagaaaaaggagaaaagag

SEQ ID NO: 138773 - DNA, 710 bp, Homo Sapiens
  misc_feature (686)..(686): n is a, c, g, or t
tgggcgtcttccccagctactacgtggcccccggcgcccccgctgcacccgcgggcctccagctgccccaggagatccccttccacgagctgcagctagaggagatcatcggtgtggggggctttggcaaggtctatcgggccctgtggcgtggcgaggaggtggcagtcaaggccgcccggctggaccctgagaaggacccggcagtgacagcggagcaggtgtgccaggaagcccggctctttggagccctgcagcaccccaacataattgcccttaggggcgcctgcctcaaccccccacacctctgcctagtgatggagtatgcccggggtggtgcactgagcagggtgctggcaggtcgccgggtgccacctcacgtgctggtcaactgggctgtgcaggtggcccggggcatgaactacctacacaatgatgcccctgtgcccatcatccaccgggacctcaagtccatcaacagtaagtggtgtcctctccccaaaattccttccacagaacctctcaaggccaggcctaggtggtgggaaacagggtgagggacaccagatgacactgtgcctggagtgagaaggggcagcagtatgataccttcagggtgaaggtgaggtagccttgcctgccttaagggagaaaaaggaggctcagaaaggttgaaggacttaccntcctcccaggctgcagagtcacaa

SEQ ID NO: 138774 - DNA, 557 bp, Homo Sapiens
  misc_feature (417)..(446): n is a, c, g, or t
ttcaagcaaatataagtgggttttattatttttatgctcagaatgcaagaaagctttgcgccagaaccgttaaacattcatgaactcactaaaaagaaacagaaaatgcccttagaagacgggcggggcgagggggaagacctatgaacatgtttatagaattaatgtctgtactgtagcatacacaggtaattagaaaatattctcaatgcatttaagatattttcactaaagggtttgagattatccaattagctgtactcgaaagtggcaaatacttgaagatcattgatttaatttaaaattctgagtgctgagttcagtttcctactgaatataaccagtgccctgggctctgcatggcagttgacttgccaatatctcaattaaagtgactaggcacagtggctcacactnnnnnnnnnnnnnnnnnnnnnnnnnnnnnncaggagcttgagaccagctggagaacatagtgagatcctgtctctacaaaaaaatttaaaaatacatactttttagacaggtgtggtagatcacacctggtgcctggtggc

SEQ ID NO: 138775 - DNA, 507 bp, Homo Sapiens
cagatactattggagatgaagggttctttgacttattaagccgatttcaaagcaataggatggatgatcagagatgttgcttacaagaaaagaactgccatacagcttcaacaacaacttccactccccctaaaatgatgctaaaaacatcatctgttcctgtggtatcccccaacacggatgagtttttagatcttcttgccagctcacagagtcgccgtctggatgaccagagggctagtttcagtaatttgccagggcttcgtctaacacaaaacagccagtcggtacttagccacctgatgactaatgacaacaaagaggctgatgaagatttctttgacatccttgtaaaatgtcaagtatgtctgtatatttttttcgttctgcatacagctcagataccactgaaaacattggtagtgttataattctcattcaggaagggcttattttgtattagagagttattattgtccatcattcagtaaaaaattattgaacacc

SEQ ID NO: 138776 - DNA, 440 bp, Homo Sapiens
ttttttgctttgctatattcattcatttattcattcaatgcatactgagcaccagtcctgtaccagacatctaagaccatggtcttagatgttgtggatactgcagtgagcaatgtagacacagtgtaccaggagtttatagtctatataagactattcttgctgcattaactagcattgtggaggagcatgtgaggaatgtttggctctgcagaaggcagcaggtctttctccagtctcaggtgtgaacatccaagtagactgagttgcattatctgttagaatttatcactgcttccctggtatgaagatgttggagtcactttatgatctaggttcaaacaacgttccagtttcatctcgacgctccccacagcagaccaatggcttactaaagattctttaggttacaactatcagaaaccaaacaagcatttcta

SEQ ID NO: 138777 - DNA, 498 bp, Homo Sapiens
ctatgggaagtgaggattggatagctttagtcaaagcagctgctgcagctgcagccaagaacaaaacagggagtaaacctcgaaccagcgctaacagcaataaagataaggataaagatgagagaaagtggtttaaagtaccttcaaagaaggaggaaacttcaacttgtatagccacaccagacgtagagaagaaggaagatctgcctacatctagtgaaacatttgataaactctcatatatgtgttctgttgaaagtaggacttcatgtagagaacgttccaaagatggtctttccacagccagagagcacattatcaaacaagaggaaaaataatcaaggcaactcgtttcaggcaaagagagctcgacttaacaagattactggtttgttggcatccaaagctgttggggttgatggtgctgaaaaaaaggaagactacaatgaaacagctccaatgctggagcaggcgatttcacctaaacctcaaagtcag

SEQ ID NO: 138778 - DNA, 269 bp, Homo Sapiens
acacatgggtatcattaagtgtgcattttctatttagacagggacattgaaacagttcagaaacatctgtcaccagcatgatgtgttgagaagcaaaggaaatggaaatgggtgtctgttttctcaaaagcattagaatctgtaaacataaacatcctttttaaagatctgccaatttagaatgagtttatgggcttaatgcaatttttaaaaacggtgacggcctacataatcatgttaaactagaatattttccaaattttcagagg

SEQ ID NO: 138779 - DNA, 803 bp, Homo Sapiens
gcagccctaacctttttgtctctccacctgtgctttggatgctcttctcccagccttttcaggatctttgtctgtcctcctatattaatgtattcaattattctctcagctagatccttgctacttggttttaaatttaagactaagattaaacaaaactatctttcacaaccacaaaccccctcccgccaagcaactaagattttcctctcattctcagccagttttcttgcaagcagtatctttagtcattgccctcaattcatctaatccctatcttaagctatctctaacatggatctttccctctactccactaatatcaatcactgtgttacttaatcccagggagaattttaaggacattcttttgcttctttaatataatcctattttgctcctaccactgaccatcctttctggcttatcatgctttaccttgccattaattagtggagtttctcaaacttcagaccctaggccctcttcctctaccaccagcagatctcatttatacccatggccttaaggtttatttctgtagtttagactactgagtaatgtgctactgcaaaaagaccatttggatttctcaaaggtaatttaaaaattcagctgtttaaatgctgctccccagctgaatctagggtcattatgctcatcagtgtgcaagctggacacctagcagttatggacacctccactattaccacgtctagttggctctgtcatccaactataaacgatcttatttcactaattttactagtccaagctggtctcttgtctagacaacaataagc

SEQ ID NO: 138780 - DNA, 1670 bp, Homo Sapiens
tgtcatcaggagtggttcccatggccatgccttgtttgtagagtttcccacagggagacagagatgagggagacgcgctcacggccactcacttcactgcacgagcccaggccggctcctgcggcacgctggccatggtccgaggggtctacgccacccatggccagtgtgcccaagtgaaccagtcccccacccaggactgcgtcaccacagagcctgcatgttctgtctgctccagacccctgaggactccatggtagcacgcccagctccacagcgcccgggcaggcagcgctggtggggaagacgaggtgggtcctgggctgctgggcgcaagcttggaggaggggacgctccactccatacctggtctcacaggcgaaccactgccaagtgctcacggctcaggctcacacacaccttaatggtcaaaaccaagggggcccaggactggggaagcaagggcacagatcgtacctccgagggaccccacctggacttggcagctctcacctagggacaggttcaggacgtcggggcaggccagatgtgaaggctgctgctccaccagctcaaacatgggcagggcacctccaagcagagacagctttttgacttgctggcaccaatcattgaagtcatcttcagtcttacagaaaaaccccacagcgatggacgggtcaagctccgcgatgctcatgcggcacggcgggtgctggcagtggaagctctcgtccggggatgaagcagccatcagtgggctccacggctggctgcgtggtgtgggggtccaggtagatgagctcctcaccaacgtagccgatgaagtagtgggcgctgttgggcttccctccgatgacgcccagggactggggcatcatgaagcagtgcttcagcgtctccacgtaggcctcgttgatgtccgtgagccccaggcgcaggggaatgagaagtaccaggggtctccatggcgacggcctgttggtgacctcagctccggcagggaatccgttgcagtgccggtcggaatctgcaggaaacgcagtggcgcctgcacagggaacgctggtcctgcacaaccttctgatttcctccatcacaacagtgttgtccattgcaatgtggaccgccaaggagctccacgtatcgaagacagcaagcttcttcaggacctgggcgacagtgttgggcccgtaccactggcctatggacttgccttcgccaactcccatttgcgctatctggtgaatggagtagtaactgtccttcctgtcgatgaatgcgttgaggacgctgaagtagctgtctggctgcctcttcctttgtgtccacctccaatctcggcctaggtgccggcacaccagggcttgggcaaagatcatctgtccacaccgcagcatgcagccccagcctgtgtccgaggtggggcctgtccccccaatggctggaaagtttttcctgtatgtaaaccaaagtctagatgccacatcagacaagatctcgtccttttctgtgaaaatgctgtattttctacccagtatccaaacgggctctgaggtctcaggaaaatcttcaaactcagcaaaccggagagtgtcgtaggtcagagtagctgcgtccatcttccccctcgtgccgaattcggcgcgccgtcgacttcatactctctc

SEQ ID NO: 138781 - DNA, 864 bp, Homo Sapiens
gggggcgaactttcggaaacccctggtccggggtggtgtgggtcagaaaagcctccaagagccgaaatagggggtttggtccctcagtggccaggatggggatcagagcatgttcaggttccagtagcttgtgatgtcctgagcccggcgcagggatgagaagtacaggggtctccaggcgacgcctgttggtgacttcagttccggcagggattccgttgcagtgccggtcggaatctgcaggaaacgcagtggcgcttgcacagggaacgctgttcttgcacacccttctgatttcttccatcacaacagtgttgtccattgcaatgtggaccgccaaggagctccacgtatcgaagaaagcaagcttcttcaggacctgggcgacagtgttgggcccgtaccactggcctatggacttgccttcgccaactcccatttgcgctatctggtgaatggagtagtaactttccttcctttcgatgaatgcgttgaggacggtgaagtagctgtctggctgcctcttcctttgtgtccacctccaatctcggcctaggtgccggcacaccagggcttgggcaaagatcatctgtccacaccgcagcatgcagccccagcctgtgtccgaggtggggcctgtccccccaatggctggaaagtttttcctgtatgtaaaccaaagtctagatgccacatcagacaagatctcgtccttttctgtgaaaatgctgtattttctacccagtatccaaacgggctctgaggtctcaggaaaatcttcaaactcagcaaaccggagagtgtcgtaggtcagagtagctgccctcgtgccgaattcggcgcgccgtcgacttcatactctct

SEQ ID NO: 138782 - DNA, 1079 bp, Homo Sapiens
ccttttcttaccgaaaaaaaccccccaccagggaagtgggacgggttcaaagtttccccggaatggttcattgcggccccgggcggggtttctggccagtgtgaaactctcttcgtcccggggatgaaagccagcccatcaagttgggccttcccccggcctggcttggcgtggttgtggggggttccagggtagattgaggtccttccacccaaggtagcccgatgaaagtaagtgggcgcctgtttgggctttccctccggatgacgccccaggggacttggggcatccatgaagccagtgtttcagcgtctccacgtaggcttcgttgatgtccgtgagcccccaggcgcaggggaatgagaagtaccaggggtctccatggcgacggcctgttggtgacctcagctccggcagggaatccgttgcagtgccggtcggaatctgcaggaaacgcagtggcgcctgcacagggaacgctggtcctgcacaaccttctgatttcctccatcacaacagtgttgtccattgcaatgtggaccgccaaggagctccacgtatcgaagacagcaagcttcttcaggacctgggcgacagtgttgggcccgtaccactggcctatggacttgccttcgccaactcccatttgcgctatctggtgaatggagtagtaactgtccttcctgtcgatgaatgcgttgaggacgctgaagtagctgtctggctgcctcttcctttgtgtccacctccaatctcggcctaggtgccggcacaccagggcttgggcaaagatcatctgtccacaccgcagcatgcagccccagcctgtgtccgaggtggggcctgtccccccaatggctggaaagtttttcctgtatgtaaaccaaagtctagatgccacatcagacaagatctcgtccttttctgtgaaaatgctgtattttctacccagtatccaaacgggctctgaggtctcaggaaaatcttcaaactcagcaaaccggagagtgtcgtaggtcagagtagctgccctcgtgccgaattcggcgcgccgtcgacttcatactctctcccccctt

SEQ ID NO: 138783 - DNA, 974 bp, Homo Sapiens
  misc_feature (676)..(676): n is a, c, g, or t
aagaattcggcacgaggtttttgacaacttcaaacaggactttaattccaaaccaaccacagaaccggcgcctgggagcaagtgggactgaggcccaggtgctaacacggggctggcagtgtcgagagaacgctctggaagctcctaacagacggctccgcgtgcggatgcacaggccctgacgggcactctgagctgggcagtctgacaccaagcagtaaggcctcccgggcagcgcagcctcagtccacgagcacagcgggtggccctctggggggaggcagcacggggcgcagccctcggcaggcgagcgggcgggatggatgaaacgcagcggcaccaggagccccaggctctcacaggtgccacccccgaccccaggattttcaaagggacaggatttcaaagtcttcatcttctgagtcgaagaatctttccagtcgctctacatcagaagaatctagggacaggttcaggacgtcggggcaggccagatgtgaaggctgctgctccaccagctcaaacatgggcagggcacctccaagcagagacagctttttgacttgctggcaccaatcattgaagtcatcttcagtcttacagaaaaaccccacagcgatggacgggtcaagctccgcgatgctcatgcggcacggcggggtgctggcagtggaanctctcgtccgggatgaagcagccatcagtgggctccacggctggctgcgtggtgtgggggtcccgggtaaatgagctcctcacccaccgtacccgatgaagtagggggcggctgttgggccttcccctcgaatgacgccccagggaactgggggccttcatggaaaccaagtgctttcagcggtctcccacggtaaggccctcctcttggagtgtccgcgggaacccccacgggcgccaggggggaattgagaaaaattcccccggggggcttccccccttgggcgcaacccggcccc

SEQ ID NO: 138784 - DNA, 1058 bp, Homo Sapiens
gattctgtccccctgtcgccccctcctgtccggttccttcttggtccccgatccctttcgagggtgaggtcccttctggcccgctgctcggctttgacacttttaggccggcctggctcccagaaattttcccttggagccttccttcgcacccatgacactcgcgatcccgcgatcatgctttttgacagaagtgtctgctgaccaggtactggatgggtctgctggccgccgagcccagtgcagcagttccgctgcatcagggtcagttgccccttgagaaatggaatcacaaaaggacgaaggggaaagtttgtggcttcttggagcttacagtggaattcctcaattgtcactgttgagttcaccagtgcaagaacaagagtccggcaccttctccccaatctcaggggagatgtcattgccaaactgttgcagagtggtaagaaagcgtttcaacttgctgagttgtcgagcaccacaagtggctggcaattgctgatttgtgagtgcagatgatgtggaggaggcaggaccattgctgaatctctgtggcggtgatggggcaccattcagggtaggaggagaatggttgatgccattgcttaatgcagtaggagtgaaggacactggcctcggtcctccaggatttattggtgggaggggtggcatggtgggaggtgaggatctggactgtatcttcacttccacaggcgatccaggcatcgctggcacccttttctcaggaccaactttccattgccttgccaggacctgtatttctttcaagcttattccagattctttagccattcacctggtgatctgcttatgttccaaaagatgaatgcaacatcacaggtacagtcaggattgtgctccacaaaaactaccatcctcaatcttcatcataatatctagacaggaactggtatggtggctcttgcctgtaatcccagcactttgggcagccaacatgggaagatcgctttagcccaggacgtttgagacccacctcgtgccgatttaacacccaggcctcgtacctagccatatat

SEQ ID NO: 138785 - DNA, 338 bp, Homo Sapiens
ctttccccctccggatgaatataaaccatgccagaagatttaccccagcaagatccccagaagccgtacacctggtccctggctccaagcggaagcagtcgggcagagctctgatgacatcaaaggcagaaattctcagttatctctaaagactcttcggtgagaaggcagatgaagcgaaggtcctggggttccaggttgcagaacaacatgtcagaccccacccaccccatgctcaagctgtaattcagttggcatacaggcttggaattgagaatttatttattgtaaatatgtgatttgcacgggctttaaagcagtattttaattgactttta

SEQ ID NO: 138786 - DNA, 579 bp, Homo Sapiens
  misc_feature (438)..(453): n is a, c, g, or t
ggtgcaggagaggtggatacctgatgagacacagcgaaagtgacctgtatacacattacaactctggagtacatattaaagtcgtgctatttccagtggtaaatgtctgacttttaagacattcttttaaatatttgtatcattgttaggatgttttaatcagttgttttttaattccatgtaatatatgtagccctcatcagatttatatcaccatatttctccttgtgtcctaagagaattgatgacaattcgtaaccataaattgttttatattagctagtatgtatatttatttttacccaatggctttatctgtttcccaaaatttgtttgggatttgttgaaagcattgtgtaacttctataaacggctattttcttgtaactgtcagtgaaatgaatgtgtacattgttttcttgtatttctctgggttgnnnnnnnnnnnnnnnnccaagggttaacatagaatgttttttttaaaaaattatctttggccaatgactttttcatctagatcttactttcattcaaccttctaaagaagttcgtttctcattgtgttgttctgtcaacttg

SEQ ID NO: 138787 - DNA, 433 bp, Homo Sapiens
tttaagtttccacaaatcattggtttattagaaagttcctttccctcattttacagcatatatatctctatcatatgtgataaagttaaatacaatctgttatgcttgtaagtaaggtttatttttatttttacttttaaaatcactattctggaagttaaagaaaatgcccctaggaaggcaaagaggcagccagagtatggctcaatctacaagctaatgggaagcagcacgaaaatgttaatactgtattatttatttacatgggctgaaagcaaagaaaaatgagtcccttcacttacacagatgatttcatttttccagtgctagttatccaagaagtgatgcttctgaatcagatgagtactgaacaggtaggagggtgggagggcagtcaagagttgtgtttgcctgccactttctttcctcgtgc

SEQ ID NO: 138788 - DNA, 483 bp, Homo Sapiens
  misc_feature (334)..(362): n is a, c, g, or t
aaatgtttgatcaaaatattttaataaagattctttctgacatagatacacatacaaatggtcgtacatagctgtcatagtctgattgacctatttaatatatatatcattctttacacatccaaaacccgccaacagatccatcacagctcccaactcaccatccaacctgacaaactgaatttgtattatctgcaaggagtggaaaatagcaggactccatttttaaaaaagattttcttgattttcatagggcggaaaggcagtcaaacagccatgcaaaactaaaactgaaagctcactttgggtaaatagcttcttgttcttccttagnnnnnnnnnnnnnnnnnnnnnnnnnnnnnagaaaaataacaaaggatttcacaccataggcaaatcaaaccagtcttttaacttaaataattctccacagttaaaataacatatatgtacatatatattaaaagcaattaaattagacct

SEQ ID NO: 138789 - DNA, 1245 bp, Homo Sapiens
  misc_feature (1118)..(1152): n is a, c, g, or t
  misc_feature (1156)..(1197): n is a, c, g, or t
ttttttcatgaagaggatgggacctgtttggcccatgaattcaattgactcattggccccatcacaagagatcagtgactcaatgctcagcacccagctggcaatgtgcccaggaccccctgcacttcccaagcagtgagcgcacacccaatgggtaagcccatgaacccagtttatgacactgcgttgggcaaaactcctgtccccagcactgagcatggcctaagccccatagcagctggcaagggacccaactgccctgcctgcctctagctcccagcattgctactgtgcaggccaagggtactgaagttagtcccactgtcccctgtccatgcatgttggagggaccaggccatcgtggtggggtgggacaggagtatagttgtggccaagggcttgtgagtgggcctcctactccccagcacaggtgcaggaggaactctggaagcactgctctctgtcagtgatacagcttccaaggtgttcttgagtagcagacattgtccctcagaaggggtgaccccacgggcatgcgcaccctgttccagcgggggccttttttgtagatgggcttgacggagccaggagcccagcgcgtcaggtaccggttgagttggggtttgctcttcggaacaactccttcaggaagccgaggcctgtgatttggtaatagacctgctcggtgggccatcttcacacactcctcgatcttgcggtgttcttcctggcataggcctgtgatctttcggggcagcatgcctccatgaggccggatgaactggctaagcagcagaacatcgtcatagttatacttgtgcttcaggttccaacggcagatggggcactggccagaggggttaggaggatttggactctccttgggagtcgctgtgatacggccttcaattatagttgtcttcccttcttgggtctccaccacttccctgaacccgcgagctggaagccgagaccagctggtcgctgccgggcccgctagtagcccacggagaagccgcccacagccggacaccagagccttgagggccgccatcttcaaaaacctccccggccgtaatggccgaattcccgggcatatgtccggtaccgtcgactgnnnnnnnnnnnnnnnnnnnnnnnnnnnnnnnnnnncggnnnnnnnnnnnnnnnnnnnnnnnnnnnnnnnnnnnnnnnnnncgccgagctagcgcccatatcggtaagcgtttctcagatgaatttccc

SEQ ID NO: 138790 - DNA, 430 bp, Homo Sapiens
atatctataaaacttttattaaaattggaattagaaactataccaaaaactttaaaaatacattaagacattgttcttttttcttacagaaaagagggtgaaaataagacccatggcaaagagccatccctgataattttgttcctttcaaacattcatgaacatttaaataaaattacaaatatttaaataaccctaaggtattacccacaggctaaaacttgccagtaattccttagccctgctatttcaatatcaattccacaaacatggaaaattatggtaactgcaggctgtaacagtttctaatattcacattatgaactatttgttatgttgtcataagaatgtgctcatgctataggcaaattcagaggtgatttcaccattttcaaattatcatcaagagtgtgaaagaggaagatgacac

SEQ ID NO: 138791 - DNA, 430 bp, Homo Sapiens
  misc_feature (24)..(24): n is a, c, g, or t
caagacccagttttacccagaaanggtatttctgtgcacaatgcagttgcattttcagaggcaagaccgtgagagagagccaactgagactcacggtgacggcggcttccagatctgcatgtgtcacacgaaaatgaggtcacagaggtgccgctgtcaagtagtttaatcatagtccctaccgtgtgtacctaaagaagagaactgtccttccctggacaaaccacccaccaggtcgagactccgatccagacgctccctgcacattaccagggtctgtcaccacccgctttgcttctcagttctgtgtgacaccaacgcccagggcccacaggggacgattatcattaaccagtttgtcctttctttgaccacataactctttgttttcaatgttacttatgaatattgagaaaaactgagccgaaaa

SEQ ID NO: 138792 - DNA, 545 bp, Homo Sapiens
tctattttatttttccatcacttctttgtcccagattcatgaaatttgctgatgtccattttatgtctacttttgaactcttctctttgtgtttgttttgttcttattacaaactccaagacatttcttagaattgtctacagatttcgtgtagctacttattggtagcttcttaatttcatacttgtccagaccattagacattattacatgctctgtcttgggcctatcattaacattagcttagggattctgatttcaaagacataaagaattggcaaaactcttcttacagaacttaaaacaagttttaaagttacatttctatacatctaatacataataccttcttagccattaatgtaattcctctggataaagataatatattcaaaaaatattgggaccaaaaaatgcacttgtttcttgctcatatatatatagatgtatattttttttaatttcttgtttgtttattttggttacattgaatacagatttgctgaacagttttgatgttatttttttaataaaatttgtattgt

SEQ ID NO: 138793 - DNA, 348 bp, Homo Sapiens
gaaagcaaaagggtattttaattacaaatatttcctactgtctgatgacccatccataacaactgagagttaaaagattacaggtgattttgacatttaattaaattttatcagtagattataatccaaaataaaatttctgaacaccctgtcatttacatcataatccaacaccaacagcaacaaaaaaaggtggtgtggaaaataaggctctagagattatccatgtcattgctgtggatcttcacaactgtgtaaaagtcactaggcctttggtgctttaatatcatgtacagttatgagatgtgtttaaatagcaaacttgctgttcttgaacctactgtgttg

SEQ ID NO: 138794 - DNA, 566 bp, Homo Sapiens
  misc_feature (511)..(526): n is a, c, g, or t
tttaagtgtttgctaccaagtttatttgcagtgttaacagcacaacatttacaaaacgtattttgtacaatcaagtcttcactgcccttgcacactgggggggctagggaagacctagtccttccaacagctataaacagtcctggataatgggtttatgaaaaacactttttcttccttcagcaagcaaaattatttatgaagctgtatggtttcagcaacagggagcaaaggaaaaaaatcacctcaaagaaagcaacagcttccttcctggtgggatctgtcattttatagatatgaaatattcatgccagaggtcttatattttaagaggaatggattatataccagagctacaacaataaacattttacttattactaatgaggaattagaagactgtctttggaaaccggttcttgaaaatcttctgctgttttagaacacattctttagaaatctagcaaatatatctcagacttttagaaatctcttctagtttcattttccnnnnnnnnnnnnnnnnctgagccacagtctcactgtcacccaggctctgtctcaaa

SEQ ID NO: 138795 - DNA, 438 bp, Homo Sapiens
taaaagttctttttttaagtaaattgttgacatactgcaaattttctatgcaaacttgcctcctgctgttatctgtgaagctcaggaaatccaaacatttgtgtttcaacaagggacagtaaactgtgtgtttacagccaaaagaaatgcctcatagttcttaacctcaacttttgtagaagtatttttttctctgtaatatttttattggctcataaagatgttttcatatctgaactcctaaataagtgaaattacagtagattatattaacaaaatactttttaggtagccatgcttgagactttttaaaaatataactttttccttaaagttttcagctatagcaaaaggtagttatgtatgccagacctaatatgagctgccaccaacacccctagaactttcagccatggtgtcttcagaattgtagcgcat

SEQ ID NO: 138796 - DNA, 847 bp, Homo Sapiens
  misc_feature (824)..(824): n is a, c, g, or t
ggaccctgttctgtgcaatatttttgcagagccgtaatttgtgggaatgagatacacatcatcatgcttttaaatgtaagtcgggttgaccgttgttcgtgccctgttactgtccattctttgagtacttcactggcactaccttccatgaatgcttgtactgttttgtccacacagttatcaaagtgctgcaaaaccaggataatttcattgttgctcttattaggaactattgcacgtaccgcatttatcttctctttcatgttctcaaaagctcctccctgggccagtacggtattggactgcaaatcaaaaatgaatcctgatgaatccttctggttctgtttcctggacattgtcgtttcttcgatctcaaaaaatatacaagaaaagtatccttttgccttgtctgggttttgagtgtaggtatctctgatttaaaagtgggcaacggaagtgtgcagttggaagcaaaaaatacgaaatcctgctgttcgaaattctgctcactagctgttaatctcctttccttttcttgtatcaacttcttgtcaggaagtatcattgcagacattcatgtctccttttccagggagattctagcccaggcccccgcaatcgcctcgtcgccccagctccgggctccgcgtcccggacgctcccgggtctgagaagaggaaaggagatcctccacctccccttctagagccaccgccgccgtcgccccccggccgtaatggccgaattcccgggcatatgtccggtaccgtcgactgataacgtgtgcggtaagtaacttggtaatttgcgtagtgacaggatangtttattggcgggccccagcgtt

SEQ ID NO: 138797 - DNA, 582 bp, Homo Sapiens
  misc_feature (504)..(504): n is a, c, g, or t
  misc_feature (532)..(532): n is a, c, g, or t
tttttggggaaatattttattaccaatgtatactgtgacagtttgtagccaaaaactgcggctggaggggtggggacgggacactgagtggtcacaagggacttgggctcacagcacaggggggacaaggggctggagagggtggcctttaaaagacaactgtggttatagaatgagctctctgtcctgtccccaatacccaagaacaccggtcacccaggatgccagggcccaagagcttctgtgagcccagctgtgacctccagaccttcctgagaccctctggcctttctgtgactctctctcagctgagcccccagggtacttcctgtagctgtctttggcctctctgggaatctcaaacctgtgactcagtgggagaggggatggggctggaaccaggcgggtgggagataggaactgtggaaggaccaccaacagcatgcaagagacgccccggtcacggggccagccactgcgtggagacgctcacactcgttctancctacgtgctgcccgagacctcacattncagagcgtgcccacttcgcggtctcacacaccgtcctccactcgtgcccg

SEQ ID NO: 138798 - DNA, 597 bp, Homo Sapiens
tttttgcagattcaaagtggttatttttattatcttacctccactgggttttcagtcccaatggagattgtgagacctggcaagaccttgagatcagtagcatccctgaggggtaaacacaagactggtccactgtctgctgccctgactttcctacaactcttaagaggtttgcagtccccattcctcatagccagccatagaaatctttccctgaaacaggaaacactttgggcagcagagcttctcatcccattccaggtagacaaccacacccctaaacactcctctccataactgaaggtcagagggtgaagggaatagtctctgctctctgtgaccaggaacttcactcgttcctttccagcatcattcctgctctcaagcgcctgagtctgggccttttctacctagtgggctacacactgctcagcccccacatcacagaagactatctcctcactgaagactatgacgtgagtgtctactaaagcagcagcagcatgactgcaccagagctagaaaatggacaggcaaggatccctacagatagcagagaagtaggaaatatcatctacaagtgcatgttggttttgc

SEQ ID NO: 138799 - DNA, 2412 bp, Homo Sapiens
  misc_feature (151)..(151): n is a, c, g, or t
  misc_feature (423)..(661): n is a, c, g, or t
tgcaccccagcttacattttgctccgctgtatgtgttggaatgtgagcgatacaatttcacacaggaaacagctagacatgatacgaatttatacgactcctttagggaatttgccctcgagcccaagaaatcgggaacgaggtgaaaaantgaacaaacagaagtgattttttctaatacagttccaaggtagaaaaaagtggagcaggcagggcctttcaccccttctccacccccccatggggggggtggtggtagcggcacatacacaatcatagtaaattggcagaagaaaaacacaatagattcctggctagatggggagagataaggcaatgtgcatgggggaatcagaggggagatgtgagcccctctgctcctcccacaagagtttcccctttgggccgggcacggtggctcannnnnnnnnnnnnnnnnnnnnnnnnnnnnnnnnnnnnnnnnnnnnnnnnnnnnnnnnnnnnnnnnnnnnnnnnnnnnnnnnnnnnnnnnnnnnnnnnnnnnnnnnnnnnnnnnnnnnnnnnnnnnnnnnnnnnnnnnnnnnnnnnnnnnnnnnnnnnnnnnnnnnnnnnnnnnnnnnnnnnnnnnnnnnnnnnnnnnnnnnnnnnnnnnnnnnnnnnnnnnnnnnnnnnnnnnnnnnnntgacaaagcaagacgccttttccaaaaaaaagtttcccctttggccccaaatgaagacttggctggcagcagaggcacagctggaagcatcgatcttccacctccgtggcttttccattctctgctctggggcaaaggagtgctgtgaaaagggagacgagtagtttctgcaccagtcccgcacaggccaccagggaaatggattattccatcttctttaacttctctttccttggcaccattgctttgtgaatataaggcaatatgaatagtaggctcaggaagaagatgtggccaaggaaatagatggatttatacaccttaagccatttgtcccacgtgaagaggcagaaggcagtcatggagtaacccatgaagagccagtggatggtctgttgcaccaaatagtagaagggctggaggacagtaatggcggccagcttgctcagggtggggctctcttgaatgagcctggcagcctgtctttccacaataacaatgaggaattccatctggaagcagaccaggtatcctgagtgcaggccgtgccagagggccaggaatagcaacgagagaccctgagagagttctttatttccaaggaacttgagtcgtttgaagatgtagcgggccacccaggcgttggtgttgatgttgaatgaggcaatggtgccagtgaagcgggggtttgtttcaaagagccacaccttcatgttggcacaggcatcccactttgccttgcccttttcttcaaagccattgaagcccaggcccgtcaaaatgcatactccttctgtgaccagccaacaggtgacatatttgtacagcacaaacttgccccagatcagcatgtacatgcagcggaaccagaaggggtggttgtcatagtcttcagtgaggagatagtcttctgtgatgtgggggctgagcagtgtgtagcccactaggtagaaaaggcccagactcaggcgcttgagagcaggaatgatgctgtttggtatctttcctggtatgtcaatcagctctccctgcaccagcttcatgtagtgattcattgagaactggggccctaccaagaaggccccatagaagtaggagaaaccagcaacttccagcagggaaggaacaccacgtatggcatatttctgttgctcagaggacaaggaattctgatctttccctccgtcaaagtagtcaacagccaaaccaatcagcttcaaagtcagaacacaatgtggcattgtccacttgatatcgtagttgccggtggcagtgtaatagtatccagccagaaggtaggccatctggaagcaaaaggtagtgaggacggcagtgatggtgcggcccattagtcgaaggatgaggaactgaagcacaatacacagcagggagtggtagagctggtttccaaagttaaaataagcaattgagaggcctgtaaaggtatggaagaggtggatgaggtaggtctccttgtagaaaaggtaatgccgataaaacaaagcaaaggggtaacccaggaagatggagatgatcagccgcagcgcctgttctgacgcgcccagggacgtcgccaacttgttaaggctcagctcctggaaacccgactgcagaacccccgccagcgccaccacagtcccctcgtccccctccgctgaggacgccatcttaactccgggagccccacagggaccccccagctccgcgcgccccgaatgcgggcaaaacgctatcgcttcacccccaattac

SEQ ID NO: 138800 - DNA, 1109 bp, Homo Sapiens
aggaaatggacccggcaaggattccctttccagttagccgaggagttaggaaattttcttttccaagggcaagttggttttgcttctagatctgtgaagtggcaattgccaggcgttggtggggacatgttcatcaggccagccattgaacaaccttgcggggcacagggctgtgccaggtgcacatttagccacccgtggcctctttaggagccgctcctagcttgccttatcacatccacgtgacccctcagagcacagcagcttctgattctccatcctattttcttctcttgactgatacatttgggcacttctagggaattcagaaaccaagggaaggggggaagtgctggcttttgctcctgcccagctgaaaggcttgaaaacagttcagtaattctgggcaggtttctctccttaaattaaaatccaatatgggcccctctgtacttaacattccaaatgctcattccaaacactttgccaacgaaggcaaacagtagagaagttaaatacagtgctgcccttgaggctctccaagggaaaggcgaatgaatattctccaggccctctgcttattcctctctgcctattgtgaaggcaatcaggccagactattgagggcatctggcagcaggactcaggcaggtatgaagtagccagccacaagtgtgaaaaggaagagtgctgagagaaactgcctagtcatgtgatatccctaatgcactgtgctttcttccctcaagaaccaccccttctggttccgctgcatgtacatgctgatctggggcaagtttgtgctgtacaaatatgtcacctgttggctggtcacagtaagtagaaaagttgaaacaaggtcctatttagacaagccatgggggccagtatggggagtggcaagagccctaactgagctattccctctcaggaaggagtatgcattttgacgggcctgggcttcaatggctttgaagaaaagggcaaggcaaagtgggatgcctgtgccaacatgaaggtgtggctctttgaaacaaacccccgcttcactggcaccattgcccggacgcgtgggtcgacgatatcccgggaattccggaccggtccag

SEQ ID NO: 138801 - DNA, 452 bp, Homo Sapiens
ttaaacagagctctcttcacatttattaattcctgggaggaatgagggaggcttctccagccccccagagaccccggccttgtgctgcaacaggaggggagggagccagtccagaatccccggcacttctgaggacaccaacagcaccctgggcccgcggttgcatcagctttctgccaccaggagctccacagggtcgctgagctccgattcgaaggtgtggggcacccaggagcggtggcggcacctgtagttgccggcgtgctggggccccacgaagatcagctcgaggttcgccgcggccccgggggtgcggaccgtcttcacggccttcgtctcgccctcgcgcagcagctcgaaggtgacgtcggggatgggtccctcgcagcgcaggacggcatctcggcccgccaggaccgccccactccacgtcgcccggagctgaggcctgg

SEQ ID NO: 138802 - DNA, 485 bp, Homo Sapiens
atgaaccaccttcaggttctacttctaattctagttctcttgatagtttaaccacatctgcagttacctccactactgaagtcctgaacccatcaaagtcatccataagtgttggaatcaacttcttccaaactcctcttattgttacggttttaaccacctctgatgaatcatgaagattcttaatggcatttagaatggtgattcctatccaaaatgttttcaatttactttgcccagatctatcagagaaatcactatatcaatggcagctgtagccttatgaaatacatttcttaaacactaacacttgaaagttgaaattactctctgatccatgggctgcagaatggagttccattagcagctatgaaaacatttaattccttgtccatctccaccagagctcttgggtgaacaggtgcattgtcaacgaaaaacaatattttgaaaggaatctttttatctgaatggtaagtcttaac

SEQ ID NO: 138803 - DNA, 500 bp, Homo Sapiens
ttttttttgtatatatgtacagaaatttattataaatttcattgataaaaatgatgtgcagcacataatttataaataaaatatacaatgccatttattgtaattctagaaaagttttttacagaatgcttttgttgatttttgctgactcttctatccaacctgtttgcaattcaaccatgatatgacacaaccagactacaaataaatgtttgttactatctgattcaacaaagcagtcactcatttcatggaatggatatgggctgttactcagtgaaaagacacatgagatggttcagtgctaactcacccttctgacagaaaatgccagaaagtttccaccccattgacaggcttggagtcttgagtaccatctgggtgggtggagctggcactggcacgaaacctctccactgctatcctgacagagatggggcatgtacttcccagggccacttgccaacccagggaggttttccatcttgctggtttggtga

SEQ ID NO: 138804 - DNA, 478 bp, Homo Sapiens
ttttcggaaaaaaatatatatatttcaaaggtaactagttttgttttactcaaactatttacaacaaggggcagagtagagacatgaatagctgcacaagttattttaattataaattaataaaagcctacattaaattcatcttattaactacttatgagagtgtataaaaactgatgaagccaacattatttggtacttctgatacttccattcgcttcaacttttctttctaaatagaaaattaaaagatggcaagccatttacaaaaagacatgtaattttgttaatcaggttgacattttgaacatcttcctcttcagttcagctgtcttctcatctatcttagcataggagtcctctgctgccttttcaataccgtcgtggtatttctccacagcagttttcaagtttagaaatatttcctgggacttcagtttctccctttcagcagcatcttttagttgttgaattcccc

SEQ ID NO: 138805 - DNA, 1064 bp, Homo Sapiens
ctgtcagatcgtgaacgcgactctctgctagaagacttcgcctctcgggcaccctatttacaaggtggtcacccctagaggagtttcttcgctggaaaggcggttctcctagcctgttgccctgccgacccctggtcccattatgagaagcccaatgattcccatccaatgcccccatgacccccaggcattactttggaatggccccactgcatggtttcccggagaaccctgatagccattcatccagtctttctaaacgatcttcaattcgcttttcaaagagtgtaagggtcccttcataattaggagacgatgaggcctgtcctccattttctagacccaacagctgtgcctgcttgagagagatggaaggagagccaacaggagttgaagggtttgatgaaaagctgttgttagtgtgatctggagaatagatcgaagcaagtgctttccccagagcatctccagtctgggagctgccgctgccccgcttcctctatttgccattatactgtctgtcccgttggcaggaggcgtacaggaagaggtgctgtaatggtttgtaccactacgatggaaagtggacatcggaggaagactggaattgatgtctgctgaggagtgtgatggatagctcaaacgttcatgtggatgcaggctacagtagctgctggactgtggaatatgagaagagttgcccaacattcctgcatagccaggctgattcatcccactggaggagctccaagggtcactgctgtgatggccatcttgcatgaagaaggagctagggaaagtgctggttgctggtttggaggaaggatagcctggcgagtccctattgtagtcggcagtgcttgctgatggagcatagaccgctttcccattatagtagtacatcaaagagttgccgcccatgcccgggattgtgtatgcgcagtacatggtctcggattcttttttctcctcagtaccactctaacaacttttatttcaaactcgctgtcccttttttcacaacaattccttcagttgcattttcccatatgctagccaggtgt

SEQ ID NO: 138806 - DNA, 1749 bp, Homo Sapiens
  misc_feature (43)..(43): n is a, c, g, or t
  misc_feature (78)..(97): n is a, c, g, or t
  misc_feature (249)..(249): n is a, c, g, or t
  misc_feature (275)..(275): n is a, c, g, or t
tgttcccccccgtttataaggggttttcccgtttggggggggncccccccatttttcaacaaatttttggggggtttnnnnnnnnnnnnnnnnnnnnaggaaaattccttttcctttaattaaaaggggggattcaattcccccaagtttaaattaaagggaggaaaggaaagaccatggacttcttttaatcttcccatgaaaagtccattccccttggcccccgaagccgctttttgtccctgtccntctgcaggaggccccttccagggagngtgtcttggcggaatttgtaatatttggtttcagctggagaggcttgtttcagaatgttgtcgtacatttcagctgtgtttcggctataaaaaggcggcaggccatacagcatctcatacaagacagctcccaggcaccaccagtccacagtcctgtcataaggctgcttatgaagcacctcaggtgcgagatactccggcgtgccacagaaggtggatttttgtgctgttgtgttcaatgttctcccttgcagagtccgaagtcagtaaggacaatgtgtccctgtgaatctagcaaaatattctctggttttaagtctctgtaaacgatgttcattgaaatgtaggttgcccaagttactggctatttcagcttcatagagactatcccgtggttccaggtagttgctttcggtctgtagatggtattttaggtctcactgtatttgtgtagtgtaggacaaaggtagccctttttctgcagtcatgtattgtggattgaaggcaccatcctgcttgggtggttctctcttaagggctgcttacgtcaaggcatctcatcgtgctagtttagtctggctttcgtctacagaagttggatgtaagtacagttgttttgaatgttctcttgctagagtccgaagtcggtacgtgtcactttgtccctgtgactggtagcctgaatagttctctggttttaagtctctataaacgatgttcagtgaatgcaggtagcccaaggcactggctatttcagcagcatagaaacgagcccgtggttccaggaagcagcgttccctctggagatggtagaacaactctccaccattaatgtagtctaggacaaagtacaatttgtcagcagtctggaaagagaagtgaaggcccaccaggaaagggtgcttcacattcttcaacagaacattccgctccgacataatatgcttctcctctttctttttcaggattgctttcttctgtaaaactttgactgcatagaacacttcttctgccttgtgtcttgctagaagaacctttccaaaactgccctttccgatcactttcaagaagtgaaagtcagatggtttagcatgaggattggacgacgggccaaggttgatttgctgagaaggacttggtggaggagaagggttggcattcataagctcaggctcctgaggttgggagatcttcaagatggactgaacttcagggtgtttgcatgcataggagttattggcaatcttctgaataaagtcgttcagacccatcctcctctgcttcatgaaagcgatgagaattgccaccatgcccctcatcctggagtaagtgagggtgcccttagcagcctcagttttcaccgtcatcaccaccgcggggagacagaaagacgttagcgctcaaagaccggctcggagtatgcccccggccgtaatggccgaattcccgggcatatgtccggtaccgtcgactg

SEQ ID NO: 138807 - DNA, 943 bp, Homo Sapiens
  misc_feature (799)..(799): n is a, c, g, or t
caaggtagcgaggcctgggtggcgaattcggcacgaggcccgccgcccgctgcccatgggggagatgcagggcgcgctggccagagcccggctcgagtccctgctgcggccccgccacaaaaagagggccgaggcgcagaaaaggagcgagtccttcctgctgagcggactggctttcatgaagcagaggaggatgggtctgaacgactttattcagaagattgccaataactcctatgcatgcaaacaccctgaagttcagtccatcttgaagatctcccaacctcaggagcctgagcttatgaatgccaacccttctcctccaccaagtccttctcagcaaatcaaccttggcccgtcgtccaatcctcatgctaaaccatctgactttcacttcttgaaagtgatcggaaagggcagttttggaaaggttcttctagcaagacacaaggcagaagaagtgttctatgcagtcaaagttttacagaagaaagcaatcctgaaaaagaaagaggagaagcatattatgtcggagcggaatgttctgttgaagaatgtgaagcaccctttcctggtgggccttcacttctctttccagactgctgacaaattgtactttgtcctagactacattaatggtggagagttgttctaccatctccagagggaacgctgcttcctggaaccacgggctcgtttctatgctgctgaaatagccagtgccttgggctacctgcattcactgaacatcgtttatagagacttaaaaccagagaatattttgctagattcacagggnacacattgtcccttactgactttcggactcttgcagggagaacattgaacaacaacaggcacaacatccacccttcttgtgggacggccggagtatctccgcacctggagtgccttcataagcagcctttatgacagggactgg

SEQ ID NO: 138808 - DNA, 435 bp, Homo Sapiens
cttatgtaaacaaacatcttttctctagaggtctcagggcactgtcttacaaacttaagtaacagatgcagctgttttttaacttcttgtcgatcctaagccatgattttgttgctgtcccatctcgtcatgacccatttacgctcacccgagacttgtcactagtgatgctcagtgactcatttagaaggcttgcaggttcatttttagctttaagatgtgattcccgttttaatccaaggtgtgtcattaaatagctcttcatcttcatttttagaagagccacaataggacaatttgattttgtctagagaatggggtagccattctaatctgagctattacgaaagtaattatgtgacatctgacagctacttcctcatgtgacactgaattagcctctgcttctgtttaagtgctttcttaaccgttatg

SEQ ID NO: 138809 - DNA, 1384 bp, Homo Sapiens
gtgcagccacatctgggtaggcacggccactggcattgaagtaactggatggtggcaggtgggggctagagctcaggaacttcgttacagcttcctcctggtatgaaggccgtgggaacacattgctgaagccaccaccactgatatagtcaacaatttcatttgtgatgaggaaaggttcctggaaggatgtgcctcccactgtggtgacataggggctggaggcagggaaggtagggcggaactggtgtcttccagagacagaccaacacccggccccactgtcacctgaggcgaagagcagggtgagaccccgagcggcagccttcatgagctcagtgttgacccgctggatgtaggcgctgctgagggagtcctcatcatctccatagctcacagtatgcacatgtggcagggctgactcattactgagcagcatgagccactgcaggaagggctcctgtccctcatgccggccagggctactgtagacccaggtggagatgttggcaccagcactcatcaggtactgcacatctagactggcctcaatcccggcccggccccggccctgttgtccaaccacacgggctactgatgcctgatgtgcaaagttgccaccgaagaggcgcatgaactgagccaggtctgagtcatggaaatactgctccaggaactgggcacaggcttggctgttattgctggtgccagagcccacgtcttgtgaggtcaagttgtatcgcttacggatcacagagggggttacccccagatgcaggcctacagtccctgtcacctgcggctcaggacgttgcctcagggatgatgttgggggaaaacggtgcagtccccccacaaagtccacatggggggccaaggcctgtggaagctggtagggatgtggggaccttacaacatgggtttccgtaggtcctcccacatagtgatgaaactcagccccagggagcagcagctctgcttgtcggatgctcagccagcaagtcagaaagtcctgtgtgatcacagaatggcacttctgggctccggctgccaagagccatttttgcaccgtgtggagggtcagtggggatggcctcaccagatcagccacattctctagggtcaggtattttccgtattgaggagagctgggatccgacacagcctgcaccagctccgagagtctttccacattctgctgtctcagggcaaaggtgagactcagctcttcctcagggtccgcacggcccagggacacccagcctgggggcagcgtcctccgctggtcgggctccgggctgtaactgcatttgccagagaggatgagggcaaagagccctaggaggcaggcttggagtcccattctgcccttccgcggatctgc

SEQ ID NO: 138810 - DNA, 381 bp, Homo Sapiens
cacaagacgtgggctctggcaccagcaataacagccaagcctgtgcccagttcctggagcagtatttccatgactcagacctggctcagttcatgcgcctcttcggtggcaactttgcacatcaggcatcagtagcccgtgtggttggacaacagggccggggccgggccgggattgaggccagtctagatgtgcagtacctgatgagtgctggtgccaacatctccacctgggtctacagtagccctggtactaccaagaggactggacagtggggaagggggtgggagatgggtgttgatccctgctccctcaagggaatgctataagctggagagagatcctgacaacccccagtgactatctttgtgcccatccctc

SEQ ID NO: 138811 - DNA, 1111 bp, Homo Sapiens
  misc_feature (42)..(42): n is a, c, g, or t
  misc_feature (46)..(46): n is a, c, g, or t
  misc_feature (49)..(49): n is a, c, g, or t
  misc_feature (78)..(78): n is a, c, g, or t
  misc_feature (80)..(80): n is a, c, g, or t
  misc_feature (83)..(84): n is a, c, g, or t
  misc_feature (108)..(108): n is a, c, g, or t
  misc_feature (153)..(153): n is a, c, g, or t
  misc_feature (169)..(169): n is a, c, g, or t
  misc_feature (208)..(208): n is a, c, g, or t
  misc_feature (225)..(225): n is a, c, g, or t
  misc_feature (255)..(255): n is a, c, g, or t
  misc_feature (267)..(267): n is a, c, g, or t
  misc_feature (1058)..(1058): n is a, c, g, or t
gtttaatggaaactttttggtgcaacccaataaaatggatcntgtnccncagattttcatctgggataaaagggcatntnccnnaatgggcgggcccctgggtgattncaaaacccatgtgaacccccaataagtacggaatattctgtggcnaactcccccaggaaanccagaatgtcctcaattgtggctgcatagggaagacctngaaggcgtatacaagtntctaacatttgtagggggcacaaattgctnaggtagtactgnaataatgggaggggttggaagtggaatgagaggggccgaggagaatcgattcagcacatgctgaacttcagctgctgtgctcctgaagagttcgatgtatcttttacccaacaagtctttatgcttcctcaacgcattctgtgcatattcctcacaggcaaagaggacaaaagcgttccctgttggcctaccatctgggtaggtgacaaagaggatgccttcctttcccccagtaatagggcaatgctgtccaaagaaggccaccacttcttcagctgtggccgtgaaagggagcccccgcatgcgaacaatgacttgattttccttggagagaaactgggctacctcattggaagtaccaccagcaattttaaggaaatcttcacctgttgctttgtaaacctcaatataccgggtccccatgtgatgtttgtgcctctgtagtgctaggtctcggtgctcctcacttacaaacctaaccagagcttctccgttccttcgaccctgagcattcagacaaagtgctgcacctcccttggcaatattgagtcctttgaagaatcttgcaatatcttgatctgaagactgccatggtaaacctcgtgccctgactacggtgttatcatcaataagttccatcttgctgcaagttccactttcaaacttgtaattcactctctctggatctgaaaacctgtgattataaggctctgaaatcattgctaaaattatattccccatatcttcaacttgagaggctccatatcgagagactgaactactcttctcanaatttaaatactctgtcattgtggcaacgtccagtttgtcaatatcaggtgaa

SEQ ID NO: 138812 - DNA, 822 bp, Homo Sapiens
aggggaaaatggtggggaagaatgtgggctctttttgggaaggcatcttctgggcaacctgttccatttttttggaatcccagccccccaaactgcgggttgtcctttggccaaggaggttccaaataactcttctaccgtcagatgctgtgtccagagggagcagacttatcctgtgaccgggagggcatttctttttagagtctcggtgcttccccagattggagagctgagtgcttggctgtaacccagggctggagatatttgagtcacccatctgattcctctcatactcatccttggctctgctcagcatctccaggatgtcgatgggcctgtggtcgctgcagccattggcctggctgggactctgtttgtcccgagcagcttgctgggatcgccgtgtctcctcttctaccacatcagccatgagttttgctatgcggtgacagtcattcttgtcataaaaccagatactatatatcgacaagcttgcatttctatacagaagaaatggttcatggagctgaaattccaaatctttattcactggttcaactagattgtgcatatttagtcgattcacaatggtaaaaccatggtaaggggaagctgaccttcgatatacgaataaggtcccttctatatcagtcttctcccactggttggccttggggcagaaggtgtacagagcgacctggcccgtgaggtctgcgatgctggtgatataggggtcgtgttgcttcagggccgctaggctcatctcctgcccagctcgactcagcgcctccatcttgaatcccagagcctagcccctctccc

SEQ ID NO: 138813 - DNA, 1206 bp, Homo Sapiens
  misc_feature (77)..(111): n is a, c, g, or t
tggaactccgatcactataggggtagctcgttatagcgaacgacgagcgcagcgagtagtgagcgaggaagcggcgnnnnnnnnnnnnnnnnnnnnnnnnnnnnnnnnnnncagtcgacggtaccggacatatgcccgggaattcggccattacggccgggtggcaacagaattccagaattccctacaagaatttatcaactggctcactctagcagagcagagtttaaacatcgcttctccaccaagcctgattctaaatactgtcctttcccagatagaagagcacaaggttttgctaatgaagtaaatgctcatcgagaccagatcattgagctggatcaaactgggaatcaattaaagttccttagccaaaagcaggatgttgttctgatcaagaatttgtggtgagcgtgcagtctcgatgggagaaggttgtccagcgatctattgaaagagggcgatcactagatgatgccaggaagcgggcaaaacaattccatgaagcttggaaaaaactgattgactggctagaagatgcagagagtcacctggactcagaacctagagatatccaatgacccagacaaaattaaacttcagctttctaagcataaggagtttcagaagactcttggtggcaagcagcctgtgtatgataccacaattagaactggcagagcactgaaaagaaaagactttgcttcccgaagatagtcagaaacttgacaatttcctaggagaagtcagacgacaaatgggatactgttttgtggcaagtctggtggagcggcagcacaagttggaggaagccctgctcttttcgggtcagttcatggatgctttgcaggcattggttgactggttatacaaggtggagccacagctggctgaggaccagcccgtgcacggggaccttgacctcgtcatgaacctcatggatgcacacaaggttttccagaaggaactgggaaagcgaacaggaaccgttcaggtcctgaagcggtcaggccgagagctgattgagaatagtcgagatgacaccacttgggtaaaaggacagctccaggaactgagcactcgctgggacactgtctgtaaactctctgtttccaaacaaagccggcttgagcaggccttaaaacaagcggaagtgtttcgagacacagtccacatgctgttggagtggctttctgaagcagagca

SEQ ID NO: 138814 - DNA, 622 bp, Homo Sapiens
acagtgaaatctgcagaagtttaaaaaactcatctttcagctgattttcatctaggtcttcaatagttcttatcaattgttgcaggtgagtacataaagcaatgatggattcctgtgacccatagaaattttgctcttttgattctttaaatacatcaaagtaatcgattggtggactctggataattgcttcatgaattcttcgatatatgtaacattctaccaacaaccacggtgagtagaaccatcttgattttccatcactttcatttaaaagactctgttgatattctaggtactgattccatatatcagtatcaacaaatttctcaaccaaggggataaatggtttatctgtttgcaattcattccgtaatttagaaaggagagagatagctttcttttcagcttccacgccttcctctccgtgtttctcaaaaaattcacttttatgtcgatgcaatgtatcaataaccttagttaagatctgtggtattctgtctttaattgtaagatatgcaaatgatcccacgtcctgtcctgagagagacgccgggacgacagccatcactttccgcgatcccggccgcaaagctcggctgttcaatcgccgcagaaaaaa

SEQ ID NO: 138815 - DNA, 944 bp, Homo Sapiens
gtataaagtttaaatttgttcactttgtccacattgtctaccgctcctggagttgtttgtttattaacccggtgacaatttaatgcctgctagtagcctcgtgctttcaccattcctcggatcattgtgcaataggaatgttcatttttctctggcattagagaaaagattctctcagcgttgttttttgctcgccatgtaactccaaactgatgaccagctttcctcctagatgtctcatcattttcctcttccaatgcttctgactgtccagtttgttgaaaatggtaatcagttgagggctcctggtcaccatagtaacacaataaatccaagagactatttgttgtttcaagagacacagtggttcctgcttgcaaaagctgatcaaacatgtccacagaggctttgacttttctgagctcaattcgttccttcagggcggcttcacttatgtctttgatctgaggttcaaagtactcaggcattaaacacggtatatgaggttcagctatgtccttctgaaaatatttggggtatgaattaataataaacttggccacattctccccggatttctttgccagtaaaaatgaacgagattccaaagatgatgctggcataaggtaaggatcatcttgaaacacataaggcacagctgtggtatccctgtttactgtggatgcaagtgcctgaagaacggctactttatcccaagttttcttttttggaattactacttcttcaatccctgttacatcagttccttcaacctttgagagggttgcactaccagaataaaatctgcagctgcgtgcctgttcacacaaacccgcccgccgacccgtcagcggctggccaagcctgctgcggaggcccagccagcgaacagcagatacaaccgccatccctcgtgccgattcaacaccaggcctcgtactagc

SEQ ID NO: 138816 - DNA, 1016 bp, Homo Sapiens
gaaagtccctgggctggacggtgacaccctttgttgtccagatttgcaaaaacttggatgacttggtcaagcagtatgaaagcgaatctgtgaagctctctgtcagcacaacctccaagagggaaaacatttctccagattatccactcacccttctagaaggtctaacgaccattagtcatttttgtcttttggaacaagccaaccaaaacaaaaagaccatggctgcaggtgatcctgccaacttgaggaatgccagaaatgccattttggaagagctgcctcgaactgttaacaccatggcccttctctggaatgttctcagaaaggaggagactcaaaagagacctgtcgatctcctaggggccacgaagggatcctcttccgtttactttaaaaccaccaaaaccataagacaaaaaattttagacttcttaaaccccttgacggcccatcttggggttcagttgacagcggctgttgcggcagtgtggagcagaaagaaagcccagcgtcacagtaagatgaagattatcccaacggcaagtgcatcccagctaacccttgtcgacttggtgtgtgcactcagcaccctgcagactgacacgctgctgcacctggtgaaggaggtggtgaagaggccaccccaagtcaaagggggtgatgagaaatcgcccctagtggacattcctgtgttgcagttttgctatgcttttctccaaaggtaatacagtcccccgtcctccaaaaacttccttaaatacagatgctattgcagtgagcatgcataataaatatctggttttatttctagactactagagagccattgttcagaaaatatcttaaagttgtcataatttcttcccaaggtattgatctatgcttttccttctccagagagttaacatcttaaaatctgtgcagcgtactttgaacactttatatgagcgaagctttatgtgaggcctgttaaactttaaaaggcttggatttgcattaaattgatacagaaa

SEQ ID NO: 138817 - DNA, 1237 bp, Homo Sapiens
aggcatttaaggaagggatgttaggtcaaaaacaaagtctaacccaagttgctttaaaaatttgatttgcaggaaaactagttgcttggcctagtttaaagctagttacaaaatccgttttcttaatggtccagatattttgccaattcttccaactcaacagaacttccatcgatttccacattcattacagacaacaaatgttgtcattggttcatcagcactacgggtttgtacctgtgtgtaagtgcaattcttctttttacatttgccacatgtgaacaagtcagtctgggtcccaccactcttggccatctgatgctctctgatggcttctttggtcaagtttttccgcatctctttcagctcatcactagccatttcctctgctgtcattctagcaaataagtcaggaggaatattcccacagaggacatttttccttaaatttggattttttgcatctttaagatttgatatcctacttcgtactctatttttgtatttcatgtctgtattccttatttcttgatatatagcttcttcaatttgagatcctaattcttcctcatcagctccaattgcaatgtagtcatcccctgttcgaggagctgcagcaagcatctccttacacttcaaccgcacagaatcagaagtgcttggtgcccgaggaaaggatgaaacataagtatctcgagcatttgtctcatcctttctgttgcttacattgccgctggaagtactttcttctcttgcctcagggctgttctgcgatgtaattgcaggttctttcttcttttcgtcaaggtctttctcagttgatggcccatctaataattttttccaggatttgatgagagactttgccaaagatgtaacttcctcatctgtactctgcttgcgaatagcattaactgacattccgattcttgtggactgcagtaattccagggtcataggaatattcttaagctcctttagcaaatccaatgctccagccgcgttcttcttctgcaccatcttgtccatcttcttggcaaagcggaccacttcgtcctccatggctccggcaggtcttctccgcgcccaccccgctggcaaggggaagtgggcgaagctggagcggaagacacagcaggagcgacccccggcgcgcagcaacccccaccaccgcaggcccgggcctaggcccccttcccggacgcgtgggtcgacgatatcccgggaattccggacc

SEQ ID NO: 138818 - DNA, 756 bp, Homo Sapiens
  misc_feature (691)..(701): n is a, c, g, or t
caactacgacgcgtgagaagactctgccgtgacaccatggtaggacgtaagatggtccgctttgccaacgaagatggacaagatggtgcagaagaagaacgcggctggagtcattggatttgctaaaggagcttaagaatatgcctatgaccctggaattactgcagtccacaagaatcggaatgtcagttcatgctattcgcaagcagagtacagatgaggaagttacatctttggcaaagtctctcatcaaatcctggaaaaaattattagatgggccatcaactgagaaagaccttgacgaaaagaagaaagaacctgcaattacatcgcagaacagccctgaggcaagagaagaaaggtacttcacagtatagacatatatttatattgtaagtcatagttttacttcctgcatcaattcccctgtctaatgttcccctatttacactcctttttttgttttctaatcaaatggaagtagtaaatgtatgtagccatgtattctaatttatttctttttcagatttcttgaacatttgagaggtagaagacattgaataaataagaagttatttatattgtactcaacaagtttaattgaatgggattgctggggtaggcactgatggaattgataatggaggtagtgattagggattcaaatggttgcttcctctatttaccacannnnnnnnnnnagactttattcttggcccttgatctcattctccgcgatcgatatgggggagcctc

SEQ ID NO: 138819 - DNA, 1726 bp, Homo Sapiens
agagctgtcgacattgtgcgggaagaggaggcgctgtacctgcagtgctgcttttcttgcctagactctaggaactatccgagctccactccccacaacatactcaaaggaacggagagaaccgggacccccctgcggggacccggaactgatctgacaggatggcatctgatgactttgacatagtgattgaggccatgctggaagctccctataaaaaagaagaggatgagcaacaaaggaaagaagttaaaaaggattatcctagcaataccaccagcagcaccagcaacagtggcaatgagaccagtggaagcagcaccatcggggagacaagcaagaagaagaggagtcggagccataataaaagcagggatagaaagcgcagtcgtagtcgagatcgggatcggtatagacggagaaatagtcggagccgaagtccaggtcggcagtgtcgtcaccgtagccgtagctgggatcgtcgacatggtagtgagtcgcgaagtcgggaccatcgtcgtgaggatcgtgtgcattacaggagtcctccacttgccactggttatagatatggacacagtaagagtcctcatttcagagagaagagcccagtcagggagccagttgataatctgagtcctgaggagcgtgatgcccgcacagttttctgtatgcagttagctgcccgaattcggcctcgagatctggaggactttttctctgctgtaggcaaggttcgcgatgtacgtatcatttcagatcggaactcacgtcgttctaagggcattgcctacgtggaattctgtgaaatccagtctgtgccactggccattgggctgactgggcagcggttgctgggagtgcctatcattgtacaggcttcacaggcagagaaaaaccgactggcagccatggccaacaacctgcaaaagggcaatggtggaccaatgcgcctctatgtgggttccctgcacttcaatatcactgaagacatgctccggggcatctttgagccctttggtaaaattgataatattgtcctgatgaaggactcagatacaggccgctctaaaggttatggtttcatcacgttctctgattctgagtgtgcccggcgggccctggaacagttgaatgggtttgagcttgctggtcgacctatgagggttggccatgtgactgagcgactggatggtggcacagacatcacttttcctgatggggaccaggagctggatctgggatcagcaggtggacgttttcagctcatggcaaaactggcagaaggcgctggaatccaactgccaagcactgcttgctagctgctgctgcccgccgccgcccaggctgctgccttgcaactgaatggagcagttcctcttgggggggcctgaaatccagcagctctgactgctctgagtccagcccttgtacccttgtctcccagtggtttccagctctccagccctctttacccccccagacgatggtaaatccaggggcacaggaatacctgcctcccttgtggcctctgggatcctgccaccttcacatctacctctttcaagggccccattttctcccattttgggggaaccaagccatccctgaagggcatggaacattgtcctcctgaggaaaattgggggcccccccttaaaaatccccagaaaacgcttcctgccccatggtccccaccgggaaaaaggaattccggctgagccaa

SEQ ID NO: 138820 - DNA, 615 bp, Homo Sapiens
ctcgcccgccgaattgacacgaggcggcagagctgccgccattttgcgggaagaggaggctctgtacctgcattagctgcttttcttgcctagactctaggcaactatccgagctccactccccacaacatactcaaagcgaacggagagaaccgggacccccctgcggggacccggcaactgactctgacaggatggcatctgatgactttgacatagtgattgaggccatgctggaagctccctataaaaaagaagaggatgagcaacaaaggaaagaagtaaaaaggattatcctagcaataccaccagcagcaccagcaacagtggcaatgagaccagtggaagcagcaccatcggggagacaagcaatcgtagtcgagatcgggatcggtatagacggagaaatagtcggagccgaagtccaggtcggcagtgtcgtcaccgtagccgtagctgggatcgtcgacatggtagtgagtcgcgaagtcgggaccatcgtcgtgaggatcgtgtgcattacaggagtcctccacttgccactggggagccagttgataatctgagtcctgaggagcgtgatgcccgcacagttttctgtatgcagttagctgc

SEQ ID NO: 138821 - DNA, 1083 bp, Homo Sapiens
tttgtggaggttcctttctattccaggggcccaatttatttaccaaatttttaccccaaaggggggctccaaaaaatgcccccgggaggcaatttttttcaagtgattattgaaagtgcccggggaacccccaataggagggcgcattggttccaccattgccccttttgcagggttgttgcccatggttcccagtccggtttttctttccctgtgaagccctgtacaatgataggcactccccagcaaccgctgcccagtcagcccaatggccagtggcacagactggatttcacagaatttccacgtaggcaatgcccttagaacgacgtgagttccgatctgaagatgatacgtacatcgcgaaccttgcctacagcagagaaaaagtcttccagatctcgaggccgaattcgggcagctaactgcatacagaaaactgtgcgggcatcacgctcctcaggactcagattatcaactggctccctgactgggctcttctctctgaaatgaggactcttactgtgtccatacctataaccagtggcaagtggaggactcctgtaatgcacacgatcctcacgacgatggtcccgacttcgcgactcactaccatgtcgacgatcccagctacggctacggtgacgacactgccgacctggacttcggctccgactatttctccgtctataccgatcccgatctcgactacgattgcttgtctccccgatggtgctgcttccactggtctcattgccactgttgctggtgctgctggtggtattgctaggataatcctttttaacttctttcctttgttgctcatcctcttcttttttatagggagcttccagcatggcctcaatcactatgtcaaagtcatcagatgccatcctgtcagatcagttccgggtccccgcaggggggtcccggttctctccgttcctttgagtatgttgtggggagtggagctcggatagttcctagagtctaggcaagaaaagcagcactgcaggtacagcgcctcctcttcccgcaaaatggcggcagctctgcccctcgtgccgaattcgccacccaggc

SEQ ID NO: 138822 - DNA, 787 bp, Homo Sapiens
  misc_feature (23)..(23): n is a, c, g, or t
gaaagttcttcctattggttccnagtatgtgcgacgagaatgcctgttcatgcaccattggcagacttgatttagtttccaaagtgtgcagggctggggcattcataggcacagctggagcagctggctgagattcaaaagcctgccaggctaaaggatttcctttgggttcactgatactgtttaatggattacaggtaaagtctttaatctgctgtctctgagttataatcagctcattctgctcctggagtctctgccctagctcttctatccttttcttatagaaaacattgcttgcatttagatcatctatcattgaggttcgaagtttctctatatgtgacaggagtcgacccttctctttcttgtgttcttgatgaatagcttgaactcgagctgtccatttgctttcctgactatcaagaagctgcatgacattatggaaatcctggggatatggagaacggtcttctttaaactcgtgtgcatcttttaatgtgcctatgttggacttgatctgcatattggacttctggatttctgacagttgatattctaatgctgcattcttcgaagttaattctttaaattccttcataaacatctccttgactttttccatttcatcaactagtttctccttttcttcttctttccacctgtcaaataacttcaaaaagtcttcctcttttgttttctgcatttcatattccttggagaatctgactgcactggcatggtgtgcagcctctagctcagacctggtgagctgcagctcttcccc

SEQ ID NO: 138823 - DNA, 1047 bp, Homo Sapiens
  misc_feature (527)..(527): n is a, c, g, or t
atgaagggtggcttcactgggggtgatgagtaccagaagcacttcctgcccaggactacttggctacttactacagcttcgatggcagcccctcacccgaggccgagatgctgaagtttaacttggaatgtctccacaagaccttcggccctggaggcctccaaggggacacgctgattgacattggctcaggtcctaccatctaccaagttcttgctgcctgtgattccttccaagacatcactctctccgactttaccgaccgcaaccgggaggagctggaaaagtggctgaagaaggagccgggggcctatgactggaccccagcggtgaaattcgcctgtgagctggaaggaaacagcggccgatgggaggagaaggaggagaagctgcgggcagcggtgaagcgggtgctcaagtgcgatgtccacctgggcaacccgctggccccggctgtgttgcctctcgccgactgtgtgctcaccctgctggccatggagtgtgcctgctgtagccttgatgcctanccggctgccctgtgcaaccttgcctcactgctcaagccgggtggccacctggtgaccactgtcacgcttcggctcccgtcctacatggtggggaagcgtgaattttcctgcgtggccctggagaaaggggaggtggagcaggctgtcctggatgctggctttgacattgaacagctcctacacagtccccagagctactctgtcaccaatgctgccaacaatggggtctgctgcattgtggctcgcaagaagcctgggccctgagccaggagggccagccagaggtctggtcaggctgtgaggccttggccatctgtatgctagagaggggtgaggaatggatgctgtctaacagtctctgatttcaacactaacattccatcttctgaaattctgagattctaacatccttgttttagaattctaagtttccaacattcctcattctaggatcctaggagtggaattttccattttctaatatactaagccttacagctatcttagatgcgatctgact

SEQ ID NO: 138824 - DNA, 1977 bp, Homo Sapiens
ttaaaacagtagaaacaaggttgactttattccaaacataaaacacttattttgtgttagaagagttatcccttgcctatccagggtgacaccagtgactgcacatgtgttcttgagctgcttttcctccggcaaagactcatgtctcctgtctctttctgtcttgaaaggatatgtttgtcactgaagctgctctctgggatcaacgtcagagttgcatactctggaaaagatctttgcaactctggcctatatgaatccataagccacaaacttgactttttgtacccaccatttgtggaactaaattatatcagtacaaaaagggctacattctaaatagtaaaaaaatatgcaaactgaggtataaataagattatattctgtgtatcagtgactctagaggttaaaaatgactgagaaaatagacagttcttcaggaaaacaccttctttggactcacaccatgtgttttccattcaaattagtaatgttcaatttttcctgcagttgaaccagctattagctttctggagagtcaaaattctcttcgttttaggatcaaatttgtattgtcttgttccatgaaagaaatagaaaaatccatctttcatgaaaactgcatcaactttgtggccaattccaggaaagtcatgtgctatcattttgggataacctggatccatagatcgtttatattcatcatacctccagtatttgttagcaacaaagaagtaggtttttccagtgttttcctcagaaagagcagcatcgatatgcttcacagttctagggaagccaaaggagctgtagatgtccttggggtatccgtgtagcacattctgtccctgaacagcccagtacttattccctttgaaaaaccggacttcatctctgtcggcaaattcgtaagcagcttcaagcccatttggcagttgtggccagaaaacagaaatgaaattgagctcaacttccgggtagaagggatttgtgcgcatgtagaatctgtctttaaagaacatcacttctccccgaatcgtagttatagcatcaaaggttagcttactgtcacacgcttttggggtttgtgggccgatgggctggacaggattttgggaacgtccatatatggcttggatgccatcaatgtcatcctgagctagctgaacatcaccactgaaggtgtagctagggtacatcaaagccccgatatcagtagaatggagagtccaagagaatggccgagttcatgagccgcaacacgatgtaagttgtactctctgaaattgttggtccacctttcatcttcatcaaaatgagcatcccctccaatacctgggcctggttgaaaagcatgagcaagatttcctccaggtccatcaaaaggagagttgtcccgatgatctcccctgacaaaagatatcatgatgtctgcttgaccctcagagaccttggtgaatgtcagaggtgtgacattactccagagttggaaggctttctcaatggcatggtccacatctgctcttggcaaatctggcgtgtaattttcaatcctgtaggtcagatgtgtttgctcccagcgagggttcccctcagtgaggacaaactgagccacatcaggcactccacatctgggctgcttcatcaccttcagggtttcagcatctggtttcccagtcactttcagcccaaagaattcctgcatttgcttcaatttttcaaccactgggccactatttctccgcttttcaacttgcctcccatcattcttcaggttgtagtatttttccaggtatttctggactaagtccacatcttgctcttgtgtttctagagtcgctgggaagctgtgagacaccacaccccagaacagcagcagcagcagtggaggaaagctgtgcatactggcctttgtcttctttctcagtgcaaggtaagtgatggcttcccagcctcttgctgctccaatccagtagg

SEQ ID NO: 138825 - DNA, 1053 bp, Homo Sapiens
tactggttctttctcttctttttgttacctcccactaaaggggttccaaattatcctggtctttttctaccttgttgtgtttctatctcgtctttacttccatctgtttgtttttttctccatcagtgggggccgagttgttcccccagcctgccaaattttgatccttcccctcttttggccagatcctagggggaagaaatcctagtatgccaaaaatatatgctaagcataattaaactccatgcgggtccataacagccaagaagcctgcaggagaaagccaagggcagttccctccgcagaacaccccatgcgtgctgagaggcgagctccttgaagaaggggctgttcttccaggaggccttattttgaactgcctcaggaccccactggagagcacagcatgccttactactgggtcatccttggtctatgtgctctgtactggaggctctgttctgcctcttatcagccaggtcaggggcacacatggcttaagtgacaaagccagaggagaagacaaccctgacagcatcacgctgcatcccattgctagcaggattggcaactcttcagacggagctgcgcttccctgcagtctagcacctctagggcctctccagactgtgccctgggagctcctgggactgaaaggttaagaacataaggcaggatcagatgactctctccaagagggcaggggaatttttctctccatgggccacaggggacaggggctgggagaagaaatagacttgccacgttatgtcatgtaaataattgattttctagttccagaacataatattggtagggtggggaaatggaagtaagaagggggaggaaagtttgaataagcccagttggctttctaagccccaaaggattccctcttttggttaatccccgaagaacgccccaacccttgaaaaaacccctttaaaagggggaaatttacggccggaaaagacaaaaattccccccttagcccacccaaacccctctgttaatttaataagaaagggcgcgccgggggttctcagttggggg

SEQ ID NO: 138826 - DNA, 883 bp, Homo Sapiens
gtatcatttcagcataagcactactctaggttttaatttgtcagcccagatcccagacagagatgatactccaaacatgaaaagtcacctccaagtctcaattcactactgagaacccaagttcaaaatatcccctaaaattccataaaaatcaggaaagaccctagctattgccccagggaagggcagaccatgagacaggtctcttttagctccaaactgaaagttgttcagcagctaaaatcctgaagaaaaaaatattgcaattaattaacttgaaagctacagatatgcctgtccaaatcttttgttatcaagacacaattttaagatcaaacaattgtcaaggtaggccatggcttgttggcagtagtaggggccctatggcctatttccaggtatgggtggccccttttccttggttatctggggaatctgccacagcagacagcaaaaggtaaaaagcatccctttaataactacaccccactccagcaattgaggtttattcaggggtgggtcaaagtagtacaagacccaaatagcttagtgaaatggttagaatccagactgaggtgccagactgcctgcatctgagtctcagtcccaccatgtatgagccgtgtgaccttggggtgagttactagcctccccaggcttcaaatctctcacctgtaaaatgggaacagtaacaatacctacttcatcccgtctgtctggggactgaatgagctaatatgtgtaaagtgcttagaggagtgtttggagcatagtaagtgctgtgtgagtactttcaaaaataaaaacaagaacttggggaaaagtgctctctgaggtttgtagggcagtgtatgctacttaagtgttgaagcatattttcatt

SEQ ID NO: 138827 - DNA, 1186 bp, Homo Sapiens
ctctctctttttgtctcttctttgcgtttgttcttgtggttgttgtgtctctttgtgagcgttggtcgcgtttatgtcgcgtggtgtcgctgtccgcgttctatttttgctctctctatggtgtgtggccttgtgcgctgcgtctttgatttcctggtaaacggagtgttattgcccttggttcccttccccacttggcccggcctgtgattccacttgccccaccggcccttattggcgctggggcccagcctttcctggggaatctttttggtggctgcctctgtctcagcgtggaggggacactcccgttctacccactcttgctccatctcctgagccgaggaggatcggtgctttgagtgtcttcttgatgttgtaacctcgcttctacctgctgctgagttcgttttggttctctttgtactggttggctctcagaacttgctgctcgatgcccagtagaactgcttcacagccatcacaccattcatgcagggtcttgacaatattattgatatccttctttcggatgtcacggccaatgcagaaatccacttccagcagctggtttcgctggtccagcttgccctggatgatgtcagtgtagacagcctcaatgataaggtcttctagttcccggagattccgcatctccaggtctttcagcaacacggagtaggggatacacttcattcttgatgccaagctcacgatggtaagatgcttcagcttgttctgctgagctgtgctcagttctggcaggctctccttgttggctatgtaatctgggtatgtcccataggcaaacaggttcaacaactgcaaataagcagcattagctccttccgcaagctcctgcacgttggccagctccagaagttctccaaagacatacactccgggagcctctaagacctggcttatgagagcagtgagggctgagccactggtacctttggctagtaaaataaactgctccaggagattacttgagggtttctgttcccctgccattctctggccttgaaatcatgatttgcagatgtctgagttccatgtaaacagaagttaactctctgcgggctgtcatcttcttttgagggtgagaagggtcttcccgttgggtttcaagtctcgggattccgaaacgaccaactcagcgggcgggtttgtgaatttgcgc

SEQ ID NO: 138828 - DNA, 956 bp, Homo Sapiens
gcggccgccggggtgatcatggacgcttgacaacctgcgggcaggcgccgggaggccgagccagcgactaagaggaccgagaggtggcgtggacagatttcaaggccagagaatggcaggggaacagaaaccctcaagtaatctcctggagcagtttattttactagccaaaggtaccagtggctcagccctcactgctctcataagccaggtcttagaggctcccggagtgtatgtctttggagaacttctggagctggccaacgtgcaggagcttgcggaaggagctaatgctgcttatttgcagttgttgaacctgtttgcctatgggacatacccagattacatagccaacaaggagagcctgccagaactgagcacagctcagcagaacaagctgaagcatcttaccatcgtgagcttggcatcaagaatgaagtgtatcccctactccgtgttgctgaaagacctggagatgcggaatctccgggaactagaagaccttatcattgaggctgtctacactgacatcatccagggcaagctggaccagcgaaaccagctgctggaagtggatttctgcattggccgtgacatccgaaagaaggatatcaataatattgtcaagaccctgcatgaatggtgtgatggctgtgaagcagttctactgggcatcgagcagcaagttctgagagccaaccagtacaaagagaaccacaaccgaactcagcagcaggtagaagcagaggttaccaacatcaagaagacactcaaagccaccgcatccctcctcggctcaagagatgggagcaccagctggctgaacgggagtgtccccctcacgctgaacaaaggcagcccacccaagaaaaagtccaaagtgaaaaggtctgggtctccagcccgccactagggcccggctggggcacctggcaactcaccagggccggggtccg

SEQ ID NO: 138829 - DNA, 612 bp, Homo Sapiens
  misc_feature (286)..(308): n is a, c, g, or t
agattcttcccttgtaatttacaattttgctattacaagctttcctatgagatgtagaagcttgaaaagtcttggttattattagaaataaagcaatgtttatttgggggaaaacctagagaacaaaatttccccttttaaaatgctagctaggctatggtcacagatggtctctgcttaccactgtaaggtaaatgtgcaaagcacacagggctgcacggaggaggctggactgtgaccataaactgttcagatttagagatcaaatataacacccacaaagagnnnnnnnnnnnnnnnnnnnnnnngagagcaagagaaatgctataccaagtaatattttcctatttcatggaaaacgctattcatatggcaagaggataggagagggcaacaaaagacttttcccttcctttttaagacactaataggtatgccgggaatgctaagggccaatggttgtcactgctttgttctctgcacgtgaaccgctttaatgtatgctggcatcagctgagtgtagatcagctttccacattaactttttccctttatatgtagaccttacagtttcataacaataaataaaatttgtagttacaatgcatttgt

SEQ ID NO: 138830 - DNA, 863 bp, Homo Sapiens
gagggaaggtgttttatttttaacaattatgtactaactggtattgtcctctcccttggctgtccctgccacagttccagagttatcagtaggctagatagaaggtgacctctcctcataaggacttggacaactcagattatctgaagacacaaacctgacaggagggagaagaaaaaacaaaacacttgaaccaatgaaactcaaatgtaatcctacgatcaaagcaactggtcaacacttccatcagaagtgaagataggaagctcatcagatagaacatcagcccatgagatgtttgcaacaaatcttttgttgcaagcagtgtgtcgcttctgcacaatcagagactgtctcgatctctccactcaccgtggaagttgccttgtgcctaaactgaattgacaaatgcattgtaactacaaattttatttattgttatgaaactgtaaggtctacatataaagggaaaaagttaatgtggaaagctgatctacactcagctgatgccagcatacattaaagcggttcacgtgcagagaacaaagcagtgacaaccattggcccttagcattcccggcatacctattagtgtcttaaaaaggaagggaaaagtcttttgttgccctctcctatcctcttgccatatgaatagcgttttccatgaaataggaaaatattacttggtatagcatttctcttgctctcattttctgattaatagatactggcctctatgagggtcgtaatattagatctcttacatctgaaccagacatggtcaacaagtacagctcatcccgagcagccagtgtgctttgcaaatttagacttacaggcgtaagcagacgacatatggaccc

SEQ ID NO: 138831 - DNA, 984 bp, Homo Sapiens
agagcaatcagggaaatcatgtatccaatctggaaatacaaccaaccaatagggaatgtgcacggccagatgaccccgcagctgttctggatgattgtcagcacaaactgaagcagctgcccctgagtgatgtacttcttccaccagaggtatggacgcatggaagggactgacgacaaaccatagtaagagtacatgaggacgtggatgaagctattaagtgtggcaccaaaataagagtggccgcaggggacccagttcatcacaaaccaccagatgttcagcatcgaggcatggtggtagacgtgcaggaccgtgatctggtggttgttcttgcgcaggatgaagaagaaagtgtccataaattctatgagtttggagaagtagtaccaccagaggacacggataatcttcatatctgattctcctgcggtgcgtgtgccctgacagaagaagttgtatttgccttcccatactcctgttactaactcacagaacatatacagagacagcagtgtgagtccaaggttatacaccactaaaatcccccggcaagagaatggctgtttattcctcatgtattttggtcccagccatacaattagtaaatatatgacagagcagataaatgtgggtatataattgtccagaagaaaccatccttttactctagtatctcgagggcctagcaatgccttgaaataggtactaagtgatgcatcaaaatgttccatttgaaaaccttttagcccaaggggcggcagcagctttgagcagcagcaaggcggcggcggcggagggagcgcgggtggcagccggcgcagaggcggatgtagaaggagacaccggtggctaggacccgcgcgatgggaagaggaaggcgccggctatctacaatcagaacgtgggctgaccgtgacgtcacaatggcgcccccggccgtaatggccgaattcccgggcatatgtccggtaccgtcgactg

SEQ ID NO: 138832 - DNA, 1160 bp, Homo Sapiens
  misc_feature (294)..(294): n is a, c, g, or t
ttgttatttcccaggggggggttggcccctgataccttctttgggaattgggcctaaattgtaaaatttccggaaaccctttgggtagttcagaattgtgtgaaagaattggtagaaggccctagggaaccagctttaaatgggttggagagaaaagcttcagaagtttcccagtggggtggtttcgtgatcttcaataggaaaacccactgggggtttttagtgagaccacattcagcaggtttaaatacattagaattacagattttgacttgttaaacctagcaggcaccncctagggaagtgaatctgcagaaggtctttgaaatgtttgaggttggaagacagtggggactgtccaaggatgatcatttgtttggaaagaggaaggatctaacctatcattcatttctccaggcggctgaacaatgttttcaagagacctgttttctagtggatctccataaaagtctggataatctaatgagctggagagaccaaattttgtagccacatctattatggttgtctgtagtgaagatttcccggtacacgaacacaggaatgcacatcacaaaagccaccacccagatacatccacagatagagcaggccatccctacattgcgatgattctgacaccagattggcttgaataccacaagacagcgatccaggctaatggcagtaagcaggaagacactggcaaacatgttgaggacaatgatggaggggatgagcttgcataggaacctgccgtagggccactgtccctggagagccaagtgagccagcgagaagggcaaggagaggcagcagaggaggtccgccaaggtgaggtggaggaaccaaattgtgttcactgtccgctgcatcttcaggccagccacccacagcaccagcccattgcctggcaatcccagtaaaaaagtaaggctgagaatgaccatggagagaattactgggggctcattccatggctgtgagagtaggtcagttgaattggtctcagcagagaaagacgccattgctaaacttcaaaaaactgagacagtagctgaaggcttcagcacctggatgtctccacgagtcctgtctggtccccacacttagccacagtgaagtcatgaagtatggcaagaaaatttgctgagctttct

SEQ ID NO: 138833 - DNA, 809 bp, Homo Sapiens
taaaatttgcacatgtgattgtgaagaaatttgtactacctaaaagtcccagtgcatgtctctgaatgtgtaagctatataaatgctatttatatggcatagaaagaatataaatatcctgtacacggcagattgtgaacaaactatattcctttaagttttcctggttgcactctgtagactggatctgttttaggaagttactttcacagtgatgttgtgtgttctgttagttttatgtctcagttaaagtgtaaaaagtgacggattttctctttcttaaacttacctgacacttaaccagagtaccagttctcgtgatgtgaattaatttttttgtgtgctaggggagggagagtgaggagggagtgttatttccttgggaacctagggaggagaggttcctttgttgggaaactttgttgatagctgctgcctttgtcctgatcgttttctttcccttttctctggtggcctgttgtggtgcaacgagctgatggcatttgatcttgccccattcaggttggggagtgaagtgtggggacccttttcccccgcttgctgtgaaagcacagattcattgactacagtacactgttgttcagaaaagaaggctgcaaatgacttctgagactttatgtcttttcttccagaccaagaccgtagaaggagtcacatctagccggcttagccaaagtacaggtgtatatagttcagggcacttgatttagatttggaggggctggggtgggcagagagcaagaggcgagtaaagagaatggtggtttcagagatctctcttcccaaat

SEQ ID NO: 138834 - DNA, 1572 bp, Homo Sapiens
ctggccgcggcgagcgggactggccattgtgagtgctccgtcgtgcgtagggaggggaccccgactcgataagtttgcgagagcactactgcagtcagtcgggggcagcagacaatgatgcgaagcgagccgtacagatcccgggctctccgtaacgcaatcgttcgccctgcttgagcgaggctgcggtttccgaggcccgtctccagccaaggaaaagctacacaaaaagcctggatcactcatcgaaccacccctgaagccagtgaaggctctctcgcctcgccctctagcgttcgtctggagtagcgccaccccggcttcctgtgtggacacagggttggcaccatggggcccaccagactgtcccgctggtcaaggcccaccgaagctcggtctctgactacgtcaactatgatatcatcgtccggcattacaactacacgggaaagctgaatatcagcgcggacaaggagaacagcattaagatctgacctcggtggtgttcattctcatctgctgctttatcatcctggagaacatctttgtcttgctgaccatttggaaaaccaagaaattccaccgacccatgtactattttattggcaagtctggccctctcagacctgttggcaggagtagcctacacagctaacctgctcttgtctggggccaccacctacaagctcactcccgcccagtggtttctgcgggaccgggagtatgtttgtggccctgtcagcctccgtgttcagtctcctcgccatcgccattgagcgctatatcacaatgctgaaaatgaaactccacaacgggagcaataacttccgcctcttcctgctaatcagcgcctgctgggtcatctccctcatcctgggtggcctgcctatcatgggctggaactgcatcagtgcgctgtccagctgctccaccgtgctgccgctctaccacaagcactatatcctcttctgcaccacggtcttcactctgcttctgctctccatcgtcattctgtactgcataatctactcgttggtcaggactcggagccgccgcctgacgttccgcaaagaacatttccaaggccagccgcagctctgagaagtcgctggcgctgctcaagaccgtaattatcgtcctgagcgtcttcatcgcctgctgggcaccggtcttcaatcctgctccttgctggatgtgggctgcaaggtgaagacctgtgacatcctcttcagagcggagtacttcctggtgttagctgtgctcaactccggcaccaaccccatcatttacactctgaccaacaaggagatgcgtcgggccttcatccggatcatgtcctgctgcaagtgcccgagcggagactctgctggcaaattcaagcgacccatcatcgccggcatggaattcagccgcagtaaatcggtcatttcctcccacccccagatagacgaaggggacaatccctagaccattatgtgttctgtaaacgccaactcttcctgctagatctgcgctgtggccacccaccggctgcgttctttactcgaaccgctgcccacccaatcgcctcgt

SEQ ID NO: 138835 - DNA, 1846 bp, Homo Sapiens
  misc_feature (35)..(35): n is a, c, g, or t
  misc_feature (47)..(47): n is a, c, g, or t
  misc_feature (58)..(59): n is a, c, g, or t
  misc_feature (118)..(118): n is a, c, g, or t
  misc_feature (129)..(129): n is a, c, g, or t
  misc_feature (165)..(165): n is a, c, g, or t
  misc_feature (254)..(255): n is a, c, g, or t
  misc_feature (358)..(358): n is a, c, g, or t
  misc_feature (389)..(389): n is a, c, g, or t
  misc_feature (594)..(594): n is a, c, g, or t
ccgatttttaggaaaattgccctccccttttgctnaagggggtcctnggaaccgcggnncccttctggggtccgtggggaggcgagaaatttttttaaaacttcacgggtcttccganggccgccaggncccatgagcttaatgggcaaaagtgttgatgacttntcccctgggaaagtcaaaggccggaaagttaagaccctttgctcccggcccttaagcaattaaggaggaatcattcctggttgcaaaannaaaatgaggaggctctccaaacagctgtccactgcagaatcagaggggtcatggagtcttgcccagaatacggtccaaatatccccacagcccatgctggggngaaatttcccttccctttcccattccatttngtagcagaccgcaggaactgcctcgggctcacacctttctcggctgatcaattccatgccacctgcttggtctgccctctgaaggcggggtttgctcctcgtcaagactgcccaggcgagaaccgcagactcagaccccagccaaaaggaccggcagaaggaaagaggggagaagggaggggaaagagtgaggtttttctgaaanctcctctcccttcgctgaaaagttctttgaaataaacaacgtgggtgttgtatggtgagcccagagccttcaggtcacttgctttagaaagcccagatctgcaaactctgaggacctggagggggtgggggagctcaaagtggagctttttagtaagccccgctcgttaacaaaaactgaaatttaaataggatacccatccacggttatatatttgggtgaagtgatatcagttacttcctgtctaaccccccggggaatctatgtgccccccaccacaagccataaatggcttttgcaggcatcagcagcacccaaagttgcctgcccctgccaaccaccactcatctctgctcagagcagttattcctttgtgagatgcttgggacatggctctagttttgcaacagggtgagattccaaaaaaatgttggggagggggcagaggaattccagagttcaaaactaaaaggcgcaggaatcaaagtcatttcattctattctctttctctgtcctctagccctcaggagtctgcagatccctgcaaaggctcagagaaggctgagcaggctgagcaagagggtgcctcatccctcccaggggtggggttgcccaggctggactggggatggaatgggagaggtggaggagatacacgcagtcccctccttcttccctgggatgcccggccaggaacagctttcagaaaagggaaagggctgagaacagcctcctccaactccagcacccaaggcacgggcagcagccttgctccaaagactgcaggctgggagcacaccatcccccatgcagaccaaaggctgcttagcacagcgttaaaatgcagggtctgggcatttgcgaggaggtccaggaaaggagagaaaactcttctgtcgagcattccaactccttcccgcagagcagagctggacacgtcctcacgtccatcgcagagaggggcggcttccagcaggagaagagagaactcaagtggaagggaactgaaggctgagcactgtgtttgcaggaatgaaaatatattttcttagggaacagacaaaacaaaatcccaggcggaatacctaagaggggcattcattgtttggctcctgcctgactgatgacactggggtgtcaatatataacattgtgatgacaattggactttcacccggcaatattccagaactactattctacaggatttccattttaataagcagtgaacaaagcaaaaagaaaataaaa

SEQ ID NO: 138836 - DNA, 1423 bp, Homo Sapiens
  misc_feature (72)..(72): n is a, c, g, or t
caggactcatcccggcaagtcatccaatttctccctttttttccttaatggccagtttaccttttccaattncaaatttccggtttactgttggtagtaatggagttttccgattaggatgttttgaagaacctttgtaccaggcccttcttctttcgaatgtctcctaagggaccttgtatttatcccagaagaaatgcccatgtgttatttacaactgttttactatatcatgagtagtcagatcatccaaggggagccttagcttggccatcagataagatcttctgtttataaactgtagtagacctaagagaagcattcactgaatctgggtgcttcctcatctttaagaaagatttcgagggtaactccatgcttgactttgaaattgcaccaatatttgactcttcacatgacatggacttctgttctttaggacctgatttgatacatgaaacagaggaatcttttgatgcactttctatacaagaggaaagagctccgtcacagctcactgatttgaccaaaggagaagctgtatcaccaagactcgccaacttatgccctgtaggttgtctgctatactccatcaaagaattaattcttctgacggactgacgaacaggagtacgctgaaacttaagaggtgacttgacttttattctatttggttcatttaaagaaagcttgttaaaccactgtatgtgatcagaaacctttctatgttctgtcatttgtgaactttcagaaactgttttctgcacatgtttctcaatgactgctgtttagcaattctcataggcctaggttttgacaagtttgttacaacacatgtactctgctgtgagaaagaggatctagcctcgtccttgctatgtgctgcacacttcggtaagttaccttccatcatattctcattctcttttaatttattatttagtttatcctttggggactgctgtttctttatttcttcatcactggagaattcttgcttgcttaaataatcttttggcatatttgaatgaatgtctttttcatgttccatcttcttctgagttgaataacattttatagttgtttctctattaaatgtttgagtttgaaggggtgaaaagtccctctctgaaaaacatttttcacctttaccagtgtggtgttcatatttctcctttgattctactatagtcaaatcattagtttcaaatagattttcctctgggctatcttctaaataagatggttcagttaattttactttccccacattagttactgatgactgcctctgattcatcaatgcgtgaagattacttccagattcagaaaacgctttttgaactttcaccaaagtctctttggtcatgttattttcatccccgctaagagggctacttgttatgctgctattatgcttatt

SEQ ID NO: 138837 - DNA, 694 bp, Homo Sapiens
ctacatctaaatctgtggaggtccgggagcggcactgcccagtcatggggctgtactcttggttttcatcagcacacacgcacaggaaggacccttccacgttttcacagaaggcttcaccacacaccccactgagcagttcacattcattcacatccacacacccttgcccatcctgtggggcttgaaagccctgataacagaggcagcggaaggagccagctgtattgtcacaaaacccgtgactgtcacaaacagtgttgtttacacattcatcaatatcttcacacgtacggccatctgcagagattgagaaaccctgctggcagacacaatggaaagaaccctctgtgtttaggcactccccttgtggaccacagagccctggatgttcacattcattaatatcttgacatgttttattgtcatctagctgaaatccatccggacaagtacaatcataggaccctgcagtattaatgcagtctcctctctggcaaacactcttgtcctccaagcattcattgatatcttcacagtggtctccaagcccagatgctctgtaaccctggtcacacacacattgaaaagagccctcagtgttcctgcactgcccatgagcacagagatgacggtgctggattcatcaatgtcttcacactgggtcttagctgccgacagctggtaacccgtc

SEQ ID NO: 138838 - DNA, 1987 bp, Homo Sapiens
ccccatttccacagacaggaaataaacaacatgaaaacagctcaagaaatacactaacgagcaaaaatatatgaatatatggggaaagaggaacggtgttgttttgacttaactgaagaaaccaagaggaaactggtctacgtatgaaaatgtgcatcctggaaagtcaggtgtcaagattttcgagtaggaatctatacgacttgaatctccccctatttcctgaataaaagtgacatctttcagtatttatacttcatggctcagacacctacctcatttggctctattccttactcactctagcctttacttaaatgagtctgaaaaacttggggatatagcataagaagaaaaataatcccacataatattccccctttctgtagctactttagacctgggttactagaaaattcctgaagaaaatttcaacgttaagtctgtggctttgttgaatcaagcccccctattaatatttagaaaacacccacggtttgggctaatagcattatcggtggtacctattatatagagggatagctgaataaagtctgtctcaaaaccagtgttaaatcactctcagggttgagaagaaaaaaggggagtctaaaatcacaacaagtaaagacatatctaggacccttgtccttctggatccacgcttccttcagggtcttcatcattataaatgttctctgccatttgccacacttgcatgatattgtcttctgatacagaacaaatcacccaaggttcattgggattccaggagaaatcagatatcttggcagtatgaccaccatgaataaacaacaactctggtggcccgtcttctgcatcttctggggattgttcctctccaattttacttaaatcccagacattcagtctgcgatcagtaccactggaagctaaaatagtctcattgtgaggtgaccactgaacctggaatatttcatccttatgtgactcaaaggaatgcaacttaagtttcagatttctcagatcccacaaggcaacagtcttgtcagctgatcctgtggcaagaatgaactcactataaggattgaaagaaaggcagttcacttcagcagtgtgagcatcaactgagtggcttggtttggaagtattgtttgaacgagtatcccaaatcataagtttctgatcatcagcaactgacccaaacagagactcatggagtagatgccaggaaacatcttctactactgccgtatgccctgtaaagatggtcttcgcatctaccacttttccctcctttggaacggcactgatgtcccacaggcagatggtatggtcatctgaagcactaagtaagtgcccactgagatttgggttccaagaaagcccatagccttccttctgatgtccacggagacgcaagtctgggttgcactctccagaaggatctggtttagaaggatgttttgtatagtcaaagacaagaacatcactggaaggagtctttgttgcgatgatacaagggttctggggcatataacgggccctgtttacttctccttcatggttgatcttgatttctatttcaatttttccactaactgaaccaaaacctccaaattctcctttctcactgtcgtagtgtgacgcatcaaactgagcatcatcattagggagctgcacactggctataacaagatggttttgttcatccgatgtgtgtgtccccaggacaagtcgatgaatgctgaaatctttcccttctggtctggttacatctggaagccactgggcagttaggctgggccactccagagcatgggtcatcaccaaatcataaagaaaaggggtgttctttttccatattttgtattcctcgttgatcactcgttcttccactgcgtcgtcgaaggctgcttccttgtcggccatggcgggcaggcgagccgggggaatcctggggtcgagcgttgcgggaggggcggggaggctgcaagagctcccc

SEQ ID NO: 138839 - DNA, 978 bp, Homo Sapiens
tattttttttgtatggaagtcactgattcagtttattgaagcacaaattaaaacttttcaggagatacttacccttttctgttcttttatatactctatcaattcatctcttgttcttttcactgcctcttccacagccttttcacttcgtttctgctcttctattattgctgccttaacagtttcctgacttatttttctttgttcttgtatagctttttgaatttcctgagatactttttcttgatcttttgcatgttctgtcttccataattccctttcttcagcatgcgctttttctaaattttttctttcttcttctacgacttttaaaactgcatccttcattgcttctttttcaagctttgcagcggatactaatgcctctttatttctttgcctttcttcctcccaaacacttttccaatatttccttctgttcttgagattgctgaatcaaagcttcctttattttttcttttaacagttccttctctgtatctagcatttcaaggagcctctgatgctgagcatttagcaactcctcacacttgtgtgcctgtttctcaattgcagaaatgtactgtttttcaatagcttctacttgttgcttaactgaagactgcagtagtgccttatattcatccacaataatgctgagggcttcgtgaccagctttcctcatgtcttccaattcttgtttatgtttttcctgaagttctttgtatctatcttgaaaagaaatggcctcttgctctttttcttttagaaagcctttttctaagacattatgcttttccatcaatgattccacatcctgtttaattctctgtttttcttcttcagatactttgagtttaatctccagacttgaaattttttgctgaagctgtatgttagatacattggctccaggatcctcagaatcatccacaagggcaattgttccattacttttttcatcagttaaacccaatg

SEQ ID NO: 138840 - DNA, 820 bp, Homo Sapiens
agagtatgaagtcgacggcgcgccgaattcggcacgaggggagccatgaggcgccagcctgcgaaggtggcggcgctgctgctcgggctgctcttaggagtgcacagaagccaaaaagcattgctggtatttcgaaggactctatccaacctattatatatgccgctcctacgaggactgctgtggctccaggtgctgtgtgcgggccctctccatacagaggctgtggtacttctggttccttctgatgatgggcgtgcttttctgctgcggagccggcttcttcatccggaggcgcatgtaccccccgccgctgatcgaggagccagccttcaatgtgtcctacaccaggcagcccccaaatcccggcccaggagcccagcagccggggccgccctattacaccgacccaggaggaccggggatgaaccctgtcgggaattccatggcaatggctttccaggtcccacccaactcaccccaggggagtgtggcctgcccgccccctccagcctactgcaacacgcctccgcccccgtacgaacaggtagtgaaggccaagtagtggggtgcccacgtgcaagaggagagacaggagagggcctttccctggcctttctgtcttcgttgatgttcacttccaggaacggtctcgtgggctgctaagggcagttcctctgatatcctcacagcaagcacagctctctttcaggctttccatggagtacaatatatgaactcacactttgtctcctctgttgcttctgtttctgacgcagtctgtgctctcacatggtagtgtggtgacagtctccgaggg

SEQ ID NO: 138841 - DNA, 890 bp, Homo Sapiens
  misc_feature (584)..(592): n is a, c, g, or t
aagatgcaatcaagaaatttgttgtgactcagtgtattttgttgcctgtgtcttcacttctactttacattattaaaattgggggtgactatttttttatttatgcctggctgttcacattagttgtgtctctggttcttgtcacaatctatgctgactatattgcccctttatttgacaaattcacacctctgcctgagggaaagcttaaagaagaaattgaagtaatggcaaagagtattgactttcctttgacgaaggtgtatgttgtggaaggatctaaacgctcttcccacagcaatgcttatttttatggcttcttcaagaacaagcgaatagttttgtttgacactctactagaagagtactctgtactaaacaaagacatccaggaggattctggcatggaaccccgcaatgaggaagaagggaacagtgaagaaataaaagctaaagttaaaaataagaaacaaggatgtaaaaatgaggaggtactcgctgtactaggccatgaactggggcactggaagttgggacatacagtcaaaaatatcattattagccagatgaattctttcctgtgnnnnnnnnnatttgctgtattaattggtcgaaaggagctttttgctgcatttggtttttatgatagccaacccactcttattggactattgatcatcttccagtttattttttcaccttacaatgaggttctttctttttgcctaacagtcctaagccgcagatttgagtttcaagctgatgcatttgccaagaaacttgggaaggctaaagacttatattctgctttaatcaaacttaacaaagataacttgggattccctgtttctgactggttgttctcaatgtggcattattctcatcctcca

SEQ ID NO: 138842 - DNA, 862 bp, Homo Sapiens
  misc_feature (177)..(177): n is a, c, g, or t
agctacagtgtgatccaacgctgatctccttccagaaagtaatccctgaaaaattctggtagttccatgctcagcagatccacatcaagaggcagcaaagagaaggcccattcatcacagctcacatctccatagattccctcttcctcaagcaccatctcacacgcatagaacttntgagggctgaagatcactttgtatttgcgagttcggccagccaatttgtcagcattgacaagactggcaatgtatcgcatattcttgatgcggggtctgaccaagaagcacaattgttcattggagctgagggctggcttgttctccaccttgtatagcttgtctacttcgtgttgcttcaggatggagacattggcaattcgatccaaagggctcatgagatctgcctcaatgaataaatccttttttccaggaagctgctccagcagatagatgagctggtctcgagccagcctcttcagcatggagaagtcaggcagctcaggggcgtccggccgatggggaaaagccatggcagcggtcacctgcgccgcggggtggaaggacgcccttcgttctgagaaggccggccgcagcccagggaagcgcaaggggggctatccttcaggcctgggcaccgacttccagagaccccagatgggccctcgctcctcagcagcactccaggaatgaatggccacctccaggcaagagagctactacctcggagcagccttgtctcagacctgcagccaccgtgtctcgaccctccctccctgatccactctgcccgtcagcaggattccggtctacaccccgcagagactccgcagcgtacgagcagaaccccgccttctaccagaaa

SEQ ID NO: 138843 - DNA, 1003 bp, Homo Sapiens
  misc_feature (112)..(121): n is a, c, g, or t
  misc_feature (925)..(959): n is a, c, g, or t
gattttttgcttggctgcccggagtgaagcggccgggttgggcgattaacaggccgtggttaggaaggacggagaaggggcgttcgctcctttgggacttttcatgcctcgnnnnnnnnnncagatgtggcttggtctgggcgcaaggtcccagcagccagcttaagcttactcttctgtgaaaggggaaagtatcccctgtggaaagcggttaaacttgtggagggggtgcgggacgtgagttcttccccatgccaggcgaatggtgtggccttgagctggtccaggagccggctcgacgtgtctgagggaggccccggagggggcggggaggtggcccacagaacgcgggttctgtaaagagacgttgggaagattcgattccgagaagaggaagaaccggattgaaagatagccaggccgctgagggggagggggctgctaaggatggcgtcggcctcctccgggccgtcgtcttcggtcggtttttcatcctttgatcccgcggtcccttcctgtaccttgtcctcagcatctggaatcaagagacccatggcatctgaggtgccttatgcctctggcatgcccatcaagaaaataggccatagaagtgttgattcctcaggagagacaacatataaaaagacaacctcatcagccttgaaaggtgccatccagttaggcattacccacactgtggggagcctgagtaccaaaccagagcgtgatgtcctcatgcaagatttctacgtggttgagagtatcttctttcccagtgaagggagcaacctgacccctgctcatcactacaatgactttcgtttcaagacctatgcacctgttgccttccgctacttccgggagctatttggtacccggccgtaatggccgaattcccgggcatatgtccggtaccgtcgactgnnnnnnnnnnnnnnnnnnnnnnnnnnnnnnnnnnncggccgcttcctcgctcactggactcgctgcgctcgtcgttcgc

SEQ ID NO: 138844 - DNA, 974 bp, Homo Sapiens
  misc_feature (417)..(457): n is a, c, g, or t
cctagttatagcaagaagggatcttcagcagcaatgacagtctgttgtacaccgtgtaggaaacttgaatttctttatcacacttttcattcatttcaagacaccatatttccagctccatggaatctccctcagaagtcttaagtgaaatctccacacacatggacctctcgtctgcaggcagctgtcctgccagtgccttctttgcgttcatgtgtaacctctgggatgtctttgattgctaagttgaaccgatgctgaacccgttggagaagatgatgaacgagtgcaaatctgtttcaccaagccgagcctggacaatcacttggacagtcttgagggcataaagtttaataaacttgtccagttcctttctgtcctgggaattgagatcagtttccattgcctataggaatnnnnnnnnnnnnnnnnnnnnnnnnnnnnnnnnnnnnnnnnncttgagtccaagatgccagagatttatttaatgagaatggatcacaggtttccacaggtcgttccactggccagtaagaagacagtcgtgaaccatgggtcccttttttcactagtctacagtcaccctcacctgcgaagctgcggtcacaaagagtggttccgggctctcattacggaggccgggacctgggaccgaccagccgcgcctcctggtctgagggttccgcgctccggatgctgcagtgaccgtacacgtcgccgatagacacctaaggcttcagaagggtcctggctctcaggccccagacgttttgctcctaagactccgcgagttgtcgcacccacgtcgactggcgctcttcagtgcttccctcactggttaatgcggtcactcccgccttaagcccagcagccggtcgcttcccggcgccgccatcgttagtgtttgtttatcatccgcgttcggtcctcgtgccgatgtaacacccgggcctcttcctagccctatctttttt

SEQ ID NO: 138845 - DNA, 475 bp, Homo Sapiens
tttggctgcggggtggccagagaacgaagaaataccaaaagtgaaatgctacgctgaattgaccaggctaactgggaactcactggaaaagtgaaaactgggaagaattagtgatgagctcaagaaggtgcttagccacttacccagagatttatttaatgagaatggatcacaggtttccacaggtcgttccactgccagtaagaagacagtcgtgaaccatgggtcccttttttcactagtcaacagtcaccctcacctgcgaagctgcggcacaaagagtggttccgggctctcattacggaggccgggacctgggaccgaccagccgcgcctcctggctgagggttccgcgctccggagctgcagtgaccgtacacgtcgccgatagacacctaaggcttcagaagggtcctggctcgcaggccccagacgttttgctcctaagactccgcgagttgtcgcacccacgtcg

SEQ ID NO: 138846 - DNA, 663 bp, Homo Sapiens
  misc_feature (82)..(82): n is a, c, g, or t
gctattgtaaatattagtggtttacaatgcgctttagacatatttctttaaaatgtaagcagtgagaaataagacctctctngaattagtagctctaaactgttaacatagaatgttacttggaaaaagtctggaatatgtggtgtacacaagcagtgcttcgtgaatgagtttcttagcttttatagtgcgccatgtttctcaaagtttgtttttgttgacaaaacattttataatatatatcttatgtttattttttttctcaactaattgtgtactgcactgtaaggtgaaaattagccatccattatttatcttctgtggcaatgcatttatatggttgattgggtggggaattttttgcagaaagatgcaaagtgattgggttttcgacttcctatcgcagggagcttttaagaaatattaatttcctatacatttttccaatccccatgcaaactgttcctgtttacataccttctctgttgtatcagtactttgagtgagaagacagtttatttaaaacttgagcaggctgttcagcattttttctgcttctgaaatctgtatagtacactggtttgtaatcattatgtcttcattgaaatccttgctacttctcttcctcctcaatgaaatacattatatatttatctttatgta

SEQ ID NO: 138847 - DNA, 948 bp, Homo Sapiens
acccccaccaaatttcccatttggaatttacccccttccccccaggggcttttttcctttttggaggaaaaaatgtatattttcccccattttccaccaccctgtggataaggaaagttccatcccattgggaggaaattctgcttttccgggggaataaccaaaccccacattcagcggaaattccttggtaaccccatagttccttctctttagtaaaaagtacattcaggcccaaacctggtctttaatcctccggcaaatgcacatgtagacattccagtggaatttatagagagatcagacaacttaaaccttctttgagtatcagcaccttgttgaaacccaaggtcaaggcaggccacgttggcttccctcatgctccagctgcttttgcatatgaacattgtcttatcttggtccacaagttttacttcaactattccctctgaatctgtatttccatgcttcaaggaaacactaaactttccttcggctgtgcatgttccgttatttaaaaactttgtccctggatgaagacattccaaactcttttgttgacagtatgttgggaagcttctcctgttagttgcacacactgcagtgccattctttgggcactgatacggtagtttacaaacacaggtgccctcaatgcatctctgccatggctggcagaagactttatcgcaggagaggtgagtatatttttttgctaagcactttttctccaccagatcctcttgagatgtataagtgaccttgcaaaaccttaagtggaagcacagaaataacaggaaaacatgaagaagcttcatgttggaggtgttcggggtctttgtctctgctgagaactcttttccactccaggtattcttttgaaatttaatttttaacccccggccgtaatggccgaattcccgggcatatgtccggtaccgtcgactg

SEQ ID NO: 138848 - DNA, 707 bp, Homo Sapiens
  misc_feature (29)..(29): n is a, c, g, or t
taatttatatactgcaatgcaagtgcttngagatgcaggtgatttggccaaaggagaccagaaagggcggaaaggaggaacaaaaggaccatcaaatgttttcaaaattgtgaagatgattatggaaagaaatttccaacctgtgattattttcagttttagtaataaagattgtgaagcctatgcactttaaatgaccaaattagattttaacacagatgaagaaaagaagatggttgaagaagtatttagtaatgcaattgattgcttattcgatgaagataaaaaacttctttaggtagaacatgtagcttcctcttttgaagaggggaattggtattcaccatggtggtttactttctattttgaaagaaactatagaaattctcttttctgaaggattgataaaggtcttatttgtcacggagacctttgttatgggaattaacatgccagctagaactgttttatttacaaatgcccgtaaatttgatgggaaggatttccgatggattttttttggtgaatacatttagatgtctggttgtgctggaaggagaggaatggatgatagaggaattgtaattcttatggtagatgaaaagatgagcccaacaattggaaaacaattacttaagggctccgctgatcctctaaatagtgctttccatttgacctacaacatggttttgaacttactacgtgta

SEQ ID NO: 138849 - DNA, 1636 bp, Homo Sapiens
ccggattcccgggatatcgtcgacccacgcgtccgggccgcggctcggttctcccgcctccgcctccgccgcggctcgtggttgtcccgccatggcactgtcgcgggggctgccccgggagctggctgaggcggtggccgggggccgggtgctggtggtgggggcgggcggcatcggctgcgagctcctcaagaatctcgtgctcaccggtttctcccacatcgacctgattgatctggatactattgatgtaagcaacctcaacagacagtttttgtttcaaaagaaacatgttggaagatcaaaggcacaggttgccaaggaaagtgtactgcagttttacccgaaagctaatatcgttgcctaccatgacagcatcatgaaccctgactataatgtggaatttttccgacagtttatactggttatgaatgctttagataacagagctgcccgaaaccatgttaatagaatgtgcctggcagctgatgttcctcttattgaaagtggaacagctgggtatcttggacaagtaactactatcaaaaagggtgtgaccgagtgttatgagtgtcatcctaagccgacccagagaacctttcctggctgtacaattcgtaacacaccttcagaacctatacattgcatcgtttgggcaaagtacttgttcaaccagttgtttggggaagaagatgctgatcaagaagtatctcctgacagagctgaccctgaagctgcctgggaaccaacggaagccgaagccagagctagagcatctaatgaagatggtgacattaaacgtatttctactaaggaatgggctaaatcaactggatatgatccagttaaactttttaccaagctttttaaagatgacatcaggtatctgttgacaatggacaaactatggcggaaaaggaaacctccagttccgttggactgggctgaagtacaaagtcaaggagaagaaacgaatgcatcagatcaacagaatgaaccccagttaggcctgaaagaccagcaggttctagatgtaaagagctatgcacgtcttttttcaaagagcatcgagactttgagagttcatttagcagaaaagggggatggagctgagctcatatgggataaggatgacccatctgcaatggattttgtcacctctgctgcaaacctcaggatgcatattttcagtatgaatatgaagagtagatttgatatcaaatcaatggcagggaacattattcctgctattgctactactaatgcagtaattgttgggttgatagtattggaaggattgaagattttatcaggaaaaatagaccagtgcagaacaatttttttgaataaacaaccaaacccaagaaagaagcttcttgtgccttgtgcactggattcctcccaacccaaatggtgatgttatgtgccagaagccagaggtgactgtgcggtgaattgttcataaagtgaattgtttcaccttacaagaacgattgtgaaagaaaattgcattgctacccacaagtccattgagaggggaagaacactaatcttcgaaggaaaaccagcataccagaattgcaatggataaagggcgcaacgagatcccgaattatgaaaccccagaagcacggtc

SEQ ID NO: 138850 - DNA, 1385 bp, Homo Sapiens
  misc_feature (978)..(995): n is a, c, g, or t
  misc_feature (1133)..(1142): n is a, c, g, or t
ggcatcctggatcgacacagctgatggctctgccaatcaccgggcccgggtcaccaccaggatgggcaacactccagattcagcctcagacaacctcggtttccgctgtgctgcagacgcaggccggccgccaggggagctgtaagcagccgggtggtgacaaggagaaaagccttctagggtcactgtcattccctggccatgttgcaaacagcgcaattccaagctcgagagcttcagcctcaggaaagaacttccccttccctgtctcccatccctctgtggcaggcgcctctcaccagggcaggagaggactcagcctcctgtgttttggagaaggggcccaatgtgtgttgacgatggctgggggccaggtgtttctgttagaggccaagtattattgacacaggattgcaaacacacaaacaattggaacagagcactctgaaaggccattttttaagcattttaaaatctattctctccccctttctccctggatgattcaggaagctgacattgtttcctcaaggcagaattttcctggttctgttttctcagccagttgctgtggaaggagaatgctttctttgtggcctcatctgtggtttcgtgtccctctgaaggaaactagtttccactgtgtaacaggcagacatgtaactatttaaagcacagttcagtcctaaaagggtctgggagaaccagatgatgtactaggtgaagcattgcattgtgggaatcacaaagcaaatagtactccagaaagacaaatatcagaagcttcctattcttatattttttttgctctcccttttgagacagggtctttctctgttgccccggctagagtgccactggtgatcacggctccctcctagccttgaattcctggggcccaagtaatttttcccaccctcagcctcctgagtagctgggcactacaaggtgtgccccccacattgccctgggacaaannnnnnnnnnnnnnnnnngtaacggaatggggattctccccctcccgcgtggcccgcgtggggggccccccaaaattcccttggggttacaaagagggaaatccttccccaacactttggaaacttccccaaaagttggcgctggggattttacannnnnnnnnnaagacaaaccctccccaccggtgggcccccctctctctcccaaaattgtcccttaccacaaacaatgtttcccatggaacaagggagaatttcgcttaccagaaccctggatacacttgagaagaatatattgggtgccgcccataaataattcaccccgcccccttggcgcggttaatagcagatttagacgtgcatcacgagccgccttatatcttttcatcggccacatcctatcagcca

SEQ ID NO: 138851 - DNA, 1089 bp, Homo Sapiens
  misc_feature (356)..(356): n is a, c, g, or t
aagggggaatttttttcccgaggggctgaagctttcggaagcttgaaattgcccttgtttgccaacatgggccagggaaatgccaggggcccctagaagggtttttttccctggtccaccacccgggctggtttccagctcccctgggcggcccggccggcgttctgcagccacagcgggaaacccgaggttgttctgaggctgaatcgtggagtgttgcccatccctggtggtgaacccgggccccggtgattggcagagccatcagctgtgtcgatccaggatgccccccggaggacgcgcatgtcttgctcagcagcctggtacggtgatgctgtccactcccacacgttccncaggaggtcatagagcccgtagttgttctgggcggggaaagcattcactggggagactccatggaagccatcctcagctttgtctcccttggggaactttccctgccacaggttggtgcggtttggctggaaccagttcccccatgggtaaacttgacccttcaagccccctcgggcggcaaactcccactcttcctccgtgggcagtcgttttccccgccaagcacagtaggcacgggcgtcattccagctcacgtgtaacactgggtgctccagtctctctcggatgccagagccaggacctgcaggctgcctccaaaatgccttttccactggaagccaccagagtacagacttcattggctgggtggctttgtttctcagctcatcagagacaaagtcctcaaagacaaagctccatccaaacatctcagcttctgtccgatactttttctccctgacaaaatccctgaaatctttgttggtgacaggaaatatgtcgatggcaaagggtttcactgtcgcctcccgcacaggcccttcaccatctctgctgtctggagaatttgttcccatcaggaatctcccaccctgcagttggaccatgctagtagcctgtccatttcctagcttgagccacgcgccgaccaggagcgacagcaggggcagcagcggtaacccatgccgggccatcaggactgccgcggtgcgccgcgtacacccacggccccgc

SEQ ID NO: 138852 - DNA, 1102 bp, Homo Sapiens
  misc_feature (88)..(88): n is a, c, g, or t
  misc_feature (157)..(157): n is a, c, g, or t
ctgtttggtgtgtttgccaatccctggtgtcaaataaatactggcccttttaccagaaaccacctggccccccacagccatggtcaancacacatttggcccccttctccaaaacaacaggaggctgagtcctctcctgccctggtgagaggcgccntgccacagagggatgggagacagggaaggggaagttctttcctgaggctgaagctctcgagcttggaattgcgctgtttgcaacatgcccagggaatgacagtgaccctagaaggcttttctccttgtcaccacccggctgcttacagctcccctggcggccggcctgcgtctgcagcacagcggaaaccgaggttgtctgaggctgaatctggagtgttgcccatcctggtggtgacccgggcccggtgattggcagagccatcagctgtgtcgatccaggatgccccccggaggacgcgcatgtcctgctcagcagcctggtacggtgatgctgtccactcccacacgttccccaggaggtcatagagcccgtagttgttctgggcggggaaagcattcactggggagactccatggaagccatcctcagctttgtctcccttggggaactttccctgccacaggttggtgcggtttggctggaaccagttcccccatgggtaaacttgacccttcaagccccctcgggcggcaaactcccactcttcctccgtgggcagtcgttttccccgccaagcacagtaggcacgggcgtcattccagctcacgtgtaacactgggtgctccagtctctctcggatgccagagccaggacctgcaggcttcattggctgggtggctttgtttctcagctcatcagagacaaagtcctcaaagacaaagctccatccaaacatctcagcttctgtccgatactttttctccctgacaaaatccctgaaatctttggtggtgacaggaaatatgtcgatggcaaagggtttcactgtcgcctcccgcacaggcccttcaccatctctgctgtctggagaatttgttcccatcaggaatctcccaccctgcagttggaccatgctagtagcctgtccatcccgggaattcc

SEQ ID NO: 138853 - DNA, 1148 bp, Homo Sapiens
  misc_feature (37)..(37): n is a, c, g, or t
ttcgatcccaagtatcgtgttgtgattcgtcagagtngtaagagctggaaggagttctaggattcgaaccttggtactgacgtgggaaatattgaaagcaaagatggctgtcttctcaacatcccaacttgcaagactcacattggcttctgtctcagactgatcctcgatattggaggcatcagtttcgtttgtgcttctccgtttcctgccccgtttggggtagccattgatcttacactcgtaacaagcctctggggagagtgaattgtcatccatttcaccactgacaggtggctctgggtttcctcggcccatgcccattccagaaacacagtgcccttggcctatgcggaagtaaccaggtggacagccacacaggtaaccgccctcggtattggaacagccatagctgcagggggcctgcgcagagccacattcattgatgtcttggcatcctccactgaactgttcatactggaagccggcgggacacatgcacttgtagctccccagggtgttgtgacaggaggctcctccgcagatgtgagcggtgaggcattcgttttcatcaacacactggttccactggtagtgctggaggtagccctgggggcagctgcacctgtagcccccaatgatgttctggcagccatgctggcagcggtggttaccctcacactcgtccacgtcttcacagctggagccggtctgatcaagtgagaatccccgctggcattcacaggtgaagcttccaggagtgttctggcaaatgcccttagacccgcacagattgatgtcagaggtgcattcattgttatcaatgcaggacgtatggtgttgggtaaatccgggaggacatttgcatgtgaagccgccaatggtgttaacacataggaactggcagttgtgttgcttggttgcacactcatcaagatctttgcagctccttccatcctcttgcagaatgtagcctttcgggcatgaacactggtaactcccttctgtgtttttgcagataaaattgcagggtttgggagcctggttgcactcgttcagatctacacaggaagtcccagttatatctggagtgtacccagttttacaaatgcaatgatatgatcctctgtcattgacacattccccat

SEQ ID NO: 138854 - DNA, 1209 bp, Homo Sapiens
tgtcatgcaggcaagatggcggaaggggaggacgtgggatggtggcggagctggctgcagcagagctaccaagcagtcaaagagaagtcctctgaagccttggagtttatgaagcgggacctgacggagtttacccaggtggtgcagcatgacacggcctgtaccatcgcagccacggccagcgtggtcaaggagaagctggctacggaaggctcctcaggagcaacagagaagatgaagaaagggttatctgacttcctaggggtgatctcagacacctttgccccttcgccagacaaaaccatcgactgcgatgtcatcaccctgatgggcacaccgtctggcacagctgagccctatgatggcaccaaggctcgcctctatagcctgcagtcggacccagcaacctactgtaatgaaccagatgggcccccggaattgtttgacgcctggctttcccagttctgcttggaggagaagaagggggagatctcagagctccttgtaggcagcccctccatccgggccctctacaccaagatggttccagcagctgtttcccattcagaattctggcatcggtatttctataaagtccatcagttagagcaggagcaggcccggagggacgccctgaagcagcgggcggaacagagcatctctgaagagcccggctgggaggaggaggaagaggagctcatgggcatttcacccatatctccaaaagaggccaaggttcctgtggccaaaatttctacattccctgaaggagaacctggcccccagagcccctgtgaagagaatctggtgacttcagttgagcccccagcagaggtgactccatcagagagcagtgagagcatctccctcgtgacacagatcgccaacccggccactgcacctgaggcacgagtgctacccaaggacctgtcccaaaagctgctagaggcatccttggaggaacagggcctggctgtggatgtgggtgagactggaccctcaccccctattcactccatgcccctaacgcctgctggccacaccggcggcccagagcccaggcctccagccagagtagagactctgagggaggaggcgcccacagacttacgggtgtttgagctgaactcggatagtggggaagtctacaccctccaacaatggaaagaaaggctcaagcacggacatcagtgaggactgggagaaaga

SEQ ID NO: 138855 - DNA, 834 bp, Homo Sapiens
caggggccagttctccttcagggaaagtagaaattttggccacaggaacctttcctctttcggagatatggtgaaatgcccatgagctcctcttccgtcctcctcccagccgggctcttcagagatgctctgttccgcccgctgctgtcagggcgtccctccgggcctgctcctgctctaactgatggactttatagaaataccgatgccagaattctgaatgggaaacagctgctggaaccatcttggtgtagagggcccggatggaggggctgcctacaaggagctctgagatctcccccttcttctcctccaagcagaactgggaaagccaggcgtcaaacaattccgggggcccatctggttcattacagtaggttgctgggtccgactgcaggctatagaggcgagccttggtgccatcatagggctcagctgtgccagacggtgtgcccatcagggtgatgacatcgcagtcgatggttttgtctggcgaaggggcaaaggtgtctgagatcacccctaggaagtcagataaccctttcttcatcttctctgttgctcctgaggagccttccgtctgtatagagaacgggcagaggaagcaagcgccccgggaacaggctgcaatagccagcttctccttgaccacgctggccgtggctgcgatggtacaggccgtgtcatgctgcaccacctgggtaaactccgtcaggtcccgcttcataaactccaaggcttcagaggacttctctttgactgcttggtagctctgctgcagccagctccgccaccatcccacgtcctccccttccgccatcttgcctgcatgac

SEQ ID NO: 138856 - DNA, 852 bp, Homo Sapiens
ttcccctttagatttaaggtaattagaatagattgggaaatgatttaggattacccttcccaccctggaaatgtaacatcctacttatgttccatgaaaagaacacaataattgttcaacagcaagatttagtttctctaaaaaacaggagcactttgctctaattttcacagaaggactgcagaaaattttccaacatgaaagctagaaattgaggccagtaaagaagcttctttagtaatcaggacctatcatagttagagctctttggaatgtgtctcatacatacaaaggtatcacaaattaaatcttcagcatattcataagttcttaaatgagaaagatttctaatgacagataaaggctcccatcggcaaattaaatctgataactcaatctttcccaactaacaactgaacatagcctctggaatcaaatgtaaagatcactcaatcatgacgatgtaagatgaagtatagatgaacaatacatatgaaaaaattttgtaaaccgctgcagttctaaaacagatttatattacaaagcaatgtaaataaatactgggctagtacaaaagctcttatttacagttttacaaatgaaattgtattcagtgtaaatgctgtgttttaaagaacacagtattgtattagtaaaattagttctgttgagggcattacagtttgttagaatcaatgcataacatataaaaggttcaagttaactctgtttataatttagtacagacaacccagtttaacctggaatggcatctgttaaagtgctgaaaaaacaggaaatatttagaaaacactgtacattattaaagctttatcaagtcagaatgttcca

SEQ ID NO: 138857 - DNA, 655 bp, Homo Sapiens
atcaactgactgtctgcaggtatcattcactcagtgacatattctcaatcttaaggaattccatgtataaaagatagtcattgaagccaaaatgaagacatagtaagctttaaacacatatagacatacacaatcccatgtatttatatatgtataatatatacacagagtattttggttaagcagaaactagcattgccataatttgttcttgataattaaacaaataaagcatcaccaagcaccaacgttttctaagacattttccaaagttttaacagacactggttttgtaaactccacaaaatgcattacaacatgaatataattcatctgttacttggatgtggaactcaaatgaatcctggagctttctggaagatcacaaaagaggacatggcactgagcgggatgaaggagtcacaggcatcacagcatgcacttctggttttctgcttattgcttatgtgcttctgtcacatacgtatctttggcttgctacaaccttatgattttgaccactccatcagtgttcactttgggacagcctcagggaggaagcaatgggtatacagagcaatcatctctctgttaaaagaagagagaatcttccctctttcctctcccaaactatgagcattttatgtgggagtgg

SEQ ID NO: 138858 - DNA, 619 bp, Homo Sapiens
tcttcatctcgtatcgtttcgggatccgtatccatacttttattttcactttcttcctcttcctcctcgaactcctcgtcgccatcctgtctgcccagcttcccgtagccatcctcgccttctttctcgtgctccttctcgctctcgccatccctcggcatactctccctctcctccgagtcagagtacccctgaggggtaatgctctgcaagtaagcccggttcatcagcagctcggtgggttccaagtgccctttctcgcgcgcctcgcgctccgccgcttcccgctcctccgcctcccgcttgcagtaggaatacctgtgattcatgtgctgcgagtacgagcccgagtgtgagaagcgcttgccacatttatcacactgatagggcttctcgcccgagtgaagccttgagtgctcgataaggtggtgcttgtgtttaaacgctttcttacaaatctgacactgatgtggtctttttcctgtgtgttcgtatttatgtcgcagaagggaactgcttttctggaatgtcttgtcacataagtcacatgcatacatgccactctctgtcttcttgatctttttgcgagacagacaggagcccgagtctgtcatatcat

SEQ ID NO: 138859 - DNA, 1230 bp, Homo Sapiens
  misc_feature (1036)..(1067): n is a, c, g, or t
atttgtatctctcattgtttggcatatttttcaagtcacacttaaaaactcttccatgtattcacttctcatcacttggtctacatgccgaacctaaggtcaggattccaaaaagatgagtatcctctcaaacgcctcctaagcctctggtatacatgacttaggctgtgcacttcatttagacttcacctttttgtttgctgttgttttttacactagattcctttgtcttcattaaagataatgaaagattcacatcacagtgcagctcttcgctttgtcctttcgtaagtccgtagcaactgccgagagttctggtctgctaggcatgtgtgaaatccgctttgtggctctctgtgatttgttccgcttaacgtttttatttgtcttatttacacatgccaaggtggcaacgtgaaaaatgtctctgacgctattttccgactgtaaagctgagcattcgatataagtagctgctccaatctgtttggccatatttgccccctggtcataggacactggcgtctgcctgtgattggagagctctactaatgtactgacatctgtccgcagatcagacttgcagccgaccaagagcattttggtatttggacaaaattcctggatttcacctttccactttttgaggacactgtccagggtctctggtctactgatgtcaaagcaaatcagcacagcatccgaatcagggtaagagagggggcggacattgtcatagtaaggagaacccgaagtggtcccacaggctcaactctattctttgtgtgtcgatttcaaaactggccgtgtaattctcaaacactgtaggaacgtaattctcggggaagcagtccttggcgaagacatggagcagcgcagtttttccacactgactgtctcccaccacaactatcttgcatttcacgttctgattaggatccatgatagatttgctggataatttctggctggctcttctctccttcattgatgttgccttattttctcttggaacaggaattttctcttaagaagnnnnnnnnnnnnnnnnnnnnnnnnnnnnnnnnttctctctttataaaaagcagatataaaaataaatcacaaggctgatgggcaacctctgaaacgcggcgcagacgaggaggagagcgagaggagcaggctggttactcccctccaacaagttttaagcctgactcctcaccgcgcctcccaagtccaattccg

SEQ ID NO: 138860 - DNA, 925 bp, Homo Sapiens
gaaccatggggttatccctgctgtttccccccccggattacattttattgaccaacagttcagatgggtgattcccactcattttggccttggggccagcagaaaaacggaagtggaagaacaatagctggccaggggacagaattaaatttttcctagagatggtgttctagacagctatgccaagggccactgggaatttttcaggctctcccaagttaatttctgtggggtgccttactctgccatgtgggatttaccccaacaactgaggactgcagtggatagtaaccatataattgctaccaaaaacagtggtccttaggttttagttaagcaagagagaaagccttgagactacaactccagcaagttaggctttatgttgatctgaaccccccgccctcacagcattctaggaactacagtaacgtcagtcggttgcagtggtacaacgagcctgcaccagtctagctacggaacactttggaatacttgtcagagcgcactggcatctgttaatacatggcctgacccatgtacccattaccataaactcaaccacagacgagacatccagaggttaaaaaaaaccctattacttcaacatagcaatagagagaaaggataaaagctgcctccagaaggtggctgcatcagaaatgaaaatgtgccttccaatagattacacaggctgggagttctgtcttggctcccttcaaggcctctggttctatccttaaaacaataatacacttccactgagacaggcagggcactctcctgtggttctgctggctccaccacaggccctgctagtcctttggaaaggcaccaggcttggcaattcaggaaagcccagggctggggggagcagcatgccctcgtgccgaattcgccacccaggcctcgctacctaggaccg

SEQ ID NO: 138861 - DNA, 939 bp, Homo Sapiens
  misc_feature (906)..(906): n is a, c, g, or t
catctcatagccaatagccttggtggtctgcattcgtggaccattgaatggggattttccattctattccgggattttgcaccagtgggagtaaaccggtatttgctggatcgttccgttaaggattggttcctcttgatagtcttctctctcttccagaatccaaggagatagcccccagtacaaagagactgagcaaggaggggcaccaacaggagacacaggaggaccatggaggaatctgggtcatcagcagcaccttcacagagcttcctggcaaggatggggcttgagaagtttctgctgacagggttcctggcaacgcagatgaaggtcatatcactttcgtccccatctccaggagatggggaggatggacccattatgggactcattggctgcttgccccagggccttccaggtataaatcacatcctcttccccatgttccatgcagcatgtcagattggtcacacaggtgccattcttattgctctgcagacccatggtgactttaggctttgacaggtgctcgtagacatgcagcacgtactcctgggtggagggctgctggagtgatgagctgtatatccccacatagtagatccctgagtcattcttcttcagtttgctgagcttcagggagtagcctccatctgggaagtctactctctccctattacgattttgggtcactatgatagtgcccccttctggctgtatggtgacaagaggggttgtgttgaaggtccagacaatagagtcaacttgctttactttggacttcagggggaaagtcacggccccaccaacggaaccgaccagctctttcacgggtccagaggctgctgaccctgtgagctgccaaaggatatagatgagggtgaggcatgttggggaaccagnccatattgctctctgcaagtcagcaactgaaat

SEQ ID NO: 138862 - DNA, 1008 bp, Homo Sapiens
  misc_feature (864)..(864): n is a, c, g, or t
  misc_feature (985)..(985): n is a, c, g, or t
aaagtcacttccccaagatctgccagacctgcatggtcaagcctcttatgggggtgtttctatctctttctttctctttctgtttcctggcctcagagcttcctggggaccaagatttaccaattcacccactcccttgaagttgtggaggaggtgaaagaaagggacccacctgctagtcgcccctcagagcatgatgggaggtgtgccagaaagtcccccctcgccccaaagttgctcaccgactcacctgcgcaagtgcctgggattctaccgtaattgctttgtgcctttgggcacggccctccttcttttcctaacatgcaccttgctcccaatggtgcttggagggggaagagatcccaggaggtgcagtggagggggcaagctttgctccttcagttctgcttgctcccaagcccctgacccgctcggacttactgcctgaccttggaatcgtccctatatcagggcctgagtgacctccttctgcaaagtggcagggaccggcagagctctacaggcctgcagcccctaagtgcaaacacagcatgggtccagaagacgtggtctagaccagggctgctctttgcacttgccctgtgttctttccccaggggcatgactgtcgccacacgcctctgtgtacatgtgtgcacagcagacaggctacaaagcagagatcgacagacagccaggttagttggaactttctgtttcctatggagaggctccctacacagggcctgctattgcagaatgaaaccatttatagggtgaaggagaaataccatgttacttctctgaggtttagttggtctttcatctaacactgcattacttgctcaatcttcagttctctantccctcttgtcagggaagacaagggcacattatgcgggggtcgttgtacaagggcatttggctgtctgaagccaaggccgaggacaaatacctggtgcaaggagcccagggcgagttgccntggtgggcggggggttccacgcc

SEQ ID NO: 138863 - DNA, 884 bp, Homo Sapiens
  misc_feature (767)..(767): n is a, c, g, or t
  misc_feature (838)..(838): n is a, c, g, or t
ggcctgggtggcgaattcggcacgaggcggaggagacagggctactgcaggcgcagagctgggggcagccgggggcccgagtggctgaggctggtcccgcagcggccgcttgccggcgttctggctcctgtggcctcaccaggaagcgtcagagtcccgacactggggaagctcggagcgccgcctccgctgccgccgcctcctgcctggctctgggtccccgagccccctcccctggcccagcccgactccctcctccttcccgaaccatccggctcgggctccttccctggcgatggctggccgctgagccatggctcagtacggccaccccagtccgctcggcatggctgcgagagaggagctgtacagcaaagtcaccccccggaggaaccgccaacagcgccccggcaccatcaagcatggatcggcgctggacgtgctcctctccatggggttccccagagcccgcgcacaaaaagccttggcatccacgggaggaagaagtgttcaggcagcatgtgactggttattctcccatgtcggtgaccccttcctggatgaccccctgccccgggagtacgtcctctacctccgtcccaccggccccttagcacagaagctttccgacttttggcagcagtcgaagcagatctgcgggaagaacaaggcacacaacatcttcccccacatcacactctgccagttctttatgtgcgaggacagcaaggtgggatgccctggggggaagccctgcagaccacggntcagtcgctgggaaatgtaagttctcggccccgctgcccctggagctctatacgtcgtccaacttcatcgngcctctttgtaaaggaaggacggttgcggagggtccctcaaggaag

SEQ ID NO: 138864 - DNA, 750 bp, Homo Sapiens
ccgtgagagagttggattgacgatgtatttaagattgtattaaggaccatgcatatccagttgctgcaattcatcagccttggtaatgtaattctcaggcaggagtccagagcaagccggtggttaaggacgtgccatagattccaaccctctgctggttctggttctgctccattggagacatgaagatgaagtccccggggatcagttccagctcatacgtcattttgtggggtataggggtagatgacctgtaatgtctcatggttagccaatcggatatcccgagataatatggtagccgcccattcacaccctagcttgacgtcaatgttctgggccagtttctctagggtgggtaggtggctggcttggaagtggtaagccagggtcacatgtagctgcttcttatgaggttccacatgcacttcggttttggatgcagcctctgcagcaaagtcagcagcaaacttcttgaggacctccgcactgtcttcctttacaaagaggccgatgaagttggacgacgtatagagctccaggggcagcggggccgagaacttacatttccagcgactgaccgtggtctgcagggcttcccccagggcatccaccttgctgtcctcgcactggcagggaaaacaggcagtcttcactcagacacaaggggagatggaagtctgctgctacttaacattggcatcctctccccagagacctggaggaggctgataatgcaattacttaacc

SEQ ID NO: 138865 - DNA, 582 bp, Homo Sapiens
gaacttggctctgcagggaccagtgcccgctgtccaccacagggaacaaaaggcaagggagaggatagcaccttggcttcctcgatgggagaggcaaccaatagcaagttcctacagggcgttggcttcaaccctttccaggagcgaggcaacaacattgtcacatatgaatgggccaaggaccttctgactaattaccagactggagtcctagaaaactctcccaagatggtactgcttttccacctgattgaggaaagtgtgaagcttggggacaagatccttgtgtttagccagagtctttccaccttggctctcatcgaggaattccttggaaaacgagaagtaccctgtccacctggtaccgaggggcaaggagcacagaagtgggttcgaaacatcagctacttccggctagatggtagcacccctgcctttgagagggagcggcttattaatcagttcaatgatcccagcaacctcaccacctggctgttccttctctctacaagggccggatgcttgggtgtgaatctgattggtgccaaccgagtggtggtgtttgatgctttctggaaccct

SEQ ID NO: 138866 - DNA, 871 bp, Homo Sapiens
catggtcacccacatgcgacctgatgttgtccgtgacgattctcagggagtgagcacgtaatacaccagttctgggaatcccgagtccttttatttcgaccactattctgggtagttttatctttctggttcccctgttgaacttgtctgtggaactagactgacgtgtgaggttacgaggagttctcgtcgtttgaccgtgaaattggaacggaacggaagggcctcgaattaaagggcatgctgtcgtatgtccccccacgtttccaccaagctcaataacacacacttgaggttccaggccatcttcatctacaggtattaacgcctgtctcatcacccactcctggattgcatctgtgatatgagggacaacttggacagttttccccaagtaatctcctttccgttccttgttaatgacatactggtatatctttccagtggtcagattattgtccttggtgagtcggatgtcaaggaaccgctcatagttacccaggtcaaggtctacttccccaccatcatccagcacaaaaacctcaccatgctcataaggagagaatgttcctgcatcaatgttaatgtaggggtcaattttgattgaagttacatgtaaaccacatgacttgagtattgtgcccacactgctggcaatgattccttttccaattcctgatataacaccaccagtaaccagaatgtacttcattttactctttgacctgcggccggcttcagatcctcccgtcagcgacagagctgggccggcgaacgcgcgcggagccccggacagccagtgaacaaccccgaccgccctcgtgccgaattcgccacccaggcctcgctaccttaaaccgctatagtactg

SEQ ID NO: 138867 - DNA, 891 bp, Homo Sapiens
  misc_feature (575)..(608): n is a, c, g, or t
ccaaatttataacccaggggatctaggttaaaactgccctccagcccttatcatttacccaattaagttaatcaccaatgcattaaaaaagttacttggcaatcctggcagaattagggcatatgttgttgtaaaataaaaacacaaacctggttttgtcaaaactgggcagtgtaaaagaaggcagcactggaagtgtatgaatcgtctgtaatgccaagtaccctccataaactcttaaagtggttaggctttgggacccattgttttgaaatcttagacgtatacactttttcatagggctcacacaacctatgattatcttcactcagccaagttgaacttcagctttagcaattcttatataaactatgtctctgggtctacaggatagtactaataattcaaaccaaactaatagacaagagaccacttaggtttagtgttaccatagcagccttttataagtttactaacaactttagcctaatcccaataaagcctgataacagtcataagaaatcattaggaagtttactggggggtaccattatacccatgcctttacgagtccnnnnnnnnnnnnnnnnnnnnnnnnnnnnnnnnnngttaagagtgaatttggattgcctgagtaacagctgtctggcaaactggacatgatggcgttctcttttcacagatcttgttggcacattccatgcagaagaggttgtggccacatggaactagggcagcaataacctcattctcaaagcaaatcacacagtcgtgctttcgtcttgattctggaggtgagctagaggtggaaccaccattggaagaggagtaactattggtaccattagaaaaagcagggatatatattggaaggccaacatggttgcctgt

SEQ ID NO: 138868 - DNA, 778 bp, Homo Sapiens
  misc_feature (39)..(39): n is a, c, g, or t
  misc_feature (55)..(55): n is a, c, g, or t
  misc_feature (87)..(87): n is a, c, g, or t
  misc_feature (117)..(117): n is a, c, g, or t
  misc_feature (127)..(162): n is a, c, g, or t
ccatagcagccttttataagtttactaacaactttagcntaatcccaataaagcntgataccagtcataagaatccattaggaagtntactggggggtaccattatacccatgcctntacgagtccnnnnnnnnnnnnnnnnnnnnnnnnnnnnnnnnnnnntaagagtgaatttggattgcctgagtaacagctgtctggcaaactggacatgatggcgttctcttttcacagatcttgttggcacattccatgcagaagaggttgtggccacatggaactagggcagcaataacctcattctcaaagcaaatcacacagtcgtgctttcgtcttgattctggaggtgagctagaggtggaaccaccattggaagaggagtaactattggtaccattagaaaaagcagggatatatattggaaggccaacatggttgcctgtactaggtgggtcgctcctaaccctccgagcaagtggatgttctatgctctcaggaaatgtaggagacagacgaggagtagatggctgacttcctctgcgctgagtcttcatgttaccagaaggatcactcccaaagccagagagtgggttaactggttcaaatggagtccagatagtttgagcagatgttggtaaagagtcaaaggcaggagagtcaactgctaggtcttctgagcctacagatggtagtgtatctccaaaccagaagtttcctgtgctaaatgggcttgttggactaaagtcagccagcctattgcttccaaagtaggaatccc

SEQ ID NO: 138869 - DNA, 922 bp, Homo Sapiens
  misc_feature (570)..(570): n is a, c, g, or t
aaagaacttcaaaaatctgattacatggagtatgctgggagacagtactatttgggagacaagtgtcaggtttgcttggaatcagaaggaagatattataatgctcatatccaggaagttgaaatgagaacaattcagtaacagtcttcattgaagaattggcggaaaagcatgttgttccactggctaacttaaaaccagttacccaagtgatgtctgttcctgcctggaatgctatgcccagtcggaaaggaagaggttaccagaaaatgcctgggggttatgtcccggaaatagttatatcagagatggacataaagcaacagaagaagatgttcaagaaaattcgagggaaagaagtttacatgactatggcttacggcaagggagaccccctcctcccacccaggctgcagcacagtatgcattatgggcacgatcctccaatgcactactcacagacagctggcaatgttatgtctaatgaacattttcatcctcagcatccatctccgagacaaggtcggggatatgggatgcccaggaattcatctcggtttataaacaggncacaacatgccgggccctaaagttgatttttacccaggcccaggtaaaaggtgctgccagagctatgataacttctcttatagatctcgttcatttagacgtagtcaccgccagatgagttgtgtgaataaggagtcccagtatggatttaccccagggaatggacagatgcccaggggcttggaagaaactattactttttatgaagttgaagaaggggatgagactgtttatgcaacttttcctaatcatgaagggccctctaccattggttactgattctttaggatactgagtttggaaggcggggaccaaaattaggcaaacagacttttaatttaatagaggtgta

SEQ ID NO: 138870 - DNA, 1134 bp, Homo Sapiens
agagaggaaaaggaaaaaaatggcttgtgatagacattttttggacccaccaaaagccttgcatatctgaaaagaaaattactttggctttctggaaacattaaactgcattcaatcaaaaaaacagactaaattataacacatcacaaccagtaagcttcatagcagccgcagtaggagtgatggcatttcgtgttggtgtgcgcgtacacgtggaaaggaagtttgcagggcaacaaggtcagcaagaaccagacctcagattgtttcactcaccacagaagaaaaacacccatggcaattcccttttggaaagttaaagcttatctcctcggaatgaagttccaaagacatccatttccacagaagatggaggaaaaaagacaattacatttcaaatctgtaagtcacaaatagacaggcagagttctggcgaggcgtgtcacagttaaccagtttgaggacatcagtgtcttcccccagagtctgtaaacacgcagccagtcaatttcctaatgaatgcttccctttaacaaaaggctgctgtcagtcctgcctgcaggcctactagagtcttccagcagcacatctcagtgggagccatcagattttccaaaaaatcttctttctatagaggatgtaggcaatgagcacccagagggcagtgtcgacgatgttctgagtcaggtgctccttgtgggactggttgtccttcagcttccactgaaaggggaagtagttctcaaacacctcgtggccgacgtataccagaatggaattcattcctggataaaagaatggggttcctgtccacagccccttcacatccacaactgggtacaggaccagcaggatgaagaaggcaaaagaactgagcgtagtgacatacgaaagggaccagagatttttgtttactggaataaagccttcattttcagaaaccttcgtcagagcaacagaaatgagcccaagaatacaacaccaagcagtgaatcgaatcaggatgtctttggtccgagccttgtaatacaatagtatttttcctgcctgaactcctaaaaaggccatcacgatggagttgatggtgcccaggatgccctcggggtcataggccacctcggtgtggtaaagtac

SEQ ID NO: 138871 - DNA, 729 bp, Homo Sapiens
gggccttttgccggggaagggggggtaaagccaaaccctgggggccagttttcctcacaccgggaaattcccacagaacaccccggaaggtgaggattgcctcccatgacaaatgccggggggtttctgtttgtcctttgtcccggaattcaccacctaggaaacaagttctttagctgtgtgatgacaagtaggaacggctgcttccattggggaggatcatctgaaaaagacttactccaatgagagtttttaaaagttttcactactatttattttgaagagttttctgtaatggaactatttcttctgaagatttcagaaaagcttttgatgtctgttacctcaccatgtctaagaggtggaaggaactgagagtcatcttcccgctcatttcacaagtgaggaagccaaggcccagacgggccaagggtcttgcccagcatcacccagcagggatggctcagctggacccacaggcaaagacagtacctgccctccccacagccactcccctgggcagcggctgccatccagatacacagagatagggaggaaggaagatgatggacagacaggcagatacataggtaagagggtttgggaataacacatagatattttaacttttcgagagaggaaaaggaaaaaatggcttgtgatagacattttttggacccaccaaagccttgcacctcgtgccgcctcgtgccgaattcggcgcgcggt

SEQ ID NO: 138872 - DNA, 1063 bp, Homo Sapiens
  misc_feature (84)..(127): n is a, c, g, or t
gccccccatttctttaaaaatcccaaggaaaaaggctttttctttctctggggaagggacccaaatttttttcaatttaaaggnnnnnnnnnnnnnnnnnnnnnnnnnnnnnnnnnnnnnnnnnnnnggggaagttaaaaaaggccaaggcccccaagaggggtctttcccattttcccgtgggctttaaattttcaaattgtccaaggcggaaaccaaaaacccggattctttaaatggattctggcccaaaagccagttccccaaaaaacccagagtgagggttttccccagccccttcaaatttttctgcacccaatgtttcacaaccatgacaccccaatggcagaagcagagttccagtgccaagttcaagttttcctgaatgatgaagggtgtaagtttcttcttgttgattgctctttcatcaatggtatcaggaactgaaaggttaatcattttacaaagcacaattccatcaccaacagctttgaacaggtcatcggtgttagggttcattggtataacatgtctacaatcaggatcattttccaaagctttgtttatccagttaacaaaagcatatttttcttcctctgagtaagaatgctgtgttccttcgctggacaactctgaagttccacccagagcacaaataccttctttcctgttgattgctttgcggaaggtcttggcaatatcactactttttacctcttgaaaaatataaacaaattcgtcaaaacttattttcccatctttattcctgtcaccatccagcatgagtttctgaataatttctctcactttatatcctggtaatggcatattagcttccttgaagagctcatgaagttcatagtcacaaatgaatccgttgctgttgagatcaacttttgcaaaggcctctttgagttcatcaagctcatctttggaaatctgagtggtagccatctcatccatttaaagatgtaaagtcgcagagtcctgggtctggcccgactgccgccgacccctcgtgtcggattcgccacccaggcctcgctacttaggaccgtaatga

SEQ ID NO: 138873 - DNA, 785 bp, Homo Sapiens
  misc_feature (24)..(24): n is a, c, g, or t
  misc_feature (121)..(121): n is a, c, g, or t
tcaaaggttcaccaacatggccancccaatgggcagaaagcagaggttccagtggccaaagttcaaggttttccttgaatgatgaaggggtgtaaggtttcttcttgttgattgctctttncatcaatggtatcagggaactgaaaggttaatcattttacaaagcacaattccatcaccaactagctttgaacaggtcatcggtgttagggttcattggtataacatgtctacaatcaggatcattttccaaagctttgtttatccagttaacaaaagcatatttttcttcctctgagtaagaatgctgtgttccttcgctggacaactctgaagttccacccagagcacaaataccttctttcctgttgattgctttgcggaaggtcttggcaatatcactactttttacctcttgaaaaatataaacaaattcgtcaaaacttattttcccatctttattcctgtcaccatccagcatgagtttctgaataatttctctcactttatatcctggtaatggcatattagcttccttgaagagctcatgaagttcatagtcacaaatgaatccgttgctgttgagatcaacttttgcaaaggcctctttgagttcatcaagctcatctttggaaatctgagtggtagccatctcatccatttaaagatgtaaagtcgcagagtcctgggtctggcccgactgccgccgaccaacgcactcagacaacttctgcacctcggaatctttgcagctgtggctctaaagccagcgctccctccccccc

SEQ ID NO: 138874 - DNA, 587 bp, Homo Sapiens
ggatattatagcttcttatttagaaagaatatcatttgttagtatacagttattataaacagttaattgtttacattcattatctgtattcaaagaatcttgtcaggtctgaacgctttcccatactgcttacattcatagggtttttctccagtgtgagtccttccatgcatttgaaggtgcgaggctgatctgaaggctttcccacattgcttatattcatagggcttctctccagtgtgagtcctttcatgatattgaagggaactagaagaaatgaaggctttcccacttggcatacactcatagggtttctctcccatgtgagtcctttcatgatattgaaaagaagtggaagaaataaaggcttttgcacaatgcttacattgatagggtttctccctagtgtgttctttcatgatattgaaaagaactggaagaagtgaaagctttgccacattgcttgcattcatagtgtttccttccagtgtgagtcttttcatgtctatgaaaggaagtaggcaagctgaatgcttttctgcattctttacattcatagggtttctctccattgtggatacttgcat

SEQ ID NO: 138875 - DNA, 729 bp, Homo Sapiens
tgcctacctgggcgtatgtaggacacagggtctgggctgctgctgaatgcatgctccagggaacacggaaaacccctgaagaggtacacagatggtaggcccaaatactcagccaggatcaccccacaggttaaggctgggtctgtgaaaagagcatcaaacttgctctccttaaagaagttcagggtgtccctgtcctgcaggaggctctggcagttgatgaagtacaggccaataacaatcatgttattcctgtactctgtctgaggagcagtcaggaatgatcgctcagcaaagtgattgtttccaaatgattggtaacggttcttcagctcttcttggtcatacggcactggatagatttttcttgtgtagtatttggattctttcaaaagcaaattaacttcaggcaccaccactacaatctcatgaccccggtcactgagaacctcaactatatccttcatactaagccagtggcttccgtcctgagggaccaccagcagcttgtcacctacaaccatgccccaaagtgctaagaagaaaacccctgcagaaattctctgaaatgcgcgaaggaggcaggccatcctggaaagagttaaagtaacaacggtaataaagagttttcactctccaaatcacagggctcctaggtattttccctaaactaaccactgcttttcacaggtcctgtctacctctcccttgctctgaatttaacccttt

SEQ ID NO: 138876 - DNA, 1398 bp, Homo Sapiens
gagagtatgaagtcgacggcgcgccgaattcggcacgaggtttgcgaacggagcagctgctgcagcagggcccatggcggacacccagtacatcctgcccaatgacatcggcgtgtctagcctggactgccgtgaggccttccgcctgctgtcacccacagagcgcctctatgcctaccacctgtcccgtgccgcctggtacggaggcctggctgtgctgcttcagacctcccctgaggccccctacatctatgctctgctcagccgcctcttccgcgcccaggaccccgaccagctgcgccaacatgccctggctgaaggccttaccgaggaggagtatcaggcgttcctggtctatgccgcgggtgtttactccaacatgggcaactacaagtcctttggtgacaccaagtttgttcccaacttgcccaaggaaaagctggaacgggtgatcctagggagtgaggctgctcagcagcacccagaagaagtcaggggcctctggcagacctgcggggagcttatgttctctctggagccaaggcttcgacacctcggactggggaaggagggaatcaccacctatttctctgggaattgtaccatggaagatgccaaattggcccaggactttctggactcacagaacctcagtgcctacaacacccggctcttcaaagaggtcgatggagaagggaagccctactacgaggtgcggctggcttctgtgcttggctcagagccttccctggactctgaggtgacttccaagctgaagagctatgaattccggggaagccctttccaggtgacccggggggactacgcgcccatcctccagaaggtggtggagcagctggagaaagccaaggcctatgcagccaacagccaccaggggcagatgctggcccagtatatagagagcttcacccagggctccatcgaggcccacaagaggggctcccgcttctggatccaggacaaaggccccatcgtggagagttacatcgggttcatcgagagctaccgcgacccctttggttcccgaggagaatttgaaggtttcgtagctgtggtgaacaaggccatgagtgccaagtttgagcggctggtggcgagcgcagagcagctgctgaaggagctgccctggcccccaacctttgagaaggacaagttcctcacccctgacttcaactccctggatgttctcaccttcgctggctccggcatccctgccggcatcaacatccccaactacgatgatctgaggcagacggaaggctttaagaacgtgtcgctggggaatgtgctggctgtggcctacgccacgcagcgggagaagcttaccttttctggaggaggatgaccacgacctgtacatcctctggacggggcctc

SEQ ID NO: 138877 - DNA, 1024 bp, Homo Sapiens
cttcttaacaatcctggaaaaagaggagcaggacaaaatccaacaagtgcaaaagaagtatgacaagtttaggcagaaactggaggaggccttaagagaatcccagggcaaacctgggtaaccggtcctgcttcctctcctcctggtgcattcagatttatttgtattattaattattattttgcaacagacactttttctcaggacatctctggcaggtgcatttgtgcctgcccagcagttccagctgtggcaaaagtctcttccatggacaagtgtttgcatgggggttcagctgtgcccgcccccaggctgtgccccaccacagattctgccaaggatcagaactcatgtgaaacaaacagctgacgtcctctctcgatctgcaagcctttcaccaaccaaatagttgcctctctcgtcaccaaactggaacctcacaccagccgtcaaaggaaggatgaaaggttttagagctgtgtgttctttctctggctttgattcttctttgagttctcttacttgccatgtacaggaccattatttatgagtgaaaagttgtagcacattccttttgcaggtctgagctaagcccctgaaagcagggtaatgctcataaaaggactgttcccgcggccccaaggtgcctgttgttcacacttaagggaagtttataaagctactggccccagatgctcagggtaaggagcaccaaagctgaggctggctcagagatctccagagaagctgcagcctgccctggccctggctctggccctggcccacattgcacatggaaacccaaaggcatatatctgcgtatgtgtggtacttagtcacatctttgtcaacaaactgttcgtttttaagttacaaatttgaatttaatgttgtcatcatcgtcatgtgtttccccaaagggaagccagtcattgaccatttaaaaagtctcctgctaagtatggaaatcagacagtaagagaaagccaaaaagcaatgcagagaaaggtgtccaagctgtctt

SEQ ID NO: 138878 - DNA, 2000 bp, Homo Sapiens
tgcagggagagagaactgttgtacccaagggtcgttggcctcatagtcattgaattcttcctcctcgatgttttgggagacggagaaaaagctgttgatccaaggctgcacctgtggcttgatgcctgtgctgttgagctccgtcagcccttcctccagaggtctcggaatttgttggacacggcggccaagtcagaaagccagctgtcaaacttggcctgggcctgctcccctccaatgccctggctgaagagcttggtgcagtcactctccagtggtcttctttcagagtggagatgttttcactgcagacttccacgttgttcagagtcaccgggaaggacatcttcgcctcgtcagttctctcgatgccttttgtgtcaaatttgccttgctggaggctgctgtgcatgatgttcacggcacttgtcaccccgcgctggatgtcctggaaggtggtggcaggaaagcccatccgcagcttattacacagaacatccctgaagtcagactccagctctgtggtggcgaggttgatcatggcacagagacagtcaatgctggagctggacagagcccgcccaatgcacttcttaacaatgtagaagacatcatccaccatgctggatgtcagctggcccttctcataggtgtccagagccacagccttattgacagtctccctcatgaagtactcctccatggtaacatataagccaattagctcctgcatggtacagctcaaaaggcagttattgaggagtttgtccagacacttctggtgctcttgctttacttcctctgaggccatggagtctcccacctcaaaatcagagctaatcctcttcttgaggaagcgtaagtatagctcactgcgggcattcatcagggtgacctcagtcaggatggggtccagttctcttggttcgattttttctgttgtagaatttctcatcaggttgttctgaacatgccggaactgctggtggtagtccctttgcttgatgaacttgtctaccaccttctccacctgtctgtcacattccacctgcagatatttgatcagggtatagagtctccctggcccataataggtctccactattggctggtgggtctccacaaatgcgggcaatcccttcaaacagaagagtaagtgtatctgcaaagatgactgcagctctccgatcactcatgtctgtccccagcaccatgagcagattctcctcagctttactggccacctgcttgcaaaggtactccgagaactttcttaatccctcctcatgcaaacccagcagtgggaagatcttgaagaagcgctccacctggggcagatcaccttccttggtggcaatggcaaacttctctgccacaatggctttgagacgttgctcagcttcctgcagcaatttcaggttggcatcaatcatgctcccctctttgccctgtcggctgagctcaatgaccgacttgtccaggcacaagtagcgatgaatatgtgctgcagcctgctcataatcttcactcctcaaagcagtctgaactccatccatgcagaacttcaggtccaagatgtcatcagctctctgaatggcctgatagaggcggttcttggccaggtcaagctgacgaactttgctggacacattctcagccaggttgcaggtaaaggtgatcattccagccagctgctttgcatctccctcaatcagctgcagattaggacccattcggtggagagtgaccatcttactttcaatggtgttttgctgttccaaaagagcatccagctctctctccaccactttctcctcgccgcagagccgttcgtatacagcctccagctcctgcagctctgtcagggagcgaatgagctcagcggagatttcggagcagcggccacctcccaccccctcagacggctgctgcacccctgacagcttcggaggcgaatcaggtccgccatcttgcctcgtgccgattgacacccagcctga

SEQ ID NO: 138879 - DNA, 823 bp, Homo Sapiens
  misc_feature (72)..(72): n is a, c, g, or t
  misc_feature (78)..(78): n is a, c, g, or t
  misc_feature (84)..(84): n is a, c, g, or t
catcagtcgtcccagcacatgagcgatttcctcagcttactgccacctgctgcaaagtactccgagacttcntctatnccctcntcatgcaacccagcagtggaagatctgaagaagcgctccagctggggcagatcacttccttggtggcaatggcaaacttctctgccacaatggctttgagacgttgctcagcttcctgcagcaatttcaggttggcatcaatcatgctcccctctttgccctgtcggctgagctcaatgaccgacttgtccaggcacaagtagcgatgaatatgtgctgcagcctgctcataatcttcactcctcaaagcagtctgaactccatccatgcagaacttcaggtccaagatgtcatcagctctctgaatggcctgatagaggcggttcttggccaggtcaagctgacgaactttgctggacacattctcagccaggttgcaggtaaaggtgatcattccagccagctgctttgcatctccctcaatcagctgcagattaggacccattcggtggagagtgaccatcttactttcaatggtgttttgctgttccaaaagagcatccagctctctctccaccactttctcctcgccgcagagccgttcgtatacagcctccagctcctgcagctctgtcagggagcgaatgagctcagcggagatttcggagcagcggccacctcccaccccctcagacggctgctgcacccctgacagcttcggaggcgaatcaaggtccgccatcttggtccccctcgtgccgaattcggcgcgcctcgacttcatactcttcccccctta

SEQ ID NO: 138880 - DNA, 1557 bp, Homo Sapiens
tttttagctggggggacctcaggaatctactagttgaatttcttcattttccagaagaggccctgaggcctggagagggcaagcagcctactgaggctgcacagcttgttatatctgcttgggggtcatggataggggcagaggggctgcagtgagcaatacaatgcaggggaaccttgcacaccacatggtgagttacattcagacccccctgcaaatgaaaacttcccacccctgggctgtttcccgttgatttgtcacagaagtggacaggtcctggactgagcttgtccatgggcttccctcaggaggggaggaggaatgcaggagtctctttacttcccagttcgggaggccatctggatggctttgatccactctgtgcgctccttgggggtggctgcttgcaagaaatagtgcacttcatctgctgtgatgatctcaaaaaggttctcttcctcactcttcctgccatttgagttgctctccactgaagtcaccacacagcctctcaagtgaattgctcccaggggatcttctggcccagcagggtcatagtagtgcaggtaggcagggtcttctctcaagatgaacttcctcactttccagtttttccttctatgcccctgcttcagtaaacatccctgcttgataatgacccctctgaattcgttctttcagaatcacatcatcatcactggaattctccttcacagaagaacccactgtctggaaagtagtagaaggcatcagggttgtccaggaaagggtttttcagcagttcccatccactgcactcttggacatgtctccagcaggctgcagatacccctcattgagcagcgatgaagcaatcatgaggccttcctggcgattcctaacagactggttggataccagccaatcaatgacgcagttacctgtgaagcagtgattaaaaatcttcttgtccttctctagattcagttcttttattcctttttcagtgtctttcatggacaaatataaggcacctaagtcaatggtttctggcagtcgaatggacctcctggtagatttcctggcaaatttctggcctccttcaatgcatttaatggccttcttgatatcccgaacccaggcatctctctcctccaggaaggctgcctggaagaagtggtcctgctgtttggtcgtagtgatcttaaacacaaacatccttttgccaaagtcttgacaagggctagtcagagtgctccctttcagcgggatcattcctttggggctgttgtcacttttcttcttatagaattcaattccatcttctaacaatacaacccacatgggtttccacgtattgaacacgctccccttcttcacaaggtagccctctctgatccgctttggttccatgctggctggacaggcagatgcaaaggtcactctcaggcaactcctctcagcagctgggcctcctctgcatgctgaggtggctgtgggccgccttttctacagcaggtcgctttcacaatttcccttctgctggcggtcgcatgatcacatcctcttcccctcccc

SEQ ID NO: 138881 - DNA, 1348 bp, Homo Sapiens
tgtagtagactgattttgaccgccacaaagagtaggagttgtcaaacttgaggagatagactcctctccctggatattgatggctgccagcatacacctcctcatgacagtcccgtcggtacacaggcacaatctcatccagcaaaagcttgttggcattctttttggctttctcttcacaaccgatgttttcttcttcctcctcgtcgtcatcgctggactcactgacatgcacgctgacagcagtgtttggagagtctgtccattcgaaatccaccccaaacccaatgtcataattgtctgtggcaaattcccaagagagatatgatcctttcttcatgggtgggtactcgaacagtgacccacttctcctcggcccactgtaatcacggaatctgcatcctgctgaatcttctctttgaagtctttgatctgaggtcgtgtccacatggatggagctgctattactggaagagattcttttggtccattctccagggcttcttctgcagcttctggttccagttctttttcggagctgtcagtgtgtgttttggcctgtccattaactgacatcatattacttggtacagttgcattcacttttgatgatgtaggcaaggaagacccagccactactacttcctgttgtttctgtaatgctgcctgttgctgtgcaagctggacttgatacaactgctgcatgtactgctgatagtgttgctcctgcaactggcggatgagaatttgctgctgttcgtagttccctggatactgttgggctgcatactgctggaactgcacggcagtctgggagtttaaagctgccattatctgctgcttttgctgctccaaccgaagcctttcttcttctatccgtctcctttcctcttcctcccgtcgaagcctttcctcttcttctctcctacgtttctcttcctccttttgcagacgttctctttcttcctcttcacgccgccttcgctcctcttcctccttcctttttttgtcttgctcttccttctctattttgtgggacgcaacatatgttgaaaagagatggcaacacctatttaagagcttgacaaactccaccatggcatcctctttagacatgtttcccagggctgcccattctctcctcctgtcattccccaacacatcaaagaatccaacctcaggacaagtgtctggattatatgggcccataagaacttgcttatgcagtgccacaagcttcaatttttcttcataagttggatgaaatgctttgccatctttttctttgaagaagcgcagtgccaggccgtacaactcctccaggccgaaaccccagcgctgctccagc

SEQ ID NO: 138882 - DNA, 587 bp, Homo Sapiens
ctttcagaaaattttgcttccttgtgtggtgctttaaaatgttagtacccccaggttcaaatccttttccattgaaacctcctggtgtcagttgataaagaatgatgttttgaagagcatttttgtcccgtatcagaatttctttttcttcactagtcattcccttaagagccatcattggttggcacaaataatgtccagtctccaggttgtgtcaggagctctttcaagtctgcagcttcaagtaggctgaggaaggtgctaaagcgcttatcttgttttaacttttcatggagggatttctctgctggcttgatgatctcgcggaatatgtgaatcgcaccgtttctcccttgcttactccctttctccatgcatgaattttcaatgcagacagctgtacgatatacgaagactctgagctgtttgcctccgatggtttccagtatttgcccgttgtaaagctcattaaggccaacttttactttcaatatgtgattctgcagaattaatttaaggaggcgctgatccatgctgagagtatcatcagaaaatgcattattcacaggtgccagcaaagtgtattc

SEQ ID NO: 138883 - DNA, 903 bp, Homo Sapiens
ggagtcacaggaatacgccagtgatggtgcagctctctctcagggaagacaggtacaggtatacagacctctggtgtccacattaaaatactgaaatcctccccattatgttttggggcagccaggttgatccaatcctcccattgggtagaagtctatgtttcctaatggctccttgtagcccagtgcatcagtgtcggaatggatgacatcaacaaactgcgcatcactgggatctaatctgtcttggtgaggtttcccgttgaataaagggcctgcagggtcgaggcctgtaattctccccagccatccatcgtacatctctccaacaaacccagatatgtgggctcctagacttactccgatcatgtaaatgtcatcaagagaagctccttctgccaacatctggtcaataaattccttcaagaccatggctacttttctggtcttactagaggcatgggtatatattaaagttgtagctcctcgattccaatcaacaacaactacgttcatgtcttcaacagagagcaaaccctttactaagtcatccatccaaacaggaggggagcctgttggcctgaatccatggacaatgaaggtggttttcttggtcacattcaagttcccaaaagctgaggagttgatggtttgtgcgcaggtcaggtttttccttgtgtagagcatcagcctcacatttagtcccgtaccaaccactgcactgtgaaagctcagcctggtgaatgaaggacatgtttcttctgcgtctgatcttgacaagcacaacaaactgatgaataagtagaatctcaacatatggaaactggagagatcgtgtgtcacattcacaagaatgatttacttcgcagaggcttaagagtttccactgtgggattttgctca

SEQ ID NO: 138884 - DNA, 1117 bp, Homo Sapiens
  misc_feature (97)..(156): n is a, c, g, or t
aacgcacccagcagttgactgtgagcgtgtggcagaagggcttcacctggggcaaggtctactgggaagtggaagtggagagggagggctggtctgnnnnnnnnnnnnnnnnnnnnnnnnnnnnnnnnnnnnnnnnnnnnnnnnnnnnnnnnnnnnccggctatggggatggatatgacgactgggaaacggacgaagatgaggaatcgttgggcgatgaagaggaagaagaggaggaggaagaggaggaagttctggaaagctgcatggtgggggtggctagagactctgtgaagaggaagggagacctctccctgcggccagaggatggcgtgtgggcgctgcgcctctcctcctccggcatctgggccaacaccagccccgaggctgagcttttcccagcactgcggccccggagagtgggcatcgccctggattatgaagggggcaccgtgactttcaccaacgcagagtcacaggaactcatctacaccttcactgccaccttcacccggcgcctggtccccttcctgtggctcaagtggccaggaacacgcctcctgctaagaccctgagccctgacatctgcccccagccccaaccctcagatgcttcacttctttggaattccaggactctcaatggggggacgggatgcctggcctaagcacctggagcaggggaccccatttccactggtagccacctccccattgctgtggccccctgaaatctcactcagtgctgttgctccatctactgccctaatggggctcttttcccacctcctgctggtttcccgagggaacttctgaccctggagtccatgagggctcctttcctttttgaccacgacctttggcgcccaggtctggcactctctggaataagggcccgatgcagcattttcttggccagtgtggcaagaactcaggaaaaaacagtccaattacgccctaagatcatttgctgtccttaaaacccccaagttcttcttgcacaaatccatctggtggccaccttccgggttttaaagactacccaacaatcaagttagctctggcatggggaataacaatccggggttccgggcataagcggtacagctatcagggcc

SEQ ID NO: 138885 - DNA, 1525 bp, Homo Sapiens
agctcacagctgtggtaaagaaagtttcatatcttatgctttgcttcaacagaacctagcacatagttgggggtgggagggtgagaagggagaaatgctttggcctcccattaatgcgctggggaatgggctccgatgattcccaccttacaatacatcttactaaaaacaatcacaacatgagataaatgtccatttgataagtgatcctcaggaaagatgaattctgtgggatatggacttggggtgtctgcatccctctcaagtgtcttagtttctgattaacaataaatataattttaaaaggcccccatcttgcccatacttgacaacatctctcagaaatggtacagtgaagaaatggttggcaatgttccccgcattgaacatcagtcgtccgttctgagcttcgtttttgagctgttgcgcagggaaatctcactatattctaccacctggtaaactccatccactcggcaaaccactccaaactgtttctgtaggtttcgttttctctaccacctttgctccacagtctgctcctttctgaatgcagaaatccaatgacccgtggtctccacttttactaatatgttgtcaacacaatagacatgaatgctccaaatgcctctttgctccatatcctccacaatattctgggctgcaagtgcccgataaagaccaccattcccatctggagccatagaaactttttcttctcttccaaaataattttcccatcaaaactcatggcggggagcattccttgctgaaaaaagattacattctctttttttaaaccaaagtacttgtgcttggtgaagaactcctttgtagattccattgttctgccactggtcattatataccatggaataatgcatttgttgccataatattttttcagcaacctgctgtagcttcaggatacgctctgcttgaatctgaaaaagtgtcttacgggatggcaaaccgacatgcatacatcccgcttaggatatgcaacgccgagtcttgtcccctgcccaccagctagaagaagaactgctactgttattctgagaaatctggaaaagtccttcactttcccaggcctggagctgatcttgatcccttgtagcactgcctaatacctctcgaggcacaggttccattcgtgcatccacattcttttggtgagaagactggttaaaaccttcaatggccttttggaaaaagaagttcagctcctcaaagttcatggcctggagctctgcataaagttctacctgttgggcttcttcaagctcattccagaaacgtagtaggtgctcttgcccagctttggacaacgtgagtttgaggtcattaatgttcataatgctctaatagccaagctttgtagaaataggggtgtaatgtatgtacctgtaaacctttctcggggcgaccgcagctacgaccgtctccagctccttccgcgcggccactcatcccccggccgtaatggccgaattcccgggcatatgtccggtaccgtcgactg

SEQ ID NO: 138886 - DNA, 2037 bp, Homo Sapiens
  misc_feature (20)..(21): n is a, c, g, or t
  misc_feature (55)..(55): n is a, c, g, or t
  misc_feature (121)..(266): n is a, c, g, or t
  misc_feature (320)..(320): n is a, c, g, or t
aaaacctttttttccctttnnccagggtgttcacgcgcccatttttccctggctnttaaggctttccccaaggttgggctgggaaattaacagggtgcccaggcccacccaagggcgtggnnnnnnnnnnnnnnnnnnnnnnnnnnnnnnnnnnnnnnnnnnnnnnnnnnnnnnnnnnnnnnnnnnnnnnnnnnnnnnnnnnnnnnnnnnnnnnnnnnnnnnnnnnnnnnnnnnnnnnnnnnnnnnnnnnnnnnnnnnnnnnnnnncggccaaaaaaacaactctttaaaaatgtactttagagcaacatgcaaagcttncctgctcagcaatcccaggttggggccccctgtcttcctatcgtcctacccgtcacaaccaccactgcaggcttctgatgctctgttttcctcctctgtctcagttcagttgctctgagttagagaggagctctctgggactggagctgactgcgccctggcccatttcctcactaccatcctcaagctcagatgctgacaggaaaatactgcctatgcctgaaggggcatcccttagcaggcggcccagttccttctcataacatttggctgcttgcagcagatctccattctgcttatgaattaatccttgaagataccaataatttggtgcattttgtggaagcagattttcggatacattctgtggttggtctttgatctcttccttgtcagttgattttttgcttatggacaaaccctctaaaccatgttgcacagcagtgtcttcagacttcccattatatttctgaaggttgcagtagcgctgatgggattgttgcttttcagcatcagggacttccttattgaatggtgtctgataacattccgtctccaggaactcagcgagatcggagtatgcattcagaggattcagtcccttctcaagagctttattcgaatagtccatagcatattgctttagtgcttcaatcatctctttatttccactagcttcagattctcctgtattctgcatttgtcttacttttgccttgtagcagcacccaatctgggtgatagaggtagccattgtttggtgtggattccaacacccgttgaaacagttcaatagctttgtctaggtcaccttttcttctgtaaaatttggctgcactgcggaggacatctgtttggcaaggagacttttccaaggcttcttcaacaaactgctctccttcagcttctttattcatcttctgcagtttcaggcccaagagaaccttgacgtattggttatcaggactcagctcaaatggcctgcttcaaaacatcagtagagaactgtttttctgggtgattatccagatggtacatcgcaattgccagtccagaggagaattctgggttgttgggcttttcttccagagccttctcaaaacacaccttcgccctttcatttcttccacacttcagttgtgtccacccttcctcacagtcaagttcagaatactcaatactgtatggatttgaaaatttcttgcaggtttgtttcaccttatctacataaatctgagcatctgagagtctgcccaagtgatagtagacccaggcgtagtttccccaagtgactagacttctgatttctgcttggtcagcatgttcttgctggattaactcttcagcttgccgtaagcattccagggctgcctcgttgttaccatctaggtgttttatgtaggccaacaagttgtacattgtagctttgaactcagtgtttaaaaattcaatctggttacacactctatcttctagatcccttgagacactgtcttccttgaataagttccaggtgaaatggcatttcagctgtggaaggattttctccagggaattcttggtgacctcactcatgatggctgtttccctgcagttctgaaaagctggggtcccggttgattttgtttttagcttactgattccaagcaaatgctgaagaggtttccacccagggtgctgttaggtctgtgcttttacgaaaggggaaaggaaaagt

SEQ ID NO: 138887 - DNA, 584 bp, Homo Sapiens
ttttcttcaagggcgttaaggatcgggttaagggaaagagcgacccttaccatgcgaccagtggtgcgctgagccctgccaaagactgtgggtctcaaaaatatgcttatttcaatggctgctcctcaccaaccgctcccctctcgcctatgtctcctcctgggtacaagctggttactggcgacagaaacaattcttcttgccgcaattacaacaagcaagcaagtgagcaaaactgggctaattacagtgcagaacaaaatcgaatggggcaggcgggaagcaccatctctaactcccatgcacagccttttgatttccccgatgataaccagaattctaaaaaactagctgctggacatgaattacagccactagccattgtggaccagcgaccttcaagcagagccagcagtcgtgccagcagcagacctcggcctgatgacctggagatctagatacaggcttgaaagcatcaagattccactcaattgtggagaagaaaaaaggtgctgtagaaagtgcaccaggtgttaattttgatccggtggaggtggtactcaacagccttattcatgaggctt

SEQ ID NO: 138888 - DNA, 595 bp, Homo Sapiens
  misc_feature (37)..(37): n is a, c, g, or t
  misc_feature (571)..(571): n is a, c, g, or t
cccttaacttttgaagccctacagtaacaaaaaaacnaacttacagactcccaggatgtgtgtttttttcttttaatgccaagcacaaagtgtacatcataaaattcatatttggtgtttggcattattttaataggtatgatcaagaccacaaatatcttgccataaaaatattctactataataatgaaaaaatatatcattacatcatcagtgactcgaataaaatatggtatagatatggcattttcaatgaaagttggaagacacaccacatttgtactagtcttaatataggcacagtaagaagaacagatatttccctctttggctagtgatatgcttttagggtagttacgctgctgattatcccagtgaagttagtgttgaggaaattctctttacttgagccaaatctgcacttatgtgcaagactgtggtacaagctcctaaaagaagattactgctgccaacttaagtcatctccgttaacgaaattgcattcttgtggcagagttaaaacaacaagagaaattcagtgtttgctggttctgaatgtcatttttccgcncctggtgtggttttaaaatttcag

SEQ ID NO: 138889 - DNA, 757 bp, Homo Sapiens
gatcgctcgagaggacggtcatccactgtacagtgtcagtgtggttggtgtagctggatctctcacctatgaaatctttacttttgtgggtttttgggcttggatgcttgtaacatctctgtggcatcacatgggccagtcagtaactgccctccttgacccccgagcagtccatgaacatcctgacctccgtgctgctgctgtacaccaaggaggaggaagccttctggctgttggttgctgtgtgtgagcggatgctgcccgattacttcaaccaccgagtgatcggggcacaagttgaccagtctgtcttcgaggagctcatcaagggtcatctcccagagctggcagagcacatgaacgacctctcagccctggcgtccgtctctctctcgtggttcctgaccctgttcctcagcatcatgcctctagagagtgcggtgaatgtggtagactgcttcttctatgatggcatcaaagccatcttccagctgggactggctgtgcttgaggccaatgctgaggacctgtgcagcagcaaggatgatggccaggccttgatgatcctcagcaggtttctagatcacattaagaatgaggacagcccagggcccccagttggcagccaccatgcctttttctccgacgaccaggagccctaccctgtgactgatatttcggacctgatccgggattcctatgagaaatttggagacccgtctagagcgtaatcggtaccgagctcgattcgtatcag

SEQ ID NO: 138890 - DNA, 1882 bp, Homo Sapiens
gtaaaactttcccaagacattttcagacttaaaaataaagtcagtgttacaggtgctggtcagccttcttacttgtacctcaaacactgggataaaggaggcggtccagggcaatgcagtgatgtctgtcaagacattccccctcccctaaactcagtagcagttgaggatgacatttcaggctagagagacccaaaatacctctgttccacctgagagcaaggtggaagttgcatcagctactgccccaagtgagcttcatcttctgattgtgggctttggaggaacgagagaactggctcttggccactgtgaggggtacagctttgccactcaaatataccttattgtggcattcagggagccagggtccagagctgcagggctgcggtcctggctcacttccacataggccatcacataacctgtcataaaggcatcaaaaccagcccggtgcaatccatccccaggcactgggttaggactggcttggctccctggcacttctgaggtagctctatcagctatttcaggccttgctgccttaatccccatctctaagtcatttttgttgccttgcttggagtgaggcaggttcctagtttcatcggcagccacctcctgctcggtttcttcaggcttgatgctatccccacagacctgcttcttgggaggaccatccttagcttccccagaggtctgtgtccccggtaggttcaataaagccctcttccgtttttccctacgtcgtcgccgtcgccgcttgtcctctgccgcagcctcatcagtgtcaatgataaggtcaatatcgtgagactgaggacactgtggtcccagggggcaccagccataagccgagaagttgtcacagatgctggtgggatgaggacggtgggttgctgggggcaggcagcagcggtaatcaatatggtccctcatgctggaaggatagttgcagaactccagggtaaggtgtgggctgccagctgcccgctgcttcccattttccgtttcacatttccggaaggcatattctaagtaggaggccacgaaacgggcatgaaactcagcagcatatttggtgtcataaatgcctgctgggaacatctcacacaggtcagcggtgaaggttcccagactctcagggaggtgtgcatagaagttctggtacaggaacaccaagtctataaggccattgtgtagcaccaggggccggcgggctcggattagctccaggaatagggtccgtactgactggctctggctctcatcacccttgtcattgcccttatggtaggggatgccttgggcatactgctggttgaagttgaagccatgctgtatcaggaactgcacagactttggttctatgacatactcctccatgcacagcagagtgagattgaacacttgagccagataggaatgttcacccttgtctggctgccgcttgaagcaggcgaggcccagggaaaggatagaacgggtcctggcagcatgacacacggccttgtaacgttcctcaatgcactggttcagcaaactcttcctgtccccaagcccactcagctccgtgtccacagccacgaaattagctgtctttatggctagcaggagggatggccacatctccttgaagttgttgctttgcacatccactacgggaacctggactactagctcctccccagatgttgtgcttttgctgacaccaccgtcggaagctgcgggagctgaaactgcgccatcgtcactgtcggcggccatgacaccgctcgtctcccgcctgagtcgtctgtgggtacgctggacttgcggtccgtctcctggcgcggttcaggcagtcggggatggggcggggtctcgccgtcgggtcgccccc

SEQ ID NO: 138891 - DNA, 771 bp, Homo Sapiens
gtgggctctctggggtacacactgtggccccctagctccatggctgcttgcttgaaatctcctggccgggctgggtccaccagctgctgggctagaccccagagctgctgggaaacaagggtgctgctgggatcagcaccaatggctcggacacggcacagcacccgtgctacgttgccatccaccacaccggttgcctggccaaaggcgatagaggcaatggccccagctgtgtagcgccccacgccaggcaggagctgctgcagggtctctgctgtacgtggcatgtggccccctagctcctctaccaccttccgagctccctcctgcagccgccggccacgagaatagtagcccaggccagcccagagttgattcacctcctccagggaagcactggccaggtcctgcagtgtaggccacttctgcatccatccggtatagtagttgatcacagtggcaacctgggtctgctgcagcatgacctctgagacccacacagcatatgcccgcctgtccaggtccatctcatcttctgcccgtcttctccatggtaggtcccgtttctcttggtcgtaccagcttagcaggctccctcggaaggctgtgacttcagctacgtctcatcacaggcagaaggcttggcctgactgttgttcttagcatgcttctgcctcccttcctggctggctgcctgcttcctgtgaccacttcccacggctgctcgtggcttcctcatgatggcctcccgcgagctctagcgcgcccggc

SEQ ID NO: 138892 - DNA, 1075 bp, Homo Sapiens
  misc_feature (399)..(399): n is a, c, g, or t
tgacccctttcccagggttttggttcccaggggctcgaagggagggcaggccacagggggcccttgttccaggtgtggggaggcacattttttcccatttccaggactgccggaccaggctccccggaggctaagaagcttttcctggtcccacttttggggcgtgcccggcacagggctcttccacaggggccactggctgcacagtgggcgttgtggggtacaccactgtggcccctagctcccatggctgcttggttgaatttcctggcccgggctgggtccaccagctgctgggctagcccccagagctgctgggaaacaagggtgctgctgggatcagcaccaatggctcggacacggcacagcacccgtgctacgttgccatccaccaccacncggttgcctggccaaaggcgatagaggcaatggccccagctgtgtagcgccccacgccaggcaggagctgctgcagggtctctgctgtacgtggcatgtggccccctagctcctctaccaccttccgagctccctcctgcagccgccggccacgagaatagtagcccaggccagcccagagttgattcacctcctccagggaagcactggccaggtcctgcagtgtaggccacttctgcatccatccggtatagtagttgatcacagtggcaacctgggtctgctgcagcatgacctctgagacccacacagcatatgcccgcctgtccaggtccatctcatcttctgcccgtcttctccatggtaggtcccgtttctcttggtcgtaccagcttagcaggctccctcggaaggctgtgacttcagctacgtctctgaatagatggtatgaggagacagaggcctgcaataccacctcttccggctgcctggccaggccatcacaggcagaaggcttggcctgactgttgttcttagcatgcttctgcctcccttcctggctggctgcctgcttcctgtgaccacttcccacggctgctcgtggcttcctcatgatggcccgcggcccacgctgatgaagacagcagaacacggaggccccgcgttcatcccggga

SEQ ID NO: 138893 - DNA, 1980 bp, Homo Sapiens
gtttttccgggaaaccctggggggggccaacccaggtgaccccggggggccaaaaaaagcccggggaaacggaaagccggccgtaattaaaggcccccccaatgttaggggccccacccacctttttcaagttatcttccagcgggggggcaggacgttaaggccagttgggaaactggaggaacttggaggggccgtgtggccaaacccggggagggattttatccagaaaaagagagggacccccaaaacacgtgcctgcccctatttatcttgcatgtcctgtgccaggtgaaaggacgctggagcatgggtaaggttcctgagaacaactggtgggcagaaacgggctgggatgggcactgctccacaggcaacattaagcctctgagggggacactaatagtgctacatcttgtgggctgctgaaaagtaggtaacgaatggcctttattgcactttttcgttcttaggaaacaggggagtgccctgcagagtttctcttgatttgcagaaatcactgcagatcaatgataaggtgcaggcagaatcacgggtgacctctgactctcaagggaagaagtccagtgattggtctttccagggcctcaaggggccactcttcaacctgggatcctcgagctgggtgaaccgggtctggcttggtcaatgtgtggcaggcagattggtcgaccggcagacacttgggacaaaaggtggtgtgcccgggaaagctggggcaaactttccaaacagggaaaatttcttggcaaatgtgcagattctgcaaccagactggaaccacgattcccaatgcgcctgactccctttctcccactctagaactggaccaccccagaggaacagagatggcctgggagggccctgggtccagcgccatagcatcaaactggagataacaaaaggaaggggttggaaacaaaagagcagtttacatatcagatgttggtttcgaaacagtctttttgatctcaggaaaatggaggcagataccactggagaacctggctgtctgtctgtccatccgtctctcctggggggctctgaatacttcatatataaatggggtggtaccgtttgtggttgatctttgttcctacaagcttgggcaagtattagcattcttcagggaatcacggaggcactggctacagaagacatgtccgcattctgtggaaacgatgagacgtccattctgcacgatctctgagtatccgtccatgcagatgggacaactgacagtacctgagggcctgaggcctgtagcgccctcatccctggcgtttctgggagtatgggtagtcacatatacgtctctgtccctggacaactcctcatcgtcactgctcaccacacagctgtcagcatggtcctggggcagcctcctagcattcctccttggtcttcttctttcgtcaacaatcacaacagagtcattgtgagtcagatcaaccaccacaggctctaaagattcacaagtgaggtccacaatttcatctccagcagtttccacgagttctatgggttctgcttccaaggagatctcgggggtggaggttgcttcccgagttcgcttctgagcttgtctagaatttattgctccaccacgacgctttcttgtactcattgtgctctttggtgcctttcctttcctacagaaaaggaagtgatctataccaaggtttgcagggaagtcaaatgttctcaacctttcatgccctctggttactcatctggcttgcaaaataatttggatccggacagatttccagtattttcaagtccgctgctttcccgcaaagctcggcctaacctggagctagttaggtccgcaggcgccaccgccggcgcactccggagaagaagctccttcttcagccgcccaggagagctcctcgagaaagatgccgccgcctcaaccctcgtgccgaattcaacaccagccctcgtactagacta

SEQ ID NO: 138894 - DNA, 684 bp, Homo Sapiens
  misc_feature (85)..(85): n is a, c, g, or t
gcaggcaacgctgtgagtgtcgggctctggaaagtggcttgcatctcttggacacacaccattgctctcaatgtgcccattggcntgagggccaccctcggtcctgaccacggtttcttgtcggtcagaaagggtcccctgagaagagaggtagcttgtaacatctggtggcacgacggtttcatctgtgttggtgacactgtactcttcactcttcttcctggtctggtagatgatgcacacccagaccagtgacgtcaggacgatgctgctcacgacagcaatggtgaagatgcctacggtggtcccatccttcctgcagcctgctgcgggcaggacgctcagctgtctgtgagctcgctccgtgcccagggtgttggacatctcacaggtatatcggcgcgcatcctctgccaccacgttgtgaaccaccaggatctggttgtcaggggtcaggtggtgccgctcagtgaggctcagcgggtggtcccccttgaatcaggtgatgcggggcggagggttctccgtggctttgcattggagggcctctgtttctccctcagataccacacggtcttccaaggggaccaccaaggatggggtctctaggacagtcagggtggcattagctgaaatagaaccgggtgagttctgagcagtacagctgtaaacccctgcgtcatc

SEQ ID NO: 138895 - DNA, 392 bp, Homo Sapiens
gcaacattttgctgtaatggttcccttctttttcttctttctgacttttccttttcattgtgctttgataaggtaattctgtattcaaatccaggggagagggtccctgaataactccttcttgaggcagagatggcattattgcctgtgctgattagcaagcagtgtgtgctgctgtaccaagctctcaggaaatctggaaattccacattagtctaagtaggatatggccccaaatcactgaaagttcttatcatattatcttggtggaatcctcagatttcaggataccaaagttatgggataacaaggtacccgggtgaggaaagcccagcccgggtcctcgcgtccccgctgcaagcggtcccccaggtgctcccgcgcctcgcagc

SEQ ID NO: 138896 - DNA, 1119 bp, Homo Sapiens
  misc_feature (687)..(696): n is a, c, g, or t
ttcatttgcttacattgaaatccagttttaaacaaaaaaaatccttttgaatggttcagttgttaagaaattctataagcactttgtcagctaaatgtataggcttctcaattcaaaatgaatgctgaactttgagaatcaaagaaaatgcccttaaatatgcttgaattctgaacactgtgacatatgatggctcccaattccctgtcttaggttatgctgaaaccaagaagtcctttgaaaagtggtgtctctgcttctggtcctaacagacctttctttaaagtactttgtgcaatattttaaacatccatcattctgtcagcaaaatgattgtcacaggaagtatagggcacacgtttctctattcagtgagtgacagtgagctacaaaacactggaaagaactgaaactgaggaaggaacttgtaaaaacaacttcaaaattaccaagaagaaggctgtcccagaagaaatatctctttagtctaatcagactttctgaaacttatgtgtaacttaggctgtagatagatggatttcccatattcataattttacaaataatcactcaatattagattaattaatacagtaacatatttggcaagggcgactcaggaagaaaaatcagttactcattacattctctcagaagcatcttttcgtagcatgatcattttgactnnnnnnnnnncagttaactatccacaagcatcataactagcaattaattctacatgaaatatctgtactttatcctcaccaacattatttatgcattctcttcgttcacaaaagtacaagttaaaaatccttaggagcttatcactatcaactcatgggtattgccccacccaacccctttcccatttgattctacccagtattttattgcagttggaagactgagttttcctggaagaattatgaactgaagatcagcataaaatgtaatatgttttagaaatcagatgcatttgaatgatatattggatgaagctaccattttaccctgggtcccgaactcttatttacttctgttttgcaagtgaaatggaggaatacaacataaaatggtatatacgcattttgagcacaaagttcggtgaatgaagca

SEQ ID NO: 138897 - DNA, 675 bp, Homo Sapiens
gctgctgaaagttccgagatctcaattcttgcattcgtttgctattttcttcatatttttcttccacaatctttttcagcttcctggctttctcatcagccgcctggagcttcctcagccgcatcctttctcttggcgtcattttctgtacttctgacagtgccctcagagtctgcaggtggatccttttttgcatggcattaattatatgagcagcctccttctgacaatccaaatttttgtcttccagagtcatttctgaatatctacacattaggttctgtagctgctcatcaaggtaagggatttttaaaatttcgatagcagatggtcttaatgaaggattcttgttcaacatgctttccatgatggcatttagttcttttggatatctctcagggagagaaggtgtgtcaccttcaacaatttttaaaacaatggataagaaattggagccagcgaatgcatgattcatgcagcacatctcatacaaaatgcatgccagtgaccagatgtccgactttgtgtcatagccttggtgtttcagagcctcaggactcatataatggggagttccagttaaagttgtggccaggtcacaggatcccattagaagtcgagaaactccaaaatctccaattttaaggagattatttttcagaaatacattctttg

SEQ ID NO: 138898 - DNA, 597 bp, Homo Sapiens
tttccaatttatcttgcattatcatcttaccctctgtctcaatatacatgttaagaaggtctttccctaactgccagaccaagttggcttcaataggcagctcaacattcaccacctttattttgggctttttagcttctggaggctggtcaacttttttttcatttgctttgtcagcatctgggattttgttttcttctgaggtaagttcaggtgaagggggagactgtgaggtttgttgagcatcagtttgtacctggggctgtgttccagcttcactgttgtcttgctggacatttttatcagtgtctgggttttctggtggtctctgattcagacactccatgtcagcttcagaagacatttcattctcctcagttgggactttctccaccatagatgccgtagagatggtgaaaatgccatgggtgttgactcgcactttgacttttactctagatttttctccatctttctgtgcagaaacattctgaactacaaagcggcctatttttgcttctggatatggaactccttggggatcagaatagaaagcttctagctcaaaaggcccccttctcagaaaggtgagaaccc

SEQ ID NO: 138899 - DNA, 1672 bp, Homo Sapiens
  misc_feature (1312)..(1365): n is a, c, g, or t
agcggtctggctgcgagacccctgtcagcgtggactccatccccctggagtgggaccacacaggcgacgtggggggctcctcctctcacgaagaggacgaggagggcccatactacagcgcactgtcaggtaaatccatttcggatggtcactcgtggcgtgttcccatacagcccttcctgtcccgagcatcactacaagcacatggaaggtgacaggaatgttccacctgttccccctgcgtccagcaccccttataaaccaccctatggaaagctactattacctccaggcacggatggtggcaaataaggcccgcgagtcctgaatggcaacccacagcaggaagacgggggactggccggtatcacagagcagcagtcaggtgccttcgacagatgggagatgattcaagcacaggagcttcacaataagctcaaaataaaacaaaatttgcaacagctgaactctgatatcagcgccatcactacttggctgaaaaaaactgaagcagagctggaaatgttaaagatggcaaagcctccctctgatatccaggaaatagaactgagagtgaagagactgcaggagatactgaaagcctttgatacttacaaggcattagtggtctctgtcaacgtgagcagcaaggaatttctgcaaaccgagagccccgaatccacagagctccaaagtagactccgccagctgagcctgctctgggaagcagcacagggcgcagtggacagctggagagggggcttacgacagtcgctcatgcagtgccaggacttccaccagttgagtcaaaaatctgctgctgtggttagcgagtgccaagaaccggaggcagaaggctcatgtcaccgatccaaaggcagacccccgggctctcctagagtgtcggagggaactaatgcaactggaaaaggagctggtagaacgtcaacctcaagtggacatgttacaggagatttcaaacagccttctcattaagggacatggagaagactgtattgaagctgaagaaaaggtgcatgttattgagaagaaactcaaacagttacgggagcaagtgtcccaagatttaatggccttgcagggaacccagaacccagcctcacccctgcccagcttcgacgaggtagactcgggggaccagcctcctgcaacatccgtgccagctccccgagcaaagcagttcagagcagtgagaactacagaaggcgaggaggagacagagagcagggtccccggcagcacacggccacagcgctccttccctctcagggtggtccgggcagccctaccnnnnnnnnnnnnnnnnnnnnnnnnnnnnnnnnnnnnnnnnnnnnnnnnnnnnnngaaagagactacagctgcactcaggccaacaactttgccccggtctttttaccccatgctgaagtacaacaatggcccaccccccaactagaagggcataacctgggcccaaggggtacaccaactgcctgaatttgcaaagggggcccaacacgtgggcccccaaacccaatctggagtgggacttaagggttggcaaaggcccccggggaacctggggcaaaatttcttttgggggtttaaacccacaaacgggggttctccctggaagaccccgggggaaacctttttacaaaattggggggtt

SEQ ID NO: 138900 - DNA, 640 bp, Homo Sapiens
  misc_feature (430)..(478): n is a, c, g, or t
caggggagaaaatgtgacccatttttttccacaggagaatcccctttaaaaatttaattcccaacttagtttttttgcccaaaaaatttccccggggggccccctttcccaccccagggttttcccctgtttcctgggggaagggaaccccaatttttgaaaagcttgccctggggcttccaggggaggccccttgctgtttaagcccaaggaggaagtttgccacaggtcccggggactttgccaaacactaagtcactcagattgttctggggcccacgtgctgggcacccttggcaatcaggcaggtggtgtagcactgtggccagctatgccctctatgtggggggtggcccattggtgtacctcagcatggggtaaaaggaccgggcaaagttgttggcctgagtgcagctgtagtcttcttcgnnnnnnnnnnnnnnnnnnnnnnnnnnnnnnnnnnnnnnnnnnnnnnnnngcaggggtagggctgcccggaccacccttgagaggaaggagcgctgtggccgtgtgctgccggggaccctgctctctgtctcctcctcgccttctgtagttctcactgctctgaactgctttgctcggggagctggcacggatgttgcaggaggctggtccc

SEQ ID NO: 138901 - DNA, 285 bp, Homo Sapiens
ccagtgtttgcctgagtttgcatggacctcatctcattctccttgctgggacatactggaccattttggcaaacatgcatgcttttgcaaggaaagctgcagaactcattttcatactgtaacctgatgccatgtcacccgtgacccgttcagtaggagagaatagactgtcgcttgctgtctttcgtttcaggtaaatccatttcggatggccactcgtggcatgttcccgacagcccttcctgtcccgagcatcactacaagcaaatggaaggtgacagtacg

SEQ ID NO: 138902 - DNA, 1394 bp, Homo Sapiens
gctcgtacccccaccgcagatgtactgtatacgggccttgtaggtgttcactcccattgtggtggtgtaacggaagtcaccattaggcaggtttcggggctgcccacagtccttgatcttgcatctgggcatggcacgatgccacgtgccatcatcctggcagacagctgtgaaggaatgcagcacctggttcccctctatgagctggtagccttgcttgcaggtagcaatgaagtagtcacggaactggtactgaggctgcaggttctggatgatggtgaactcgtctagggtcttgggctgggggcacttgatgatctcggtggtgtagcgcagcttccagccccggctgtcccccgactcatctgtgaagaacagcagatccacagcattgctgctggtgtcgaggtcggggggcctttgcttcccacagaactcgccaatgttcttcccgttggcatagatctgtagctggtcataggggcagtgtacttgctggtggtcatcaatatcaaaaggctccaggaacttgaggtgcagggtgaggccccgctccacccggatgctgtagttgcagcgcaggtcaggggggtaggaccgagggtactccaggctggagatgtagcctgatgcctccgtgtacagctcgctgctgcactcagcctggcaggaatgcctgtcttcctgaagctcatagcctggacggcaggaacagaagtagcctccaacgtagttgtgacacaggtgctggcactggggctggggatcctcctcccctaatttgctccgggaagcacattcatcaaggtccacagcttggtagtaggccaggaagcccttgtagaacatgatggtcccattctcctcgttggagaagtctgtgtggaaggtcagcagcatcttgttcccttgggacataaattccttctttcccggggggttgcccagtggagaacccagttgcccacagaacctccccaggcttttcttatcagcagagatcttgacataatcatagaagcagccttcagaaggctccaggtcaaactgctggaagacgagcttcaccctgtatcccgtggggactgtgatcacagtggttgtttcaaagttgttggggtaaggcttggggaacagaggggaagtcacctccccaaataacttctgagggatgggaatggagcctcctgccctgcagaacagggccggcaccaggaggtacaagagccacatttctcaaggcccgtgttgaatcctgggctctcccgacagcgtcttcgtgcactgtgtgcagagggagcccgcgtcatgcacagcagggaggggagggttttctgtggagtggaggggggaccattcccggaggaatgttggagggaatgaactatttgcat

SEQ ID NO: 138903 - DNA, 591 bp, Homo Sapiens
tccgctgggacctcgtctacccctgactgcgctgaactacgcttccggtggagcgggcctcaccctgcacctcaagttcctggagcccttttgatattgatgaccaccagcaagtacactgcccctatgaccggctacagatctatgccaacgggaagaacattggcgagttctgtggtaagcaaaggccccccgacctcgacaccagcagcaatgctgtggatctgctgttcttcacagatgagtcgggggacagccggggctggaagctgcgctacaccaccgagatcatcaagtgcccccagccctagaccctagacgagttcaccatcatccagaacctgcagcctcagtaccagttccgtgactacttcattgctacctgcaagcaaggctaccagctcatagaggggaaccaggtgctgcattccttcacagctgtctgccaggatgatggcacgtgtgcatcgtgccatgcccagatgcaagatcaaggaccgtgggcatgcacaccgattatctctgcctaatgttgacttccgcttacaccaccactattgcgagtgaaacctttctccgccatgtataact

SEQ ID NO: 138904 - DNA, 572 bp, Homo Sapiens
actgcatcacgggtagtttaaccaaagccactttgggctttggtaaaagcaacttctgaggatatctcggtggtgttgtaagagtctgcttgtcagtgttagagccacaagagtcttcaaaagatggttctagctttatttctgaagcttctagttcttgagtgtctggtctagggattggttggttgttcaatgattcaatggtcttgttggataacttctggttttgtgcacagttttccattttccttttcttactaggtgggtccctgtgttctgcaggtatctcgtgcccagttcggtagatgtgagactgcagtgctgttctactggcgtagggacagccgcatgtgcaccggaaggtcttgccacagtcctctgcatgtcttttcaggtcccattctgtaccgtacgaattgctgcacttactacatttgtgcttcttctcagcatgcattttcataaagtgctgttttacgagagaaaactgagaaaacggtctctcagggcctctggggcagccttcaattggacagcagtagaatttcggtccagttttcaaatcttttctt

SEQ ID NO: 138905 - DNA, 1030 bp, Homo Sapiens
caagtgagggtttctttctgcgatgttcaactggaactctcccatcagtagttacaattagaaatacctactgatggttagtctgaaggccattctcatggtcacctatacagtgtgtttccctgtgagctagcagacacaatgaccaggaaaaaacctatgaattccattcttaggtttcccagccaattgctcccttctgctttagaagtgactaggtactgagagtacaaacactcccactttataatgaaggcgtcatgtcaccccttcctttacaggtcctggggtccaggagacccagaatgaaggtgtcagttgggcatgaagtgttatttagtgtccattcttgatccttctgagcacctacagctggaaactaagcagatactggtcctgcattctgactgagattgtgtcttctttatgaggatagatcaaattggcagtcaggcccatgatagtcagtgcagttggggcagttgtagactttgctacaggatttcagggtttccaatcaccccacaggtaagtgaatgccaaagtcttcttttttcagaccatacaagaagtcattttgattttcaaagaagccgttttgattttcaaagaagcaggttctggtgacattattttcttccttggacaaagtggggggaaatttctaagtattttaactgagttcagggtccttagtgagcctggacagagcaaggagagggctccccactccctaagccccacagccagctttgcatcaccacacacagccagagcctgtgaggagctgccttcttccccatgtgacttgcaaagagtctcaggcaagaaaccagggcttcaaactgctagttcccatggagggtagttccctcgtgtggagcacttgtgttaggatcactgattatctgacaaaggctggtgcagaaaaaaaattgtaggcccaagtgtcaagaaccacaccagattggagatagaaaagaatagctgaaattatgtcagtggtgaaatgtccctccattgacccacc

SEQ ID NO: 138906 - DNA, 996 bp, Homo Sapiens
tcggtacccccaccgcagattgtactagatcaggtgttgtttgtggcaattaactgttggtggaaccaggggaaatgcagaaaacagaaacacttcttttattttcctgtaatatatctgtatcatcggagttttggaccaatcgagtacaaaggccccatgagtgctgtttacattgagaagtttgtccgccgggtgatgaaaccacttctctacatcccatctcaatcagaattactagattttctctcaaactacgagcctggagtactcgggtactttgagttcagtggctcaccccagcctcctggttatttgaccttcttcacctcagcattacattcattaaagaaagattacctaggaacagtacgatttggggttatcacaaataaacatcttgcgaaactggtatccttagtacactctggaagtgtgtatttacatagacatttcaacacatcacttgtcttccccagggaggtcctgaactacacagctgagaacatctgtaagtgggccttagaaaaccaggagacgctctttcggtggctgcggccacacggaggcaagagtctcctgctgaataacgagctgaagaaaggaccagcgctgtttctgttcataccttttaatcccctggccgaaagtcatcctttaatagacgagatcaccgaagtggccttggagtacaacaactgtcatggggaccaggtggtggagcgtctccttcagcacctgcggcgggtggatgctccagtgctggagtccctggccctggaagtgccggcacagctgccagacccgccaacgatcacagcgtccccctgctgcaacactgtggtgctgccccagtggcactccttctccaggacccacaacgtctgtgaactctgtgtcaaccagacctccgggggcatgaagccgagctcggtcagcgtgccacagtgcagcttttttgaaatggcagcagctctggattctttctacctcaag

SEQ ID NO: 138907 - DNA, 786 bp, Homo Sapiens
gatttgccccaaaaaagaaggaagactagtttcttcctgtttccagaaagatcaaaaaagtttgtcaaactttgaaagcttatctgtgtagaattgatactaaactccaggtattcaacaggcattttaaagacatgaaaatgttttccaaaaaggcacacaggttggcagacacaagggacaagtgagaagattcataaatgaagttattagtcagtgagttcagtcactgtcggggataagttcccgaaacttagtgcagaatgatctctcagttttgtgtcttccattgttcaagccatgtgtcttgatcagaatcggcccccagcaacagcttcagccctctccaccaagcttgccatcaaggcaagtcaaccgtgggatttcctgagctgctatttgcttcctggtcttgctttctgactccaaactcaagtaactgaaaggccaggtggcccttgtcctgtgcaggtcttggcccccatggtgggctggccctaccacatagctggcatgctcatcaaggatagaatgttcatctccacagggagagggggattatgtatccacgggggacttgtcttctgttgcaatgtctatgtcagtctctcccagggaatctctgttttctggatccctcacacaagcgtctttgtgctgctgaaatagctgtgtccctctccctccttctcaggtccttcagaatcttcctcatcgagagtcagttcaaactgaaacttctcccgacgcgtggtcgacgatatcccgggaatccggaccgtacct

SEQ ID NO: 138908 - DNA, 2593 bp, Homo Sapiens
  misc_feature (345)..(354): n is a, c, g, or t
gctaagccagatgacttagtgtggcaaatgaggaatccaaaatcctctaattgggggtcggagatgccttttcccgggcccagttttctgtccaaaaagggtctttttaccctccaagttatccactattaatggtaggcccatagtggggcggggtgtgatgagctggaaaagcatgatgtgcgtgtgcgtgtgcgggggtggggccatcatcagaatttgcacaggctgctgggaagagccatggctgtcttgctgggaactctgcttggggccaagcaagcccctttgactcctcctgccccatctctagaatatttctaaaatgttttaaccagcaagttnnnnnnnnnnttttaaccctctttatatagataccctggacactttttcttatggttcctccaagatgattataacttccgtctgacactatatattcctttaataacaaaatttcccagaaggctcacaaatcatggttggcagtgcagccttttcaatactggacacatcccatgctaaggccctctgcacagattttgtttactatcactggcgatcagcccaaacttctcaccccatatatcaacccaccccgatgtgtacaccaggtactatgtgacccacctactactggctaatgatgcaacttctgagagacccttgcaccctcactgcacgtcttgccacacaggtggcttggtgtcacgtactccctggcaccatctggttcatgccaggtttagagttcatcgtgtttggcttcctggtctttgagtttaaattcctcggctgtgaccttcccatctccattccggtcctggttggtgaacatattcttcacaatcagctcagcatcaaagccaggagcgagtttccctttgccagatgccacctgggcgtgaatgtactctgagaactcttccaggaggacttctccgttgccatccttgtcaatttcttcaaagaggttgggtgacacctcaccattccatatgaacatgtacccctcaggaaggccagccaccagctccagcagctcaatgtcaaacactaatacggcactgccgggcacttctccatccacgccagcttccccatagcccaggtgaggcggaatgatcactgtccgtttctcgccaacgcacatctctctgagacccatgtccatccccaacacaacttgcccagatcccagaacaatattgtaagttttgcctaaattccacgtggagtccagcagggtcccatccagaagtgaggcattgtagtgatatttgaggtaatctcccttcttactcagcactgagcagtcagggggtttgtagtgggaggtgatgctgatggagtccgaagggttgtggaagtcgatcacatggatgtcaaacaccagcacagccgagccggggatattccctcttccttcctctccataccccaggtgaggcgggaccacaatccttcgcttttctccaatgcaaacaccaagtagaccttcatccatcccaggaatcacgtagccctgcccaatgtacgtgtcaaacgtgcggttccgagagtagctggaatcaaagagggtgccatccagaagcgtgccattgtaatgatacctgagaaagtccccactttgacttatccgctcacagttttcaggtactaccttgttctcaatggaaatgctgtccttggggttatggaggtccaataatgcaacatcaaacaccagagatgcctgaccgggaatgtctttcccatctccatcctctccataggccagaaaaggaggaatggtgatgatgcgcttctcacccacacacatccccagcagccctttatccattccaggaatcagccagccaattcccacatacgtgtcatatgttttcatgcgattgtgactcgaatcaaacagagttccgtccaggaacgtcccgttgtagtggtacctcacaaaatcagacacctggatggtccgagggcaactcgggggcttgaaataggtgtgaatctgaacctggtcttcagaattccaaatatccatcagaagtacatcaaaatgaagcactgaattgggggggatcacaccagaaactccttcatttccgtaggcaagctttgggggaatcttcacgaaacgtctctcgtttacgcacatcccaacaagagcctggtccatccctgtgatcagctgtccttttcccacaaacacattgaaagtggagtctctgtcatagctggagtcgaacttctggccgtcggggaacgtccccacgtagtggtagcgcacgaagtcgccgctgcgcacggtgcgcgggcactcgtcgggcacgaagcgccgctcgatctgcagctccgcgtcggagcccaggcccgccacgggcgctgcctgcccggtcacccagagcagcagcaggagcagcggtggcggcgggggcctccagccccggaacgccatcggggcggcgagaagagtggcgcggacgcagcgcggcgctcgggcggcacgggtcggcctgggcgttcggctgcgtttgcaaacgtggaccgggtctcctggccctacccgggctgcagccgccaccccgtctcc

SEQ ID NO: 138909 - DNA, 738 bp, Homo Sapiens
gatgaagactcaaacgtttgaccgtagcacctggatgaacattaggagtgcttagtcttttttctacttgcttttccaaacactcacagtatatacaacaggcagcggattgtctattgtttgttgttctaacttctgctgtcgagaagtttaaacagaaagcaggagtaatgtgccgtttctgaagttgccacaaacaataagacactggtgaatgagagtataattgtttttcttctatttaatgtaaaaatctgtgatatattatatttaaagtgttgcatttaagatgagtattttaccagagtgtttccattcatatccgcggtatggaggatttgaggaacagtaaccaggatgtgaatgattttgttacatcagtgttcactgtagccacctaagtaggacattatatgatttcagaatcaatatgtggaacttctttaagcattcagtgtgcccactaaatgccagccacacctccacttgcctcttattgtcttatttttatatatttttctaaatatatgtatatatacagtacatagaaaatagaacttttattttgtgacctaaggacgatggtgaaaagatcacgtcttcaaaacaatctggtgatcagaatgttcatataccagctggtttctgaagaggtcagaatgatctttctccatactgactcttaacaatgttgatcattgaggctaaattatatattatgaataaccctttttgatg

SEQ ID NO: 138910 - DNA, 968 bp, Homo Sapiens
  misc_feature (745)..(793): n is a, c, g, or t
ataatgctcgcctacgtgtggcgtgtccagggcgcccgccctaccaacgaaaaggttaattttggcttatgggtgggggcaaatatcagccatcattatctgggcgcagacctgttcgaaccagtttagtttaaaaaatttcaatcggttccacattcttttttgttgtaccaagcttagttttggaatgcgggttattcaaacccccccttaaccagttcccattcttccacccccaagagaggaaaaatgttaaggggtccattggggtcccagttcataattttcataagtaagttcccataatgcccacgtaaatgggccattgtcctgttggtttctggcatcttgctcaacgttggtataaaatattactccatctccagagcaggatacaatctgtttatcatttgtccaaggtaagaactttgcactaaatatgtttgctcggtgccctgaacgaattgttgtcaaaacctttctgttgtaaggattactaattactaatttggtgtcatctgagccagataaaatatattctccagtgtcattccaacagattgtattaacacaaccatcatgcacattaagggttgcttcaagttttaatctttggataaattctcttcttcccaggtagcgactccgcagccgggacgggtcctccagcccgagggaccttttcctcacgtcccacaacaggtgtgggtaggagccaccccgagacatggctctgcctgagccnnnnnnnnnnnnnnnnnnnnnnnnnnnnnnnnnnnnnnnnnnnnnnnnncacccgtttcaacacccgagccgcaccggcaccatccgcgcgccgggcctccagggcgcagcgttagatggcggtggcagcagcggcgcctgggcccctgaagcccggccgcacccgggccggagctcgcctcatctctccggacgcgtggtcgacgatatcccgggaattccgg

SEQ ID NO: 138911 - DNA, 865 bp, Homo Sapiens
tttgtacatttaacatagggtggacacctcagaatgaaagttcatgttggttctgaatggttcgctgcagctcctgtcacaggctgggatggatttatcacactgagttgtgaaattacctggttctaagaatttttgagtggcaaaaatagaaaacagtcttcatttgaaaacatgcctaagcttgaataaatggataccatagatagcttctcttttttattctggtgtcattaccagcatctgaatttcaagttcttaaaatttcaaaaattaaaatttttcattattagctatccatttatcttttacacgaacttgtcatgaacaaattcaaatgtttatgccagcaaatttttgtactgttgcatagttaaaaatgctgggagtctctacatagatacaaaatattattaaattattacataaatttaattttataaaatttaatcatgcttcttttgtctgggtaatagacattggacagatatttttagttcagatggtgattctgaagcttacatctcccttaaaaaaatctaaagcagctcttatgggcttctaattttgatataaataaataatttaaattttattggtgttattggaagaaaaatgctattaatgggctaataaaaaacatgtgtttctcttatggattttaataagctccagtattattcaaatgatcaaaaatatagttataattttttgaattttaaaaacgtgattgctctaataaagaataaaatctatgctttttaacaaacatagttttggtgcctaattctgtaatatgttttattgaaattagattcatttctctaatgtgagaaaaatatatccagtaatagtattgactgtt

SEQ ID NO: 138912 - DNA, 1023 bp, Homo Sapiens
tggcaggtccttcccccaggtggggcgatttccccgctccttggcgggcaaactcaattttttaggcttgaagcgggtcagccccctctatggcctgctccacgtcttggtcccttctggatctgggaggccagctggaggggagtgattgcccgatgagagctgttcccttaaggtctccgcctctctttgagccacctctgccctctggtttgccctttccaaggtccgtcatgatcatttcaatctcgtcggcctttgcagtagtttcttcatcgtatttggttttcaggtcaaataattctgttcgagttttttccagggctgtttgtaggctctgaaccttatgctcagcttcctccagctttgaggtggtggacatctgtgtctcctgcagctttctctccttttctgcaaagtcattctgtaacttctgttccttctcaagagctatggtttcggcttggttcttcagtgtctgttcatattctcggattttctctttaagtgcttttatcgtaacctcttgatttttcacttcagcaaattccttgttgtattcttccagagtttccctaagtttctggttctctgtttcaatatcgtgcaggcgctgcactttgagctggagttgctgtccgagatccaaagctggtacgggatctgggacgtcaatcaatcttttgtagacattcaagaaagctgcttcagcttccttgcttcttttactcagtgcatcaatctctccttggaaactcttcagcagcggcgctacctgcttgcgcaaatcctctggagtgttcttcttgaactcccggctctgttcgataagccgctttctggactgctcactttcatcctgccggttcgccaataccgttgcggtggcatcgagttctctctgcagctgctgtaaatcaaagcgcttccaatattgaaacatcgatcccacattggccgccatcttgagacatattgagacggacctcgtgccgaattggcgcgccgtcgacttcatactct

SEQ ID NO: 138913 - DNA, 803 bp, Homo Sapiens
  misc_feature (425)..(425): n is a, c, g, or t
  misc_feature (449)..(449): n is a, c, g, or t
gagtggggaatctgaagtcttgttttaaatgaggccaggtattgagcaaatctccctggtaagagagcccactgatatttggagatgtagccatttgtgatgataaatgatgactgttactcttatgagctatgagagcttaattaaagctaatgcttagcaccctttggaaggtggagagattaaaaactaacttccttgccgaatagcctgggtttggaaaagcatgtttttgaaatatgtgggatctccactctggggccctctgcagtcctgtctgggtcttcacgcctcagtcaaagcaagagctatttttgcgttagaatttccttagcccagactaccagaggccaaatgccagggttcatctcagcttcctgtgcattcacatggaaggtcgtctttgaatctgcacgtccagctcnccatacacatgtctcaggcagtcnctgctcatgctggctatcagcttccaatgcccagagacccagggccggcacacttcttcccactgcacggtggagttgggccggatttcacggaacatcttcttcattggtcttgttactccaggaccatccaggtgtacccagacatttcgcagggtttcttttaaaggattggtaaactcaactgtcacagtcatgtcagaaccaactacctgagtgccacggaccttgatgatgatctcagggatggttagcacggtggacttttgcttggccagaacatccctggtctcattgatgcgagctgtgacaaagaagtgcagggacgcttgttccagcagctgaaccatgtac

SEQ ID NO: 138914 - DNA, 1573 bp, Homo Sapiens
  misc_feature (125)..(164): n is a, c, g, or t
  misc_feature (324)..(387): n is a, c, g, or t
  misc_feature (617)..(646): n is a, c, g, or t
  misc_feature (1418)..(1452): n is a, c, g, or t
  misc_feature (1456)..(1507): n is a, c, g, or t
aggaggatcggaaaatgttcccccccttacttaggcagtgaagagggcggcactgttttgaacgacatattaccgccataaaaaagggggagcgcaaggcagggctttttgggcgcccctacgannnnnnnnnnnnnnnnnnnnnnnnnnnnnnnnnnnnnnnngtacgcggggggattggtttttagagatcccagttggggcccccgggggggaagagatatagtgtgcccgcacacttttggtgcgaagaagatttttggggaaaagggcccgccggccccggcgacaagaggggtttttaagggggaagacccccccaannnnnnnnnnnnnnnnnnnnnnnnnnnnnnnnnnnnnnnnnnnnnnnnnnnnnnnnnnnnnnnngtggggttagtaccgagagagtgtaggttagcaaaaagggcggccgccttggattttttctcttggagaaaggggggggtggtcgaatctggcccccgccggggaaaagggttacgcccgccccgggtttaacaagggtttccggcaattgttagagggggcccccaaatagtgtgtttttagggagaaagggtttccgcccccgggggtaggaaatgttggcagaaatnnnnnnnnnnnnnnnnnnnnnnnnnnnnnntaatgtgtgtggatggggttgagcggagttgttaaatgataccacgggggggaggggcctcccgccccaaggatagtgcaagatggtgctgcatgggcttgggggcccaatgtgccgcggtgggatgggtaaaagcgattcgtgtggaaaaagaactgccaggggagaggtctgctcttgccggaagtcggggtgcaggggggtgacccttggctgggttttgatgacccacttgcggggtagagtttttcatcattcattatgcctgggatttggatccggcagcagtagatcccactgtctgctagagtcacattctctatggtcagggacacatctcctttgcggaaatccccatttagccagtatctggatgtccaataattcacatccctttcatcagtcctgagcaccacgttgccacattcaaacacaggacaggctcctttgccccagcagacgggcacgaggttccctggggcggctggggtgtagaagcagggcagataggcattctgaccgacctccgctctgtattccacttctgaggaccttgtaagtagtagcagcagcagcagcaggacacagtcaaagggaagatgtgaaaacatggagcttgcagaagaaaagtcagaggacacctctgttaggcacagttttaactctccaaatggactgggtacttcttccaactgtctactccacaatcacatgagcagtccccggccgtaatggccgaattcccgggcatatgtccggtaccgtcgactgnnnnnnnnnnnnnnnnnnnnnnnnnnnnnnnnnnncggnnnnnnnnnnnnnnnnnnnnnnnnnnnnnnnnnnnnnnnnnnnnnnnnnnnntagcgccctatagtgagtgggtggttgacggacgggtaagaggcgggggcaacgcgggggggaaaa

SEQ ID NO: 138915 - DNA, 154 bp, Homo Sapiens
cttcagtcttagagtttgaaagagtctatcttgataatctccccagtgcatccatgtatgagcgcagttacatgcatagagatgttatcacccatgtggtatgcaccaagtaagtctatcacatcttttttactttgttctgagtttatttaaa

SEQ ID NO: 138916 - DNA, 820 bp, Homo Sapiens
ggggcgccttttctgacgatgcgaacaacatggcggcggaaagtggtagcgattttcagcagagacgtagaaggcgccgggacccggaggaaccggaaaaaacagaactcagcgaaagagagctggcagtagcagtggcggtgtcccaggagaacgatgaggagaacgaagagcgctgggttggacctttacctgtggaggcaacactggccaagaagaggaaagtcttagagtttgaaagagtctatcttgataatctccccagtgcatccatgtatgagcgcagttacatgcatagagatgttatcacccatgtggtatgcaccaaaacagattttattattactgccagtcatgatggacatgtcaagttctggaaaaaaatagaagagggaattgaatttgttaaacattttcgtagtcacctgggagttattgagagtattgcagttagctctgagggagcattgttctgttctgtgggtgatgataaagcaatgaaggtgtttgatgtagtgaactttgacatgatcaacatgctgaaacttggctattttcctggacagtgtgagtggatctattgcccaggggatgcaatttcttcagttgctgcttccgaaaagagtaccgggaaaaattttcatttatgatggcccgaggagataaccaccccacttcatattttttgacaaacttccatacattcaccttcttactcaaaattacggcctaaaccccatttttaccaaaccagtcagtggcccttcctgcacaaaatttgtgggaatgattcggaatccctggcactgggggcccctca

SEQ ID NO: 138917 - DNA, 291 bp, Homo Sapiens
  misc_feature (92)..(103): n is a, c, g, or t
ttagtgatgcagttagtatagctttatactctctccactttatagctctaataagtttgtgttagaaaagtttcgacttatttcttaaagcnnnnnnnnnnnncccatcactctttacatggtggtgatgtccaaaagatacccaaattttaatattccagaagaacaactttagcatcagaaggttcacccagcaccttgcagattttcttaaggaattttgtctcacttttaaaaagaaggggagaagtcagctactctagttctgttgttttgtgtatataatttttt

SEQ ID NO: 138918 - DNA, 770 bp, Homo Sapiens
  misc_feature (692)..(726): n is a, c, g, or t
tagttttaaaggtcacattggctggattcaccaatgtttttagtttttccaccgtaagagaaccaaacatcagggggaaccaaagggtcacaatccccgtggcactggagaatagacatatctttattagcccccgtgataggaccctgtggaaaggaaagcccgaagtggaagccagcaactgagtgcagtgacacctgccagtttctgctgtgtggtaagggcagtatataaagataaagctcctccctgagaaaaccctcccaaaataattctgttagaaggaatgccattcttcacttcttgatcaatcaaagcttttatattttctgctgcctgtttaatcccagattcatcctcctgtgaatctggtgaaagcccaataatatcaaaccatgaaggcatagccacgttcatatttaatgtaacaggcctaacaggcgcatgcgggcagatatatttgatatgtgaacttctgatacctgcaaaggcttctgcccatccgtgcccagtatctcccaatccatgcaggaaaatcaccgcagcggtggccttccgggcggcgggcacgatggcgggcagcggggttgacatgttattgccgcacatacaccgcctcagctcacagcgcaagcggaagccccggccgtaatggccgaattcccgggcatatgtccggtaccgtcgactgnnnnnnnnnnnnnnnnnnnnnnnnnnnnnnnnnnncgccgcttcctcgctcaagactccgctgcgctcgtcccgggttt

SEQ ID NO: 138919 - DNA, 1347 bp, Homo Sapiens
  misc_feature (1063)..(1063): n is a, c, g, or t
  misc_feature (1116)..(1116): n is a, c, g, or t
  misc_feature (1169)..(1169): n is a, c, g, or t
  misc_feature (1196)..(1196): n is a, c, g, or t
  misc_feature (1202)..(1202): n is a, c, g, or t
  misc_feature (1210)..(1210): n is a, c, g, or t
  misc_feature (1242)..(1243): n is a, c, g, or t
  misc_feature (1280)..(1280): n is a, c, g, or t
  misc_feature (1286)..(1286): n is a, c, g, or t
  misc_feature (1289)..(1289): n is a, c, g, or t
  misc_feature (1302)..(1302): n is a, c, g, or t
  misc_feature (1313)..(1313): n is a, c, g, or t
tattttctgtcgggttacaacccaccttgtttcttctgggcgctttcaatgtatgcaataaaatcatctttctaatgagctttgtgggcaactgtgggacattcacaagaggctaccgagccatggttctggatgttgagttcctctatcatttgttgtatctggtgatctgtgccatggggctctttgtccatgaattcttctacagtctgctgctttttgatttagtgtacagagaagagactttgcttaatgtcattaaaagtgtcactcgcaatggacggtccatcatcctgacagcagttctggctctgatcctcgtttacctgttctcaatagtgggctatcttttcttcaaggatgactttatcttggaagtagataggctgcccaatgaaacagctgttccagaaaccggcgagagtttggcaagcgagttcctgttctccgatgtgtgtagggtggagagtggggagaactgctcctctcctgcacccagagaagagctggtccctgcagaagagacggaacaggataaagagcacacatgtgagacgctgctgatgtgcattgtcaccgtgctgagtcacgggctgcggagcgggggtggagtaggagatgtactcaggaagccgtccaaagaggaacccctgtttgctgctagagttatttatgacctcttgttcttcttcatggtcatcatcattgttcttaacctgatttttggggttatcattgacacttttgctgacctgaggagtgagaagcagaagaaggaagagatcttgaagaccacgtgctttatctgtggcttggaaagagacaagtttgacaacaagactgtcacctttgaagagcacatcaaggaagaacacaacatgtggcactatctgtgcttcatcgtcctggtgaaagtaaaggactccaccgaatatactgggcctgagagttacgtggcagaaatgatcaaggaaagaaaccttgactggttccccaggatgagagccatgtcattggtcagcagtgattctgaaggagaacagaatgagctgagaaactgcangagaagctggagtcaccatgaaacttgtcacgaactttctgggcagctgtcgngattaaggatcagatgacagaacaaaggaagcagaacaagaatgggtctctangacatctcctcacatgaatgtcacccnacacancagcatangcaatgaaagaaaggatgtattacttttaaanntatatatgtggtatggtatgagtctgatcaccacganggtaantangctgatacattgnataccagtttnaacgtagaatgatgcacctaaggttgataatgta

SEQ ID NO: 138920 - DNA, 880 bp, Homo Sapiens
ttcttcattgcttatctgtttttggttgacattcatgtgaggaggatgtcctagaagaccattctttgtttctgcttcctttgttctgtcatctgatcctttaattccgacagctggccagaaaggttcgtgacaagtttcatggtggactccagcttctcctgcaggtttctcagctcattctgttctccttcagaatcactgctgaccaatgacatggctctcatcctggggaaccagtcaaggtttctttccttgatcatttctgccacgtaactctcaggccccagtatattcggttggagtcctttactttcaccaggacgatgaagcacagatagtgccacatgttgtgttcttccgttgatgtgctcttcaaaggtgacagtcttgttgtcaaacttgtctctttccaagccacagataaagcacgtggtcttcaagatctgcttccttcttctgcttctcactcctcaggtcagcaaaagtgtcaatgataaccccaaaaatcaggttaagaacaatgatgatgaccatgaagaaggacaagaggtcataaataactctagcagcaaacaggggttcctggaaaagagaggtgtctggatcagtctgggtcccttgcgaccctttggtctgcggagcctggggcacagctcaagtgagacctcatctacttgggtagaaattaaattgggcattcaacttttaaactgaaaactgcatctcttttccatgtcccctgtctcaattgcgacttctccaagtgtggtgtgacacagccaggagggatattcactgtgcgttcaggtggatcaggcctaaccctccccggccgtaatggccgaattcccgggcatatgtccggtaccgtcgactg

SEQ ID NO: 138921 - DNA, 944 bp, Homo Sapiens
ttaaccttgaccagaacaaagaaaatgtggtgtatttcagcaataacagacgtaaccgtgaaaagacaggagagaatgtattataaacattctcaaattgtatttttaaactttcaggaaatgaaaagtcacaaatagaacttttaaataaggagtaggatgtgtaagggcaggaaggtaatggtaatctattctgaatttgaaactccatgtgaatatctaccatatgtgatgatcttggatattggcaaaggacataaagatgcaacacatgaacctgatttgtccatgtcttccaatctgatttaaaaagtgttagaaggagtttggagatgattatttgaggcttaatattgtccaaatttactgttttagttctagtcatgaggaaaattgatcagacgcaggttttaacttaattttgctcataattactcatgttgaaataagccaggataatatattgaaacacactccaatatttgaaccatttctcaatatctgggcagtggccatttaatcaaattaaatataagtacatagaacaaattttaaggaattcactattattaataaaatatacataaattatattacattgttggtaaaagtaacaaaatttttaaagagacatccattttaaaatgatactctgtaagtacattttcagataggtaacttcatactttagaattatttaatttctcagccactagatacaaattggaccaaaatagagagagtaaaactctttaacatataaattgtcagatgtgaatgatttccatagggacaacaaaataaatttctaaaaaggaatggaaaatatgattcttgtacttaaatgactgattttttatagacacaatagaaaatatactggtgattttgcaaataaaccagcatttctgtttaaatgtatggtcagctctgatgctcttgca

SEQ ID NO: 138922 - DNA, 573 bp, Homo Sapiens
taggtaagattttcttcagtgttggggtcaaaaaatcctttggtatcatcacttggatctgagagaatctcactgagttcctcattgaaatagcccctcttatatgctatgtcaactggtaaacgatggctctcctttgggtcaatgatccccccggttgcgatctgtgcttctaataagcgaataccgtggcccttttcgatgagttccttattcatggcttggaacaaagagatgatgtttcctgtttcaggatcattatacccagtggcagcttgttttgcagacaggagcttttttttgaactcaaatgcccaccagacttctcttgtaggctttcttccactggtaacctcaagttgctaacaggatccactataaagccagtagctgcttgggcttccagcaactccagagcagtaccaggtcggactaagccaattttcatggcctcataaatgccaagcttctgttttgtggtctcattgtatatgcctgctatgcagcttgaaccctggaggaagtccttaattctctcaccaacctcgtcataagaaatctgaccagattcca

SEQ ID NO: 138923 - DNA, 805 bp, Homo Sapiens
aggggaatataaattatgtttaattattcagaatattaatcctcctaaaacttcaaaaggcaaagaattccagtaatgtaaattttttccttaagatatctccaaatctgaattctttgttagtccttcatattttccaaaatctgtagtctttagccactccaccagcttggcagatcggaggaaatctctgtgaaatggatgatgattgggtaaacccggttgagacacagtgctgggggagagtcgaactctgatcgtggccctgttgaacaaaaacattgtttaggtgactggccagtctccgggcaaaaagctctcgcaaatcactgaatcgctgctgttgctgtttgactgccagaagcaagtcatggcctggtcgaagagctacattcatgcactgcagaagggcatcagcagcattggtgcaggcctcaatgcctctggaagaagcaagatctccttcctgaagggcctttatatgacctttggccaagtccatgtggttcacaaggaactctatctcagataggagttttacattattagtgttactaagatgaattaggtggttgctttcagagatctgatccatttgttcttttacactttggagcatttcctcataactgctcagtttcaattcaatctgatctacctcctttagagcctcatctagcaatttcatcaggatgttgacttgtttttcagatgccatgattgactggatgttagccccatctagcacctgcagctctctggacaatttttctgcaaaggcttccgcattcgagattgaatattc

SEQ ID NO: 138924 - DNA, 1230 bp, Homo Sapiens
tttccccagggcccaacatgaatacaggctgtgaaggcttccggccccaaaccagtcaaaaagatattgaaagtcaagaaaccagaccacaggaatgaagtaacgttcccaggtgctgctgcctgcgatgctggacttgacctcaacagtccacggctggaaacatcccaatgggtgatagtgaagatgaagcagacagagaaagccaggactgagatatttttcaggatggctttgatagagtggctttcattggtgggctgagagttggagactgaaactccagattcctctttgcctgttcttgtgtcctctcctttgcttatgaggttccaacttggtctcctgcttccccgggtccttcaagccttgagctgctgttattagcggtagaattccaggcggggcaggcccaggtaacagatgatggtcaaaatgataacagcacaggctgtgataaagtagccgaaggcactttctgatagctccgagccactggcaatagcgcagatcatggccacggaggcaaagaagcctgctaggccctggccactcatgatgggggccgtgtagctggcaggcagaaggccagccagaccaaacaggctgccctgcaggatggcaccaaatgaattaatgagcacgatcttgatcatggtgatgacaaagaagggcagagcatccagctgcaccttcaccaggatggcagtgatcagaaacaccagcaggatggccaccaggctgcccaggatccgtacggactgggggatcctctgatgcaggaaggagttgaggtaggtgaataacagcaggggcagcatggcacatagggtcatgacattgttgaagatggcactgagagagttccgctcaggcaagggtgctgcaggggcggctgacgcctgggcgtccttgctcagttcagcagtgaccaaggacacattctgggacatgtccaggcggtttgtgaaatactgagtggccgtcatgaaaaaattccacgggagcagcgttcccagacccagcatgaagaagataagccagacagctttgtatctgtcctgaggctggtgactggttgtcatggtgatggtgttctcggttttccctggctgacagctccctccctcaggggcctgccgcagaagcactgctcccgcgctgagatccgcgcgctctcgctgcagcttccccctcgtgccgaattcaacaccagcctcgtactagtaa

SEQ ID NO: 138925 - DNA, 901 bp, Homo Sapiens
cttgaacccaggaggcagagatgtgttaaaagtagagagaccctggctgggtgtggtggctcacacaggaagagatttatggaatggagacagtgaaacagatgggaattccagaggtccctgctcctttcccagaggaacagtaaagttcagcagacctgggtgcgtccccatcctagatcagttagaagaacagagattatctatttcagggctttactacggtcggcactcaataaataatataactgatttttttaacaaataccgatttaagaagtgatggagttgattgaaggtcactggtaactgacccctcagccacaaagttcttttcctgaaaccataaacactctccattgtctggaatgtgaaaggagaggcctataaccctgtagcattgctaaggctactaatccaaatggccacttctgatcaaatacactttgccctgaaaaggcaagagatttgtggaaaaggcatgtcaaaacccaaagcattgtcaaaacactagctccagaactcaaaactcagaattcaggtgcccagattcacccaagtgctcttttattgttattatttagtcattgacaagtatcgatcacctactccatgcctggctttctgctagatgctgccttggtcacacaatcactgacacattatgaagaaagctgcattacaaacctctatactctaacagcaagaccagtcccctaccgcctggtcttccttcccctgcctgtgccagagtccctgcacaactcccaagacaccagagcagagcgtgagtaagggcaggctctgcccctgggtgcgtgctccagggccgtggacagttatgggaactgtctacaagcagcacagggagttcacattttacctttcataggaaatggag

SEQ ID NO: 138926 - DNA, 884 bp, Homo Sapiens
gtagttcaaccagctccaaacacggttgtacagtggtaattattctgcagcatttatgggcctaaatttcagtctgaattgcaacttttaattccattgtctgatgtgagtggttgttatttgtttcttttagtgcatcgccaatattatcaatcaacattaggttttattccattgttaccatgttcttcagcaatatgattcacctgtgaaacttctgaacaggaagcagtttgggtaaccacagaaatgctacactgatgtggggaattttccagacggtcattttctacctcaggaagaatgttaacagtagcaaagcgggtgtgataatcactggaaccatgactacaagaagttttcatgctttctaggtcagaacaactaaattcagaaaaatgactagagtgagaatctgctacagaaggcatactgtcactgagggatggagcctcaaattcacttgagttcgtgctttgttgttctaacaactgtgcatccatgtcctctctcgtctcatttatcttcatgttaccctttttcctcagtttaccacttttttgattttttccctgctgttgcttctttggaccacttggtggcactagatttaccttcaggcaagccactggatgaaccgccagcatgacttcgggtggcactgccatcatccacactactgcttccactgttgtgcctgaatttggatggctttgactcaatatctacttgcacctccatcctgttgccttctttgtccaatgggatgtaggaattcagaatggatcctgccattgctttggtgctggcattatcactaactgtccccaagctgactgtgccagattctccacttagagtgtaccgttctttctgaacatctg

SEQ ID NO: 138927 - DNA, 888 bp, Homo Sapiens
atcacctagggacagctgtggcctcaaagtcacctccatatggttcctagcccagggtctgccatctccttggctcttggagtcaacccagaagggactcctcttaacctcccacaggttgagcccaccagcttacagttggtttccaggagagagtgaagggcactgtggctcccatccctttctcccatgtccatggttgctgtgcgcagagacagggccttggagggatgagctggagcctggtggattccatcccattctgatctgcaagatgtgatgcctcaggccctcccactcctctggccactggttatgctttggggctccctcctgcccttgaatgtctgtcaaaggagctgagaaacttctggggatgaaactcagtccccctttgtctctccccttccttctaagtctgcccccgggcaaaggcctactctgcgaacagcacctatttgcctcagtgcagggcttgtaaacaactcaagtccttccgtgggtgggggccatgggtgccatctgtcctcagggatttggtgagtccagatctcactcctgtctttccacacaggctgctcgactggccccgccaaacagagtcctcggcagttccagggaagtggggctggggtcctcattgaagctcggtggttgggaaggaacaggtgtctcctttgcctttcttcaagctactgatttggggaagctagggcccaactccctcggtgcttcctgcccatgtccccttcccccccaccctgaaggcctcccggcgacactcctctcctgctcagtgatcagtgccatctgggctgcccgactactccagggagtcactgtgttccaagcccaggtcgctgacatttgtcgtctgcagctcgtcga

SEQ ID NO: 138928 - DNA, 768 bp, Homo Sapiens
tcatcctgatccaaaccgcttctcttctgtgtccaagttcttcttggatctgctgcttctaccaggatcttgggcatcccggatggcatgcagcttagcaattcgaggataatcattgctcatgtgccttgagctcctcctcctgctccagtccgcagcttgttggctctctgcaggaggttctgggcccgttcctcggccacctcctccaggtcactgagcttcttgttgttgttccacaccatctccttctgtttcatgatcttctttcgtgtcatcactgcatccatggtggcttccttctccttcttgaaggcctggtccctggcctcaagttcttctctggtcaggacatgggatgcccatttgattcgctcaaactcctcagggctgatgattagggactccccggagggatcctctgtgggaacaatgagttctcggaccatgtcccgggtgatgagctggatggtctctggcttgcgatccaagcccaaagcagtgagagttttttgaagggtatgcttatctcggagcagcacaatggggctgtcgctctggccctgggctggggacttgatatctccaaagaggctctcatccacctcagagctcacggctttggtccgatagcgagccttattccttgacctgttggaagcggcagaagaggagctcaggatgccagctgtgcttagtggcatctcctcagccacacgccctgactccggacttctgctgccgcctcggcgccgccaaggccctagt

SEQ ID NO: 138929 - DNA, 787 bp, Homo Sapiens
  misc_feature (121)..(145): n is a, c, g, or t
  misc_feature (325)..(341): n is a, c, g, or t
  misc_feature (626)..(626): n is a, c, g, or t
  misc_feature (774)..(774): n is a, c, g, or t
gggagatgcaaggcggcgattttcccttctgtcagatcttgatgaacaaagcagtcataattcatctctagaaagatttatatcctggcatttgaaatgctttttatttagaatagtagtnnnnnnnnnnnnnnnnnnnnnnnnntgatgatggaataccagaccaagagaattccttggatttttctgaacactttaaccaacttgaattgttggaaacacatggacaccttattcctactggtactcaaagtctttgggtaggcaattctgatgaagatgaggagcaagatgacaaaaatgaagagtggtatcgattgcaagnnnnnnnnnnnnnnnnngacccaagcagattgcttctttgggctgctgaaaaaaatcggcttaccacagtgcggagactgctttctgaaaaggccactcacgtgaacactagggatgaagatgagtatacccctcttcatcgagcagcctacagtggacacttagatattgttcaggagctcattgcacagggggccgatgttcatgcagtgactgtggatggctggacgcccctgcacagtgcttgtaagtggaataataccagagtggcttctttcttactgcggcatgatgcagatatncatgcccaaacaaaaggcctcttgaccccccttgcatcttgctgctgggaacagagacagcaaggataccctagaactcctcctgatgaaccgttacgtcaaaccaggggctgaaaaacaaccttggaagaaactggcatttgatatntgccagggaggaa

SEQ ID NO: 138930 - DNA, 736 bp, Homo Sapiens
ggggtagtctcggaggcggcgccgcaggggattgaggggttgactgagcgttgcgagccttagctttctcccgaacgccagcgctgaggacacgatgtcgcggctctcccgctcactgctttgggccgccacctgcctgggcgtgctctgcgtgctgtccgcggacaagaacacgacccagcacccgaacgtgacgactttagcgcccatctccaacgtaacctcggcgccggtgacgtccctcccgctggtcaccactccggcaccagaaacctgtgaaggtcgaaacagctgcgtttcctgttttaatgttagcgttgttaatactacctgcttttggatagaatgtaaagatgagagctattgttcacataactcaacagttagtgattgtcaagtggggaacacgacagacttctgttccgtttccacggccactccagtgccaacagccaattctacagctaaacccacagttcagccctccccttctacaacttccaagacagttactacatcaggtacaacaaataacactgtgactccaacctcacaacctgtgcgaaagtctacctttgatgcagccagtttcattggaggaattgtcctggtcttgggtgtgcaggctgtaattttctttctttataaattctgcaaatctaaagaacgaaattaccacactctgtaaacagacccattgaattaataaggactgggtcatgttctgtgggtaccg

SEQ ID NO: 138931 - DNA, 1110 bp, Homo Sapiens
  misc_feature (837)..(924): n is a, c, g, or t
ttctttatcggctgctccagccaccagattgcgggcatcacacaccagaccagtgcccaccctgggctggagctgtctccaagctgcatggaggcctgctcctgcccattggacggctttaaccctgtctgcgaccccagcactcgtgtggaatacatcacaccctgccacgcaggctgctcaagctgggtggtccaggatgctctggacaacagccaggttttctacaccaactgcagctgcgtggttgagggcaaccccgtgctggcaggatcctgcgactcaacgtgcagccatctggtggtgcccttcctgctcctggtcagcctgggctcggccctggcctgtctcacccacacaccctccttcatgctcatcctaagaggagtgaagaaagaagacaagactttggctgtgggcatccagttcatgttcctgaggattttggcctggatgcccagccccgtgatccacggcagcgccatcgacaccacctgtgtgcactgggccctgagctgtgggcgtcgagctgtctgtcgctactacaataatgacctgctccgaaaccggttcatcggcctccagttcttcttcaaaacaggttctgtgatctgcttcgccttagttttggctgtcctgaggcagcaggacaaagaggcaaggaccaaagagagcagatccagccctgccgtagagcagcaattgctagtgtcggggccagggaagaagccagaggattcccgagtgtgagctgtcttggggccccacctggccaagagtagcagccacagcagtacctcctctgagtcctttgcccaagattgggtgtcaagagcnnnnnnnnnnnnnnnnnnnnnnnnnnnnnnnnnnnnnnnnnnnnnnnnnnnnnnnnnnnnnnnnnnnnnnnnnnnnnnnnnnnnnnnnaaccaaagagttgtttgggcatttgctgtgttggccatttctggagcaagagggtcttcttcctccttcccccagccagccagctgtcctggggccaggctttcctgggtggaaagaagtatacctttccctggggccctaggatagcaaagtgagccatagtgggccaggctgccctccattgct

SEQ ID NO: 138932 - DNA, 674 bp, Homo Sapiens
  misc_feature (51)..(51): n is a, c, g, or t
  misc_feature (65)..(65): n is a, c, g, or t
  misc_feature (105)..(105): n is a, c, g, or t
ggaagaatatttttaaataacttaattgaaaaagtattgaactccccaccnaatttcagctgcancagtattccacctgaatgttttctaattagtgctctgtcnctggactttaggcccaatactctgtgtgtcctcttcctgactaggacgtttcccaccactgagaccagtgcccatggagcttcttccttgcttcaacaggtgagtttgctgactgtcgccatgagcatagtgtaaaataccactcccttgagagcaacttccactgctgctacaacctgggatattttctgcagaatatcccatgaagcctccattcccattaggattagaaggtactgatgccagaagacctagtcctctatatcgtgaaagctgctgatagatctgtttcatcctttcgatattcaaacggcttgcctcagcatggttcaccattggtttaggataattaactcctatcaaacatttggctaccttttggataccttctggtgcattccagggatcatagatatattttgcagggaagcctcttaggacaggcaaataacgcctgatatagtctccattgggatctgttctcctaccaaaaccaacagggcaatagcagtgaaaaaactgttgaaaaaaggaactacaagacagccacatccaacttccaacattta

SEQ ID NO: 138933 - DNA, 899 bp, Homo Sapiens
  misc_feature (54)..(54): n is a, c, g, or t
  misc_feature (799)..(833): n is a, c, g, or t
gcttaaataaagtggggcatcaaaggagaccgtcctcccagagccatgggtacntgggttcctcgccgagacagcccccatccagaatggaaaactggaataggaaaattgcttgctggatgaagttccagatcaagctgtgctattaattttcagcaacttggcatccaaagacaagcacttctcttggctcttttcccagttaaatgagcccgaggaaaataggtaacagttttctccatgccagatccagtcttgcggacaaggagctgaacaatttgctactctcttcagtgtttcttggagattcagattctggtggtgaagttccatttgctctttggatttctcattcagcttccgagcaagggtttctatcatttccttgagttcgttttctgactcctgtgaagcttcttctgcttgttgccgggctgagatctgtccctccagtttctttttctggtgagttaggtttgcttgctcttgtgttaggaggtcagacacctgggataattgcatgcccagcaccataatggtcactactaatcccaggcaaaggacccctagagtcgcagcagccaggcaccaccatggagagtaaagaaactgaagacctttagctttttttccatttgacttctcatcaggctggtccttcacagtctggatctttaggtcatcaaaagtcatttccaaattcaagctaagaatgagagagtgaagcagtcacgaacttcaacaactccccggccgtaatggccgaattcccgggcatatgtccggtaccgtcgactgnnnnnnnnnnnnnnnnnnnnnnnnnnnnnnnnnnncgccgcttcctcgctcaatgactcgctgcgctcgtcgttcgctatacgcgggcccatatagtatca

SEQ ID NO: 138934 - DNA, 1211 bp, Homo Sapiens
  misc_feature (1105)..(1137): n is a, c, g, or t
tgtgtttgtgtggtgctcacaggtggtgcccgtgattccgacctacgttaatttttgaagttcattctccaaaagtgggctttgatcctgggttttccgcggggtaaagtgaaagtgattgatgtaccgtttttgtggataatttacattggtcctcggatggttatcccatacaaatgtcaggggttttctgccatccaccaatggagatctacctgcccaattgtgatcatttgaaactggtttccttaagccatttcccaaagtacaatgatgattatagcttaccaacatagaagtcagaagtacaccaattagtatggcagctattgaattataatgtttttttgtgggtttgtttgtttactggtagtatctaaagataaatcctggtgtactcctctaggtgaatttttgacagttgattttggttgtgtggatggattatgaacagttatttgttttctagaagggatctggacagatgatgattgttgagtaaaagtatagacaaatgactttggtggttgtgtggtagaagtacgggcagatggtagttgtctggcagaggtgaacacggcttgctgggaggaggtgttggctattggtgttggttgtttggtgttgtaggcaagtggttgtccagcagaagtatgtgcttctggtttttcagaagaggtatagacagctggtgttggttgtccagcagtgactttggcaggtgatattgattgtccagaaaaagtgtcgctgaattgtgttggttgacccaaaggattccctgttgtgttttgagaattagccaatacctgtgacattgatgatgtgaataaggtaggctgtgactgcttctctgttgtaattgtctctgtctttgaaaaaaatgtattgttcaggtgtccacaaaacaaaattaagatgaaatatttgggatccatttcagaatatttcctcgttatctcagctgttaacttcttttgcagaatgctaaattcttgttctaactggacattttggtgatttggctaagaaaggaaaatgggtggttcattcacccgaccgtaatggccgaattcccgggcatatgtccggtaccgtcgactgnnnnnnnnnnnnnnnnnnnnnnnnnnnnnnnnngtgcgccgcttcctcgctcaccactcctgcgctcgtcattcgcttctaagactagcccctatagatctcagtct

SEQ ID NO: 138935 - DNA, 693 bp, Homo Sapiens
ctaggcgtttgaataatagcaggcacaattccaaatacaggtatctcttgtacattctcacactgaagctttccacactaagcattcccagtggcacacttctagtattcattgccagagaaaccacaattgccaaatctgtcacctttagaattcacttcaatgaaacaatctttgggggcagccttggcttttgagccaaagatgacttgacattgagcatcataatactggcacatgccgttgtagcaataggctttgttattctggcaaggatatccattctgaataaaaacatctggctgacagaactgagaagaaccattgcagtactctggaacatcacactcactggtttttcctcggcataaagtacctcctggaaggaaccgacagtctttacaacagtcaccatatgcacactcagcaaatgatttaagcttacaggtacttccttcgcagcaagggtccaattcacattcctttggagtaccacagtcacactcttccccagcgtccaccaacttattaccacaggagggagcactataggcttcatcaggcttcggaatattaagaaggcagtttcctcctttatttaaagttcacttctcaaaagtcctctgcactggaactggtaaagtttctggaacccgatggtcctgaattcatgatgcaggtctttgctcacag

SEQ ID NO: 138936 - DNA, 461 bp, Homo Sapiens
ttttttttgatagtaagtgagcttttattttattcaccataaaatatttgcatctcttactcctcaggttcttacataagacaacatttaattaattaagttaccattatagccatcgagggcctgagaaaccacatcctttgcaactgtctcataaaccaagtcctgggaggcatcgtgaagaactccatccaacttaaacgaccagtctgtctgttggttattgacaactcctctccgaatgtctttttttaagtgaatatcaatgcttcttttgtcatctccgtatctgatcatttcatgagcaaagtcatcggtgggtttgacacggacaaatgcatgaacttttttcctagtacccattctagcgttcaccaggcagcgacgctcccgggacgcgactgccgcaaccgaaaccacctgcactccccacgcggggctgcctggctgtgtacatagtc

SEQ ID NO: 138937 - DNA, 415 bp, Homo Sapiens
tttttgatagtaagtgagcttttattttattcaccataaaatatttgcatctcttactcctcaggttcttacataagacaacatttaattaattaagttaccattatagccatcgagggcctgagaaaccacatcctttgcaactgtctcataaaccaagtcctgggaggcatcgtgaagaactccatccaacttaaacgaccagtctgtctgttggttattgacaactcctctccgaatgtctttttttaagtgaatatcaatgcttcttttgtcatctccgtatctgatcatttcatgagcaaagtcatcggtgggtttgacacggacaaatgcatgaacttttttcctagtacccattctagctgtaacacgaagggctccgactggtgatcccaaagccccctctagttcg

SEQ ID NO: 138938 - DNA, 881 bp, Homo Sapiens
  misc_feature (801)..(835): n is a, c, g, or t
tccattcctgatgtctggaggaggcttacacttgacaatttcacattgtgggagaggatgactccagccaactcctctatcttggacttcacaacgactagtggttgagccaattaagaaaaatccttctgaacagctgaattctatttgtgatccaaaagataaatctgtcttaatctctacttgcccattacgtaactctcctgggtgtctgcatcgtttgtagatacagaaggtgttatacacccattcgccatcagaattacaggtaagcgtctgagttgaatgggatctgacgtagccagggaggcaggtgtatttcagagtagttccagttttgaagcgtgtctcagtcaacgtaatatccatcggggcagcaaatgataaagtgggtggaggaccacaattgccaagaacagcaggcaacagagcagcgatcaaggtcatttggaagagaattggatcagagactttccacagcctggagaagggccaggctgccattttcctttttctatgaagagccccagatggagtttttggggggtgcatggcctgctgcttcgctgatgtttttctgctttggtagttgaggaagagcagaagactctatgatgatatctgggatagtttctcaaagaagaaaactgccttgatctatgtagtcctggttcctcccccgatcagagtttatcataataccctgaagttgactggtaattgctccaccaaagagttcctgaatttcaccccggccgtaatggccgaattcccgggcatatgtccggtaccgtcgactgnnnnnnnnnnnnnnnnnnnnnnnnnnnnnnnnnnncgccgcttcctcgctaaatagctctctgtccgccttgctggtttca

SEQ ID NO: 138939 - DNA, 1006 bp, Homo Sapiens
actgccgttaaagctggaccccggtgctgggtgtgtgatacttctagtacccgcccgcttgcagcatgatgcacccttgcacaaaaatgcttttctttagatcccttcagacagaaattgtggtcaaaaccattgagatggaagtcctgcaggtgttttccaagctcctctggctttctcaggtcgaatgcagtgccttgcactggggcaacttctcctgcaaactttgctcctggttcatgggtaaaaggagctctcagccttgcagaaaccttctgttggtgccacctgtaggaatcagggtttcatccacaggcaaataagtatccgcttctatggtgacttcatggtcatttatatttggggaagcctggcctgccaggttgaagtaagaatggttggtcaggttgactggtgtggcctgactggcttgtgctctgtagttgactatgagctctccgccatccaggggtgtatgtcacccagacttttaactctccggggtagccttcttcacccatctggactgatgcgcgagaactggacgccatttgacagcacccgaggggtccagagcactttgatcaaaccctcttactccctccatgcaagactgttgggttccttgttaatggccaggtgatactccttcccatccaccttgaaggttcctttggcagattcggttggccaccctcccaataactgctccaaagtatggctgcttttggaggtatccttccaactcggcgaagccaagcaccacgtccgaggctctcccctgcctgtctttgacctctagggctgtgatcgtgcagccccaggagatgatgtccactctcaagaggtctgactgcagctggaacttctccactgtccctcctcccgagggcagctctccaaacacggccctggtcaccgaagccatagggaaagtttggcgtgtgcagccactgcccgctcttcaaactccagcgctcgctaagctagaggcgacccaagtttt

SEQ ID NO: 138940 - DNA, 1189 bp, Homo Sapiens
  misc_feature (507)..(507): n is a, c, g, or t
ttaccatttgtatgattttaatccatagaatcattctgaaagcttcttaatcttcaccttttttctggacaggagacaggtggctgagctagccctggactggatcatatcttcacacttccttaagccacagaaaacttgaaccaggtggtgtggtcatactcctcaccaggcctcagcagcacaggagggaagcggggctgattgactgcatcaggccagttctgagtctccaggcagaaaccggagtgcttgggatagacagctccattcttgccctttaatgtgccatccaggaagttgcccgtgtaaaactggaccccgggctgggtggtgtatacttctagtacccgcccgcttgcagcatgatgcacccttgcacaaaaatgcttttctttagatcccttcagacagaaattgtggtcaaaaccattgagatggaagtcctgcaggtgttttccaagctccactggctttctcaggtcgaatgcagtgccttgcactggnggcaacttctcctgtaggaatcagggtttcatccacaggcaaataagtatccgcttctatggtgacttcatggtcatatatatttggggaagcctggcctgccaggttgaagtaagaatggttggtcaggttgactggtgtggcctgactggcttgtgctctgtagttgactatgagctctccgccatccagggtgtatgtcacccagacttttaactctccggggtagccttcttcaccatctggactgatgcgcgagaactggacgccatttgacagcacccgaggggtccagagcactttatcaaaccctctgactcctccatgcagactgttgggttccttgttaatggccaggtgatactccttcccatccaccttgaaggttcctttggcgattcggttggccaccctcccaataactgctccaaagtatggctgcttttggaggtatccttccaactcggcgaagccaagcaccacgtccgaggctctcccctgcctgtctttgacctctagggctgtgatcgtgcagccccaggagatgatgtccactctcaagaggtctgactgcagctggaacttctccactgtccctcctcccgagggcagctctccaaacacggcctggtcaccgaagccatagggaaagtttggcgtgtgcagccactgcccgctcttc

SEQ ID NO: 138941 - DNA, 1118 bp, Homo Sapiens
  misc_feature (57)..(57): n is a, c, g, or t
  misc_feature (103)..(103): n is a, c, g, or t
  misc_feature (745)..(756): n is a, c, g, or t
aagaagggcttaaaatcttttgtttcccatctttccatgggccccaaatcacaagantaagtccagccacttatctgagagagtaaggtatacactctcaccntgtaggagtgtccctttcttatgagaaagggacaaaaaggttgccgatctcttgggaacagcagcttcagtgacaaaaatgccttaaaggcagaggtggaaattcatttcagaagagaaacgaggatgacagagaccacaggcaacctgttattcaaggtattatttcagtttgctttgttaatttgggaaggactgcttttggcaaaaggggaaaaaattagtctccacagagaatcatgcttagattgtaatagtattttctctagagacaactttttggttaattgggacacaactatgagaatgcagaatttacttaggtgcaaagtcatgtttgctttttatacaccttaagatcctaaatacaagggaacctgtttttcagtagttcagtcatctccctgattctggttctaccattgggtctctctctcttcttccctcctctaagatcatcaaaacaatactacccaatggcttaaaagcccaaacatttttctgtttttgtccttccctccaattctatcttaaacatgtatctcctctaacagagtgtgctattttggcttgatggaatgcaaggttttatttgctgccactctgtaggacagtaagcattccaatgtaactagttctggtnnnnnnnnnnnngacaaagagattgcaaagtgtttccacaaaatccacgggcgtagagaaaggactgcaaggttcaactcaaaacacatgctccagagccaatcccagtattcatctatccaaatgtcacacctgtttgtcctttggcatgggaattaagactgaccaactatgatgcccaaccctagaatgagcaattgccgaggaggtgagaaggcgattcagcaggaatgtctccatgctctgaaacttgtggtctttgctttagtttctactacagaaaataccaaagacatccaaggccactctgtcccgtcaccagaacttgctgctggccacttccaatccatctcataccatttggaattgattgt

SEQ ID NO: 138942 - DNA, 415 bp, Homo Sapiens
tagatgcaagttattttataagtgtaagtgcacttcgttatctaggttctaggacacactggcatttcttaagaaaaagaaaataataaaatacatcactatcaacaagaaatgttggaaggctaaagagaaatctgcattaattttagtactgcatacagaggccaatttatgagcacaaagtactaatgccctcattggcactggcaagcattatctctaaagcacctaaaaaatggattgaaatgcccagttggaatagtcttatatattgcaatttaaaagattgaaacccacgcgtccgcccacgcgtccgcgacgcgtgggtcgacgatatcccgggattccgaccgtaccagcctgcttttgaccactgttcatattcacatgcttcttcgtttcttttttgtctgtg

SEQ ID NO: 138943 - DNA, 875 bp, Homo Sapiens
ttcaaggagtagccccctaaaggggtttcctggtccggttcccacggtaacctctcattggaggtccggaatctcttcttttctccttcgcctcctggaaaaacctgagaatagtgtaggcatttcggtttcatcaggaccctggttctttttaaattccaggatcccccttctgcttatcacatcccattgtcttttttcccaatgaatttttaagggcatccaaaccccccacttataacactctttcctgtgctctgaacagcagtagagatggtagagaatacaccaaatgccccagccactggggaggagttttcattctctttggcatttgtctctcctgctacatacttgacttcagttgaaatttcactgggactagggattccaagggaagtctctgccttctcgatgacatttgaaatgccttgtcctactgtagctactgtagccgaggctgaggagagtatggacttgccccagctcccccaataaccccatctggtctggggtacatctttggaaacattatcctgaatagggagaacttttgaagtctcaaggtcactggaaggtttggtctctggtcttttccgagtggaaactacaggttctgatttactctctggtttggcaccttggtcaacagactcagaattcttggctggctcacagtttccatcttcaaggatgggggctgcttcagttagcagtggagtctcaatatcatctttatctgacatgattagaacatcagctgtctgcctcgccgtttcctcatctgtcaaatggagttctgggtccctatccggccgccaccctcagcacagccacggcagccgactcggcgttcctactgccccggaagtccc

SEQ ID NO: 138944 - DNA, 1043 bp, Homo Sapiens
ggaactgaatcatgattttcaagcacttgctctggagggaagagcgatgggagagcagctcttgccaggtaaaaagttttgggaaacagatgaatccagcaaagatggaccaaaaggaatattcctgggtgatcaatggcgagacagtgcctggggaacatctttatcattcagtttcccagccaatcatggtgcagagaagacctggtcagagtttccatgtgaacagtgaggtcaattctgtactgtccccacgatcggagagtgggggactaggcgttagcatggtggagtatgtgttgagctcatccccgggcgattcctgtctaagaaaaggaggatttggcccaagggatgcagacagtgatgaaaacgacaaaggtgaaaagaagaacaagggtacgtttgatggagataagctaggagatttgaaggaggagggtgatgtgatggacaagaccaatggtttaccagtgcagaatgggattgatgcagacgtcaaagattttagccgtacccctggtaattgccagaactctgctaatgaagtggatcttctgggtccaaaccagaatggttctgagggcttagcccagctgaccagcaccaatggtgccaagccctgtggaggatttctcccacatggagatcccatagtgtccccttgggaccccatggaacatgtgggcatggagcctcttcagtttgattattcaggcacgcaggtacctgtggactcagcagcagcaactgtgggactttttgactacaattctcaacaacagctgttccaaagacctaatgcgcttgctgtccagcagttgacagctgctcagcagcagcagtatgcactggcagctgctcatcagccgcacatcgcaggtttagctcccgctgcgtttgtccccaatccatacatcatcagcgctgctcccccagggacggacccctacacagctggattggctgcagcagcgacactaggcccagctgtggtccctcaccagtattatggagttactccctggggagtctaccctgcc

SEQ ID NO: 138945 - DNA, 1106 bp, Homo Sapiens
  misc_feature (1000)..(1034): n is a, c, g, or t
gagtttttcttccgcctaaaggttgtctcccccgtttttgtccgttgtcgcaaaaccttggggagctccctttcctgcggtatcttttttcccgccctggttgtcacaccttttccgggggagtgtcctcgaggcctcttatcgggccaaattcatcatttgaggagggtcccggtgcgcagggtttcccccagggatttgttttcatcccggacgctcctcttccctctccggcaccggagactggcctgtttcactaacacgttgtcaggatctcatgtgttcctgcctggaagatgagcactttgaaatggttgcgtcggaggacctgggcgtggttgtttctccagccggcttcacctgtgcgcactgcctatccatgcgctctttgaccgcgcgcgtgtgggcgctgaccttgcgggacttctccagcagcttgctcaccgtgttgctggtggaggcctggtacttggagagcttggtgaggtcattctggatgcccttcacggagccctccaaactgatctgtcgctgctccatcttgtgctggttctcctgcacagcgtctagcatgttcaccagcttgtccaggagcgtgagcaccgtgactgcgttcacctgtgagttgtcccggatggcctcctctgtgttccctaggttcaggctggggcttggtgtggaggaaggcatcgggctggggctcgagggcttttcctgccgcatgtcagacccagggtgctggaacttttcggcctgtgcagcgtcctctcccatggctaggcaggtgggaacgttctttctctctgggagctgcttcttgctcgggtgagaagttgcggtggtgagggtgtaggatgaggcccgctggttggagctcagggcaccagtctccaggactggcagaggttcagacaggcaacaactggctacgctgatcaggggaactgcccccggccgtaatggccgaattcccgggcatatgtccggtaccgtcgactgnnnnnnnnnnnnnnnnnnnnnnnnnnnnnnnnnnnccgccgcttcctcgctcaatgactcgctgcgctcgtcgttcgctattgaggcgaccccctatagtgatatca

SEQ ID NO: 138946 - DNA, 490 bp, Homo Sapiens
tggtccaaaggcgcaagactggggattagcctggtgtgctgaaggaactgacagaggtcagtgtgtcaggagcccccatccataccccctccagtgaaaagcaggatagggcaactccttcaggatgatggaaaatgcctcagactggctggctgtgtcactgtccttgacttctcctcacaactagtatgacaggttgatgtggccgagcgtcagaaaatcgagagaacagttagcagtgcttccaggtctccagagccacaatgcaggtgaacgcagtcacggtgctcacgctcctggacaagctggtgaacatgctagacgctgtgcaggagaaccagcacaagatggagcagcgacagatcagtttggagggctccgtgaagggcatccagaatgacctcaccaagctctccaagtaccaggcctccaccagcaacacggtgagcaagctgctggagaagtcccgcaaggtcagcgcccacacgcg

SEQ ID NO: 138947 - DNA, 664 bp, Homo Sapiens
  misc_feature (1)..(1): n is a, c, g, or t
naccatacccggccggttatctgcagttttcaattctcagatttgctacatgaatatttttagcctacagaattcagattagctttgaggaaatgtggtgtgagagacacgtgtaaccagcagaaaatcagcttaggctacccaccttagcgttttgttcttattcaaacaggcaaattcttagtaaataagaaagaagtaaagtttgatctcaagaaaatatgagggaaggctgaaaagggccctgggttcagaaagaagggttactaaaaaggagataagccgctggacaacagatctccattttgcagaatgctaagacattgcacttagtacctcctgtttcccatgggttctgatccagaaatgtgcccctgggaactgagcagctgagttaaaatataactcaaggcccacctgagtcgccaccttcctgaggcaccgtgccagcaaggtgcaccagtgtggcagacctgggagactcactgtccccctcaggcttggctcatggactccgacaccccccaggggaaatgcttccagcccgggattagtcattcaaggggcccttcatacagacaaaagggaacaactgcacattaggggattttctaaaattggggcaagtccctgggcccctggcccccttaacgaaccatatgga

SEQ ID NO: 138948 - DNA, 1632 bp, Homo Sapiens
  misc_feature (63)..(94): n is a, c, g, or t
tttctttaaattcttcattttaccagcaactgctgacatcaaagtctcccctcccccaacaannnnnnnnnnnnnnnnnnnnnnnnnnnnnnnngtcatttgtgatcgttgctgtggttctgagctgcaaaggcactttcaaatacagaactacttgtacgtcatcataaaaccaatatacaaaaacaactcaagagtcaataaatataaataaaactatgatctaagactgcatcaccattaggacatctggcagaagtgggagctcaaagaccagggggctgggcaggctcctgggagcctgatccgagaccgtgtcggctgcaaggggacacacaaccagggtactgttgactagctttttgcatagctgtgagatgcggcactcgatttcccagccaaccacagaaactaccattgccagtgtaagccagcttgtcaaaacttaaattaacacagggattctaagtcagcaacggcctcagactcgagtatgacacgacagtttaaagaactacaagccctcagactctacctagcggcggcagtgcccgcggtctgctatacgatgtactccattcggtttaagctctgggcactttccaagtctctgttgtcctgtttgtttgtccagtttgggtgttttgtcggcgtgccgttggggggcttctcttctctgtctaccagcgtatacgccggctgcttggcaaaccgggctttctgctggtgtttgtccatgtcgtcctcttctacttcagaattgtgtgtccttattttagacattttggagttcttgttctcgtaatccttgatggggaccgtgttggccccatgtttctcaatggggtttttgatctggttcagctgctcccgcacgttgttggtggtgttgtcctcagaggctgagtgtgtgtggctgcccggcttccgccgcttccgcaggcaccagtagaaggccgtcaccaagcaacagatccaagccacagttaagacagagctcagcaagggaacaaggaaatctgttctgttcttcagaggccgcctctgaactcttacttctgcaacggcagcaatcagcgagctgtttccatcacgtttactaacaagatcgattattttgtcagtgatttccttgatcgggttcccatcatcccgtatatcttcagcagaaatggccacatgtatttcattgttcgctgaaggggaaggctcgcaagcgatgtagattgaatattcagcggaaacattcttcaaaatattcaaattcctcaattcactgcaaatgtgctccgtagtaagacctggtgacatcatctccttgttaaaggtaaatgtgatgttcgcacagttatcctggtaataggagtcagaggtgcactttgtcttcaccggctggagactggaagaccgacactcgcccacaccagtgcaggggtggacgaagcactggtcgtccaggatggggatgcagctctgcccgctggggcactcgctgtgccctttgtggagcaggcaaggtcgagggccacaccagacctttgagcaggcgatccgtccattcaggcactggcaggtattacagtcatcatcccattggccccatcatcccgggaatccggaccggtccagcct

SEQ ID NO: 138949 - DNA, 898 bp, Homo Sapiens
attttgtttctgtcaggctgtccctggccggggttctgtaacgcttgtgtgggccgcaggtggaggtgttgggaaagcgcggaggagatgttgtccccagtgtcccgagacgcgtctgatgctctgcagggacggaagtgcctgcgtccccgatcgagacgcctgccgctcccggcagctgtccgcgcccacggtcctatggcggagctaacggactccgcgcggggctgtgtggtctttgaggatgtgtttgtatacttctctcgggaagaatgggagcttcttgatgatgctcagagacttttgtaccatgatgtgatgctggagaactttgcacttttagcctcactgggaattgcattttccagatcacgtgcagtcatgaaactagagcgaggagaagagccctgggtgtatgaccaggtggatatgacttcagccacagaaagagaggcccagaggggacttagacctggttgttggcatggagtggaggatgaagaggtatcttctgagcagagcatttttgtagtaggagtgtcagaggtcaggactctcatggcagagctggagtctcacccatgtgacatatgtggcccaatattgacaagataccttacacctggctaaataccatgggggaaaagccaggcagaaaccatacttgtgtggggcatgtggaaagcaattctggttcagtacagactttgaccagcaccagaaccagcccaatggagggaaacttttcccaaggaaggagggcagagactctgtgaacagctgcacgagtccatgtgccagacaagaccctcacatgtgggacaggtcaggagagacttttccgccacatctggccttcttcagccatcaagcctcatttcaatcggccttgaagccc

SEQ ID NO: 138950 - DNA, 837 bp, Homo Sapiens
ggttcttctccgtgtatgcattctttgattttgtgctaggatgtgaaatttgattaaaaaccttgccacattcattacattataatggtttctctccagtatgaatcctgcgatgctgtgcaaggtgtgacatattatggaagaccttgccacattcattacatttatatggcttctctccagtatgaattctttgatgacttgcaaggtttgattttttattgaagatcttgccacatatatcacatttaaattgcgtctctttagtatggattatttgatgtatagtaaaatgtaagccttgatgaaaggccttgccacgctcactacatttgtagtgttctgtcccaatatttgctttctctttttgtgtgaataatgaatccacaaaattacattcatatgtatgagaaatgtgggttttgacagtagaagaaatacgttggggtggggaaactaaggaactactgttgacagatttttccatgtgatcatatttatatattttcccttcagcttgaaatagctgcagttctggtagatgtgactgcgggtttaatccaagctgatttttaacaggctgcttttgtgcatcatcctttctcccatgcatgtctcttctaccaatgagactttccttataggtcacacgcactcgcttataatgtcttcaatcatgtttccacagacactgagagtcatgtacatttttctgggtttctctgaagcaaaaatcttgtatgtcgtggctttcatgtctttccaacattactgtctggaatatttctcctgtattactctccttttttggtggtaattccttgatctcacatttag

SEQ ID NO: 138951 - DNA, 654 bp, Homo Sapiens
  misc_feature (190)..(367): n is a, c, g, or t
atttgggggagaattccaagccgctaggtcatggtccagggatttcccttagggaaaccagctattgacccaatttcctttcccttactgggccccgcgcgcccaaacgaaatggttttgaaagttttttgagggccgaggcgggccgacaaggtagtagattttgttcttgccttctcttttcgcagannnnnnnnnnnnnnnnnnnnnnnnnnnnnnnnnnnnnnnnnnnnnnnnnnnnnnnnnnnnnnnnnnnnnnnnnnnnnnnnnnnnnnnnnnnnnnnnnnnnnnnnnnnnnnnnnnnnnnnnnnnnnnnnnnnnnnnnnnnnnnnnnnnnnnnnnnnnnnnnnnnnnnnnnnnnnnnnnnatagtacagtggcgccgcgaccgacaaaggaaagcctccgggaggtcaaaagagataccagagagtgcgtcccgcactggaggaagaggaaggtttttaccaagcagcgagtccagagcccgcgccgtcaacgacgcggtgctgccttttttccgagccgctgcgggagggggccaggacacgctcccttaggagagcgggcgggtcacaaggacctggacagaggcagaactgaggccagcagccagctccgccgctgaggccagccctctgcgcagaagccctgc

SEQ ID NO: 138952 - DNA, 1134 bp, Homo Sapiens
  misc_feature (139)..(162): n is a, c, g, or t
tacgtggccatgctgagcagagtaccatgagaggaaatgatcaactctggaaagctctcctgaagacaatgatgaaacagctattatcacatttccttatcttacaactggaacatgaaatggctttaaaacaattgtnnnnnnnnnnnnnnnnnnnnnnnnggtagaatctgtggaatgttaacaatcacaacagaacatttaccagagttacagtgttttgttacaataatactttgcaggaatgttcacgttttctgccataggactggagcaaagggtctcaaaagaaaacatttttttaaaaaagttttgttcatcaggtacatttcaagtcaaagttaagcaggtctgctacataatgttcagcaagaagatgtgttcaaaggcaaacactgatcaccttcttgttcagaaagctcaatcttaaaggagtcctatgtaagaaaaccacttgtaaaatatatccttgtatacggacttcaaaaactgatcatacaaaaaatttttgaaaaataaattagataattaaaaacgtcttttccagcaaagctggacattaggctgtcctcactgagccattattattgctgcttttactgtaacttggatcatttttttccagccacatctcagccagctgctgtgtggacccataggtcgatgctttggaccccaagcacattttgtactgtttggggtcaagattgggatcacaaaagacaggatggtggacgtggactactcctacttcctggctcctaaacgtcttcaaacctgcctggacaaccttgttgaaaaggtccacatcctccagcccccagccttggatggaaacatcaaagccacccactcggacaagatctcccttataaatacacgtgatgccaaacccatagtttctccagaagccagttttctgagtaaaggcaaaatggttgtcactgggaactttcccactataaacaatctttgggtcatactggctgaagatgattggaaaatatatttgttggcccagaactgtatttgctcgacatcgctgaaggaattctgtagtaaacacgaggtcaacgcggacgcgtgggcggacgcgtgggtcgacgatatcccgggaattccggaccggtccag

SEQ ID NO: 138953 - DNA, 1017 bp, Homo Sapiens
actcgtgtcatcccccttcgtgggggtatggctgctggttggacagaagctctccgatgactttgttcatgatgtcctggggtgggaagaagtcgtctagaaactggggcaggatcctggccaccactctggcttcacaaggaaagcctttcctgatcctatcaaaaagaacagatacccgctccatagcaacaatcactgactcgctgtcgggggctgcaggattagggtctgaagttctacccggactgactttctcctttcctgtgtacatgcaggtgagcatcaggcccagagccgccatggcccggtgcgggctgtgcacgttcactctgtccacactcagcttgaccagcgattctgcatccaggcgggagagctgctcagagagcaggaggcgctccaggcctctgagggcacagtggtaaatgatggagggggtggactcctcacttccagccagcatcaccccacacatctgtattattgatgctgaaaattccggccctacgtccagaggatagttctcaatgaggtaaaacgcagtggcacacatgaccagtacgtgctgctggctgtgaatgttcacgcagtgggcgatccctttcaggttggagaggagatagtcgctgatgaccgggatgagctgcttggcagtgtcgtccagcaggtcgcactccagcacatagaggatgccgtgcagggctccaaccctgctgggcaggtggctgctcctgagcgtgctctccagcaggcggctgacaggctccgccacggccatgtccatcccaaggacggcagctgccttgcaggtggcaggcaccaggtactgagcgaggatctcgtcttctgaagggtgcacccttcgcagttctgtcagcgtcacatacatcagctcaaactggttgcgctcggtgaacaagtctgagaccactagaagggatctgaccacctcactgatcaggatggccggggtcctcctggctgagctggacggcaggatccagcgaatgtaca

SEQ ID NO: 138954 - DNA, 657 bp, Homo Sapiens
tggctttgtttcactataaagacaaaaagatttcacatatgtccaagggaaatttcagtttacctttcctttggtgtggatttcatgaagttctgactaaaaaaattaatctaaatatacatctactcattttatctgaaagcatgaactatgttcattttatatatatatttatatgtacatagcaacaacaaaaaccagtctacatatgtccaatggcttaggattggcatgctctgatgagcacgaggtccacctgctgtgactaggagctcagcaccagtattaggtggttccatcagcttcagggtccagccttgggccagcgacatgcaggctcttcctctctgtagtattctaaggagcactttctgctgaggccgtgcctcttcaattatggcttatttcctatcttggctttgttgttagggttgcagtttaggtctctcagcaacaggtcacaattgactagagcatccgcgggcagcagcttccggagttgctccactgtcttttgataagccattttttcttgttccagggtccggattaaagacttcattttggtctctctcgtcaaaagattttccaggtttgattccaaggcctggattttagtatgagctacctgtaatttttctaggaggtccatgtttg

SEQ ID NO: 138955 - DNA, 1186 bp, Homo Sapiens
tcgctcatcataacgcatatttgtcggaggagcgctcttattttctgccgcgtgcgatgatctttctcagatatgtgattaccgtgggcggggtcttcgtggcacaatcacttccacctcgtgtgtgctgcccacttagaggcggcctttattggccgtcgtcatgttttcccacagccccgcgttattttccccaggagccctctttgcgcataatcgcacagagccctggggttctcacaagcagtagaagtcttttcttcagtgcaccaacctaccatgtgggaccacggttaccaacagggggctctaaaaaatgtgtggaacgtggtcccgcaagttcaaggcgccactacaacgcaacgtttcttctaggggctccacctggagttcttgcgccatttcttgcatcgaagacttttaggtctcaaaggtcatagaaagttgccgcaaacctagtggaccgatgggatgctgagcgagagtccatactggtaaaacttttgagcctcagcctgcatctccacagcttccagtcctcagagtgagtaattcgaagtagttcctccaacactagaagcagccctgatctgctgttcagatcgttccaatgtggactgagatgatcgcttcactggtccatgttcattactggagccctgcaccagctggacgtacaacatcatgaaaacattcaccactacccactctctgtacattttgaatatttcaatatccactgattactaagcagttgacatcaggcagctagagaaaattgtttcaaaaggcattctccagaaggaaagtttgaaacctcaaaacttcacacagaaaaccaaataatcagttctgatcaaaatccaatgaaattatttcaattaggcaaggtacgctttttttgcacaatcttaggggtggggagagagagatgaaaaaaattcaaaatgttctcatgctccaaaaataatcagaaggtggacatgtcttctacctgaaattagaaagcactctaaatttacttcatgtccagaaaattaaaaaaatctctccaatgtatgccgcaggttctagttgctttgtaaggaggtggtgtggccaccaatgcttacagctacagaaagctggaacccaactctggattgaaacttttttgcacaaccttcatggaagcttgcagaagcat

SEQ ID NO: 138956 - DNA, 684 bp, Homo Sapiens
tctgcctctttgctgtgatttcatccaattctttttgctcttcttctgaaggtttggctacatctttttcatccacatattttgcccatggtcccaaaaaaccatcaatattggatgcatcattttctttaaactttttcctcttttctgttttcttctgaccagtttcaaatacagttaaaccttgatttttttcagcttcttctacagaaccaatatatttagcagacacttgatgattatctaatgaagggtctaatgcataaccatatgttgcaaaagttctcctttgctgctcaaacatgaaatcattgatatgagctggttcggcatatccagaaagcatatttctaggggcagccatttgctgtgtcctaaagggattttctggtccaaactcaggagcaaacatggtctcataggtaggattatactgaacttctttgacggcagggtcaaggtgaactccagtctccaaatcttccttaactgccacctccggagccgagtccactgccactgctagagacggctttgatgaaggcgatttagtcaagtgcatgagggagtcggcggctggcagcggacaccgactgctctcactgtccgagtccgattcggaccctgaacccgaaccataggaagcggccagagctgcaatcgcacccgacatgacagcaacaa

SEQ ID NO: 138957 - DNA, 1051 bp, Homo Sapiens
cttatttctcccggtgcaatgtttacaagcgtgtgtaccggagtcccatggtcgttggtagtggtgcgcttccccccgtgggacacctggtgcccagcgcaagacctttggatggcgagccatatgcgttccaggcagattctgaacagaaagctccagtcaaggtttctagtaaatctgatgctgcaccaccaatctgggcctgctttagcactgccacaatgccagctggaaggaagcagtgtgctcgatgaagtgaggcctgaattttttctgggtaccctctgatgcgcctattcacagcagctcgtatagattctgaagcaagtattttttctgaatgtgctgtgattatattcaatgcttgtggaattgttgggggtgtggtgggtaaccaagattctgctccagattttcttggtgcagggataatacacaattccccatggcagaaaaataccctattggtgctattttcaggatccagccatttagggagaaagtcagcagcttctattaacaagaattcaccatcattgtcttcaatccttgctactaactctggaaattcctttgtgatctgctttattacataaacaataaaccattcatcctcaatgttatccccaaactttgtcacgccaaacatatgagcaggaacacctcctttcccaggtttatatttaagattgaaaggctgattctgccagatgtaggggaccagcataggtgcaaaccgagtgattattctctcaatgtacttctgaagaatctctttatgtttatctgagtcccttgactcatctggtatcaggaacaggcagtactccactgtgtcttccatcgtagcaagcttcatggtttcttccattcttctttgaaaaggttctagggcctctccttcgcgtctctgctgtggcacctttccttagccgcctctccgactgcgagagctgatcgagagctgccaccggccgccgaagcctggatcaggctctgtcccgacgcctgaccggaacctgaagccagcggaaatcctgagagaaagtct

SEQ ID NO: 138958 - DNA, 1047 bp, Homo Sapiens
  misc_feature (384)..(397): n is a, c, g, or t
gggacttctttcacaggggattttttcttccaattgggtgcagtggccactttgttaggagattcccagcccattaaaggaggagggtccaggagggaccccttgtttttcccaggtgaaaaaatggtcctggggtctgttgagcgcaaaccccaagattagaagagaatttccccttggtattttcccgtctttcgtggttcccgtagtcttctataaataaaactggagtgaacatgattgtctcccaaacctcccttttgcataccccactagaacccagcagctccagaggaaacccacaatacccttaagtaaaaatacagtcagatgcattttgtccaaaagcaaaagttgatatttttagtccttcttgtcctcttnnnnnnnnnnnnnncctaaggttctaggaggtacagtttcccagtagctgaaaaaacagatttacctatttttcatgacagtgacatttctgagcacaacatcctcaccgattttcctgtcctattttaaatattttggaatatgtcaagagtagttatttctaagaaagctgaaactcagatttccaattatccacagttgttaagagtttttgctgcattgatgtagcagaagacggctaatattatttgatcagatgacctatgcattcctatatgaatttatgataatcaggcctttggtatttgaattagcaaaagttgatcttctgataaactgtagttcccaaagtaatcttcacttgcttttgagttcttctcaacccttgagctctttccaaaacaaatcctgatttctgaatcacagatctatgctgatctgcaccttggtgttggaatatatatctgtccggcagcttggtgataactttaacatcttttgtgtcgtcttagtgtaaaataatactctaggttgtactattcaagtaaatgtgtttccctgaatttacttgaaatccttcctgtaagtccattcaatccctttctccttcttactgttaattccacctccagcaggcacaaatataccagccctcttcaagag

SEQ ID NO: 138959 - DNA, 843 bp, Homo Sapiens
  misc_feature (28)..(28): n is a, c, g, or t
gaaattagctgtttctgttaaaaaaaanaaagaaagaaagatttagagaagacatccatactttgcttcaagcatttaaacaattttttctgttgctcatgcaacaaccatatttacagttttggtttaggaagatatttaaatttggatccaagaaagcacattaactgctgaaaccaaactgagaaaactatctcattgcctggttcattacagagcaccaggcacaaagcattaactcagcacttttgatttgtagttgacattagcatttcagagcacagtcatatttgagtctgtaacacatgtgtaggtggggtgtatgggggaggcgcaggtgatggcttgattcctcgggctctcatataggagagaaactgctcagggatctcagctaggacatctttagccaatctagccatgctcagtatgtggtttccacttctgtcaatataatccctgaatggcacaaactgcacaatgtctctttcagcatattttcctctagaggagactcttacatcatctccatccaattcgaccattgcatcaaattctgctggtccaacacctactataattattgacattggaagttttgaggcattaactatggactccttagtctgggccatatctgagataacaccatctgtaacaatcagaagcacaaaatattgggagccatcctttacagaagaagcatatcttgctacatgattaattacaggagcaaagttggtgggcccatatagttgtacagatttcagactcgtgtaatgagcctcgatgaccctctcaatgccatcacagtaggggttttgaggattcccattcagttgc

SEQ ID NO: 138960 - DNA, 965 bp, Homo Sapiens
ggcaacttaatgtggtcaaagatggatcggaattcttgctccttcttgacagaatggacaagtgtactagcaagcagcctgtctttagtcaaggaagcaggtctgttagaatcatcaagaggaacaggtgccattttgagtttgacttcaggacggtgagaatcactcgctatcattttgatcctaagtgggctttcctctctgaaggtagacttttctcgtgcatccagattcttgtgtagagggggactgtaatcaaagaggtctttgagcttttcagactttacctgctcaggtgactgagtttctttctttactgttattctttcagaatttttgtcttcttctttgtgcttatcttttgtagtgctaggcctttccactacatatccagtctctttaagtttataatttttttcttctctaaatccatcactttctctattgcctttcagtgaaactttggacttgtacttgagtccttcctcctcagtattccggtgagatgcagtagcaaaacttttaccctgatctgcgaggactgacttcctgaactgtctataatcctctgtctcctctgtgtcatccccttctgaatcattaaacttttgttttccagactctttatcactgaagtaatctagagcttcctgatcttcccattctccctctgccctccctttctctgatcctttctcttttgaagcctctttatccctggtattacccctatcaagcaggaatactctagactcttcatctgtgaacctttttaagaacttcccagtctttgcagtttcctgatctccaccatcaggataaaacgaggaacggcccctagactcatctcttggagcattctgtggtgcgattgtctttgcaggacttcttcgtgaagggatgtgatgaattggactattctgagaaggactgtatcgactagatccatttccaacagaaccagg

SEQ ID NO: 138961 - DNA, 1577 bp, Homo Sapiens
  misc_feature (204)..(204): n is a, c, g, or t
  misc_feature (232)..(232): n is a, c, g, or t
ccgtgtttctgccgccaccccccaagaaatgagagacacgggagggcgttgtagccacacatagttggcggtataagagcgcacaaccccagaggttgtgggatccagtgggcgtgtgggtgtaattgggggaggggaactatggggaagtagccccggttccaagtgtgaggccatctgcccccatgttgggaagagccggcntattctttgcccctctttaaaaataganccaaaatccttcagagttttccatgcgggggggaaactcggtgacatattgttaagcgaatttgagtgtaagcgggtgaatttctccaaacgagcgggttggggtaggcggggggtggccttcgccgaaaggtataaatttcccggagagggctggctcgaaaactttaatctcccggaaacaggggagaaccagatttcccccaagctaacttattccccttggtgccttccaaggttaggacccacccctaaagtccactgtgattccgtgggccttcgaagttggttagaaaacgccattgcaaataaaaggtgtaccaaaaaagggggagaagaaaaaaatgtgtcatgcaaagagggatgtgttattttatttttttgggtttgggttttagagtaggttgggttgccgtggttactaggcgatggatggcagcctttggtggcagagaggttcctagcctgggagggagaaacgcagggtgtgtgtgttcccgtgcatgagaagactggattgtatctcactgatgacaggccaacggctgctttagagatggtgagagattggatcttatataaacagtgttttaaccctcttcatcctgcatgcaaacagatccagctgcctgtagcactttaagtctcaagtactgagaggtggggtagagagagtgcctattgtaaacaaaagcaatggatccagcctggatctcagcgccaatttcttcacccagccccagcaggcttagctacacagtgtgctctcagggactatttctatctgacttcctctttctgaaggttgggcgtttggaccgttgaaacaaaatgagtgccccctattcagggtactcatgagaaaacggctttgcaagtcttcctcttagttatcaaatgctctcctctgctgattgacttcttttcttgcagtactgatgcatgttggctgagatgatcatggagatgagtgacaccagagctcacagaaacattcatgttgacaggtagcaacagagtcagtcacgctgcatttctcagtggcaaagagaaatggcctcgacactggaatcagcagttgtcatggataccatgtaaagctcagcagttctgctggggcccacggttagaggaactccacgtaattctcagggatgaggccagtctttccgttcagagtcccctccaaccagccaggctcctgagatgggtgaacattatcgaagaccgtgcctgctgtgaacgaaagttctgagtcatgttcagctttgcaggcatacaaggcttttgccttccggaacggtgtgagtgagttgggccgggtgggtttgaccacagccaggcct

SEQ ID NO: 138962 - DNA, 828 bp, Homo Sapiens
acactttctcctggagctcagcctcagagcctgttacatgcccctctgatgactctgatgccaggcatccccgtggcattggttgtagagagactggacgggggcaccgttcactgctcccagaaactgcagactcctggcaagactccccaagattaccctggttcatgggcatgtatccagatgatggacttaaaaggctctggctccccacgtggccgattaagtgttccaactggtaggctgagggcggagcccagtgtggtggttgccaggttgtcctcctctgcttccaagtctaggtctaggtctagttctggctccagctctacttcctctagcttcttgtttgtcagaccatggggctctggcccaggggctattccaggcccactctctctctttatgaccagataccgtggtgggtctcgggccatcctggtgaactcattggctagttctttaaaggttgggcgaatgttctcatcaatcatccaacacttgaccatcaccatgtagacatcaattgtgcagatctggggctgtgccaaccgctcccccttctctagcaggtctggtacttcagccaatcgtagccctgcatagggctctgccccgaaggtcatcaactcccaaactgtcacaccatagctccagacatcactctggtgtgtgtatttcccaaagtggatactctcaagggccatccacttaattggagtcttggcctcactgtatagcagctgcttatcatcaggaggcagcaggtcagccacaccaaaatctgccacctgaacctgactgggtcacttgagtagcacgtttcgg

SEQ ID NO: 138963 - DNA, 766 bp, Homo Sapiens
tttgggcaagttatagtccatctcatagtgttgttaggactaatttcttcatgtgcttagaaaaatgcctggcagataggaaatggtcaatattattattattgataagatgaccatgtttggagtttagaaaaccattttcaatgcctatgaaataacaactccataagccattcccttaaatccagtagactgaattctcacaagtcctcatcactcatcatttctacatcctgctgatttacaaatacttcttcataccatggtttatgtctttgcttaatatcaaggaggatggattccatggtagagccaaactcaatgatactacgagtctcattttggtaagtataagcaaagccagcagcatgcatggccaccaatgaaccttttgaatcaaacacaggggagccggaagccccaaagaaaaattcagtgtcataggtaatcacatcagggttgtgaactattttctggaaacttctttgagtatacatatggacatactctggactttctgcttttttagactgaacacgttcctgacatttctttgctcgctgaccctgagggatcacagcacaagcatcaatctgctttttttctccatatggatggccaataatatgtatcaacccactaagtggcacaggagtaattccattatatagttccataggtacttcgttgtccattttccttcagtttcaggacagcatagtcaagctcttcattatgtatctcaaaccaaggttcaacaaaaaag

SEQ ID NO: 138964 - DNA, 998 bp, Homo Sapiens
  misc_feature (168)..(168): n is a, c, g, or t
  misc_feature (278)..(319): n is a, c, g, or t
aatgagacaaattcacggtttcttttcacgggtgttccccaaacttctggaggggttccagaaattctttggggggacaaagcgggggctctaactgtaggccctgttattttcaatgggtttttttgctcttcttcctcggccactgggggaatcctcactgctagnctcttccggtagggttgtaacctgctttcactgggccttggccacaactttgctttttaggtacagtcttcttgggggtgctgctgccttctcctcctctgagtcatcannnnnnnnnnnnnnnnnnnnnnnnnnnnnnnnnnnnnnnnnnttaccattggctattttaggtgctgctcgagctggtttgggaggggctttagtctgagctttaactgtcacaggtgttatctttggcttctggttctttggtggctcatcctcggagcttgagtcagaatcagaatcagagctcttggccttcttaggaggagctttggctgccttggcttggggcttaactcccttctggacaggctgtttcttttggtcctcctcatcatcatcatcactggactcttcactgctgctactctctgatgctttggctgcagccttcccaggaggcagaccgactcgcttggcaggtacagcagccttctttgctggaggcccttgaacttcctcctcctcctcgctgctgtcctcactgtcactggatgaggccttcttcttagctttcttagccactggtccatttgcctgtaactttcgctctgggaccttggcagacctgttgagccagaagctatagatgtctaagagggaagaggcattggcatcctgctgtgtagctcctgtcgctttggcgaacttattggccacctctgagagttggttatcgcgcaggaagccgagcacgaggggatacaggtcgctgggaaccacgcggcgaatgccggcgtccgccatcctccagcctcggccgattaaccccgccttactagctt

SEQ ID NO: 138965 - DNA, 600 bp, Homo Sapiens
gcgctgcgcgtcgcaggagtaacctacttggtctcctgctttcgcgacatggccttcaattttggggctccctcgggcacctccggtaccgctgcagccaccgcggcccccgcgggtgggtttggaggatttgggacaacatctacaactgcaggttctgcgttcagcttttctgccccaactaacacaggcactactggactctttggtggtactcagaacaaaggttttggatttggtactggttttggcacaacaacgggaactagtactggtttaggtactggtttgggaactggactgggatttggaggatttaatacacaacagcagcagcagcaaactacattaggtggtctcttcagtcagcctacacaagctcctacccagtccaaccagctgataaataccgcgagtgctctttctgctccaacgctgttgggagatgagagagatgctattttggcaaaatggaatcaactgcaggccttttggggaacaggaaaagggtatttcaacaataatattccgccagtggaattcacacaagaaaatcccttttgccgatttaaggcagtaggttattagttcttgcccacg

SEQ ID NO: 138966 - DNA, 888 bp, Homo Sapiens
tttttttaatagatactatttttaatagatgacataaacatttaaaacttcagaacattaaaaagtcataaataaaatttttaaaatgacaaactggcaaaatatatttgaaatataatggataaatgatgaatattacatcattataatttattaagaaaagtaggtttgcagctgcagcacatcaaggttactgattttttatgatgtttggtggctatgagactatagaagcatatgaagatgatctttatcgggatgagttatctagtgaactgagtgttgatagtgaggtggaatttcaactctatagccgaatttattatgcccaagatcttgatgatgtcatcagggaggaagagcatgaagaaaagaactctgggaatttggaatcttcgagtagtaaaccaaatcagaagaagctaattgtcctttcagatagtgaggtcatccagctgtcagatgggtcagaggtcatcactttgtctgatgaagacagtatttatagatgtaaaggaaagaatgttagagttcaagcacaagaaaatgcccatggtctttcttcttctcttcaatctaatgagctggttgataagaaatgcaagagtgatattgagaagcctaaatgtgaagagagatcaggtgtaatccgagaggtcatgattatagaggtcagttcaagtgaagaggaagagagcaccatttcagaaggtgataatgtggaaagctggatgctactgggatgtgaagtagatgataaagatgatgatatccttctcaaccttgtgggatgtgaaaactctgttactgaaggctgccagacaccctacttgaaggatcctgttggaacctgtggaaataatacttacaagaacgttgcagctaagc

SEQ ID NO: 138967 - DNA, 1317 bp, Homo Sapiens
  misc_feature (1106)..(1106): n is a, c, g, or t
  misc_feature (1208)..(1208): n is a, c, g, or t
  misc_feature (1241)..(1241): n is a, c, g, or t
  misc_feature (1302)..(1302): n is a, c, g, or t
atgcgcagaaacactgggcacagggggaggtaactacagtaagtcccgcttggccctggagtccacgcggattttcgaatgctggggctggcaagaggccgctggacaccacgctccagtcgtcagcccacttcctagctgaacagcgcgaggcggcggcagcgagccgggtcccaccatggccgcgaattattccagtaccagtacccggagagaacatgtcaaagttaaaaccagctcccagccaggcttcctggaacggctgagcgagacctcgggtgggatgtttgtggggctcatggccttcctgctctccttctacctaattttcaccaatgagggccgcgcattgaagacggcaacctcattggctgaggggctctcgcttgtggtgtctcccgacagcatccacagtgtggctccggagaatgaaggaaggctggtgcacatcattggcgccttacggacatccaagcttttgtctgatccaaactatggggtccatcttccggctgtgaaactgcggaggcacgtggagatgtaccaatgggtagaaactgaggagtccagggagtacaccgaggatgggcaggtgaagaaggagacgaggtattcctacaacactgaatggaggtcagaaatcatcaacagcaaaaacttcgaccgagagattggccacaaaaaccccagtgccatggcagtggagtcattcatggcaacagccccctttgtccaaattggcaggtttttcctctcgtcaggcctcatcgacaaagtcgacaacttcaagtccctgagcctatccaagctggaggaccctcatgtggacatcattcgccgtggagactttttctaccacagcgaaaaatcccaagtatccagaggtgggagacttgcgtgtctccttttcctatgctggactgagcggcgatgaccctgacctgggcccagctcacgtggtcactgtgattgcccggcagcggggtgaccagctagtcccattctccaccaagtctggggataccttactgctcctgcaccacggggacttctcagcagaggaggtgtttcatagagaactaaggagcaactccatgaagacctgnggcctgcgggcagctggctggatggccatgttcatgggcctcaaccttatgacacggattctctacaccttggtggactggtttcctgttttccgagactgntcacatggcctgaagcctttgcctctgtgtggncactcgctgacctgctgacgtggcgctggctgctctctacgaccctgtggcctctcatgcngctggcctgtgcatc

SEQ ID NO: 138968 - DNA, 1687 bp, Homo Sapiens
ggttttctttggaaatgcactgttctcagcccagctgggttccaacgggggcacctgggacgacagaggcatctcggggcagggggcagaggccacgggagggtcaggtgggacccttgacggcaccctctgatctcttggggggacgaccgtgtaagatgaaagtcggtcaagtttatttgctttcagtgcatctcctagaaaagaagtgttggagcagggggtggtgatgaggggcccgtggggaaaggattcaagaggcaaagcccagaccagggagtgtgacaacagccgtgagcatctcacctgtgttcaaaacaagacaaagacgaacaaatattttaaagtattgataagaaaaagcaatgtttggattgtatctgctgaatcatattccaacctatatctgatttctgtttccggggccagttggtctgaggccaaggagtctggcctccacccagagcagggaggggctggcccctcgcccccctcaccctcgccgccctggcacactcgggaagcagggcccagctctgagcccctcctcacccctggggtcctaactttcctgaaagtagtaggtgccgtgagaaggggcagtttggccaggttcctgaactgggcagggctcggggcctatgagggcaggttcacagtcccaccagattctctcctcacccccaagcagaatgcatgcaaaagacaccccttttcccacccaccttattggtgcccccaaacccctggcctgctgcgtagatggtggtgaggccaggccagcagtgctgtggccaggggagaagaaaataaaacgcaggccctgcccttggggaaggcccctttctgggcccccttttccaccagccaaatctgcctggccctcggacccctctgcctgccccaacccctttggaggtttctcggccttttctgtgccacttggtggggcagatggcctgatgggctagtgcttggggcatagaatgagggtccccctgaccacctgagcccaaatcctggccccaggtgcaagcagcacccctcgagggctctgccccagtatccccagggaattcacacccctccccttctcccacagccaaggacagacaggctgcctggacctgagcccaacagccttcagcctcagaaacgcatggggggccacacactccttatatcctcccacactaaggttcccctggccccacgggagcttcaggaaagccccccaagttagccactgctctaggacgagctctgtgtcccccacaccacaggcctcgaagcagggtgctggtgggtgccctgtcacgccaatcccaggtccccttggccccctatttttctcgggcccattgggggcctgatttctcaccctgcatgggggggaccccccctgaagggccgttacccaggaggctccccaggaggctcaagggctggggggcttacgtacgggccgaggggcggcccgcgtcaggccccgaatacccaacacagggctaacattgtagggaagaagagcaatagtcaacccaggggagtatgaggaggtgatgaaagccacgatcgagcacacagacacaacaagactaggaaaaagcggcggaatgtacactgactaaagacagggaacacaagaaaccaacgaggacacacaaataaccaagacgacaactta

SEQ ID NO: 138969 - DNA, 575 bp, Homo Sapiens
gaatgagattcccatcatgtctcagggcacgacgatactcagagtgataatgggttactttttctttcttgagaatcccagaaaatgagggaagaaaaaagatgggtggaagatttgggcaaacaattaaaggaggacaaactaatatttgctgaatgggaaaaagggatgggaagatcattcgtaaatgcaaataagagccacaattaattttcagagaaaattatgtttaaaaagccaaaatagttaagttggaatcatctccaagaagctaaaaccatgctgaatagttgtcctcatgccctaccatagaagcagagtttgggctaaaaccaatcctatcttcttagagaacaggctcaaaacaagccaatggacactgatgtaacatggcagtgtacactcagtttcacactgacttatattccatcccttccaatggtctccaattccactaggattttattgtcaccctcctgcaccaccatcatcactttcacccttgataggaaatacagactggcagaagtaaggattgaaggtataaagggacaagccagacctcagagaacaga

SEQ ID NO: 138970 - DNA, 954 bp, Homo Sapiens
agggtgatttaacctctatttcaacaagatttacacagtatttacaatatggaattgtcaaagctatacagttttgcagattggctttacttacatttctgcaaacgtttttcccaaaataaaaatataccaagtaagtctatttacaaactaggaagctgtttcagaaacagcatgatttagatataaagtgaagtttcagtacaatgaaagtgcaggtcatgctttcagattctgtcaatatcccattccctacactcagtttaagggatatgagtttttaacacctactgttcttatgtgtccagaatgtttactcatcctaatgcaatgataacaaaaatttgtctacatccattcctgctggaaatgaactgggaagcttctttttcttaattttcttctttttcattggtattgatgaatttgtaagatttttactagaaggacgagagtttcgctcacgttcatctaattcctcaattttccgcttttttgtggtgctccttgaagatgctctaaactgttgtgtgttatctttcagaggagttgctgaagtagtcctagaaatggctgccctggagagaatcattaatgtgtgggcagccatatttacactgttttcacttcctgtttcactggcagggctgcaggcaggcaagtctggggtgacaggagggaccattacttttgatgtactactgtcttcactgaaacgcctactagagggggccttgataatatctataggttcttctttatgtttttcccctgcccctgagccaggtgtccggggcacaggtaaatcactactatcagcaagcctacttactgagctgtgcctctgtatatcctgtaacatttctgtggtaatcaaagaactggcggatttagtttgttcttgttttagatccttcacagctgtacctagtgaaagtacatttttatagtttg

SEQ ID NO: 138971 - DNA, 893 bp, Homo Sapiens
  misc_feature (56)..(64): n is a, c, g, or t
  misc_feature (107)..(107): n is a, c, g, or t
acccgcccccctgaattaaggggtaaattcctttttaggaaagccttgaaccttgnnnnnnnnnacgggggcggcggtgccccaaaagccaggtgccccaaatattntggcaccccggaccccccagggcatttcgcaggtcgcccgaccttcccagataccgaacgcttcggtcttctgaagctgtagccagcattcccttgcttttcaggtatgccatgctgaagatgatgcccacatgcccactgattcgtcggtcaggtgctacaggtttgttgtctgctaaggcagttgctgggtaccagaccaagagctggttggaaacagcacctgccactatggtcagctccttccaggcgtctccaatcaggcaggctgaagagagggtgcacctgtctgtgcagggcacctcttgcaggatgcaccctactacagggtcatatagcaccactgagttgtggcccagggccaaggctatatttccctcaagccagcgtgcatcccaaatccagtcagacatgttccacaggccagagcgccaaagctcccagaagtggccctgtccccagctaattttcacaactcggagtcccttgcttccaaacacagccaccatggcctccaagtcaaggtctccattaggctctggccgtacccggaagccatggataagatagtggccaagcaggttctgcactcgctttatcatccgcagatgcccaccaaagtccaagctgtacaccaggacatcgggaccctcacccgccaacagccggtcccccacgcactccagacccgtcactgggaggagtataagctccgaggttgcccgcggccaaacgtagtcctcgagagcgtccatgtcgatcctcgaggtgctgacccacgcgtcc

SEQ ID NO: 138972 - DNA, 997 bp, Homo Sapiens
ggctcccgctgggccggccttccgcagatttccgatggggccttcactgttagtccacccctggggacactgccggcaggtgagtcacaccgctccgccaagaggccggagaccctggccaacccagggaaggcatgcccacccccacgataccattacccactacagtgcccagcaccagcccgacttgcctcccaccccaggttccttgagcagacctggtctggaggggaatagcagcacagagccccggcggtcaccaacacaccagggaagtcacctgggggtaggaaggcactgcatgtggccatctctgcttgcttgggggcagcaggtaccgacaacgttccttgacaaagatggccttgccagagggtgcggctgagatctctaggcaagctactaccccgccagggcccgatgccagcaacaggagctcctcataaccacgcagggcccagctcaagctgtgcaccttcccaggaaacagggtctggtccacagcagcagttggagtgttgatggggacaaccttgacacgaccttccccattggccatagcacacaatccgaagccctcgggaccaggagctgcctccagcaggcagtaggactggaaatgtttatcctctagcagctgctcccagcacttgacctcgacgtcatagagatacagggcccctgtatcagtcactgccagcagtcgccaagagccagccagagtcacagccttgagtgtacctggcctactacgggacttgaagcagagagccgagacccccaatccccggtacccacgccctaccaagtgccacagccgaatgcctgagtcatcacccccagtgatcacccaggcctgcctctcatgggcagctatggcccggatcccacgtccctggtgtccccgaaaggcctggaggatctcaccttcatggctccacaccaagcctcgtgccgaattcggcgcgccgtcgacttcatactctctcccccctaa

SEQ ID NO: 138973 - DNA, 1139 bp, Homo Sapiens
gccgtggctgcctcagcacctcgaggatcgacatggacgctctcgaggactacgtttggccgcgggcaacctcggagcttatactcctcccagtgacgggtctggagtgcgtgggggaccggctgttggcggcctgcctgattggagacgcctggaaggagctgaccatagtggcaggtgctgtttccaaccagctcttggtctggtaccccagcaactgccttagcagacaacaaacctgtagcaccctgaccgacgaatcagtgggcatgtgggcatcattccttcagcatgtcataccctggaaaagcaagggattgctggctaacagcttcagaagaccgaagcgttcgtatctggaaggtgggcgacctgcgaagtgcctgggggtcgggtgcagaatattgggcactgctttgggcacagcgcccgtgtgtggcaggtcaagcttctagagaattaccttatcagtgcaggagaggattgtgtctgcttggtgtggagccatgaaggtgagatcctccaggcctttcggggacaccagggacgtgggatccgggccatagctgcccatgagaggcaggcctgggtgatcactgggggtgatgactcaggcattcggctgtggcacttggtagggcgtgggtaccggggattgggggtctcggctctctgcttcaagtcccgtagtaggccaggtacactcaaggctgtgactctggctggctcttggcgactgctggcagtgactgatacaggggccctgtatctctatgacgtcgaggtcaagtgctgggagcagctgctagaggataaacatttccagtcctactgcctgctggaggcagctcctggtcccgagggcttcggattgtgtgctatggccaatggggaaggtcgtgtcaagggtgccccccatcaacactccaactgctgctggggaccaaaccctggtttccttgggaaggggcccagcttggacctggggccctggcggtggttataaaggagccttcctgtttgctgggcatcggggccccttggcggggggaagttacttttgccctaaaaggaatctccagcccgcccccccttttgggaaaaaggcccattttttttgttcccaaggaaaccccttt

SEQ ID NO: 138974 - DNA, 863 bp, Homo Sapiens
gcttcgccacattcttcacatttgtagggtctctctccagtatgacttctctgatgtgtagtgaggtatgacctatagttgaaggctttgccacattcttcacatttgtagggtctctggccagtatgaattctccgatgctgaataacatctgaactataactaaaggctttgccacattcttaacatgtatagggtttctctccagtatgagttcgccgatgcacagtaagacctgaggagtcactaaaagatttgctacatgctttacatttgtatggtttttctcctgtatgagttgtctgatgttgagtaaggcatgaactacggttaaaagcttttccacattctttacatttataaggtttctctccagtatgaattcgcttatgtttagtaaggtatgaactacagcgaaaggctttgccacattctttacatttgtatggtttctctccagtgtgaattctctgatgcacaataagattggaggaacgagtaaaagatttgctacatgctttacatttgtaaaggttttctccagtatcaatttgctgctgtttagtaaggtataaactaccgttaaggttaaagaaccttgccacattctttccatgttatagggtttctcttcggtaggaatgatctgatgttgagtaaggtgcaaactatggtttaagctatccccacatttttcacatttgtatggtttctcttcattatggattatctgctttctaagatttgatgactgactaagatctttatcatatttgttatagctatatgagttttctctgatatggatggtctgatgttgaatatgttttaatgactgggtacaaccttctacacaaatatta

SEQ ID NO: 138975 - DNA, 873 bp, Homo Sapiens
cacatacatccgtgagttatacacagccctatggtcacacacagcctggatcgcacagaccacacagtcacgtgtcctgtggaagtcacatgggggtcccacggtcacagtcctggaggagcccttgggacacagctgctctggtgcctacataccttatacttctcggggtagtcccggaggtgctgccatactggtggctaccgtcttgcgatcctgctcccatcttgcgcgaacagaagaccatctcggtgaagtaccacatccagccgataattgggacataggccagctctttcttggccaggaccttggagccccctaacagcccaaagcgttcggacaggctccagccacacagaaagtcaatttcaaacttgtggttgagaaccacgatggcattttccttcccatacttgaggtaggcgcgcgggtccgtgaagatggtgcattccgtgcccgaccaccactccagcagcatcaccagctggcttgagatgcaataggacagtctgcagttgatcttccggaagagctgcttgttaatgggccagaggaggagagtgaagagctgaatggtgttgatgattagccctgaggcaataaagacgtagcagaagaccaggtggcacaggaactgagacttcagcagtcccgcgaggtccatgatgcgtggacgctcttattcagaaataaataactacccacagtcaaagatttccagaaggaagaaagatccaggactcaggaaggcgtctccttcctggcagcctttggcacatggacttagaaaccagaagctgagatggagccggctgggttcagaaattgccactagtttataagagctgtaagtcagccaacactggaaag

SEQ ID NO: 138976 - DNA, 1460 bp, Homo Sapiens
ggggttacaactcagtccattcctttccgggaatcatcttcccccgatttccacatcagatcttcccgatgtcttctttcctgcggttgttggaagtagggtcctctcttctctggacatttctggaagtcccctttggttgtatccccctccagctctgattttttggcagccacttcagcaggggctgggagttcaagcatctcctcatcttgctgccttagccctgccactagagatatctgtcttatcctctgtgacaatggcctggggctgactggacaggggtttgctcagaggctgcagaaatgcatcaagcttctgttcccgggaatctgtacgaaccatctggtgggcatagaccttatcactacttccagaagtagaagacgaggtcagacttgttgtggatttaaccatctccccagaggggccagcaagtcctggtagcaaagtctgggtgaagtacatcctggaggaattggagcccaggagcttgctctcgatgtgctgctgcacccgctccaggatgctctcctcgtgcaggaagtgaacttcatgctttgtggggtgcacattaacatccacattctggggactgatttctaaactgaggtacaggaatgggtgtgtgtttttgggcaaataggctgcatacactgtttctatggcttttctcaaggaagttgattctaccagacgatggttgatgaagagtaagaagatgcacttcttcactgagtagtttgcattggatatgtaaccattcattttgaaggctagggttttatcctcacatccaatttctatcagttctcgactaacagcatttccaaagatggagcgaatattgtccacggttgaggcattgggtagtgtcctaacatcagctactgtctctccttgttttttaactgagaaactaatgcctgcattgtgtactgaatacctgccaacaacttccaaaattttcccatattcttcacttggattttttaaagcttttctcctcgtggctatgttgtaaaaaaggtcctccaccgtgatctgggtcccttgattgccagcacatggtttaggaggggctttcagttttccatctgagtaacttgctctgtatgcacactttccatcagctgttttcgttgtaatagtaacatgagccacatggcttatgctggccaaagcctcacctcgaaagccataggtagaaatactggctaaatcctcaaaggactgcagtttgctagtagtgaacctttcacatacaatatccagatcttctttcctgatcccggtgccattgtcttggatctgaatcaacttcgggcctccctctttaacaatcacttgaatacttgtggattttgcatctaaacagttctcaacctcgtgccgaaatcgccacccaggcctcgtccgggggggtttgtgcggccgggggctcgatggttattggt

SEQ ID NO: 138977 - DNA, 839 bp, Homo Sapiens
tgttctccttttgaattatcttaagacctggaatagcttcttctatagaaatcggccattttgaagtgatcgttatgtgtagaggatcgctgcctctcaaactgtcaaaatgtagtttgtgactttggaaatcctatcatagttgccgtataagggtcctttgtaatgtttttgtattaaaccatatgctggctcatcaagaagattttcaacagactggtgaaagactcttattctgacaattcacaagaagtgttcttttatcctgtggagattcacacaataccacatatttttcaagagattcaatcagtagtttgctatctccttgatgaaagtgtagagcagggagaacgacgtcatcctttagacagaataccaaataggaccagcccataccctctttgttttgcttgattgatttcaggtctgtcaaactgaacaggaatgaccatttgcttttcccatttctatgacttggagcatctccattggtatgtggtttccttttaaatgaaactgtattaaccatgtcccattctgcttcgtaactgttcagatgttctgatcctcgatgacctctttcttttggggcctgagtccattctacaactgaactggagtcctttctagcatagagaatactagaggaatctaatgcatcatccaatggtctccagtccactattacttcggcatccttttctaaaacacgtaatattcctgaaatcaagccgtcttggtcattggtctttccacaagatgagtgaatatatactccttcttgttcatatataatcttcccgctcacaacacccgccgccgccatgtttcctgcg

SEQ ID NO: 138978 - DNA, 797 bp, Homo Sapiens
  misc_feature (149)..(174): n is a, c, g, or t
  misc_feature (684)..(698): n is a, c, g, or t
  misc_feature (769)..(769): n is a, c, g, or t
ccgagtacacagtcagacatttgttcggtaaacagtaaatgcgtaagatcaatgaccgtgagaggcctgtctgtgctccagacgtgtggttcacgtggagagaatggctgccactcaaagtatcttcacaggaaaacagggcttgaggnnnnnnnnnnnnnnnnnnnnnnnnnnggctcacccaaaaagtcactgtgtacggacttaactttgttcaacatggattttggttttgtggaatctaaatgcagacactcgtttacctcacacccttggatttgtctgtttttggacatatatatatattttttgtttgtttctttctttcttccataacatcaatgcttcgtctgaatatcatcatcgttcaagagttgggggaagaacgacttcatatgcacagggccgggtggggaatgtttgttttggctgtttgctgcctccattcagattttcctatcgcagctcagctggtgacctgaaggcgagcaacaggcacaagggtccccagggccttccggatggctgctttcacctcctgcctgggccaccgagtctctacacagaaaaatgagtcacccgactcaaaaggggtgggggtagaggcagggacaaggcatgaaaaccacagataaccaaggtgtttcttccaagtggtcagtttaaaacaaacaactgccaccnnnnnnnnnnnnnnnccccactaaaaaatatttattcagaatcaaagataaaatactgtgtgagagccaggctacaggggcccttntctggggccatcgcttcccaagccgctg

SEQ ID NO: 138979 - DNA, 667 bp, Homo Sapiens
caagctaaatttaaaaaatattttagaaagtattaaatttctggttgagaattataacaacattgaaacttaaaagaaaaaatacatctgataataaggaaataaggaatactaaaacatacttgtatatgaaggcaatcaatctacttgttcacaattatgcttcttatacagctcatatctagttccatactctcttacccatgttaggttaggtgttatgtttaaaaataaatcacctccatgcataccttaatgctttcttcaagacgaacttcaatgtttttcaatgtaacaggtttaaaattttaaatcatctgaaatttataggcataaattgtgaattcattataaatagatcaaaatatccttaaacgtacctgcctagattacacatacctcagggttgtgcacgtgttctgcaaaaatcactgacaccatagtctaactcacagatgtctaactcagcacaattgaaaaagtgctttttcccctcctggtgtccaggaggtacattagctgcagacagatgcacagcactgattacatatttctgtagtgagcctctgagttaatagagcaaatgtgctgtgtctattaaacatctaaaacctaaataaccacctttcaaagaaagcacttcatctgtcagaaacagctttagcat

SEQ ID NO: 138980 - DNA, 944 bp, Homo Sapiens
  misc_feature (52)..(52): n is a, c, g, or t
agttttccatccccatatttttctttacaaggattcttgacccagcctgaancaaaatgtgaaaagacttggtagggatccaatccattaggcccatttccatccaggctcaatagcaggcataatgtgggcactgactttccacggagaatatcacgcttaatagtttcatattttttattatcttgatttttcttactgatagtgacccactccagagaaacatagaaaccacttcctttcatatccaattcctctttctctattcgaagaagtagggtagctatagaatgttcttcagcatttagcagtgagatactgtgaattataataaaaggatccccaagttcttcattaaacataatctcccatttttcagaagcgctatttccacgttcacctgttccaatgacatacaatcttccagttccatctgacaaggtaacccaggtagaagatgagaaatggatagatgcacaaagacggttgtcacatgctgtcaaatctgtaggaagtcgaaacacctctcgtggttttcctaaggcagtgtccagcattactgttaaattcataattcttccaagggtatcaatatagtagacactgtcttgataccatgaatcacagtgcaggtaattatacattccaaaagcatgcatgtgttccagtgtatattgatcatctcgaagttttacctctgccacagctgcgtcaagctccagctggtaacaaggcagcggctcaagagagagcttgtaaccctcgaagcggggatccaacagaggtctcttcacccgtagggagcaattagccgccacctccatcgctttccagggccgcagcgtgagaattaataaagcccttgttgaaaggtccgcgcttcacgcctcgcacagagaccggacgcggggtcgacgatatcccgggaattccggaccggtccc

SEQ ID NO: 138981 - DNA, 583 bp, Homo Sapiens
ttttgttataatattcaagagaatctgcactgtggacggcccaggaaactattgtctatttgggggactacttgactgtgaagaaaaaaggcagacaaagaaatgctttttgggttcatcatcttcatcaagaagaaattctggggaggtatgttgggaaagactataaggagcagaaggggctctggcaccacttcactgatgtggagcggcagatgaccgcacagcactatgtgacagaatttaacaagagactctatgaacaaaacattcccacccagatattctacatcccatccacaatactactgattttagaggacaagacaataaagggatgtatcagtgtggagccttacatactgggagaatttgtaaaattgtcaaataacacaaaagtggtgaaaacagaatacaaagccacagaatatggcttggcctatggccatttttcttatgagttttctaatcatagagatgttgtggtcgatttacaaggttgggtaaccggtaatggaaaaggactcatctacctcacagatccccagattcactccgttgatcagaaagttttcactaccaa

SEQ ID NO: 138982 - DNA, 834 bp, Homo Sapiens
ggttcttgtggcgatcagtctgttctgcaggatggtcaaagcttcctcaaaagtccccgtacatgctctccccatcacggtggggtggaagtgctcagagatgggattattggaacagtcatagaagaaaagcaaaagaatccaggatgatttggaaagagtccacactgaactcaaactgacgccgaatggagtcgacaaacttcagctccacgttcttcccgttcttgttggagagggagatcaggctccagcggtcagtgtccgtgcaaaccttcactagcttctgcacatatgcctccttcagagtgactggactgattttgagcttgttcacaccctctggcaggaagttcagaagggaacacagaaccacatctctaaccagctgaaattctgcctctgttggaagagccacatggaagattaggtccaggtctttgcagcccaagccattgtctttgaccaaaacgtggccagctgcggagccattcagccggacgtcgtgcactttgatgcctgcctcctccagccgactgcggacggtctggacgatgtccttcagagttatctccaaggttggaaagttgcctcgtccgtggataggtacaacttcagtgaggacctcatgcagccggctaacctgatcccagttgagcacgctgaaggacatgcaatccctggtacagctgctctcctctgccatcttcaggggatgttctggctggggaaactgggcaatagaagaggaggcgacagaggcaggtccttggcgtgggcaggccccagcaggagcggcgcgacctctacagcccctaggcagcggcaccgagt

SEQ ID NO: 138983 - DNA, 1770 bp, Homo Sapiens
  misc_feature (16)..(16): n is a, c, g, or t
atatgatgtctatatntgtgtctagctgatgtgtatacaaacattggcctttctggagataaactgtccccctctgaaaatcagggtaacactattagtaagtcaagaccaaaacaagagccaacagtaatgacagtactatatttgatctatacggcctggaaaagggaattaaaatgagacccttcaagagagaaaaccccaataacttttcattaaaaataaaaatgacccatttatacagaaggagttcaaaatttatttataaatttgtgtaaaagaatataagacctttttcttttgtacatatttgtaccataaagaaagtagggattaaaatctaaaaagacccccaaagctttcaaaacctgatctgagaattagataagaatatgtcacttagaaagacaagcctgtagcacccatagctctgattaacctgaaagcatcaagtgactccctctttttctaccctaccaacatcactctaattatacttccaattagaaaaataatgtagcatttccctggcagtagagattaaatatgagttcaggaatcagctcctccaaacatgcataaatgaggacaaggagaagccagtcactcctgactgcacggtcaagtgtgtgggcagttgaaattaaggtaaaaacagtgaggctgaacaaaatcacattaagaaaaagcatctcatgaggcttttcgaggtcagttgatgaaggccagataggagtcaatattttctcatataccccagctgttaccgctattcatattccaacagcctccagattgctcgaggccacctggttgacttttgccttggagtcggtccagaaaagcattatttaccctcctgtgttcagtctggtggattttggctctttcttgctcttgctgctgccgtttcagttccagtaattcactcttttgatgttgttcatccttcatcttttgcaattttctgttttcttctgcctttagagaatctctgtaagcccagcttctggcccatgttgaggattgtggcctacaacagcactttgacaggcacttctgtctggcgattctgtgttcagtttgctcaagaactcagcggtttttgtattgctgatgctctctaaatgcttctcttctaaggttttcttgaagtctttttttctcctccagtttattgctcttctctctctgaattgccttcattttttggagttcagcttcttcagcttccttcttgattcttacagattcttctctttttagcttttgcttgtatttagattgcatcagctggagttgttgtttctgtctgacttcagtttctgactggcttccacctagccgtctgggcaccaggtgaaccggtttagctctgttctgctccttccacttctccaggttggccagctcctgctccgcaattctttgtatctcatttctccggtttatatttggtgctatcaaggtgtatgcacttgtgctcctcactctctcagctccactcctctggttgtaagaggctagtttatctgcgagtcttgctgggacgtaggcttgctcctaccgcctctggcccgcgtgcacgacgctctcccgcgaagggcccttaggggctgcctccaaaccctctctctggtcttccacggggctcagctccccttgccgcccagaagggtcctggggatcccgggtcgggcgggaggcaggggaggcgccgagcccggagttcaccactctattgcgggtgttcatggttcacagcccgcg

SEQ ID NO: 138984 - DNA, 880 bp, Homo Sapiens
agccattcaatggggttgcccaaccttctgccaaaacctgcacccactgcatatccactttattaattttcagtgctggtaatgtttccgcatctgtttttgccaaatgaagtttattttctggcacatatagttcttttacttcataagatgcatccacaggtacaatatcccgttcctgtagaagttccacaacttgctggacacagtcatttacatcacaggagtctgttttcagcaccaactcaggggcctctggcttttcatattcagaatcgatcccagtgaaacctttaatttctcctgcccgggcttttttgtagagtcctttgacatccctctgttcacaaacatgcagaggagcatcaacaaatacttcaaaaaacggtaaacttgcaccttcatgaatttgccttgcattgttgcgatcctgagtgtaaggtgatatgaaacttgtgatgcacactaagccagcatctgcaaacagtttagcaacttctgcgatgcgtcgaacattctcttctctgtcttcaggactaaagccaagatttttattgagaccttgacgaatattgtcaccatccagagtgtagcatggaataccatgacaaaccaggtactcctccaaggccatgctcacagtagtctttcccgctccagacaagcctgttagccaaactgtgcaaccacgaaagccacctctggtccccaccacctgacctctcttgttcctgctgacatgatgggcttggtaggtgacattggttgctctctgcattccccagttctgcgcgttattgctcagcttgactttcttgcacaagctcccggggatctccatgaccgcggagcgcgctgagcagccggggttctctgcgcc

SEQ ID NO: 138985 - DNA, 880 bp, Homo Sapiens
cagggccccaagtacctccctacctctgatcccaaatgcagcaacacctgttttttgggcccttcatccttttggagccccaccaatgcctggccatccctaactactggccttcgcacccaccagggatcaaggcattctgtttttcggaacgtgctccgacagtggagaagtgcagcatgggaaggttgtatctaggaacttgaagccaataaattccttttaattcatgcttgtgatccctgttattctgtctctgaactgtgcctttatgctccagattagctttgaatcttattgctagattctccaatctgtttacaaaataaatgcacctaatcttcgtgcatcactaggagaagcaatggaaagggaggatcagagatttggcaaactctttatggcaacgctacgacagctgtgcctacaaccttttggggcagatgcagctgggaaagccaacgtctccaggacaagtgccttagtggaagcccacaccgaacttgaacaagcccagcccagaaaggagaagctgctttcatgataaaatgctgtcatgagggacaagattctttcgaaagcttccagaagtacacatgattttcataacttcttaggtataaggagacagttaagaatggaaaaccaacaggggggcatgaaaatatgaagtgggagaaaaagtctgtagtctttgcaaatatgaatataaaccagattccagtcgccactgttctgaactgtgctcaagatgagaggctgaagaggagaatcagagtctgaggttctttcttgaggcctggggggctgggcggaagaagggatagaaccaggggctagaaggttatttccaaccatgacttgccctcttctttctgct

SEQ ID NO: 138986 - DNA, 677 bp, Homo Sapiens
ggtgcacgtcacccataaattctgcatcctctgcactgacactgttcgggactgctgaattggcatggccattgaccagggcttctgtggagatactatcatcgccaccatcttgtcaaatagctgtaatatccaaggtgaccgctttttcttctttttacgctccctttgtccaagaccacctgagacaccatcattttccaaaacttccgcctccacattagaacttccatccaaagcgagggcagagcctgggtactggcagtcgatggagccatagcttgcttctttagtgataccatcaggggttattttggaagctgtacaaccgagaataaattcaggggcctgagggttcagtgtgcttgaaatactgtagctgggggttctcggcaaagtgtcactgggttcaatgacttcatcgacaccaaactcaattctctgatattcttgtccatcaggtagtttatccacagcctgtgtgccacacagaactgttccactgtatggaggaagctcaactgaagatcgaggagtcacaaagaattgattgaattcatcagggctaaaatctccaaaaatatactgcgggctgtggagggccatggctgcccgtttcattgggactccgcgatcctccggctgctcacgctgcttcccccgccgccgccatcttc

SEQ ID NO: 138987 - DNA, 591 bp, Homo Sapiens
ggggagatcctgtttgttttctgaaagctttgtggtttcggtgagctctcagagccgatttctagcgtccgtgccggggacaggtgtccagaggtcgactgctgcagacatggcggcctccaccgcggccgggaagcagcggattcccaaagtggccaaggtgaaaaacaaagccccggctgaggtacagataactgctgaacaactcttaagagaggctaaagaaagagaacttgagcttcttccacctccacctcaacagaagatcacagatgaagaagaattaaatgattataaactaaggaaaaggaagacttttgaagataatataagaaaaaacaggactgtgattagtaactggataaaatacgcacaatgggaagaaagcctaaaggagattcaaagggctcgatccatatacgagcgtgctttagatgtagactaccgaaatattacactctggctgaaatacgcagaaatggaaatgaagaatcgccaagtcaaccatgctcgaaatatctgggaccgggccataacaacgctgcctcgagttaatcagttctggtacaagtacacgtacatggaggaaat

SEQ ID NO: 138988 - DNA, 755 bp, Homo Sapiens
ttccacgggtttttcttctggttgaatccgctctcggagtttagaagcacctttctggattgccttaccagtaatctcagcacctttgactaaaccccaactcacccaggaagcacctgacaaaatgttgtgagccactttttcactccattcaggtaattcttttggcttttcttctggaactggctcacatggtacaatgtgactcaggttaacttcttcacttgaagtatctttagccctttttccacgttttcctttatgacgtacatccttattgccttggtccaactgtttcacatcagtgccagaggcttcttttagttggtcagaggagggtctagttcttccagggatttggaattcattttcttcttctgctctgttccagttggcctggagccgaaggtcagacatttgccttaacagatcctcaaagagctctctatcatcctctggtaactcagaggacaggacgacccccacaaagcatcctgctgcttgtagcattgtatcaggaaacatgtaggctcccgcagtacatttcagaaccggcgatctatcaggaactagaggatataaccagtcacaaacctgaagaaacccgggaggacggtttagaaccgtatcgagagaattatccaaaaacctcacaattcgaaggtacccaggatacgaaggtgcactaacctcccctgcaggatttacaaaaaaaatctgtactccatttggtatcaaaatcaattcatctgcat

SEQ ID NO: 138989 - DNA, 1413 bp, Homo Sapiens
  misc_feature (1336)..(1370): n is a, c, g, or t
tttttttgaagtgttactcatttattgtaatcagaattatgactatttttacctgttatctttccctggatacatctgagtatattcaactctgtattttttggcaaaaagcatgaaggcattcattggtcttttgcacttattaggagaagtggcactcacagtccctgagctgtggtttttgacagctttagcatacaaagaattggaagagagctgtgatgatccaggtgagccacagtttttactgaatccagatcttgcaaagtcttgaccaccaggtcctccacaagacaaagatgcacgacgctggcgagccatactacttaacacataaactgcagaagaatccataggtgtgaagtcatagcttttaaatgtatcaaaaacacctgaatcatcaaaattaatggcatcggggtgtccaggaggtagacatacatcgccaatatgaacttcacaacatggaatgccatgctgtaccacagtcaagcttggataaaatgatgaccaacctttatttttaacatagaaagggtggtccagcttacactctacggtaagtaaaccatcttctactgtaccaggatcaaaagtcaacttcagtacagactcgccaaatgatacactttcttcatgtgataacaactttagaccatcagaaccatagcccttgtgaatgcccatttgaagatcttcctcattatcacagccttcagctctagcaaaatcttcaacatcttgccattccttattgcttcccttatgaaagcacagtcgtgtgcctttcagaagacagtgccagacagttgaaggccaggaattgcaccatccgcgaatcatcagtgcatctgacagggaggacatgcagaaaatgccagattctgactcactatttgccctttcgtgtcttactggtgtttcctcctgtccaatggtgatgagggaaggctggttcactcttcgaagaagaggacactggtggagggcgtgcataggaatgtaaacttttgctagtggctatgatgtgtacaggagatgatctattgtaaaatgagcactgcatcagtggactttgtggactggtcgcgatatttgccaattctgttagccagtccacctcattttcacggtaagtagtttctggtatgtctgaggtattttggttccaagatgatcttgggtattcttgatgtgaaacatctgaactcagctggtacatgccagattgggtaggatcactttgaactgcctgaagttcaggaaggtcatcaagctccatgtgcccggccgtaatggccgaattcccgggcatatgtccggtaccgtcgactgnnnnnnnnnnnnnnnnnnnnnnnnnnnnnnnnnnncgccgcttcctcgctcaaacactcgctgcgctcgtcgtgttgt

SEQ ID NO: 138990 - DNA, 1051 bp, Homo Sapiens
tgcggagggactgggcgggtcggcttccgaatggaagaggtctgtgagaagttaaccgggtgataccgatccgaagagcctatcaagtgaagccccctgaaatacggagaataagaatcttagaggttgttcagcagaagtcttggagtgcattttcagtggttaaggtgaaaaaatgactactaaaaatttagaaaccaaagtcaccgttacttcatccccaatccgaggagcaggagatggaatggaaactgaggaaccacctaaatctgttgaagttacctccggagtccgatctagaaagcatcatagtcttcagagtccatggaagaaagcagttccatcagagagcccaggagttcttcagctagggaaaatgctcactgaaaaagcaatggaagttaaagctgtaagaatattagttcccaaagctgctataactcatgatatccccaacaaaaatacaaatgttaagtctctgggacatcataaaggagaattccttggtcagtcagagggagttatagaacctaataaggaactctcagaggtaaagaatgtattggcaaaagctcaagaattctgaacagaaggttactacaggacaaacgaaggtctttcaaaccagctccgtgtacagacagaggtaacctcgtgagttaaaaaagttactggttggcttctgttggggactgatcttcagtatcactttgaacgtctagcccgtgagaacacaatcagcttattttagaaaatgaagccctaggtcgaaacacagctcagctttctgaacagttagaacgtatgtcaatacagtgtgatgtatggcgaagtaaattccttgcaagcagggtaatggcagatgagttaaccaactcaagagcagctttacagcgtcaaaaccgtgatgcacacggggctatacaagatctcctaagtgaacgggaacagtttcgtcaagaaatgatagctacccagaaattattggaggagctcttagtttccttgcaatggggaagagagcaaacttactcccctagtgtacaacccc

SEQ ID NO: 138991 - DNA, 810 bp, Homo Sapiens
  misc_feature (792)..(792): n is a, c, g, or t
aaaggttgaaaagatggcagcaatgaaagaaaagcctgcagacaacactttattcaaggcatacccaaataaaggagtgggtcaggctaataagcctgatgaaactagtaaaactagtattctggctgtatcagatgtatctagcagtaaaccaagcatcaaggctgttatagtctcttctcctaaggcaaaagctacagtttcaaaaactgaaaatcagaaaagttttccaaaatctgtgcccagagatcaaataaatgctgaaaagaaactttcagccaaggaatttggtctgcttaaacccacaagtgccaggtcaggcttggcagaaagcagcagtaaattcaaacctactcagagcagtcttaccagaggaggcagtggaaggatctcagccctgcaaggcaagctttctaaactggattacagagatataacaaaacaatctcaggaaacagaggctagaccttccatcatgaaacgggatgacagcaacaataagactttggctgagcaaaacactaagaatcctaaaagcactactggtagaagttccaaatctaaagaggagccattatttccatttaatttggatgaatttgttactgtggatgaggttatagaagaagtgaatccttctcaggccaagcagaatccactaaagggaaaaaggaaagaaactctcaaaaatgttcctttctctgaacttaacttaaagaagaaaaaggggaaaacttccactcctcgtggtgttgagggagaactatcttttgtgacattggatgagattgnggaagaggaagatgcagc

SEQ ID NO: 138992 - DNA, 2115 bp, Homo Sapiens
tttcagaataggggggcaaaattggggggcctcccaaggatttttttacctgtttcccatttttcagccatttcaaggattttggcccaaattaaggggtttccggagccaaattcccggggggataaccaaagtttccaaaacaattacggccaggcggaatattcaccttaggagttttggattacctgggggccttatcaaccctggcctcggaatccacatccatgtggcaggatcctttcgttgtgccccatcactggaatccccttagcagctttctggatgtctctgaccagctgggaggagccacgtggaatgatcagatctatcattttgtctaggcggcaaagatcttcaacttcttctctggtattcaccagttgcacggcctccttgactccatggattgagagagcctcctgggtcaggaggtggagaatccggttgctgtgtgcagcctctttccctcctttgagtaacaagccattgccacttgcgatagccaaagctgccacctggggtagacagtcaggacgagattcaaagatcaccagcagaactccaattgggacagtcacttgttccagttccaagtttttggcgattcgggtgcggcgcaaaacacgtcccacgctgtcctgggaggaggctgcgatctgtcgcagaccgatggccaggctgttcaatttggatgtggagaggcttaaacgtttcagcagaggagctgcaagtctcccctctgcctcctccaagtcttttttgttggctaacaggatctcatcacgctggtccgtcaacagatcagccagatgatggataatttctgctctctgctcaggttccaaggggccaacatccttcctccagatcgcgccatttctccctgctgctcaacagtagggcctcgcaggctttacttctgaaaagaaggtaccaactttcttccccttgccacaatgtctgtgatgacgtgcccagacacctttgggtgggttccattggcaataacaacagaagtgccaccttgcaagcccagagggctgctttcaccttggcttccatgccacccattcccactctagacttggttccaaatgtcacagactgctgatctccgggataaaatatatcaataagctttgcatcatctgaacctggggggctgtcaaaaaggccttctacatctgaaagaacaatcaagagatcagttttcatttccacagccagtcgggcagccaggctatcattatctttaacactaataacatttaccccctgcaggtcactgttgggctcagctggggggacaacagcatcatttgtgttgacaatggggacaatgttcattctaaggagttcatgaagtgttccattgaggttccggcgcttctgctcatcatggaaatccaaattggtcaccaaaatctgggcagcacagatgctgtactgggtaaacatagcctcatacaaggccatcagcccactctgtccggcagctgcacaggctcgtgcctctaagactggaattgccatttctttcagctggttctgccccgagtggagggcctgccgcacgctctgagacagaaggatctcatggcgcaagcgttgtttgccaaaggctacggctccactggtcaccagcatcatctctctgccctgattctgcagcactgatacctgctcaacaatagatgccaagcgccccagggccaggccacattcatcccctcgggtcaccacggcactgccgagcttcaccacgattctcttggcatgcttcagctcactgcggtgggcgaaggacttgccatgtgtacgactgaggggtacagtgataaacgggatgttgctccaagaacgaacatgtctgatgactgaaggctggatacaatgagatctgaagacggttgtacacttgacccagggcagaagatgttggttgaagggctggaacccacagcggtaaacttgactcaacatgctgcgatgtggtcactaaccaaagtatcttcctcaccaccgccgccttcgccccctggcactaccgcgggtccgcactccacgccgggctgattccggcgctcgctcactctcttttttcttccgtcc

SEQ ID NO: 138993 - DNA, 1794 bp, Homo Sapiens
ttttggtgtgaaaattttaatttttaaatagcaaagcccctgtctgggtattgtcagtaactttcagaaatcctagagaaaatgatgattaggtcaacacaaggaaaacagcgattaacagaataggaattgcaaagagcttcagccaatggaaaaagaagcaaggcttctgaagtctcccgaccactcgtgtctgcatgggtttcaacgaccggtcccactgggtcagtatggcatttctggctcctggccactgccctgggcccaccagcctaaactggtagggactacaagggccaaaataaacttccatggccaatttgggatctgtgagaaacagccatgggatgttgggctttgccccattgaaggaggaggagttcatcccatttaaccaatgtaatctgtctgtatgttctcgcttttggcaaaccattttgcgctttttctccattttcttcatttatatcattcatcatgtcttccatagaaggcaaagtacaagttccctttattacttgtgctgcccagcgggactggaggtcaactgtgggaatggcagccccaagggactggacaaagccaatcactgctatggttgacttctcaagtagaggaggaaatactcctttaaataaaatgatctcattgtttctgcttttgatgatagactcatcaaggaaggggtaggcaaaactataccctgttgcaaagattacacagtcaatgccctcaaatatggtcccatcctcaaaaatggccgaggtctctgtgaattccttcacgttaggctttacggacacaatgccacacagaatgcttgctgggagctcatcgttaaatacaggctctttcctcaggactccatttaaaggcatcaagccatagttttcatgcttgaatcttgcattcatctgcttcacgtacaaccagtcagagatggctgtcggtaaattgttcttgaggaaggttccaaatcgagtgacgagcagcatgtcccaaggataaccattgtcccagacccggctcatcacccaggagccacttctggaactgatcatgacctgttctgctgtgcggctgagttctgtggcaatatcacagcccgaattccccaggccaaccaccaggacacgctttccattgaatacacctggttctttatagtccctgctgtggaagcatttgcctttaaagtggtttagtcctggaaaggacttttttggtaggttgggatacacatgatgtccggaacaaaccattacagcatcaaagacagccgattcttttttaccatccctttcagtggtaacatcccactggccagtagttgcaaaatcaggatgtttatttacactggatacaaatgtcttaaattgtatgtacttcaggaggttcttttctttggcaaatgcaatgatatattcctggatcttgctgttgtgcataaagttggggaagtcatcgggaaatgggaagtctgggaaacacatcatctctttggaagagttggaaaagactgatttgtaaatgctagccctgccctcctctgcatggtctgaaaatttccacaggcccccaatgtcattgctcttctcaaagcaggtgggctccagcccctcttccagacagctcctgatggaggccaagccactcacaccagctccaatgatggccactttcttccccatggtaacctttttaattttcctacccgttctttgtcttcttttcttctgtgtgtctacgtcctgtccaaccgtctgggcagtttgaaagagaaaatgttctagt

SEQ ID NO: 138994 - DNA, 583 bp, Homo Sapiens
ccgcctccccattggctgccagtgtccacagccagggaaggggagagggggcggcagcctctccctcgagcacttcggtgtgtgcaccaggaaggtaacttcctgccctgtcttgaagtggtttcactgtgagagcaggcctgaaggggcacccctggccaccagctcccctaagcatacctaagtagccgggtacatgcacaactggggaggggcgaccacaactgcccccctgccctcacgtttctgtgcatcccaatgtgctgaagcaagcgcattgctttcatgaatgcccacaactaagggtgacatggatacaacggcctggccagtggctgcccaggaagcatctgctgtggttggggctctagttcctggtgggtaaggatgggaagggctctccctctcaccagaggcagcagaagctcagggccccatgaagacctggcctctggctcaggaagtggccacagagaggatggtagaggccctgtggagagtcaccaggtccatgctgggcagctgggccacagtaggaacatcacagcaagcactttcctttcacattgtagggtttcacact

SEQ ID NO: 138995 - DNA, 1822 bp, Homo Sapiens
gggaaagagaagcccggcaaaggcggccctggattttggaccaggcaactacgggccggggacccggactgacccggctggcgttgaacggcccatcccacgggggtaatccacccatcggtagatttctcgggccaccgggacggtggccaagggagaaccgccaagcagggaacacagaagcccaggcccaaagatgtcgcagccttcatcgtaagcctggcgctcagccactcagccgccacaaagtttgctgttgtacaaggtgtcatgaggagcccattctcagcccgcagctgtttggcaaaccaaagtcacagatgcgcaggcactcgggattcccggactcgtccacatacaggatgttgctgggcttcaggtccctgtgcacaaccccctgtgagtgcagatactccacagttttgccaatggtgtgcaggacaaagctggcctcccgctctgagaagaacttctgccgcaggatcttgtccagcagctccccaccccgcatcagctctgtcaccaggtacacgtgtttgccatcatcatacacatctttcagagtgatgatgttggggtgctggccataccgcagaagaatctcaatctcttctgaaggatcccgcttgctcttatcaatgaccttgacagcatactccatgttggtggccttgtggacacagcgcttgcactcagagtaggagcccacaccaattgtctcctttaccacgtagccgttcactaaaaaaccaggttcttcccatggagttgctgtaccaccgagtgcaggggtgcctgcggggcacgaggcttgccgtcgtcttccatcaggccggtggccacgaagctgaagccccggaacagctgatgggccccagcgctgggggggatgcctggggaatccttgggtgtgcgggacgtgaactcggtgtcaaagtagaaggtgtcatcaggctgagccactgctggcttgaagggtggcttgatctcacgacggtatagcttattccagtcaatggtggagtagaagacatgccgcttgatttcctctgccccatcagggccggagccgagccggttggcaggattccgcttgaacagggcccgcaagaggctctgggcttcagtgctcagaaactggggcatgcctagcttcgccttcagaatcagtgtcatggtctccttccggtccttcccctggaagggcagggagcccgtcagcatctcaaacatcaacaccccataggaccaccagtccgcactatgggagtggccctggcggttgacgacctcaggggccatgtactccactgtcccgcagaaagaataggccttcttctcgtggtcaatggcctctttgctcaggccaaagtcagtgagtttgatgtggccctcctcatccagaaggatgttctcaggcttgaggtctctgtaaatgatacccaggctgtgcaggtgatccaggcccagagccagctcggccaggtaaaacttcacatcctcctccgtgaacatcacctcttttgagagccgggtgaagaggtccccaccacgcaggaagtccagaatgagatagagcttgccctcggtctggaaggcatagtgcagcttcaccacgaatgggtgatttacatcagccaggatgtctctctccatcttggtccggacgcggtcacgtactttcagcgttgccttcttcagcaccttcatagcatacaggtgcccactgtcaggccgggtgactttccgcaccaggaagactttgccaaaggatccctggcccagaaccctcgtgccgaattcgccacccaggcctcgctac

SEQ ID NO: 138996 - DNA, 815 bp, Homo Sapiens
accagcttttctggacagcctggcttcttactggcattgtccaactcatcccttctcgaagcatgtctttgccatgggctgtgtccttccagggaaattgtggtctcgggcctgggtgagacaatgaagtgacttccaaccgacagttgctagaattcacagggcagaaaaggggttgaccttctccccttccggctttccacccggcctgctgcttgctgtcgccactcatgtctcctccacatgcggtccacacatcagtaagggcctggagatgtgtagagacacagcaaggggcaagcagactcttggccacgtgtttccagtggctggaccacgccgacacctgggatcttgagatacccaggaagggaggctgtctggccggcctctccctgcctccacttgctccacgtccagctcatcctcaccttccctcttttttaaagtcacatttccatgtttcaacattagtttgcattcacctttacaaaggcctttctttagatctgtgcagcctttgcgtgccaaacttgtgaaattccttttaccttttttggagtacttgctataaagccacctgtcaacaaacccccattacgtacagaataggacctatccagtagccaggccagtaggcagttggggaaggtgggaaggatccagcgaggcccctgagcctgcacctggacaggtgtacgtctgcacccatcaccctcagcaccaggccaccctgcagtccacttactgtactgtgttgtggaaggatatgctaagtgatgaaagttgcgagcagtctcactggtcgtgtaaac

SEQ ID NO: 138997 - DNA, 945 bp, Homo Sapiens
tgggtaccagagccaagccacggatgcctcggcaacaccgtgtgcacaaacatcgggacttccctgggccctccagcacgcgggcagttaggtctgggatagagggcacggctcgggccccacagcccaccctagctggtcattttgggcacggatgcctgatgggcactgccggtgtagttggggcttagaaagtcatagttgtagcagtcagggaagccatagaagccccagaggccgcgaggacgcagtgcccgccccagctggagggtgcctgccatccaggcccgtgcagctccctggaactggtcctgggctactgcctccacctgaggagctggccaatcagggtgctgtgcctgtaccagtgcccgtgagcgctgccggtaaatgtccttggtgtcccagttgaaggcccagcgtgggcgccatgcctcccagtcgatgactgccagccctgagaagtcaggagcaggtatggcagccaggatgtcctggaatgtgcgggccaggtgggcaatcaggctggcattctggggcagaccaccaaacacaggctccccagtgggcgtgtagtaggggtaggtgcccagctgggagctatagaaaattgtcatgtcagggccgcggaaggtctgccctgggttggctaccacatcgaagacactgacatccacgtccacaccgtgcctctccaggcaccactgggtgtttgcattccagacggtggtgaagggccggttgggtagcaaggggcccctaaagccttgggccatatcgagtaaggtcaggaagagggcgcagatgggaagcaggtgggctgccatggcacgggactggtcgaggacaaccttggggctgaagggccttatcctccaaatttcctgaccccaggatgggggcctaagcagggcctggccagattccaccccagctgcaccagag

SEQ ID NO: 138998 - DNA, 1279 bp, Homo Sapiens
  misc_feature (1098)..(1135): n is a, c, g, or t
  misc_feature (1266)..(1266): n is a, c, g, or t
aaattttgtgcgtttggcgggtttcgctctcttcataagtattgatcattccgcagccctgcggaccggacacgtgaggaggtagtgacgccgacactgccagaacacactgctacaaggtcccagatggccacgtctctggattttaaaacttatgtagatcaggcatgtagagctgctgaggagtttgtcaatatttactatgagacaatggataaaagaagacgggcactaaccaggctgtatctggacaaggccaccttaatatgggaatggaaatgctgtttcagggctggatgccctaaataatttttttgacacattgccttctagtgagttccaggtcaatatgttagattgccaaccagttcatgagcaagcaactcagtcccaaactacagttcttgttgtgaccagtggaactgtgaagtttgatggaaacaaacaacatttcttcaaccagaacttcctgctgactgctcagtccactcccaacaatactgtgtggaagattgcaagtgattgcttccgttttcaagattggtctagtagttaaaggggcaaaagtccattctcatttggtccattagttccagcaattgaaatttatgtgaattattttgattgtagaagcactataatatgtgctgaaactaaatttctttaatattttctattcctgtcagcaccttttctagcagctgccagtttggagcattgccctctaagagctttaaaactatttttttacatgccttatatacattccactaatgacattcttataataatattaaacacatgatcttggtactaacatactcactgtgaacccagcctattgcaaaaataaaatctttttataatattatctatgggatgtcagcacaatataacactctgggaagaagtggagttttttgggttattaggttaattttctagtaaaacacgttgcctgtttttcagttaacactggtaaatgccatttttaatataatggctttttccaatcagttcagtgaaaatagtacagatttaggtttacataactactctgacatactggaattgcatatagagatgttcagtggtcgnnnnnnnnnnnnnnnnnnnnnnnnnnnnnnnnnnnnnngtgtgaagtaaattaatcaactagagaggtgcaaaacgttctcagttgatatctgagtattgggtgcatttggtggcttaaaagcaaagcttcctaaaaagatttttcttggcagctccaggtctatacantttaggtaatgga

SEQ ID NO: 138999 - DNA, 1591 bp, Homo Sapiens
  misc_feature (949)..(949): n is a, c, g, or t
gtcttttaatgagtgtaagaattggatgcccgtttgccatatactttgtgtttcccctgaaggaggattcgagacccggtggaatggggacctttgccaatgcacctgtactgggaacattcactcccacctggtccatcatccaccaagttggcatatttgccgagcagtggctccaattggtgttgaagatggccagttccgatgttccatatgggttgtttatttaccatctggatggcttcatccatgttttctgtctccaagtaccactagtactggacccagatctcctctttgtaacaaggtcatattttgccttgacattcgagatgatggttggtccaacaaagttgccattgttcatagcctttcactttaatttgtcgtccatcaagaaggatggaagctccctcctttgttccactatcaatcagattacagactcgctctttggcctggggagtgatcagaggtccaagatcagctccaggctgatctcctgcattgactctcaggtttttggcatgctccaccagctctggcagccacttcttggcttctcccacaaggactgctgttgaaagagccatgcagcgctgaccagcagctccaaatgctgccccaaccagctggttcagggtattttccttattggcatctggcatgactaccccatggttcttggctcccatattggcttgaaccctcttgccatgtcttgatcctctctcgaagatatactctcctgccttgttggatcccacaaagctgattgctttgatgtccggatgatcgcaaataaaatttacagcttcatgctgtccatggatgatgtttaatgttccatcaggggcaccagaatcctggagcaacttagcaagaagcatagttgctccagggactcgctcagatggtttcattaggaaggtatttccacacaccatgngccatgggaaacatccaaaggggggatcatggcaggaaaattgaatggagcaatgcctgcacacactcccagaggcagacggtaggaataaaggtccatgtctttggtgatggatggcatggtctctcccatcatgagggatgtcacactacaggcatgctcaaccacctgaaggcctcgaaatacatctccttcagcatcagctagggtcttcccttgttccaatgtgattaacttggcaatttctttcaagttttctttaataagttgttgatagcggagcaagacctgctggcggcttaatactgaagtgtctgcccatgcaggaaaagcacgtttgcaggaagcaatggctgcatccatttctgccttggtggcctgagggacccgaccaatgacctcattggtggctgggttgtggatatcgatccatttgtcacttttggattcaacgaatttcccaccaatgaagagctttacagttggcactgaagaagagaaggaagatgctgaataccaggtgggactggatttcaccttggaagaaacctgcaggatccgggctcgcactgccgccgccgccaatagcgccgccatggctctcggccgccctagctccgcaccccgcgcctctactgcccc

SEQ ID NO: 139000 - DNA, 783 bp, Homo Sapiens
  misc_feature (37)..(37): n is a, c, g, or t
tccaccgtggtgtagaggccctgcagggccccacatntcaggaatgttttatgtgctccatcagtggtaaacagaaccacatcatcccccagatggtggcgaaagcgcttctgcaggaagcgcaggtagtcaaaatcacaggcaaagtagctgccatattcattttcaacctgcactgttataactggccctccattctgatagaggagaggcttcatcttgggcagaaggactcccaaccacttgtccacagctgccaggtaatctgggtcggaggagcggagaagaatagactctttctctagcagccaagcaggtaatcctcccatttcccactctgcacagatgtagggcccgggcctcaggataaccagcagtcccagctcatgagccagccgaagaaaatattccacatcatggtcctcagaaaactggtactgtcctggccagggctcatgaaagttccagggcacatacgtctggatggcgttcagcccagccatcttcatcttcagcagccggtccttccagtagaagcggggcacacgggagtagtgaatgcttcctgagatgtagcgaaatggctggccatccttgaggaaggagtcccggctatagtcaatttcaaacatcctctgggtggcattgcgcaagccgcgcgtagggcccagaagcagcagaaccagcagcagaaggaggatgcgaaccaggaaccccggcatgaccaccagcctcccggctctgcagtcggcgcccaggccggccccttcgcgtcacttgact

SEQ ID NO: 139001 - DNA, 1466 bp, Homo Sapiens
gtttagttttcaagaagtggattccccattggttttcggttccaagggaccttccctgggggggatccccattccacaggcaaccatatgcttcgatcgtggaatcccattgagggggtgaaagagagaggttgctgggttgcttgcaatcttgaggaagtgttgtccggtacagcacaaacccataatgctgtttcacctggataaatgtcaagggataaaggcttttgatgggcccagagggacacagaatgtccagagctgctcccactgtctttaacttttccaaagtgacctttccatatgcaaactttggtgtagatggagggataggaccttctggtactttttcaaacttctggatgatgtttcgcagagcaaaatacttctcagtgaggtccccagcctcactcagtggggcatcatagtcgtagctggtgggctgtgctgcatagggtgagttggccccattccaataggcaaaattggtcccacctataaacatgtacaagttcacactcgccccacgggcaagtatatcatagagggaggaagccactgcttcggtcttgattgtggagtgaggttggccccagtgatctagccagccagtatagaattcagaattgatcaagggtcctttgggctcacacttcctctggcttaggaaagcatctgtgatgttgctgcctgttccaaagtccaccgtggtgtagaggccctgcagggccccacatttcaggaatgttttatgggctccatcagtggtaaacagaaccacatcatcccccagatggtggcgaaagcgcttctgcaggaagcgcaggtagtcaaaatcacaggcaaagtagctgccatattcattttcaacctgcactgttataactggccctccattctgatagaggagaggcttcatcttgggcagaaggactcccaaccacttgtccacagctgccaggtaatctgggtcggaggagcggagaagaatagactctttctctagcagccaagcaggtaatcctgcccatttcccactctgcacagatgtagggcccgggcctcaggataaccagcagtcccagctcatgagccagccgaagaaaatattccacatcatggtcctcagaaaactggtactgtcctggccagggctcatgaaagttccagggcacatacgtctggatggcgttcagcccagccatcttcatcttcagcagccggtccttccagtagaagcggggcacacgggagtagtgaatgcttcctgagatgtagcgaaatggctggccatccttgaggaaggagtcccggctatagtcaatttcaaacatcctctgggtggcattctcgtctcaacacctcgttacagatggggaagtggatccaagcgcaaagggcggccggagcggaacccccggccgtaatggccgaattcccgggcatatgtccggtaccgtcgactg

SEQ ID NO: 139002 - DNA, 804 bp, Homo Sapiens
tttttttaaaagttcaacaaagcaattgaaattctttggatgtctattacatatgggaatgaggacagtctcaagtcttggcttcttccaagcgacccagggctttgagcaggttccccaggtcactgcgaacacagtacaaatcaggattgtactgaagagcagagacgtaagcttgtactgccccttccatgtcacccgctgctaccaaggcggctgccaggttaatataaccatcgatgaaatcaggtttgagacgcaatgcatgtcgataatgctcaattgcctcctgcaactgccctctttccttgtacacattccccaaattcgaataagcttctgccagaagggggttctgtttaattgccagagtgctaaagtgagcagatctgtccagccttcgacactggaagtgtctagatgaaagttataaaagcacaccaagtattgtctggttcttgtttccagagctgcatgcagtgtctctcagctgcctcaaaatttcctgcctgatattctcgatgtgccaactcagctaatccttggaaggaaagcatacgtttcgttggttctgtgctgtcggccacgttgcccacggaagacgccatctggagcttctcgagggagacccaaaaagaggtaattggtcctgctgccgccactaccagcaagaacgtatttggaggtagtagtacaagggcagcagccgtagcaatgctctggagggcttgagcggcggcagcagttacaggcttcaaaccctgggaactctaattgaccatctacctagtacggtcttgaaat

SEQ ID NO: 139003 - DNA, 586 bp, Homo Sapiens
aagctggcccaggaaggcaggcgtgagggggcccagctcatgcgggtgctccctggagtgatgtctgaggtgacggccatccaagctggtgatcttcatggtgtgtgctcaaggtgtgggtaacgggcgtgtgtgtgtggagggcagccccccttctgtggatttgcctctgccatctttttgagttattttctaatggtttgtagcttagaaagtagccatgttttcaagtagtgccggcacaagagctgcctgtgcacgagggacttttctgctggagccaatctgggagaggagggattaaaacgagcacatttcaggtctcgacgcatctgttagctgtgtactcacaaagctgtggcaacatgaccgctgctcaattaagatttctggtgaaatgtttaagctttttctccaagagcttccagcatcaagtacaaaaggatgatcctgaaggaaagatgaagctggttttaacggcgtctgtgagctgctttccctgcacacgaacagaagctcttaccttacaaacagaaagggaaaaaggaccttaaaaaaccatacacagactccagcaaagccaaat

SEQ ID NO: 139004 - DNA, 1001 bp, Homo Sapiens
cagtcgacggtaccggacatatgcccgggaattcggccattacggccggggagagtcaacagctgttgcagcatgagcgatacgcttggttctcctaactagcaccttcccctctcccctgactcagctggtagcccctcctccccgcacctgcccaaaggtcactggacaggcatttgtctggccttcccttttactgctggctgggaaggaggagcatcagaccacagatcctggaaggcacttctctccctgactgccgctcacactgccgtgagaacctgcttatatccaggaccaaggaggcaatgccaggaagctggtgaagggtttcctctcctccaccatggttgacagcactgagtatgaagtggcctcccagcctgaggtggaaacctcccctttgggtgatggggccagcccagggccggagcaggtgaagctgaagaaggagatctcactgcttaacggcgtgtgcctgattgtggggaacatgatcggctcaggcatctttgtttcccccaagggtgtgctcatatacagtgcctcctttggtctctctctggtcatctgggctgtcgggggcctcttctccgtctttggggccctttgttatgcggaactgggcaccaccattaagaaatctggggccagctatgcctatatcctggaggcctttggaggattccttgctttcatcagactctggacctccctgctcatcattgagcccaccagccaggccatcattgccatcacctttgccaactacatggtaccagcctctcttcccgagctggttcgccccttattgtgccaggcggctgctgggtgttgcctggcatctgtctcttaaccttcattaactgtgcctatgtcaaatggggaaccctggtacaagatattttcacctatgctaaagtatggcactgatcgcggtcatcgttgcaggcattgttagacttggccagggagcctctactcatttgagaattcctttg

SEQ ID NO: 139005 - DNA, 642 bp, Homo Sapiens
  misc_feature (598)..(598): n is a, c, g, or t
atttttccggtttatctagctcagccgtaagtagtttctctatcagtcgcgcagctgtgttcgcggactcaggtggaaggaatttcttctcttcgttgacgttgctggtgttcactgtttggaattagtcaagtttcgggaatcaccgtcgctgccatcaacatgtcggtcccaagcgctctcatgaagcaaccgcccattcagtctacggctggggccgtcccagttcgcaatgagaaaggtgagatttcaatggaaaaagtgaaggtaaagcgttatgtgtccggaaaaaggccagactatgcccctatggagtcctcagatgaggaggatgaagaatttcagttcattaagaaagccaaagaacaagaagcagagcctgaggaacaggaggaggattcatccagtgacccccggctacggcgtttacagaaccgtattagtgaagatgtggaagagagattggctcgacatcgaaaaatagtggaacctgaagtggtaggagagagtgactcagaagtagaaggagatgcttggcgcatggaacgagaagacagcagtgaagaagaggagtaggaaattgatgatgaggaaatanagcggcggcgtggcatgatgcgtcagcgagcacagggagaacca

SEQ ID NO: 139006 - DNA, 1821 bp, Homo Sapiens
  misc_feature (41)..(53): n is a, c, g, or t
ttcaagcactttcggataaagctggaaggacttggtgcagnnnnnnnnnnnnnggggttgggttccttggggccctggcaggttccgaagttcaagggcctttcatgatcatcttcaagatgactgatgtccagtgtgtgaaagaggttggagagaaagccccaagatgtgaacaatggccagcttgttggagggattgggtatctcctctgccagcttctcccagttgctggatatagggtgagataagcgagtgcaggttcttaaagatctcctccacttgaagagctgacagcaggaagcccagcgcctgcatcagccacatgcactggcttgtcttgtggatctgtttcatcagcacatcctgggacacagccacaatgttggcagcatagggaggcaggtcatacttgcactctcggcagatcttcttgagggtggacacagaagagacagacagctcaggattgcttagggcatgcagtaccaaggggcagaacactgttgatccatgacggggtggtcagccagccattcagacagagctccaatggtgaacatgacagtgtctgccagctgcacgttgctgatgctgatccgtgggatgaggccaatgagcccaggcaccacatcagaatagttgacgtcaatggtctctgcgatggattggaagccgtagaggagggcctctgtgtgctgccaggagtagggctcctctgagctggtgagcaaacgacccagcttgtcatagaggttgctgagcagctcggcccccaacatctcatagacatacatgagcgtgtctgagatgtccaccctgtaaattcggaactgctccttctcgtctgaggaccagaatccatattcctcatcagaagggaactgggccttgtgcagaagcacatccaccagctggaagtagactggccggtacacctgctggtatacagcctgcttctctgcctcaaaggatagaatatcatcctgcagtgtgtaccagaaggtgagggttagggagctggtggtctcattgacaggatagtggccagggatgcctgtgcagaacataatcatgttgacgagtgccaggaaactctgccagtgctctacttggtccagcaaggcccgggagtggttctcgcccagggccacagcgatgcgacagatgccatgggaggtctccatgtccccattctgcactgcctgccgcagttgttcctgcagacccagcaccagcgggatgagtttcaggagtgtgttcacgtacctctgggcatcaggctgtgagatggcattcacaatggcctccacactgctgtcgaagagctccgagtcctgcagagcagcaaaggcagcctgaatgagcgcctcacagtcctgcagcggcacctccagctgcacccagctggagaaacacttgagcaccttctgacgcacacagctgggtgagctgggctgctgtagcagctgctccagcagcgggaagacagccccacattccaccgccaggctggtccgcaccaggcctttgcggtactggggtaggcgactggtctggaactcctcaggcagcactgtcagcagctctaacagggctaggcagcggccctgcccatccactggtgagtcctcagcctggaagagtcgtaccatatctgccacagcacatggccaagcatcaggcatcatgctgagagccagtgaggccagtgccacgcacagccgagtcagtacaatcttggagccactggcaaagcgggtgatctgggtgaacctcgtgccgaattcggcgcgcctcgacttcatactctctacaataag

SEQ ID NO: 139007 - DNA, 1021 bp, Homo Sapiens
  misc_feature (49)..(49): n is a, c, g, or t
  misc_feature (169)..(169): n is a, c, g, or t
ggtaccagtttcaaaattatgtggccagggaggccgtaggggggcttgnttccaccattggtagacatccccagtgccatttggcagggcaacccagggtagtgtcgtgcgcagagtaaaccagcagcttggggaagctgggaggtgtccgccataggggtcaggttcnttccttatctgagccagcaggactccccccctgaagccggggccttctcccgcctgctggtagattccgaagaggaagcggaagctgaagtcctttagccggctgagacgctgcatggtttggggtgaggcccagggcggcaggcgcagcccgtgcgtttgctcacagaagagtgtgtcatagacattccagacggtctccagtgtcaggtctgtaagccctgtctcgttggccaccatgtccagaaattgtgcattccgagaactctcattctgatactctggtgtctgccgggtctcgttctgcagctgctcataacggggacatgggcccaacgggaacttcagcagcctgtcctcagtgatgggcacagtgtgcacaggaataggctgccacgagatgttcgggttgaagcgctgcatcccgttgggagggaagagtccagccaggttggcctcagcactcatgagagtccggtcaaagtctgtgcttcgcacataaacctcttgccggtgataagaggtgtttaggaagccgtgatagcgctgccgcagggcctggcccagttcccagtgctgtagcatcccctccttggttaactgaccaaacccctggggccattcttcttcctgataggggtccttgggatatgtcttcactggtgaacggtctccatggcggtacagcaaggtaacgaagcgcagactccgggcccgggtgggcggcatcaccaccaggttcacgccgagaaggagctggaggagagccgcccggctccagccggaccgcttgcccgccatcaccgttgtaatctatgcagcaaacaagctggaacccgctgggtggacacct

SEQ ID NO: 139008 - DNA, 1967 bp, Homo Sapiens
atagggaaaatcctaaaagagactttgggagttttcacagcagagagaagtcacacatgactgtctgtagccctagagatttttccgcaaaagggctactccctgaatgtacatccctcctccccagaaagacaaggccacccagtcaaagcttaggttcactggctctcaccaggccttgccaggtaaccccactatctgtctgcaggaggccagggcagcgtaggctgcagatggagcaagtagaaaaacaaacagtttgttgctaagaactgagctgtgtttgtggaaggaacttcattcccccaggacattctccaatcactctggacatctgtgtctccagcttttagggctgaggcaaatcttgtcacctctcccaatctgatgaaggcctggcttatggcgcagccagagtccagtctacaacagaagggaggctctctacagagaaaaatagtcactgtaggaatatagatattgccctggctcctgcttgcaggacaatgtcttccaaagggctgcagtgccttgaataggtgctcgtgctccgtctgcccagcttagagtggccaggggcttgggaatggtgagacaacgggagcccgaagttccttggtgcagcccaggggccaggtcaggatgtcaaaggccagtgttaacagccaacaggggcagtgggcttctccgaggcagaggcagcagcaatggcagcaaccatctccaggcagctcaggtttccaccactcggatgacaggcatgggcttcgggctaggcggcttggatatcctaatactgcccgggttctctgtcttggcccgggcctgggtgctgaagttgccatgactgatttgtttttctatcaggtgttccatccggtcatgcatctctaaattctctgccctcccagatagggcgattttctccttgagcctcctggatggtggcgtcctttgactggatcacagcttttgaattctggagctgctctatcatttgccggactttccgctgctggttcttgagcatgtcatccaagtggtggatcttctcccgcaacccggccacttccttttccagggtagcagccttttctcgttctgcttggcagtcagcattgttgctccgaagttcctctagggccacctccccttccctcactttcgccagtaaggcctgatgctccgtctccatccctagcaagcgcctctgcagctctccgacttctgcctctttctgctccactctgtcctcctctctctgaagggccacattactttgttctgcttccctctggtaccggctgagtgtgacctcaaaagccacacagtctgactggtgttgccgcttggcctcctgaagcttggccagcaagtcctgcaccgtcttcctcaagctctcaacatcctcatttatacaggtgtccacctcaggtgggctgctgtacagggctgtgggactctgactaaagccatttggcttttctagcaccacctgtatctcctgtcgatggagagaatctcctaggttcctgtcaagcttgctacttatatcctcccggagcttctgtaggcagttcctggcctcctggatgtactggacctcactcttcagctggttaatattcttctcgtgaatcatcttgtctccagacctccccttcaagtacaccttaatgatctcctcatgtccatcatgggactccaccagttctgaagccagagaatgaccagctgagtggctggacaccatggcataggtcttcctgcccgccttctgggctatgtgttcaagttcatctcctgtcggttcaccctggagagtcagcctgagaatgtccacgctgcccgccgcccggtcctctgggtgcacgtccaccagggtacaccagttccgcgtcccgttcatcttccctcggggtcgcagcacacacgccacttgtccaccccgctgtctggctccaact

SEQ ID NO: 139009 - DNA, 1758 bp, Homo Sapiens
  misc_feature (471)..(534): n is a, c, g, or t
gttcgtcttattgcgttttttctttgctctaacttgtcactttctgggtgtggggtgctctttcctctgattgtctttgattctgagttttatctttgtattagcgtgcctaagtctctttagcgctggtactattctcctgaccttttggtggtgttcctcttgttttattactctatctgcttctggtttcatcggtgtcttttatcgggtttggcttttgcctctcgttgtttctttgttctttttgtggggtgcatgtgttggtgtcgtctttgtggtttgcgtgggtggttggtctgttggttgtcctgtattctttcttctctttgttggtctttggtgggttttttcttctcgttggtgtgctttccgctttcatttttgtctccgtattcttgtctattgtgtcttcttttgtgttttctgctccctttctttgcgtcatttgctttctcttcgtcttggatnnnnnnnnnnnnnnnnnnnnnnnnnnnnnnnnnnnnnnnnnnnnnnnnnnnnnnnnnnnnnnnngtggtaatcgctgtggtctgcgtgagctacccgggtggtggtccttattgtttcccgccaaatcctatttttctcgtgctgtttgggtccgttgggtgtctcccaatggctttccgggtactcggtagatctcatctgggggcgtatatcttccccaatttcccgctgtggggttctatgctgctccttggtaattctggataccggcttcggaatatggctcacgtgcggtccccacctgtgtctgtcacacctttttgccgtcttttcgtggatatttttcggcgggaaccggcggttgcgtgcccaacggctggctgcgtgtgggcccctgtgccctagtgtgcgcctattgcgtgcggtttttgcggtttgctctgcgtcggtgcttttggcgttttcgctgtcgctggggttcctttcccaagtcggtgtttttcctgtgtttattgggggttctcgcgtttgttcggtggcgtatcttgcattatcggggtgtcccttggtccgttgccctcgttttgtggctgttggtgtcacggctgttttggcctcgcctccgggattttccttcggctgctgttggggttttcctttcgatgtggtgtcttgcgcaaccgcgcccttccaatggttcctcgtttgattgtggcgacttcgggttatgggtcttcgatcagcgctttcgtatcgtgtacattggggttcccagtgggatagggcgttgcatggtcaacgccatgggataactccaccgttgggtgggccaagcgggctctccgcggtgcccatggtgagattgccagctcgtgtacagggagccagcaagggctttgtgacagatggagggtttccctgcatcatgggttaggatgattgtttcttgcacttgactccacgggccatatggccatgatctcgagtgtcttgaaggccgctgtgtcatttgtcacgcgtgcactgctcacgatgttctgccttgctgtagcgtggcttcagctgactgcacgggtgtagtcatagatgtgctcgcctcatggatattgacgttgcacagctttggagcaaatgatggatgtcttccctgttgttcttccagacctcacttgtgagccgtcttctgccactgcagcaccattctagcaccattgggacttccctctccagtcatgcctgctgagtcgcggttcctccagctcccagggccgcggccggagcagctct

SEQ ID NO: 139010 - DNA, 938 bp, Homo Sapiens
  misc_feature (29)..(29): n is a, c, g, or t
  misc_feature (214)..(214): n is a, c, g, or t
  misc_feature (831)..(865): n is a, c, g, or t
cctttttcaaacaaaccttccaaagattntggaaagtgttattgcttctcttctgccaaaggtaaggccagataccggaggggcaagtgtctgtggcatggtcatcttccacgattccccttctcctttcgttgtgagtattcaactccatccagagatccagagcagacagacgtttctgattgtgatgctttgctgacggggaaaggtttcngagtgtggatgtcagactgagactccgctccactttcaagaaaaggaggacagctgacatcacttagcagctcaggctcactagcccagtctgaatgacttagattatcttctaataccgtaggtttccttccagtggtataaactgggttcttacaatatgcctgcttgctcttctgaaggtagcgcttccaaaaattatgtaaaacatcgttctttaactctgggcctactccaaggttctttaaggcttctgcttgttgataaagaatatactggaaaccttcacacacatacccatcccagcctttttcagtattgttttcttttttaagcccccggttgagggcttttatttgggtattaggaataagatcagtgtttgtaacttcctgatatctctctgtaacattgtggcaagaagtgcaataatatttgccttcatcagtaagaccccatgagacagcagcacactgagtacagcgttctttaaactcttccgactcctcgaggtccatcgcggcgccgcgggagcttccacagccgggacccgttacccgggtagcccccggccgtaatggccgaattcccgggcatatgtccggtaccgtcgactgnnnnnnnnnnnnnnnnnnnnnnnnnnnnnnnnnnncgccgcttcctcgctcactactcgctgcgctcgtcgttcgctcgccgagctacgccctatatgattataactg

SEQ ID NO: 139011 - DNA, 838 bp, Homo Sapiens
  misc_feature (639)..(639): n is a, c, g, or t
aggtcaaagaaataaaccgtcaatacgtgagagggaaagcaggaacagaagtagcttttcataaggtaatttctgttctcatggtccctcctcaaagggctggaaaggtaaaggagttaaacaaagaagtggtatgttagcaaggggtttggaccctcttggccccattaaatctagtgctgagggcaggaccctgggcatattttggcacacccagtcactctcctagatcctgcatggaggatctattttctttgggaaggaagtcttcccatcaacctcaccattgaacggctcccggagaatcagaaactcatacgttttcttggacaaagcaccattctctatggagaccaggggcctggacatgttttcttcctgtctgccacccctcccaatcacacgaagtctttaggttctttcccctggcaaacaggaggtgtgggattgggaggactgcacaaagcagtctttaattcctgtggggcagaggggtattcccctgggtgtctggagggagttaggggtttggaggaaagtgaagggggtggggcggcctccgtcctttagtcctgatcaaggtgaggagatgcaagtccattaaaaaaacatttgcttccaaccagactcctttctcangtggtgccggtcccgttctctatcccggtgtctcctcatgctcccggttcctttcttggaaataatcatcatgccgatcttcattatgaagcagatcccggtgcctcctgctgctctcccgggaccggctaggtgacctttcccgggagcgatgtcttttcctggaagagctcccactggcacccacactgtaggaccc

SEQ ID NO: 139012 - DNA, 1124 bp, Homo Sapiens
  misc_feature (1089)..(1089): n is a, c, g, or t
gacccctggaaaacatcagtcaccatagtcttctttttcttctttgtgccccccagagctgagtgcagagcattcagaaaccaagacagaaagtcaacgccatctccttgtttggtgatctgaaaagtcttcttactgcaaagtacaactgcctgaagcatctcatggggagacacatgtgccttgaaatttcgagggttccagagctttctcatcagctctccaaaacgctggaccaacaagaacatgatatcccctggaggacgtttgatgttcttataattgtcttcttccagaaagtagttccggagaggaggaacattagatagagcctgaaggacagcgttggcataatcattggcctttatgttattcagtcccacaatacccggcaggtaagtggtaccatcatatgcccgggacaatttggcttgcttgtccaagtttgcaatttgctgctttgtgaaagtgggcttcaacacatacgtgatatcctccaatgaggaatcgatgatctcatagttgtctggaaggcagtaaaacttgagggtgtggaggttgaggaaaacatggtggctaaactggacactgtgaatgtaggcgtgagacttcaaaccccggccttgaaagtacttgccacacaccagacaggcataagcattgatgtgtgagagggagatagaacacagtttctcaaagtcaaagtccagcacactcctgttaatggtgtccaggtacgggcagtggcggctcctccggtcctcagaatccactcggccattctttgctcgcacctcccgctcaggctccgagtcctcatcgacctcgcgctcccgcttcacccgcacaaacgggacaacagaagccggggcctcgcgcgcgctcgccggctcgaactcccgcttcacgcgcacagggctgccccgggagctcgccgcctcaggctcccgctcccgatctcgctcccgcttgacgcgaccggagctgccccgcgactcagactctcgcttcccgcgagtggaaccgcgagactcccgcttagaccggccggacatctatcccgggaattccggaccgataccaaggggnatcgtcattcgccagggtgggaaaggagggaggtg

SEQ ID NO: 139013 - DNA, 741 bp, Homo Sapiens
  misc_feature (602)..(602): n is a, c, g, or t
ccccttctttcgctatgaaatacctgccacccatctgtactttgggagatcagtaagcaaagatgtgcttggccgtgtgggaatgacatgccctagactggttgaactagtagtgtgtgcaaatggattacggccacttgatgaagagttaattctcattgcagaacgttgcagaaatttgtcagctattggactaggggaatgtgaagtctcatgtagtgcctttgttgagtttgtgaagatgtgtggtggccgcctatctcaattatccattatggaagaagtactaattcctgaccaaaagtatagtttggagcagattcactgggaagtgtccaagcatcttggtagggtgtggtttcccgacatgatgcccacttggtaaaaactgcatgatgaatagcaccttaatttcaagcaaatgtattataattaaagttttatttgctgtagttctgatataattctactattttgtggcacagaaatttgatatcttcagtcagtatatgtaaagattgtttatcggaagacccatgaatgagttttggtcagaaaattccacttgtttccttagtgtaatagcagtcatatctccgaanttttttttaatgtggttcggatgtgaaataaccagttatacgtattaaacagtttacagtctaaaggaaacaaaacctatatgttataatatccaagaagtactaataggtttttctgaaatgttatattctctatgca

SEQ ID NO: 139014 - DNA, 583 bp, Homo Sapiens
tagatgtggttgaggtggcagtggtggtggaggaagcaccgctgccagaattagcctgtgcttctgacaccttgttttctgggagagccattgagatgagagaaaggagtctgaggagtttctcagttaagagagagctccggcggatgactgggtgtgacaacatgttcatgagctgccccagtggagaggcctcgaggctgtatggagaggtttccccctcaccgccagcgctcactggcactgacttcacggagttctgcctttccggctgacattcatgttgtccagttttaccaataagtcccagaagtctgtgcaaatgccactgctggaggactgtgaggagcatgggctacaggccttattgcccctttcccgatcactctcacagtttgtttctttggtccgctgctgtgtgaagtggctgggaaataccttggccaattgaatgagtgtatccaaaacgtgtctgcagacaacaggagcagcttggggatggatgtggacggtggagccaccgcttgcatgcttctcggtatgtttacgcccccctgaacgctgcctctgaaatataatagtc

SEQ ID NO: 139015 - DNA, 899 bp, Homo Sapiens
cttattggctgttccgggatctctgcctgagaaaatgagaccggtttcctggggagctcagatttcttggaaacaagcagacccttttgcgtcgttgaagaaagttggaaaagattctactgtcttactaatctgcatcaccgtgtttctttcataccttcctgaagctggacagtgtgtcaagtttttttctctatctcaggcaggtcataggttttggatctgttaaaattgcagcattcatagctatggtaggaattctgtctattgtggctcagacggcctttcttagcatcttgatgagatcattaggaaataagaatactgtcctccttggcttgggcttccagatgctccagttagcctggtacggttttggatcacaggcctggatgatgtgggcagcagggaccgtggctgccatgtccagcatcacgtttccggcaatcagtgccctcgtctctcggaatgcagagtcagatcagcaaggagttgcccaggggatcataactggaataagaggactatgcaatggcctggggccagcactgtatggcttcatattctacatgttccatgtggaactgactgagttgggcccgaaattgaattctaacaacgttcccctgcagggagctgtcatcccaggcccgccgtttttatttggggcatgtatagtccttatgtcttttctggttgccttattcattcctgaatacagtaaagccagtggagttcaaaaacacagtaacagcagcagcggcagcctgaccaacaccccagaacggggcagtgatgaggacattgagccactactgcaagacagcagcatctgggagctctcttcatttgaggagcctgggaatcagtgcactgagctgtaaactcggcagaaagtg

SEQ ID NO: 139016 - DNA, 879 bp, Homo Sapiens
  misc_feature (681)..(691): n is a, c, g, or t
tcttgctgtttcttcggaggagagcggtggtcaaagagcccttactgcccccagaggatgacacccgggacaacgtttattactatgatgaagaaggaggcggagaagaggaccaggactttgacttgagccagctgcacaggggcctggacgctcggcctgaagtgactcgtaacgacgttgcaccaaccctcatgagtgtcccccggtatcttccccgccctgccaatcccgatgaaattggaaattttattgatgaaaatctgaaagcggctgatactgaccccacagccccgccttatgattctctgctcgtgtttgactatgaaggaagcggttccgaagctgctagtctgagctccctgaactcctcagagtcagacaaagaccaggactatgactacttgaacgaatggggcaatcgcttcaagaagctggctgacatgtacggaggcggcgaggacgactaggggactcgagagaggcgggccccagacccatgtgctgggaaatgcagaaatcacgttgctggtggtttttcagctcccttcccttgagatgagtttctggggaaaaaaaagagactggttagtgatgcagttagtatagctttatgcgtgtctccactttatagctctaataagtttgtgttagaaaagtttcgacttatttcttaaagcnnnnnnnnnnncccatcactctttacatggtggtgatgtccaaaagatacccaaattttaatattccagaagaacaactttagcatcagaaggttcacccagcaccttgcagattttcttaaggaattttgtctcacttttaaaaagaaggggagaagtcagctactctagttctgttgttttgtgtatataatttttt

SEQ ID NO: 139017 - DNA, 679 bp, Homo Sapiens
cagtcgacggtgccggacatatgcccgggaattcggccattacggccggggggcacttacacattaatgtgaattagtaattgtggtatagaaatgttttatagtgaaagattcaaatttgcttttcaagaaaaatgccaaaagctatttaaataattcgaggttacatcgtaggttttgatttgttctcaatttaagatacagaaatacagcaagccttaatataaagtttcctaaagtttcttcaagtattttttaaggtggtgaaatgcaggaattgtataaccagaattgtttctgcctttagcttttcagaacttgagatgtggcagcacctggactgggttatcttttaaatgttaaggactaggaaatgtttgctctttgttaattatgaacttaattgattattaagtttaggaatgcatttttacaagtatctaactatcaaattgtgtcttagtaacttgagtgtatgcacaagtttgatcaacagcaaaatagagttctgaatttcttttaaagtgatgatatattattttgtgaaactttgtgtttgaaaatgtttatttctgtttatggtgtaatcattctgaggtgaggcttttcttatttcctttgcattttgctagagctgtgctgagttcagcatttgcttatttaaccactacataatgac

SEQ ID NO: 139018 - DNA, 1059 bp, Homo Sapiens
tggtttcccccatcggagacttcatcagttttggtagcaatcctgaaggaggcttttcctgggctcactggtcccccaagagcgcaattagcctcttgcagcctttaatcccgggaatctcaggcccggcttggggcaggctcagaccattgaaaggccgggttctgcctgttgcacattgcttcgtaacacgagtgatggtttcggtttggcaactcaacgtttctcttccagcaagcactgcccacattagggatcccgaagctgtagacgtcactggctgtggagggccttccggttttacgttaacaaacagttctggggccaaagtagcccagggtgccccctggctccccggaccctgtccctgactgtgagcctccctgaaatgtggacaggccaaaatctgccagcttgacgtgcagctctgggtccagcaggacgttggatggcttgaggtcccggtgcaggagcaccgggttctggtcgtgcaggtaaaacatcccaagcaccacttctttcagcaggcggcaaaggagcggccagggccgagggcactgggactgcagcagccccgacaaggagccgttctccatgaatttagtcaccagagccggcttgggatcttggtcccagttcaccttctcgataaccccttctaggcgcagcacgaattcgttatccagacttgccatggccttgacctccctggatatcgccttcgagtttacgatcttgaccgccacatcgtagccccacttcctatgttgcgcccggaacactgtgccgaacccgcctttgccgacgagctcctggttctccagttcctcgatggacaccaagggggcgggggcaccgctgggccataacttgacgcacgacatcaggctggaaggtgccagggggcctctggaaattgcgagccgtaggagatggagtgacttctggggcttggtcctttcgcagagaggggaaggggtctgtctgtgcaggggtcagtctctagaccaagacggtgagtctactttccggggttgttaccatcccgggaattccgga

SEQ ID NO: 139019 - DNA, 1329 bp, Homo Sapiens
  misc_feature (55)..(65): n is a, c, g, or t
  misc_feature (91)..(133): n is a, c, g, or t
  misc_feature (182)..(270): n is a, c, g, or t
  misc_feature (501)..(501): n is a, c, g, or t
aacacaacccacgcctgtgggaggagcgtttttcgggcgaatacggcgccccacnnnnnnnnnnnccccccccaggaacaagacccttctnnnnnnnnnnnnnnnnnnnnnnnnnnnnnnnnnnnnnnnnnnnacaaaaaaaggggtgcgtcaaggggttttcccaaaacctttttgttttnnnnnnnnnnnnnnnnnnnnnnnnnnnnnnnnnnnnnnnnnnnnnnnnnnnnnnnnnnnnnnnnnnnnnnnnnnnnnnnnnnnnnnnnnttttttacggggtgcccccccttgtggggtttaagggggggttaagagggtcccaaaggggttttcgggagtgtctttcccccgggggggctctggggtttctcaagtccccacatggaatttttctttttgggaagggggggcctctgggtgtgggcgcgcccccgccttgggtggggaataaaaggagctctcggttggtgggcttcaagggggcccttgttatccccncttgtgtaggcccagggaagcttaaaaactcccttggcctgggcccttttttccccctggccagcccctggttcccagaggagagaaggactacgccctattcaataggcagggcctctggaggtttagtttccggcggggcctggctggagcagctctggggctttgtcttgaggctgagaggggtgtagaccagctgaccttgacgtgcagctctgggtccagcaggacgttggatggcttgaggtcccggtgcaggtataacatcccaagcaccacttgtttcagcaggcggcaaaggagcggccagggccgagggcactgggcttgcagcagccccgacaaggagccgttctccatgaatttagtcaccagagccggcttgggatcttggtcccagttctccttctcgataaccccttctaggcgcagcacgaattcgttatccagacttgccatggccttgacctccctggatatcgccttcgagtttccgatcttgtccgccacatcgtagccccacttcgtatgttgcgcccggaacactgtgccgaacccgcctttgccgacgagctcctggttctccagttcctcgatggacaccaagggggcgggggcaccgctgggccataacttgacgcccgacatcaggttggaaggtgccagggggcctctggaaattgcgagccgtaggagatggagtgacttctggggcttggtcctttcgcagagaggggaaggggtctgtctgtgcaggggtcagtctctagaccaagacggtgagtctctttccgggttgctcccctcccgggaattccgcccgtccca

SEQ ID NO: 139020 - DNA, 493 bp, Homo Sapiens
agggcactgggactgcagcagccccgacagggagccgttctccatgaatttagtcaccagagccggcttgggatcttggtcccagttcaccttctcgataaccccttctaggcgcagcacgaattcgttatccagacttgccatggccttgacctccctggatatcgccttcctacactccaggagagagctggagtcgcaccggggtcgtgggaaaatccctcccttcgccattcaggccccagagcacagtggctccacctttttggccagattgcggctggggtcaaccggggtcactcacgagtttacgatcttgaccgccacatcgtagccccacttcctatgttgcgcccggaacactgtgccgaacccgcctttgccgacgagctcctggttctccagttcctcgatggacaccaagggggcgggggcaccgctgggccataacttgacgcacgacatatagctaggggggatcaactagagtcgg

SEQ ID NO: 139021 - DNA, 1348 bp, Homo Sapiens
  misc_feature (272)..(272): n is a, c, g, or t
ggcgaagtttagggaatctggacaggatgcagaattggatagggagggttgtccaaaagaaaactgaaaattggagaacaaggggcagggccgagcctaaactggggtaggggctaggagacaagaatttgaggacaagagctgggctgagtagttcactttaggcatatccttgccactgccctctctgagggggtcagaagcaggggctgcaggggtagttaggagggctcctcaggtctaggtttcagcctgtagccgttgggcggagnctcagcccagccgtcccaaaaagagcagtcacatcttcagagggccagagcctgcctggcgcggccttgccagctgatggccctctctgtgaggcactgcagggcctcgccctcgggcagccgcactggcagtctctgcagggctaccagcagtgccaggatggtctccaggcgcgggcgccttgagcgcatacacagtggacacaggaatttggtgtcccattcccaccaggccagcagtggggatgaggtgggattgggcctcggagagctgaggaggcgaggcactgacacacaccgcccatggaaccagtcctgacacaggtcacactgcagagctcccgccccagccagcacctgcccacacacacagatagagagttgtagaggaggccgtgctcgatgagtgccagtggactgggcttggccgaattggtgcgacgcagctgcaggataccctccttctccttctgttccccctccttgaaggccacgatcacagagcctgggtccctgaggtcctgcgcagacagccccagcagctctgtgtcagatttgtacaaccccagctccttctccatccaccggctgcgcttggtgctgtctgagccggcatctgcacatgggcagagaacctccagcagcgtgtagcaagaatttttcttgaggaaggtcttggaggccttctccctccaggagtgcgctgtcagtacctgtagctctagctgtctcagctcctccagccccacaggtaggtcccggcccacagctactaggccctccaagtcatctaggcaggggtagtggtcaccattttggatctcatccacatcagcaatccaggcttgtgccttagtcagagcttctttgagagcctggatgttgggcaggtgaacagggatgttttccgcttcacggattatggcctcaagtgtggctggtggatgcttctgcctggcctacaggcagaggtgggctttctcctcccagcgttcagcaatggtcagcagttcctgcagctcctcgtgccgaattcgccacccaggcctcgctaccttaggaccgtatagtactgc

SEQ ID NO: 139022 - DNA, 485 bp, Homo Sapiens
cgctgctgcttccctagccgataattttacatcaataaacctcttgtgtgtaaagtgctatacacttgtatgctggtatcaatagtagttcatgtagcgaagaggtggcaatgattacatgaaaactgcttcaaagctaaagacagttgtagttttccttggtgtctttaaatcagaaaagaggtgtcaaagctgacgaaggtccaggcagcaggagtcttaagagcatggaagcactactgcttaaatcctacggtggcagcatccggtttctttagtgattagtaacaggaatcaggaatttctaacaagcagtgccaaagatattttaggtgcagtttaagtatattacactttgactaaaatgttttgaagatttgagaagtttgtacccttgaacctggtaagctgggcttcagctaaatggctatataggttttatagatatgaaatacattttttctttcccatgaaaagactagctg

SEQ ID NO: 139023 - DNA, 875 bp, Homo Sapiens
ctcgttcaagatggcgcggatcgcgatgcattcttggcgctgggcggccgcggcggctgctttcgaaaagcgccggcactccgcgattctgatccggcctttagtctctgttagcggctcaggtccgcagtggaggccacatcaactcggcgccttgggaaccgctcgagcctaccagcagattccagagtcattaaaaagtatcacatggcagagattgggaaaaggcaattcaggacagttcttagatgctgcaaaggctctccaggtatggccactgatagaaaagaggacatgttggcatggtcatgcaggaggaggactccacacagacccaaaagaagggttaaaagatgttgatactcggaaaatcataaaagcaatgctttcttatgtgtggcccaaagacaggccagatctacgagctagagttgccatttcgctgggatttttgggtggtgcaaaggccatgaatattgtggttcccttcatgtttaaatatgctgtagacagcctcaaccagatgtcgggaaacatgctgaacctgagtgatgcaccaaatacagttgcaaccatggcaacagcagttctgattggctatggtgtatcaagagctggagctgctttttttaccgaagttcgaaatgcagtatttggcaaggtagcccagaattcaatccgaagaatagccaaaaatgtctttctccatcttcacaacctggatctgggttttcacctgagcagacagacgggagctttatctaaggctattgacagaggaacaaggggtatcagttttgtcctgagtgctttggtatttaatcttcttgccatcatgtttgaagtggtgcttgtcagtggtgtttttgattaca

SEQ ID NO: 139024 - DNA, 721 bp, Homo Sapiens
aatctgtattaactttatttaaataaatgaccaatctgtcacccaacatgtcatgtggcttctctgcactgatcttgctttgttttcaaacttgtcacttgcaaatattataagaaaaaaaggtcatctaaaatgagttaaactggttacaattggtctcaacttttaagaatttacattcaaatggaataggacgcagtgtttttaaagtgcaagatatactcttttggctcaacatgaaacattatagaactggaaattaccgcagtcatttctcctacaacaaacttagttaaaagctgttttgaaagttagttagccatcagattataaactatgaaaaacactgaaaagtcatttaaaatgagtatataaatgcaaattacaaataaaaccagtgtgggagaggtagcataaagtaaataagatcaaataaatactatacaataacatacaaaattttgcttataaaaaattgaaaataccattttaaaacatccattttcctcacttttgagggttttacaaagaaattaaaatttagacttagagtctctataaagcttttccaaatgttattaattactggcattgctttttgccaacatctctctgatctgtcggtcgagttcacttattattcgatcctcgtgattatacacacccgttctcatcaaagtatccctttcttctatcaggcgactcaaataatcgaacaaat

SEQ ID NO: 139025 - DNA, 1268 bp, Homo Sapiens
  misc_feature (41)..(80): n is a, c, g, or t
  misc_feature (84)..(118): n is a, c, g, or t
gaatgtatcgactcactatagggcgcttaactcgttcgagnnnnnnnnnnnnnnnnnnnnnnnnnnnnnnnnnnnnnnnnccgnnnnnnnnnnnnnnnnnnnnnnnnnnnnnnnnnnncagtcgacggtaccggccatatgcccgggaattcggccattacggccggggtgggtcagatgcagtacaatccagtactgccaggccaacaggcatttttaaacaagtttcagaatggagttttaaatgaaacatatccagctgaattaaataacataaataacactcagactaccacacatcttcagccacttcatcatccgtcagaagccagaccttttcctgatttgacatccagtggattcctgtaattccaagcccaattttgaccctggtttttggattaaattagtttgtgaaggattatggaaaaataaaactgtcactgttggacgtcagcaagttcacatggaggcattgatgcatgctattcacaattattccaaaccaaattttaatttttgcttttagaaaagggagtttaacaaatggtatcaaaattacatatactacagtcaacgatagaaagggtgctgccacggagtggtgaggtaccgtctacatttcacattattctgggcaccacaaaatatacaaaactttatcagggaaactaagattcttttaacattagaaaatattctctatttgaattatttctgtcacagtaaaaataaaatactttgagttttgagctactggattcttattagttccccaaatacaaagttagagaactaaactagtttttcctatcatgttaacctctgcttttatctcagatgttcaccaataaatggtttggtgcttctttataaacacagataatctcagtgctttcctcccttcactgtttcaatctaagtgcctccacattttttcttctacctataacactctaggatgtatattttatataaagtattctttttcttttttaaattaatatctttctgcacacaaatattatttgtgtttcctaaatccaaccattttcattaattcaggcatattttaactccactgcttacctactttcttcaggtaaagggcaaataatgatcgaaaaaataattatttattacataatttagttgtttctagactataaatgttgctatgtgccttatgttgaaaaaatttaaaagtaaaatgtctttccaaattatttcttaattattataaaaatattaagacaatagcacttaaa

SEQ ID NO: 139026 - DNA, 1058 bp, Homo Sapiens
ggcctgggtggcgaattcggcacgaggcagacacttccacagagccagtcaacaccaaagcgaattgatactcccagcttggaggagcccagtgaccttgaggagcttgagcagtttgccaagaccttcaaacaaagacgaatcaaacttggattcactcagggtgatgttgggctcgctatggggaaactatatggaaatgacttcagccaaactaccatctctcgatttgaagccttgaacctcagctttaagaacatgtgcaagttgaagccacttttagagaagtggctaaatgatgcagagaacctctcatctgattcgtccctctccagcccaagtgccctgaattctccaggaattgagggcttgagccgtaggaggaagaaacgcaccagcatagagaccaacatccgtgtggccttagagaagagtttcttggagaatcaaaagcctacctcggaagagatcactatgattgctgatcagctcaatatggaaaaagaggtgattcgtgtttggttctgtaaccgccgccagaaagaaaaaagaatcaacccaccaagcagtggtgggaccagcagctcacctattaaagcaattttccccagcccaacttcactggtggcgaccacaccaagccttgtgactagcagtgcagcaactaccctcacagtcagccctgtcctccctctgaccagtgctgctgtgacgaatctttcagttacaggcacttcagacaccacctcccacaacacagcaacccgtgatttccacagcgccttcagcttcctcagcagtcacgtccccctctctgagtccctcccctttctgcctcagccttccacctccgaggcatccagtgccagtgagaccagcacaacacagaccacctccactcctttgtcctcccctcttgggaccagccaggtgatggtgacagcatcaggtttgcaaacagcagcagctgctgcccttcaaggagctgcacagttgccagcaaatgccagtcttgctgccatggcagctgctgcaggactaaacccaagcctgatggc

SEQ ID NO: 139027 - DNA, 1440 bp, Homo Sapiens
  misc_feature (79)..(113): n is a, c, g, or t
aactgtatagatcactatagggcctcgcgttgagagccgaacgacgagcgcagcgagttagtgagcgaggaagcggcgnnnnnnnnnnnnnnnnnnnnnnnnnnnnnnnnnnncagtcgacggtaccggacatatgcccgggaattcggccattacggccgggggcagggggctgctgctgggctcagtgaagttgctgcttctcccaggcaaggctgtggaccatggagtggcagcccagccagcgtcggtctgtgccccttccgccactggggctcagagccggggtggggtggctgcagcctcaggactgggagcccccagcctgtcagatccaggagctccagtgtcctgagctcagcgtggaggggtaggggctgggaacagtgtgcaaggcagccgtgggccccaccctcggggatgtgtcctgacactgcaattggcaccgaagcccagagggtctgggggcacaagactgacgccagggtatgaagagtgttattttcattcaaagtgttattttgtttttccttccaatgtctggagaccaccagggcatctctgggctggatgagctcccacaagcctgagggaaaggccagcactcgctagcagtggcaggcagaggcccaggctgccgtcccctagagtcccaggttggctctgccagtcctgtcctttaccaaagatgaatgaagcaaatgtcatgctggcttattcagggaaggaggagcctgtcctgcctgtggccatgaccctgcctctcccaggcaggggcccgcgatgtggaactgctggcactgagggggggatccagttttgtcaactgcagttgtctctgttttacaagttgggagtcactcttatgctggtacccagtttctaaactggagattgtgtgtgccctctgggctctgagtaacccctggtttgggcttggggctagggtggtttggaaagagctgaaggttgtggcctttgcgctcctggcccagcctttgttccccactggagcagaaggggagatggacgacacggtcggggcatctggcctggccagtgccctgatcccagagagcccgaggaggtgtctcaggctgcctgagtcgtgacctgctaggccagagcccactccatctggtagaagggaaagcccatatgctaccaccagctgtgtccaaaaccgccagctctgttcttcctcagccagcctcgcccatccccttgaggtctcagcccctttcccttgtagctcctcccctggagggggaatggcagcaggggttggggaaacagcatctccaagcagcttagagttggccatatttacctcagcctgggcgctggtcctttcttccggcccctcccctccaaaatgtgcctattgctagagctcctccctctcaacacccagtttccttgggagttgtcattaaagga

SEQ ID NO: 139028 - DNA, 1050 bp, Homo Sapiens
tttttttaaacttaaaaccaaaaaactctaatagaaaactcataatttaaaatgtgacataaggggaaataagttaaaagcaacttttaaaaattacaaaaatagtatttgtagtaaaataaatggacttaaacatgtaatagaattttccctgtgatttctgacttgaatctttgaatgactattccaagtaagattcaacatttttacagaattgttcttcatcattaagatattccaagattatatttccaccattatataaaggacaatcctccttagcaatccaggtttccaaagtatgatccaagggtaaggcttctcctgaagtaatgtgacacagccttaatttcttatctgtaaatttgttattgtcatttttaagcctggctagagaagcggccaagtctatggcctttccaatgctccatcggtggcaaaaagaacattggtttgctcttctctttgctccctttaggtaagaaaacctgaaagtaaattctttctgtctgtggtaatgacttatcgccatcagcatgcatctttaatttcatcgatgcaacctttgcagctgtttcactatttttggcacctttccatcgtttacttgctgtttctcctgtcttggaatcaataatgtctttaacaagtttctgagtggcagccattcgaggctttgggatttccacgtttttcacactcatgatctgactgatgacggtgtctcaggcaaaaattcttctcacaataaggacatataactgccacaagttctctctcagcacagtctttgaaagagcatgggtaagatgtatgttgatctgtcttcagtctctcattgattacagtcacctcaggacaaccatgagactccctgcttctgtgttcaaggcaaaatattcctgaacagtcatcacacacaaatggaagaaaatctcgctgccggcaatgcgtccacctggcagtgctgcccgatgtccactccgccatctctccggcccccggccgtaatggccgaattcccgggcatatgtccggtaccgtcgactg

SEQ ID NO: 139029 - DNA, 869 bp, Homo Sapiens
ttgagcgtctcgggtgagagtccgtgaagctgacacggttaattggccgattcttctggtctgtacggagttaacctggtgtcacttgctgcctcggaagtttgtatagaagtgatgccgccttgtaactggatcttcttgatgggtttggtagccagggcttttacagaagaccagcagtccggctccagagcccacgcaacaaccgcgcccatcgttcaggcacctgatagctgacactcccgtactgaatttgtccttcgcaggctcaacatctgtcagcagtttagtcctggggttcattttgtagaatatctccagtcgtggtgccaaggtagaaaaagctatcatcatcatccactgccaatactcatgactattcttttcaactgtcctgtttggcactcagttggccagatttttctatttggaagatccaattcccatactcgaattgtcccatttccagcagtcataaacatctcatcccggcacctggagaagatcacattggtggcattgccaacattgaggccggctgcagggctgccacagatggcatctctcttggctatgctccacaccaccacacttccgtcatctgggcctcctagtgataccaagtacaaatcatttggagaaaaggccagagcttcaattttgcctttgtgaagggacagccgagcaagcagctctctgttcttataatcccacaaaatgatgtctgccattgaagccgatcacggcgtcaagttccagctccgccacttgggcctccggcgaaattttgttatccatccttgggaggttctgattactttgctctcctccctagtggatcccataactccggggcggtaccagcctgg

SEQ ID NO: 139030 - DNA, 1240 bp, Homo Sapiens
acccccttttgttcttttttggggagagtttccccaccagccacggggggcccaaaataaatgtgggaggagaaaggaatctggggcccctggttcccaaatggcccaagaaaaaattttctccttttcagggacccctttggtggggccacacccaggttagtttccagaaggtccagaaaaaatgggagaaggtttaaattgggtggggggcccagggaaaaccaaaaaataaccccccggagggcattaaaaaaagtgacagctaggtaagaaaatctggagcttcactgataaaagggtctaagcgaaatttcaatgaaaagttcttcttttctgcagcagcagatgtcagcatccgggtcacctagtaagctgaagatatgcagatccactttaacagaaatggaaaatggtaggaacctgaagacccggggagagtggctgtacaccttcaaagcttcacataaggacaattccataggaagctcatatacatgttgctgctccctcatttggcttcctggggtgatggcctttcactcactgataattctttcacaagcaaagggatctgcactctttctctgcccccactcagttcaaatttccatggatggcttctcattcctcacaagtaaaaacacttatggaacatcttggagttctaagaccattccctaacgatcgagtctgttcacaacttctcgaactgtagctatgaagttttcattgtcttggggattagctaaaataatactgtgcagtctgttcatatatgagtcaatggtgtccactgtaggtgtctctccacttccaggcaagggcatgctggtaaagctgctggtcagcacctgccgcagggtctccaggtgctgctgtaagactgtgttgcggctccgctcctggatcacatccacctccagcttctccactgctgtgcgcatgctctccacgtgcttttgcagggctgcattcctctcctcaaactccatgttggatttgcgaagctggcggagctctgcttcccgagctttgctatggttcaagaattcctctgtaaatatagggatgtcaaaaacagaccgttcctttacctctgtttctttctcatgatcatgagtggcctgccgggctgcatcttgcctatgagatttgcctttctgacggtcctgggttttcctactgaagaccttgtaggcctctgttttctgatactgttccagttccttcatgtaac

SEQ ID NO: 139031 - DNA, 1631 bp, Homo Sapiens
tttatcaaatatatctgagatgatgccatcccgtaggtctgtgaaaaactttgatgtttcaaaagcagtgtcacatacatgaagaagttcagcaagaattagccccaaagcgtagaggtccacttcctttccatagtcttgcgaagaaatctgttctgggctcatgtatcgcaaagttcccttactccttgttcgctttccatcatttttcagagatgttacaagtccaaagtctccaatctttacttgttttgtatctactaagaatatattacttggcttaagatctctatgaattaatttttttgaatgtatataatccaccccttttgttatttgttcaaagagttccaaagccaaaactttgtctagtttctcgcctcttcttttttcaatccattgttccaaggtccctttatcacagaattccatttggatgaaaaggcacttagtctttggaccttgaacgtatttttgcttttctcaggatcataatcactgctctcaagagaatcatcactggtctcaggatcataatcaaatccatcccaacagccattgtagtgaacaatatttacatgatcaagttttgccaatgcttttacttcacgctccgccttctcgttattatatttaacacgtttaataacgtaagtctttccgtcaattctgtgttttgctttgaaaacttggccaaatccacctgagccaattaattctatttctttaaaatccatgccaaacctcttgtccacagtatactttgtttctttcatgtcaggaaggtcaaatctgggtgccaaagatctttttgccttcctttgattatttctgagaccattcataagcaacgaagaactgtttaaactgtcactgttagaatttatctctgatgtatctgctgagaagtcaccttcagatgatgattcagaagcgagtgtgctggtcactaaagagttgctttgggactcacacgtagtagcaaaagaaccagaggacaggtagtcagatttcactgaggtttcttctgataatatctgaagatatgcaagtttagcggccaattgttttgcttcctgtttagtagaacctgtaccaatactatattctttctgtcccattttgcatttataatgaaatccttctggcccatgcacccccgatgcacactgttcataatttacagttagtcttttcttctgggcaattctattgataaggcctatgtaattccccatggataatccttctgaagaattcgttgttgtcaataataaaggactaactgccttcttttccttattaagtatctcaacagctaatttggctgcggcattttttgcttccttctttgatctaccttcaccttctggaaattctcttccatctattataacttgaaatgtaaacctcctatcatgtggaggtcctgaattaggcagttcttgatatttaagtactactccctgcttctgacggtatgtattaagttcctccatgaagaaacctgctgaaagatcaccagccatttcttcttcccgtatcctggttggaagctttgtccaaaatgcacgcagataatcacggaagtgtggatgttgattctgaagaccgccagagaagcaaacctg

SEQ ID NO: 139032 - DNA, 947 bp, Homo Sapiens
  misc_feature (52)..(52): n is a, c, g, or t
  misc_feature (56)..(56): n is a, c, g, or t
tttctgggagttccctccaatcatttccctgctggacctcaaaaagaccacngtcngggtctcttcttcttcttcttcatccctggtccatttgcctcatagaagtcacaacaggtctatggggatgtcagatttacccctgtggatctgtcactcgggaagtggagggcccaccactgctttcagcagtcttagaaatggcagatttgcttgtgaaagtctctgtgatgagctcagtggcctccccttcagagtttcttaagcggcattctcggatcacggggtcctggagaagatgctggattacatcagggtggcaactttcaacgaagtatctgttgtgcttcaagaccagcttgacttttccatagctgacagtacacaacttaataaactgcataattccatcagggactccagtcttgctgagcttcctgaggtactcggtgatgtcactggtttgcagcccaacgctgacagctgcatacaaggagtaggcagttagtttgtactcatgcacatgggttggtcggcacactggctctgcaatagccaccaagaagtcttgggcatatttgtaaactggagagaaggcttccaagaagatatggccatcgggagccacccagaggggcctggaggtgtggtcgtccttcagcggcatttgcagcctgtagtccttggctccatattcatccactttggtgcctgactcatccacctgcttccccgccgccgagggaaccgcttcctgagggtcgttccccggggcgtcctcttcatcatcctcttcatcctcatagtgccgcttcctggatttcttcttgtcgcggtccgctcggtctcttttgcccatggcagctacagcagcagagagaagatgaccccgctcccacaggcccgcccctcgtgccgaattcggcgcgccgtcgacttcatactctccc

SEQ ID NO: 139033 - DNA, 681 bp, Homo Sapiens
aacagttcattcatcagaccgtacgcttgtgagattcgacgactatagtgttcagagagcagcaatctgtctttttcatgcttcatcttttgtctcagccttatttcccttgaagtcatgtaaagtggattgcttctgggacagaaaggatcatgttcttgccctctcttttctgccagctcatttaagtactttgccattctttcttttcgttttcttttcatccaggcttgaatctctcttctttccttgtcagttctttgtgaatgtctgccagaataatgctgaattctggaggtgcccatagcttgttctgttaagccaagttcttcactggaaactccgtctttaattataaggtcatcaataatgtctgcaatatcagtcaatccagtcatctggagcggatgtactgaaacactctcacacaattcatcactgctattcataccaggagaagtagtattctgatcactggaactggaaaggctgacagctgaatcggcagtaggaaacacacaggttttctgaccagaataattttctgttattgaaaattcaggttctgaagtctcctttttgtcactttgatcttcttcatccatatgggtcaaaaaacgcacttcttcagaaatgctaatggtttttgaagctaatgtttttttgaattcagggccagaa

SEQ ID NO: 139034 - DNA, 1342 bp, Homo Sapiens
  misc_feature (1232)..(1266): n is a, c, g, or t
  misc_feature (1327)..(1327): n is a, c, g, or t
ccccattatttgttacgtgtggaggaaattcccaagttgaaaaccagatgggttccgaaagttccacgccaggggcctcttgggttagacagctgttgccccggggaagggggggtctttttggacaaggaaggtggttccaccttcaggcttcggagggtttccaagcaaggagaacgatttttacgcaacgggctttttcaatgaggggtgcctggcattccagatgccgctgggatctcctccgggaggctgcctggactcttccagatcattgggggttcatcagttttccttttcatgagggtgagaggcacatcagggctgggggtgaggtcaaggtgtgtgactggaggtagggggacgggagaactggctttgcgtttcataccctgaaactgcatcactttcatggtggagattgttttgtttccatactgcatgacgtggctggtgttggtgtgcgattttaccaggtggtactgcttgtgcagggtctctttagtcagatcttccacgtccgagtcttccatccagttgacgctgtaccagtcccccaggtacgtggacctcttctcatcatagtaacaggcgtaggacgactctctggggttggcagcagtagttgcataaacattgatgttatccggcaggtggttcatcatggacccagactcacaggcttcaatgtagaacaccatctttcggtacattttgtgtttgtacatgtaatggatggtctcattcaggtcctttacatgaagatcttcattgggaaaaaccagtattccagtagatccatggtcagtgaagtaaatgaacacgtgatcctgggggccactcttcaggactttgccggatcctatgcccttcactgcttctgcatcgcctctcaacacagcaaggaaattttgtggggtaacatcctctccagtgtagtccttcgggactccctgatagacatctgtgccattgggcctgttgatcacaattcctggagtgggattgtcttcagagtaagcaatgtcatcgtacatcatcacaacgatctgttcgtcaggaatcccattgcggtgaatgatctggtaggcatggcacgcgtctgcctggtgcctataattataccagccatttgaacctgccacgatcaccacccagtgcttgcctccatcttcaggatccccggccgtaatggccgaattcccgggcatatgtccggtaccgtcgactgnnnnnnnnnnnnnnnnnnnnnnnnnnnnnnnnnnncgccgcttccttcgctcactgactccgctgcgctcgtcgttcgctgtcaggagcgcccaantaagtgatagtcttt

SEQ ID NO: 139035 - DNA, 957 bp, Homo Sapiens
ttactggcttggtgccaaggttctcttttaagtccaggattttccacggtccgaagtttttccattccaggttgaacgctgtaccaagtccccccaaggtaccgtgaccctcttctccatccatagtaacagggcgtagggacgactctctgggggtttggcagcagtagttgcataaacattgatgttatccgccaggtggttcatcatggacccagactcacaggcttcaatgtagaacaccattctttcggtacattttgtgtttgtacatgtaatggatggtctcattcaggtcctttacatgaagatcttcattgggaaaaaccagtattccagtagatccatggtcagtgaagtaaatgaacacgtgatcctgggggccactcttcaggactttgccggatcctatgcccttcactgcttctgcatcgcctctcaacacagcaaggaaattttgtggggtaacatcctctccagtgtagtccttcgggactccctgatagacatctgtgccattgggcctgttgatcacaattcctggagtgggattgtcttcagagtaagcaatgtcatcgtacatcatcacaacgatctgttcgtcaggaatcccattgcggtgaatgatctggtaggcatggcacgcgtctgcctggtgcctataattataccagccatttgaacctgccacgatcaccacccagtgcttgcctccatcttcaggatcatctataggaacggcaccaatgcccagggccacactgaggaatacagctactttccaaaccattctgcaccttggagttcaattgcagacacctgtggcaggcgaccgtggtggcagtggtggcggcggcggcggtgagtgaccgcggtggtggcgccggcgggaccgtgagaactcgcggcggctcgcagcctcacaccaaacacccacgacgtcggcactgctgtccc

SEQ ID NO: 139036 - DNA, 644 bp, Homo Sapiens
cggcactgcttcggatgcgtggttcatgtccagcaatttctgcttgtaaggcttgatgtttctttagcagattctggaccccaattaaatccttacctctgttggtagatgcggcaatgggctctttctctcgaatccacgtctcctcatcctcaacatcccggaagagctgctgcaaccgcagagaatcggccagcttctgcttccgggcaaccatgggctccttgagtgcctcatagcgagccacgagggcttcctgtttcttcttgatgttttctgcatcaaaatggccagcatcttggaactggcgggcctgaatggtgatgccatcaattcggtcctggtgagcagccacatctgcctctagcagggcatgtttcttctggaggttctgcacattggtaagatctttgccagtaatcatccgaagcacaagtgaccttctacttcatatagccacaattcaatatcctcaacattgcgattaaattgctgttgctggttggcttcacgaagctttattcctttcagttcagtggcctctagcagtttcttccacaaactgatcacctcattcatacgagctgccacttcatccttggcatagtggttgacatcaatcagctctttggccagctttctcc

SEQ ID NO: 139037 - DNA, 570 bp, Homo Sapiens
acacatacacaagcacacacgcgctcacacacagagagaaaatccttctgcctgttgatttatggaaacaattatgattctgctggagaacttttcagctgagaaatagtttgtagctacagtagaaaggctcaagttgcaccaggcagacaacagacatggaatgtcttatatatccagctgttagcaacaaaacaaaagtcaaatagcaaacagcgtcacagcaactgaacttactacgaactgtttttatgaggatttatcaacagagttatttaaggaggaatcctgtgttgttatcaggaactaaatggataaggctaacaatttggaaagagcaactactctttcttaaatcaatctacaattcacagataggaagaggtcaatgacctatgagtaacaatcaactcaagattcattttcattatgttattcatgaacacccggagcactacactataatgcacaaatggatactgacatggatcctgccaactttgctctacagatcatgctttcacattatctgtctagtgggtactatatctttagcttgcaatgacatga

SEQ ID NO: 139038 - DNA, 550 bp, Homo Sapiens
ggtagatttatagatgatagataatctaggtttaggttttatttatgaaaaatttctatgccagggctatatcattgagaatgaagacaaaagattattaattcaagggaagttatgaattttataactgaccaatatcttaatattctttcagctgtatttaaacttgaaacagatagaagtatatggcccttgataagaatctatcggggtggctttcttctgattgaattcctttttctactgggcatcaacacgtatggttggagacaggctggagtaaaccatgtactcatctttgaacttaatccgagaagcaatttgtctcatcaacatctctttgagattgctggattcctcgggatattgtggtgcctgagccttctggcatgcttctttgctccaattagtgtcatccccacatatgtgtatccacttgccctttatggatttatggttttcttccttatcaaccccaccaaaactttctactataaatcccggttttggctgcttaaactgctggtaagtccagaaacttgtgtaccac

SEQ ID NO: 139039 - DNA, 552 bp, Homo Sapiens
  misc_feature (401)..(473): n is a, c, g, or t
ttacggaaaataaggggtgggtgttatttaaaacaaatgaccatatcagatacatatttgtcacaattcctaagttcaatattcataagggctagctggagaagaccactttgggcaggaaattagtctgcatttattttatagcacaaggagcaggactagatgagccagagtcatggcaggaggttaattctccacctccaaccctcttttttcatgcttcaaataagaaatgtgcagaacccttcaggcaatcctattggttagtatccttagcctggttcttgaccctagggagaatcagattcctttggtctatgacagtaatagaagttatttctttagataaattttgtttaaggctttaaattaattctatcttggcattgtgtggttctaannnnnnnnnnnnnnnnnnnnnnnnnnnnnnnnnnnnnnnnnnnnnnnnnnnnnnnnnnnnnnnnnnnnnnnnntacattaactccaatcaatccaatattcttctgtagaaagaacatctggcccagttaccctgctgtattagtccagtag

SEQ ID NO: 139040 - DNA, 1600 bp, Homo Sapiens
  misc_feature (118)..(126): n is a, c, g, or t
gcgaatatgtaaaggggggggcacgcccttataacaaaatggcgtagaaaggggggggctggtaaaacgcggcgaagggtgtgtttgtttttggtgggtgaggatactctatttcaannnnnnnnnagaaacagaaaatttttggcccgcaatattacccggggtgaggggcggcccatcagaagcatcctgcggggcaagaacggaccctcggggggtgcacctttctggggggcgttctcgcttacgccctcccccacaccgggggcccccagggaatttaattgcttgtatgggcactcttcgagggacagcgcgcgtgtgttaggccaacaccctactggggaacaaaggttggagcggaatcccccgcatatacgttctaactggggcgagggaaaaagggtgcgcctccaaaacacacgtgggtgttttccaaaacaaaacgtgcattccgattcccgggaattgtgggttaattggaccaagggctgcacgttcgaaggggaaagcgtggtggccaaccttggtagggtgcccaagaattctgagttgcccagtggtgcagaccatttttttgtgggggccccattgaagaacgtttggttttcgcagcttggggaaaagttccaactaaatttatcccctcttacgggataatcctccggtgcataaatgccacatagagttgagtaaccacaagagtgtcatgttacggctttcctttctcggcagctttacctcattcgcaatggtttccatcgtacagtccacctccagttgcagagcagtctatctcccgcttctgcctggagagcgcagtccttcaggttttcaaggtccatcctggtgatcatgtctttaatggtgcttgcatcttgccccttggtgttgacacggattggccctgttattctttgttcaggtaccaggaatgtgtatgcacatttctttgcttcctctttaccatctgtggcacgagggtatcttctctggtttatttttttaattttgaattgtccacctctgcaatgtccagtgtccactagtaggaagaatagcacacctagggtccaggtaaaagtcttcattttgaaatgaggttgtaaaatgatgtgtttaaatttaagtctttacttagttgtttttagaagagaaaaaaaagtcttctatgcgttgggttaattttattagtagcttttctcttcatagttgctatattgccagctttttgtgtctgttgattcagtgaatccagaaacttgctgcccttattcttgattttaaaaatcagtgtagaagtttgttcatctgtgactttaatggcagctgcatttttgttttggaccgttgaatccaagctgtaagaaggaacttctttttccttttacaatactaatcaattgaatttgacaagccacctatgtaattttaagtagtatagtggaagttctggtctgtgggccgtctttaatccagcagagaaagcgttgtggctttgctctgtctgccacatggagaaatgcagtaaccagctgcagctgacccagattgtatatacagtacccctgaatagtgattccctctttctcccagtagg

SEQ ID NO: 139041 - DNA, 582 bp, Homo Sapiens
tttcattgcctcatgcgggtttcagtgcatgacacagccagttaaatgcctctgtgagtttaccatctgaaaggaggcaaatcctgactttcgtttcttctctctactagctggcaatatagcaactatgaagagaaaagctactaataaaattaacccaacgcatagaagacttttttttctcttctaaaaacaactaagtaaagacttaaatttaaacacatcattttacaacctcatttcaaaatgaagacttttacctggaccctaggtgtgctattcttcctactagtggacactggacattgcagaggtggacaattcaaaattaaaaaaataaaccagagaagataccctcgtgccacagatggtaaagaggaagcaaagaaatgtgcatacacattcctggtacctgaacaaagaataacagggccaatctgtgtcaacaccaaggggcaagatgcaagtaccattaaagacatgatcaccaggatggaccttgaaaacctgaaggatgtgctctccaggcagaagcgggagatagatgttctgcaactggtggtggatgtagatggaaacatt

SEQ ID NO: 139042 - DNA, 1043 bp, Homo Sapiens
ttaagggggagagggtatgaagtcgacggcgcgccgaattcggcacgaggctggacagacggacagactgagcccgcggcagctggccttggagtagagaccgagaggcccaagcaaaagacggagccagacaggtccagcctccggacgcatctagaatggagctggtcagagctggagacgacttgtctttggacggagaccgggacagatggcctttggactgatccgcacaggtccgacctccagtttcagcccgaggaggccagcccctggacacagccaggggttcatgggccctggacagagctggaaacgcatgggtcacagactcagccagagagggtcaagtcctgggctgataacctctggacccaccagaacagttccagcctccagactcacccagaaggagcctgtccctcaaaagagccaagtgctgatggctcctggaaagaattgtatactgatggctccaggacacaacaggatattgaaggtccctggacagagccatatactgatggctcccagaaaaaacaggatactgaagcagccaggaaacagcctggcactggtggtttccaaatacaacaggatactgatggctcctggacacaacctagcactgacggttcccagacagcacctgggacagactgcctcttgggagagcctgaggatggcccattagaggaaccagagcctggagaattgctgactcacctgtactctcacctgaagtgtagccccctgtgccctgtgccccgcctcatcattacccctgagacccctgagcctgaggcccagccagtgggacccccctcccgggttgaggggggcagcggcggcttctcctctgcctcttctttcgacgagtctgaggatgacgtggtggccgggggcggaggtgccagcgatcccgaggacaggtctgggagcaaaccctggaagaagctgaagacagttctgaagtattcaccctttgtggtctccttccgaaaacactaccctttgggtcccagctttcttggacatggctg

SEQ ID NO: 139043 - DNA, 964 bp, Homo Sapiens
  misc_feature (94)..(113): n is a, c, g, or t
cttcttctcgctacccgctatctgacattcagactccggtttctctctcaaccacccaggcagtttctgaatgtcccaagataggggtaggagnnnnnnnnnnnnnnnnnnnncaggagacggtgggtaagaaaacctagaaggcacaatgaggcaaaggcctaagatggaggctggctttgggatctgaaatccggccacaatcctccttgttttacctcaagtccaagaattgtcaaaaagaaaacccagaagggctattcattctaaattttaaaatcttgttcttcctggcctaccaagtccttgtgttttctttctaggcgcccataaatacaaccccattacagttctatttggctaataatttacagaacatttaaaataccgggtaaggttaccatctcttcatggcttttgtgtaagggccttaagcgaagagaaaaacaactgattggagattcctatctggcgccttctccagggaaactgacaaccagagaaatctgttgctaggatttctaggacatctggaaattccctttttgttctttctcaacaatataaaatggtatattcgcaaacctatctgaatcacctcaatctaggccactttgaaaatttcatttaaaaatgtaatcacagatttttaaactaattacccaatttgcaaacaaatcccagctacttctggtcttgaacatggagcaaaggtgtgtcagtaaggccaacattcttaggttgacagagacaggttaacacattggctggcttcatttacccccctgccacgccccacactgagctggatgatttgatgggaagagagggtccccacctcagggttcacttccccagccccagcgttcatgggttttcaggaggctcagcctgtgaaaaagaaccaatgatgatgcacaccctggctgaagtgacatctggccaaaggattccaacagaatga

SEQ ID NO: 139044 - DNA, 537 bp, Homo Sapiens
  misc_feature (186)..(205): n is a, c, g, or t
acgtgttaggccaggaagaaattttaaaatttagaatgaatagcccttctgggttttctttttgacaattctggacttgaggtaaaacaaggaggatgtggccggatttcagatcccaaagccagcctccatcttaggcctttgcctcattgtgccttttaggttttcttacccaccgtctcctgnnnnnnnnnnnnnnnnnnnnctcctacccctatcttgggacattcagaaactgcctgggtggtttgagaagagacaacccagtttgatctgcaatacaaggatccattcgtaatctctctctcactgatgttattcccccatctgccgtcttggttcatctcaccacagaagggcatttagtcctacccagccatcggctgcgtatgacagcaggatggcacttcccatttctctgtggttagtgctcgagtgaaaacctctttcagctgagtcctctgaggttctgctgttgagtcctgggtggctgatggaatgattgaggaggtctggtcaccctcaagcgccgtcatc

SEQ ID NO: 139045 - DNA, 1111 bp, Homo Sapiens
  misc_feature (83)..(83): n is a, c, g, or t
  misc_feature (202)..(202): n is a, c, g, or t
gactttggggccctttttagagagttgggtcctccagaaacttggggggctggggttaccacatgggccttgggtttggattngaagggaaagcgccttgataaggcggcgagaaaaagcttccggcccttctttgggaccattggcgtggccgttgccttggagaagtcattggtggaattggtcaggcccagttcctttntcctaagccttcggcggaagaagaacctaagtcccgctgcccaggaacttcacttgtggatcttggaggctgcggttctccagggcaccagtggacccggtttcggactcaatatcatccacagatggcttctcagaaatatccgaacgggttgtctcgtctgcttcctggacacttgtgggactagagagggcatctagcggtcctggagacatggctggtgggtctgagggaggtgaagaggggcctccgctggtccctgcatcatcctgcactgaggcttccagggatgccgcatagcccagggatagcgccaactcgtcctgagcaatgggcaccttggaaacaccagagatgatgagagtgctgcgcttggtgggtgtcttcttggccacccgcccactgggctctgtcagctggcgaatcgctgtctctgctacagggtccaagccgttggaaaggtggctgtcccggctgctgctatgggaggtattgctggggccactgctctcactcagcacagttgtcgtcttctcggtcacctccaccttggacggggagcgggagggggagtctaatttgccgtctatacggggccgggactggacagtggtgactgtggtgacaatggtgccatcgggcatgatggtccggtcaagctcaatcttcttggtaggtgtgatgctggggcgtggagtggaggaggtgggagtacccaggttccggggagagccctcctcatagtgaagctccactgccatggtggctgctggtcccagggctttccctggccctggggtgagtgggcacaactgtcttcgagacagtggtctggagggggagcccacaggcagtgtggcctggcctaggagttcggctggggaaagggatggcactgtgagctgggcc

SEQ ID NO: 139046 - DNA, 926 bp, Homo Sapiens
tgctggtacaagtcagagccaacctcagacggctcatagggcaccaccacactatgtcgaaaagtgtttctgtcatccgaatactccacacgcaaatttcctttccactcggataagatgctgaggagggggccagaccatcgctatctgagcagcgctcatggtgggggcagcgcctcacaacctcggtcatgtgctgtgactgcttgtagatggccatggcgcggacgcgggtgccgggcgggggtgtggaatcaacccacagctgcacagggcaggtcttggccagttggcaaaacatcttgttgagggcaggggagtacgtgcaagtcacagacttggctgtcccagaatgcaagaagcccagacggaaaccgtagctgccctggtaggttttctgggaagggacagaagatgacaggggccaggagggggctggtgcaggggccgccggtgtaggagctgctggtgcaggggccacgcggggagcagcctctggcattctgggagcttcatctggacctgggtcttcagtgaaccattgttcaatatcgtccggggacagcatcaaatcatccattgcttgggacggcaagggggacagaacgttgttttcaggaagtagtttccataggtctgaaaatgtttcctgactcagagggggctcgacgctaggatctgactgcggctcctccatggcagtgacccggaaggcagtctggctgccaatccagggaagcgtgtcaccgtcgtggaaagcacgctcccagcccgaacgcaaagtgtccccggagcccagcagctacctgctccctggacggtggctctagacttttgagaagctcaaaacttttagcgccagtcttgacccacgcgtccgcggacgcgtgggtcgacgatatcccgagaattccggaccggtccac

SEQ ID NO: 139047 - DNA, 1743 bp, Homo Sapiens
  misc_feature (50)..(111): n is a, c, g, or t
gcatcgttggtgacttccctacgcaaaggagctttaaagtcctataccannnnnnnnnnnnnnnnnnnnnnnnnnnnnnnnnnnnnnnnnnnnnnnnnnnnnnnnnnnnnncctgaatctgctctccatgcctcagattatctcagtatacacaatgcaacaatcttgcagcattcacaaaaacttttttgttgctttttaggaagtagcgaggaaggaaagcaaagcagcaggatcccctagagagtttagtctttggtttctaagtttaaaggggggattggcttcagagcttggagcaagacagaagagtcgacggacggatgagctggcaagggagaagggagtctctggggcatgagcaagggagccgagatcttgtctgggttcatgaagctagagagggctgcggcagaggcgttgaggcctgggtatagcactggcactgaggtgggataccagcacttctccagcatgggcaggtaggcagtcgctgaaggtgggatcaggtagaagggcaggcagaaaggaggctggtgtgggtgtgggcccaggaacggggagctgatcaggtcactgctagtgaaatggccttcatcatccgaaagctgcatccggttcttttttgtggggggttcttcggactcttgcttaattgcgccgatcctttctcccatcgtgaacctgcgtccgtggtcacttttgaagcacggctgctcactgcgcaagtcgcccttctccgattctcctccatagccactgtctgtgtccgtgtcgctgccgctctgctccccactcgagtgagcgaaagtccgctggatgactggcacgcagtttttcccaggaccttccgaacctttggccggagagctgggtttttccttgaagtccatcactttgggagctgggtctgatggcttcctggaggtaccaccctgcagcagctccgagaccacccggtggaggtgggtgacaagctgcgaagacttcaggtcccgagtgttctcgtgcttggccagatactgaagcacctcccgggcacatgtctggaaacctgagcagaacatctcttgacctgtttcgacatttctccctgacagctcaccagcttgtaaaccactctgcagggcaatgattttctgctgctgctgatcaattaggtttgttagtgctttcacatgcttcaaggtaagttcaagaaccactgctttttccaagtgacccaaagttgtaagtttgagatgttcgggtaggagatccttcagctgggcgatgcactcgttaatccggtcacgtctctttttctcgatgagccggtgcggcaatttgtaggtctccttgctgtcctcgctccgctttattccccgtcttgacttgtacacttggtacatgtgggcagggtacatccctggtaggtctccgtgctccagtcccggtgctttgggcaggcaggcggggggtggttgcgcgctggggatcccgctccatggcgcggcgagccggggccactgcgcgctcctgtctgcactagcggagcgtctggatgaggactgccctggagagggcttcgggggtctctccgcagatgttcctctgagtctgagctctttgaaatcccctgggctgctggaatcttcggctttgagatgcagcttcagttgggggcgtgcatggcccggtgtccccgcggcctctggctccgactcagcgcacagactggcggtgtgtgctccctgcgcggtc

SEQ ID NO: 139048 - DNA, 817 bp, Homo Sapiens
gttgttaggacttggacattttcccagaacctgtggcctttctgaacctgagaggtgacatcgggtctcactggctgcagtttaagctcttgacagaaatctcctccgctgtgtttatattgactgacaatatcagtaagaaggaatacaaattgctgtactccatgaaggagtcaaccacaaaatactacttcatcctgagtccctaccgtgggaagcgcaacacaaacctgagatttctgaataagttaattcctgtgctgaaaatagaccactcacatgtcctggtaaaggtcagcagcactgacagcgacagcttcgtgaagaggatccgggccatcgttgggaatgtgctgcgggcaccctgcaggcgggtatctgtggaggacatggcgcacgcagcccgcagactgggcctaatggtcgacgaggactgtgaggagtgtcagaaagcgaaagaccggatggagaggattaccaggaaaatcaaagactcggatgcctacagaagggacgagctgaggctgcagggggacccctggagaaaggcagcccaagtggagaaggagttctgccagctccagtgggccgtggacccccctgagaagcacagggctgagctgaggcggcggctgctagaacttcgaatgcagcagaacggccatgatccctcctcgggggtgcaggagttcatctcggggatcagcagcccctccttgagtgagaagcagtactttctgaggtggatggagtggggcctggcacgggtggcccagccgcgactgagacagccttcggagacgctttttaccctgag

SEQ ID NO: 139049 - DNA, 1039 bp, Homo Sapiens
ggaaattcaaaattatttttttcacagaagtcattcagaacaccccagtaaccttcaggaacaacaaaccattcacagtcacctgggccaatatttatgttaactgaacagaagttgttattttcctgatgacctggtgttctgctccctggaactttcatgtatagttgaactgtgttcatgcccaatatggtatgaccaacatggcttagaagatttcctgctgatacgacacgcacaaaagcaggaagtttagtcagctcatgtagctgcaacttccactttttgtcatcagataggtcaatattggtcccaaactttatggttttaaagggtcctttcctcctcctcccagaattatctgacgatgtagattcactatctgagtggtctttatgatgacttcttttttcattttcttctctcaatgattcctggaatgaggaggcctggtactgtgcatatttagcaattgtagtatgagatctattactttcacaatgccagattttctttgttccagtgggatcccagttttcatctgctggctgcaacaactgtgtcctcacttctaccatatgttcattgttagcttccaccaaagttttagtagagaaaagtcccaggtctaacttaagagctccagcaaggccacgtattactgtaacagggttgttcggatttgtacaaaattgatgtaatggaggaaagaaagcatcacgtttattttccaagtaaatactaggtgtaggtggattcaacttgtcctttggcaagggagggtatggtgaagatggtggtcttggaggtggacatttatccaacaaaatgctactgttagataagccatttttacctagattcctgcatgccttcagaacttctgctgagctggggtatatggacacagacattgatggtatgatctgtggactaggtttgtggttaaccagaagcagatcctgtttcatggggctctgagattcttccatcccttctccattaattggtgtagcccactgtgagggctggtaaggct

SEQ ID NO: 139050 - DNA, 721 bp, Homo Sapiens
cttattttgatatggtaattaaccaaaaattattattgcagagtaaaatgcaaggaactaactccttagggatttctgaccattaagtatttttactagttcataatgaagttaaatatgactagaacacaattcagaaaaaagagactaatttatttgttttataaaatagaatgagcgcttagtttagataatcaagaggtgacagcttcaggtatcatcttcaccaagaataaatttgtagtgtttcatattcatttaaaggaatcaggaagaaaaattcatttaatttctgctgcctgcccagtcacttcaaaaattcttaagggaagctaaaataaaaataccttggattctggttactttttaaagtaaaaatttccagatgcctcaaaagcagtgagttcaatttggtgtcttgtgttctggcaaagaacagttaagtttacagcactgcagtcacagttttcaaatgctgtgaccaattatttgagagttataatctgcaggctccattttcaaaatatgtgggataacactgtcaattcgtatattgccaatgacacctttgaaaaacaattcttcagtgatggtagcattcatcagtcttaaagctggcaatctgagtagtagtctggataacctgtaggctgtcatctggatatgtgttggtatataattcttgaaattcacataagccttttcctgaatatctcgtatc

SEQ ID NO: 139051 - DNA, 804 bp, Homo Sapiens
gatgctatggttcagattgtttttcatagaaaactaaaggggcaggggaagtgaaaggaaagatggaggttttgtgcggctcgatggggcatttggaacttctttttaaagtcatctcatggtctccagttttcagttggaactctggtgtttaacacttaagggagacaaaggctgtgtccatttggcaaaacttccttggccacgagactctaggtgatgtgtgaagctgggcagtctgtggtgtggagagcagccatctgtctggccattcagaggattctaaagacatggctggatgcgctgctgaccaacatcagcacttaaataaatgcaaatgcaacatttctccctctgggccttgaaaatccttgcccttatcatttggggtgaaggagacatttctgtccttggcttcccacagccccaacgcagtctgtgtatgattcctgggatccaacgagccctcctattttcacagtgttctgattgctctcacagcccaggcccatcgtctgttctctgaatgcagccctgttctcaacaacagggaggtcatggaacccctttgtggaacccacaaggggagaaatgggtgataaagaatccagttcctcaaaaccttccctggcaggctgggtccctctcctgctgggtggtgctttctcttgcacaccactcccaccacggggggagagccagcaacccaaccagacagctcaggttgtgcatctgatggaaaccactgggctcaaacacgtgctttattctcctgtttatttttgctgttactttgaagcttgg

SEQ ID NO: 139052 - DNA, 604 bp, Homo Sapiens
  misc_feature (351)..(363): n is a, c, g, or t
gtagaaatactttggctgcccaaatgtatcttttgttcctcttagaagtaaaataagctacatacaataaaaatttatttcagaacgcccatttctagaaaataccaccccagagtcctcatttgatagcatctgtctcctgcagacctcatcattccacagtatttccctgccatgtaaaaatcctgactttgtgcgtatataaaatgtatgcaattaagtctgtttaaatgatatttaagttttaaagactgtattttgttgacacatactttgtgcagtttttatgtatgtatgtattataaaaaaagttaaggttaaaaacatctcatttaatagtgagttcactannnnnnnnnnnnngtctctgggttgtaatttaataatcttcaaacaaaatgtttacgaaaaatgccaaagattctaaatcttatcatcccgtgtctgtttttcttcatgttgtatctcactgggttgctttctggctgagccagaattctgcatgatttgatttacttcaagttaatgaagctggctggaaaagagccttgcagaaattataaaagctccagtaaatctcgtagttgtacatacaatagatacc

SEQ ID NO: 139053 - DNA, 859 bp, Homo Sapiens
gcgaatagtgaatatgaccagtggtaaaaaaagcaggctggtccggtcggaattccgggatatcgtcgacccacgcgtcgcgcggacgccaatcttgtgcatggagtcgccattttgctcctagagaggccgccaggagacccggcgctttcttccttctgcagctgaggctgcggcggggccggggctggggtcggggccaggctctgaaaattggaaaaccaagaaggttttgatgttttgtgtgacgccacctgaattagaaaccaagatgaacataaccaaaggtggtctggtgttgttttcagcaaactcgaattcatcatgtatggagctatcaaagaaaattgcagagcggctaggggtggagatgggcaaagtgcaggtttaccaggaacctaacagagaaacaagagtacaaattcaagagtctgtgaggggaaaagatgttttcatcatccaaactgtttcgaaggacgtgaacaccaccatcatggagctcctgatcatggtgtatgcatgtaagacctcttgtgccaagagcatcattggcgtgataccctactttccttacagcaagcagtgcaagatgagaaaaagaggctccattgtctctaaattgctggcttccatgatgtgcaaagctggtctaactcatcttattactatggatttacaccagaaggaaattcagggcttcttcaatattcctgttgaccatttaagagcatctcccttcttattacagtatattcaagaaagagatcgcagattacaggaatgcagtaatcgtggccaagtctccagcctcggcgaagagggcacagtcttttgctgagcgctgcgcctgggaatttgc

SEQ ID NO: 139054 - DNA, 851 bp, Homo Sapiens
cggagacttggccacgattacgcattccggtaatctggatctcctcttgaatatactgtaataagaagggagatgctcttaaattgtcaacaggaatattgaagaaggcctgaatttccttctggtgtaaatccatagtaataagatgagttagaccagctttgcacatcatggaagccagcaatttagagacaatggagcctctttttctcatcttgcactgcttgctgtaaggaaagtagggtatcacgccaatgatgctcttggcacaagaggtcttacatgcatacaccatgatcaggagctccatgatggtggtgttcacgtccttcgaaacagtttggatgatgaaaacatcttttcccctcacagactcttgaatttgtactcttgtttctctgttaggttcctggtaaacctgcactttgcccatctccacccctagccgctctgcaattttctttgatagctccatacatgatgaattcgagtttgctgaaaacaacaccagaccacctttggttatgttcatcttggtttctaattcaggtggcgtcacacaaaacatcaaaaccttcttggttttccaattttcagagcaagaaaggcggagctgaagagctcaatgttttactgattgctgcttaaagtcaattatggacaacctccttttattctctgacaacaaaattcctcctggccccgaccccagccccggccccgccgcagcctcagctgcagaaggaagaaagcgccgggtctcctggcggcctctctaggagcaaaatggcgactccatgcacaagattggcgtccgcggtgactgcgaggccggtgggcggggaggggcg

SEQ ID NO: 139055 - DNA, 1251 bp, Homo Sapiens
aggggcgagagagtatgaagtcgacggcgcgccgaattcggcacgagggggaggcggcggcagctgcggcggggccggtctgtagcctttgctgagtcaacactactcacagtgaaagtgatgccttttctccatttgcacaacatgagtgtgacgtggttagccagaccaggagctcaacctcatgtagaatccagtccactgctctgatgccgaaggggaggcagaaagtgccacacttggatgcccccctgggcctgcccacctgcctctggctggaattagccgggctcttcttactggttccctgggtcatgggcctggcagggacaggtgggcctgatggccagggcacaggggggccgagctgggctgtgcacctggaaagcctggaaggtgacggggaggaagagactctggatgcagcaggcggatgccttggcccaggcagcagggctggtgaatgctggacgcatcggagagcttcaggggcactacctctttgtccagcctgctgggcacaggccggccctggaggtggaggccatccggcagcaggtggaggctgtgttggctgggcatgaagctgtgcgctggcactcagagcagaggctgctaagggcgggccaagcgcagcgtccacttcaacgaccccaagtacccgcagcaatggcacctgaataaccgactggagcccgggcagggacatcaacgtgacgggtgtgtgggaacgcaatgtgactgggcgaggggtgacggtggtggtagtggatgacggagtggaacacaccatccaggacattgcacccaactataagccctgagggtagctatgacctcaactctaatgaccctgaccccatgccccacccgggatgtggagaatgggaaccaccatggcacgcgatgtgcaggagagatcgcggctgtgcccaacaacagcttctgtgccgtgggcgtggcctacgggagccgcatcgcaggtatccgggtactggatggacctctcacagacagcatggaggcagtggcgttcaacaagcactatcagatcaatgacatctacagctgcagctggggaccagatgacgatgggaagacagtggatggcccccatcagcttggaaaggctgccttacaacatggggtgattgctggtcgccagggctttgggagcatctttgtggtagccagtggcaacggaggccaacacaacgacaactgcaactacgatggctacgccaactccat

SEQ ID NO: 139056 - DNA, 1256 bp, Homo Sapiens
  misc_feature (858)..(858): n is a, c, g, or t
cacttcaatcaaactggaaaattgagaaccatttgctcctatgtaacctctgctgaaccatgaccccaaggtctaaggagaaaccacataggataaatgtttacgcttcacgtggccacccagatccatttttgtttttgagtctggcttttctgtggctgaagatataccgcagtcagcaggtaatggctggatttgggcgcctgcatttgtttcttctgcttgcctaaaaaatttttcatatttgtccaggtatggtggtcgttcaggtagtaggtaataatgtgttgaactaaccttcttcccattttcaataatgggcagaatgcaaggaaccttactggcagatccttcgctgttctgtctttgcagtgctttgctgctgacatacttgggatcaggggcaaagctctgtgtcgggggcatgaccccattgaggtaagacggaaggcttttgggactcggtgtgcgcgagttactcggtgacaaaggttctcttggcggtactttgggaggcctgtcttcatcactataggtgctcgaagtaacttctgctgaccatcttctataatctggctttactggtctaggaggtatgggaactctggggggaacctcaggtttgtcttcatcggagttaggagaagctctgtgtatacaacagttggatatccttatggctggcttgttaaaggagccagctggtcccgaatgagaccttcttaatcttcggtgggtctgaggtggaggaggatttggatctgggacacctccattttggtcagacacatagctgagatctgctgcagaaacagctggggtatcaaaatatgcatagttgatttgtccacacccacnggaagcttcgcctgccaggaacatcatatttgaaatcagaaagtgtagagtcttctaaaaggaagtctgtatctgagctagttaggaattccacctcacagtctgtgtcatccagagagagggcttcagagattggcaacggtggaagaggcctagaaccccgttcacaaagaggggcacaggggaaaagggaaggggagttttttatgggtgtcagtggaggggtggaagcacaaaccccattcactgtgagtttcttaaaaccacatacaacttgatcctcttcatgtggtcccaagcggacgcgtgggtcgacgatatgccgcgggaaatccggacctgtaccagcctgctggtgtttaacacacgggttctataggtcacatgtgcgggtggga

SEQ ID NO: 139057 - DNA, 585 bp, Homo Sapiens
agatactaacaaagtaattatgttccaaatttaagagagtttcagaggcaaggagaatgaattaagtcatggtacacatctgcaaaatcttcatcccagctgggttcttcaggccttgcatgctctaacgtggtctcagcataagctttggcccatgtactcgccagctgatgtaaatctacttcacctgatttcacagctgccagggatgcttcagcatctctatcataatcgctgagggattcttcttctataaactgagtcagagcttcttttaagtctttttctttaaagcacggtaaactgtgcagcagcatcagacgtccatgcaaatgactggcattctcttgaacaggaaatttgagtggcactctcagttctaagcactgacttcctactttaaatttatatacaaattctctctctctattgcagaatctttctctgtttttcttcatattctttgacaggatttctacagaactcgtctagttccgaagtcctgggcagtccgctcactcgagctgtcagcgcgtcctgcactgggaaaccagctgacttgccgacatactttttccacccagt

SEQ ID NO: 139058 - DNA, 816 bp, Homo Sapiens
ggccctgaataaaggaaaattcccggtatccccaaaaaagaaattcaaaaagctttgtgaaaattccactgacactaatttagtggcggaggagggggacagagtttgttcaaactagtggaacacaagcatatatcatgtcattcttcagaaaagcaacaactggccagagttcttcacctcctatcaggagtccataaatggatgttttattgatgcgtgaacagctatcacgactctcaacgaagtctttatcatcatccaataatctaagttcaaagagcagtgctttaagaaagggaccatcttcaggaacaggcacataacttgctccattgaagactctggctcgtttttcaacagttggataccgtctggagaatctcacggtgccacaaagtggagttcccggttcgtggcttatgagccacactgcccgctgcgccatggttaagtcagtaaagcattagctcatctcataattaaggtcgccaccgaggaacagcgcagaccggctttctcagacagactcttaacagaagccctgaggctcatcctgcgccgcataccggtcgcgctcagcagagaggttagcttttttaggtgaagtcactaacgcttctgagtcgctctaggccaacacacaccacaaaaagttctaagaaccccaacctataaccttgagaaatttacctataccctgcaactccggtattttcttcctctaaattctacttccggaatggtggcccgcaaggatcaaagttcctcatacacggtagcgtcgagccttttttcccctctttcgccgctcgt

SEQ ID NO: 139059 - DNA, 1228 bp, Homo Sapiens
tgtgaggttggcccatggagagctggtggaagccagcagctgcctggggctgttttgggccaaatgctattgaactgttgtatctccctggtgctggcacagctgcagatacagggtccttcggtttgggaggactttccttcttcaccaagtctccttccatcaccgccatgctagcaggccgcttcctctccagggtccccgagtcagagtcgtttccagtgtggaatgagtgattagaactcggggtggtgagaggtacaaatgcttctgatacattaaattccacctcttcagggaagaaccagtcggcatgctgaatgatgggttcaatcactgcaaccacatggacggatgtggctgctgccatttcagcaagtgttccttcatttctggcccataacaagttagggcctaacacaatcgcaatgttgctgggagtcattttattcacatcgctggtctgagcaagctttgcaaggaacttgatcaaatatctaaagttaacaaaatttttgtggtggcaacttctgacatgttctccacaagtcttgaagttttttgtcttgatcctgcacacttgcaacttgtgtccattcttcatacagattaaaagtcatcaaaggttcaggcaattcccgtaaataggattttaaagcacctgctacagcatgggggtctgaatagaactcatccaggtgagaagtagaacagtccaaagcagctttcagcttctttaacttggaggccccagccccaattcggaaaaggccctcctccttcatgcctgtctccagaagcagcatgacacaggcttcaatgggcagcgcaatctcgcgcccgctcctcttcaggtgttcttctaggggagtcccaaaggctggtttttccgcccacttatcttgatgggctcgcatttcggggagggtcttttctaagactgctaatgcttttctatggtaatctgcttgggcttctaataacgtaacaaagaatttgccatactccccttctttggccataaagttgtacatgtctgctgcaagttgatccttgcactgttctactttatttccagcttcatccatctcttcctttagagtatctatttttgatggaagcccctgaaagttggttcctgaggatttgtgagcttggttccacctggctctgactgaatcccagtctaacaccaatcttgcaagctgcttcctctgcttctggatcc

SEQ ID NO: 139060 - DNA, 1008 bp, Homo Sapiens
  misc_feature (64)..(64): n is a, c, g, or t
  misc_feature (901)..(935): n is a, c, g, or t
gacccagcctaggaaaggggattccggatttaaaagggttgaggaggaattatccataccccgnctagggccctccaaaaagtttttaataaaacgaaatggtcaccccatcccaaaaggaagaattacaatgttcgcccaaaagccgggattccattgaaaaatccagtcccaagaattagagtctccaaaaggatgtgcatatcaagcttccattccaaatggaggcctgaaactcatgatgaactttaatgaatatacttgtatattcttttgtggtgtaagagtctatgcagaaaatagtgccaagtatcttcaatgactgcacaaccaaagcatcttgccaaaagaaaataccatcttggcattctttcccaatcataaggaatattgaaatactctgtaaaataataggttccacaaatcaaaggcagctggatacagaagtgattaaagagaagaactttgaaacacttccattggttttcccatgtctctggcttatccttttgaattttgtattttttcatataaggtataaattgaaataaaaatccaggtaaacagaataagaaataaagggcttcatgaactataagggatccccatgttgcaatctggaactttgtataattattcaacatatagttccaagcatttttaaatggttcttgcagaggattctcaggtaaaagtgaatctacatattccacagccaaggatgctgaactaaagatgctgacactttcatttgttgccatttttcaaatctctgcagacagccttataattctgaacggccgcgagatgactgccggccaccgacaccgaggactcgccaggtgttccccccggccgtaatggccgaattcccgggcatatgtccggtaccgtcgactgnnnnnnnnnnnnnnnnnnnnnnnnnnnnnnnnnnncgccgcttcctcgctcacagactcctgcgctcgtcgttcgctatgacgccggagcccctatatgatctataca

SEQ ID NO: 139061 - DNA, 749 bp, Homo Sapiens
agggtttttaccgtggaggattatttaattccaggtctttttttcttcaaaaacttcttccttgttttttccattaataggccatttatacttgaggagttctgtttccaaaaaaattcggatccccacccatgtaaaatggtggaagccatagttttccaaatgaagtttcatgggggtgaaaattcatgatgcccgagaaccagccatagaaaagggatcagattttaaaggggttgagagggaatatcataccctctatggacatcaatagtttctaataacggaatggtcacccatgcccaaagaagaattacatgatcacacaaaagcacgattccaatgaaaaatccagttccaagaattagagtctccaaaggatgtgcatattcagcttccattccaaatggagcctgaaactcatgatgaactttatgaatatacttgtatattcttttgtggtgtaagagtctatgcagaaaatagtgccaagtatcttcaatgactgcacaaccaaagcatcttgccaaaagaaaataccatcttggcattctttcccaatcataaggaatattgaaatactctgtaaaataataggttccacaaatcaaaggcagctggatacagaagtgattaaagagaagaactttgaaacacttccattggttttcccatgtctctggcttatcctgaacggccgcgagatgactgccggccaccgacaccgaggactcgccaggtgttccccc

SEQ ID NO: 139062 - DNA, 775 bp, Homo Sapiens
  misc_feature (717)..(717): n is a, c, g, or t
tcagtctggtacataggactccactttttaataatgatgcctgaacaccaaactcaagagttgtgaatgcccaagaaagattatgggcagcccacaaagtgaatatgaccattcttcctgtggttttctactacatgccatggcaactccgtgactaagatataaagtcgattacatctcatttgaaattcactcctggtttgcattctttcttttatttaatttagaaaattagaaataataacttataaatttgatctcattatcacaatggtacctttgaaaagcagcttatgttactctatggaagataatcaggtaaacatgttaccaaatgatcattaataatttaatgtccttcaagttcaagggcagggtaaatctgtgtatactacttataacctagtagagattgattattcaagtatcagcaatattagtccttaaaatgttatcgtttgtgtagtgcaaaatatatatgtgtatatatgtacacaaactaaactactggacaacaaaaagcaatgtaatcatcacaaactaagattttcttgtgaacaccacaatccagttcattctgaggtcatccagttccagtagtcttcttgaggaaacaccattttcctcagttcagttttcttctccttctttgatagtataaatacaccaaccactgtgcaataaaaggccatatgatgggcaaccgtagcacaccangagacatcttgaatggccaccaagatggtctctgttgaggtggctgaggagccacctc

SEQ ID NO: 139063 - DNA, 1305 bp, Homo Sapiens
tgtgctctgtgattgtgtgtgaggtactagctttgggtgtgttagtctgcctggcgcgttggatgccgtgttgtgccttcaagctatcttcttgtatgcccagcgtgcactacagaagagtgtcagcgtgcgttcgtggaggaggctatcaccgtttcggggcaagacccggtttgtccccgattacctgtatatgacggttagaattaagttgattttacggaaatcagagttatgaaatcaacattcaggataaaatgaagtcataataacaccccagtatatccacttgcatcaacggccatatgagggcctaacacacatctcgactctccccttcccttctgatccctcaaaaaaagtgcaaatcaaagagtcactgcttggtccaaaaaataaaatacattgtgtataaacatttgaaatctgatggaatccagcttctattccacaggttgtcttcagtaagaatcaacgtccgaagatggaactcagttccagaagaattaattctacaatctgattctggtacacagtatgaactgctatattaccagtctctttttctggttttaatagagtgggaccaaaaacaattgctatactctgataggtcattcgatttttctctccattttctataactcttctgagatgtcggaaaagaatctgcattgtgtcttggtttggctttggcaactgtctgattaggtccttaacagcagcgactcgctgtcttggttcttgcttaattgcattaacaaaatcattaaaatgattaaatgtaaaaagaggttctggtaattctcgaaaaaacattttgagggctccagtaatgacatgaatatcttcccatttactgtcattcaagtccaatttctcatcatgattgactgcaaaccttagtttctggatcactgcgaggttgccacttactctgtatatcccatcaatatccaaaccatgttcttcaacatgttcaatacataacttcacaaactttggtactgtgccattctctctctgacacagattagcgagattggatccaaatacctgatctttaatataacctttttcacgaacagcttgcaaagtggggcgtcgtgtaagaaacttctttaagtttttcttggtttttttctgttctgaagaatctatgctagatactttaaaggaacgaagctttttgggatccttttgttccttttctttatcatgcttttctattcctggtgaatccggtatctcctcttcaattccttcatcagtttctactgcctgattattgattgtacaactaag

SEQ ID NO: 139064 - DNA, 1791 bp, Homo Sapiens
  misc_feature (1779)..(1779): n is a, c, g, or t
cagccttctgcatagatgggactccaggcgtgtcagcatgcctggctaagcttcttagtttctggacacatgtgaggggtccttaactcagcaccgtccctggtcacctccttgtggctggtgttttgtgatggcggagggactcctgcactccgcaggctctgctgcaagtgagcccttgcccccagcagccccgcagccccactcacgtcaggaagtgtggatggtgcttgacagtatcctccagcttctccaggaaggtcaggtctgtggcctccccggggcgcagacactcctcatccaaaatcgagatgatgcccttaaacttctcctccaccagatcacagatgattttgttgttgaaatactggacgggctcccacgcgatgccctctgcctcgtactcctcctgctccgacttgagcgtgagctcgatgaagagctgctgcagcttctcgttgcagtaattgatgcagaactgctcaaagctgttatgctgaaacacttcaaagccataaatatccaggagcccgagaaccgtggtgctccgccagctggggctctccacgtccttggaggccagcgacctgttgatcttcccgacgagccaggtaaaagtgcggctgtacacagccttggcgagggcgtctcgtgcgtacgcggcctgctccaggttcagcgggctcaggagctcctcccccttggcgatgatcttcctgtgtgtcagggcttctcgcagcgtcgagccttccacgctgaggagcctggtcagatacttgagctggttctcggtggtgacctgggcattgctctcctcgttggcagcaaagtggatgttgcccaaatgaaggacgctggccacgatgctcagcaggtcctccacttcatcctcggtgaaatcaatgactgtcagagccttcctgacgaccttccagtcactcttgtcgttgatggaggagactttggcacactggcccttcaccaggtacaggtagctctgggggttccgttccaagcccagcctgcgaagagtctcctcctcgcccccctccagcagctggtagaagatgtggaagttccgctccccatgattctggtgcaccactcgtgacttttccaggaggtaactgaggatgtggccacccacgggggcacccttgaagtcaaactgcacatccatgtacttcccgaacctgctggagttatcgttccggagggtcttggcatttccaaaggcctccagcaccgggttgctctgtagcagccggtcccgcacggcacctccgcgctcgggggctgggcaggtctctgcatagaactgcagcagcctcttggtggcctcggtcttgcctgccccgctctccccagagatcatcacagcctggtcccgacgctccgtgcgcagtgctcggtacacagtgtccgccacggcaaacaggtgagggggcacttcatagaagctgacgccacggtaacgctccatatgctgccggctgtagatctgcaggtcccggtagggattgacagagaccaggacggggccaatgtaggtgtagatgagattctcccgaaatcgccgccgtaggttctcgatgaaggcggcctcgctggtgaagttctccagcagcacgaaatcctgcacccccacccggtcacgggcggtgagcgcactctccatggtcacccgaaccccgtcagtgcccagggccgacgccccctcgtctggaacgccacgcaggcctcgctacttagacctatgagggccctttagagtaccanaggaagaaaaga

SEQ ID NO: 139065 - DNA, 1338 bp, Homo Sapiens
  misc_feature (289)..(289): n is a, c, g, or t
aatatttctattcagcagtcagttcagaaagatactcagtagaaagatactcatgctgaaggattgaaattggctctgactttctaaatttcacatacaggtccattgttctgttgagcacaagaggagaaataaagcagttaaacatttcacacttactagtacctctgggattagccaaaccagctcatctttatgacaaagggagtaccatatttttgggattcagtggaaactttaaaccatcatggactaagctatttaccagtcctgctggacagggccttgnggtgcttgaacaattcatacctttgcagctggacgaatatggttgtcccagagccaccactgtccgcagaagagacctggaactgctaaagcaagcttcaaaagcacattagagactaactgtaacttaagtgctggggggaaaaaaatgtgaactaacttatttaatttatgggcattttaaaatgacactgttaacccaacggaacccttttccagtttgataccagaatgggggagaaaagaaagcgtttggaattattggttggataccagcttcatgcaccttctacttgtacaaaatgttaaagacgttgtttgtatttgtaaggctggtgtattcagagagcatatctcttattcctcactttccacccccgtattttgtaatgaccatgagcaatgtctttactttttgtataatggggcggggtggacgtgcgggcttctgacagtcagcctgaggtcctttagaggaccagcttacggaccacctttggataccttgcaagtctaatggctcaggctggggtccgggcgggcaattttgactttggccggcctggcaatggttccagtcaccggcctctgggggcccccgggttttcctggccgccagacccttttgaagggaccttctccttgatgaaaaaatccggaactggccacggagttttcttaagataggtaggcaaaccgttcaaggggcccccaaaacatccctcgggcctcttattttattttggccccctagggcaacattcgtcgcccctaattatttttcactcaccccctttccataaataatcctaagccctaatatcgcccgtcacggggggcttagaatacttgtacccaacccacaggggaaaagacatctacccggcggacatctaataagagggccctcctctggcggggtatcttattattttctcccccccttgaaatcttgccggaaccaaccccgcgggtgtcaatcaatttgttttccctcgtcgatccactatacagcctccagaaggggttcactatgggacaaccatccca

SEQ ID NO: 139066 - DNA, 1304 bp, Homo Sapiens
gagcggggagacgccccttcgttttcctcgccccagcgctgtagaggtgcccaattagggcgcacaagattcctttgttgtaaccttggcaacctccccccacgctttattgggggtttcacaaagagagttttttcaaagcgcccttcagcccgcagggcgccccccgcgccccccggggataaattattttggcattttttcagctaagaaaatggggggttttccccccatatttggcgccagggcggtggttctttgaaatctcccctgacccttacaggggtgagtctcacccccacccttggggctttcccaaaaaagtggtttggggattttccaagggcgtggaagcccccccggggccgtggcccttctttttaacccaaattttgggatttctgggttgggagtttccaggaaaaaacttaagtttccccattacttccaggattattgtaaaattaaaaaatcatgatgacttgggaggaaaaggaaggaacatgtcagatcctgagcttcctctcaggcttgagtgctccaagaggactgtattgctgtgttacgagagggtacagtgcaatgcttttcatctgatatgcccagtgtgggtaagaaggcttttccctggaggtagagactcttttatcagaaggttgggggtctccagaaggttttccccaccaggaattggatttgatggctggaatttagagcctacacatttgggtctcacaatcagggcagggcaggtaaggctaatggtgcaaactgtgtctctgcacaggcagtcatctaggggaaggggtgtggtgcagccagtaaaacctggaacctgcaagtggttcagaactttggtggccagtaagggaaaaactcctcaagcatgctacaatattgaaaggttcaaaagcactgacaaagtgttgttttgcccccggtgcagcacataagactctgttccagtgaaatgctacattcaaagtgctgtccacctcagaagatcccagaggatgcaattctggctgtgctgggaagtgctaaagttccctccatatgtcactttggagaaggaagcagcaaagcagccatgttgattcctctctcaacctttggcatcatggacgatggtagcgtgtaaaatgtttgctctcttcatgaacctccatctcggagcttttaaattcatttaattcttttcttatggcagccttgtcagcaggggtcagtttggtccaaggtttgtcggctcgccggtcataatcttgagcatctgttacgctctacacattcattaaactcag

SEQ ID NO: 139067 - DNA, 2177 bp, Homo Sapiens
  misc_feature (33)..(33): n is a, c, g, or t
  misc_feature (41)..(41): n is a, c, g, or t
  misc_feature (110)..(110): n is a, c, g, or t
ggggaagggcctaagccaagtgggttggggggncccacagnccaaggggcattgccacaccagtgggtttttatttcttttcaggggatttattaaggccattgagcacnagtgtaatttctagccaagtgaaatgaatccaagggaaatatatcaggacctgagggatgtttttttaaagttactggaaaggatgatgagctgagagcacgtgtacagccacgcctgtgcgcagcgcccactctgtgcaataaacatgttctgcccatgttcctcagtcaggaggttcaggctcccggagagcacctgagggttccatcactttggtgcccaacaagcacatgccccccaacctggtgccaagaggcaggaatgacccccataccacatagctgcaggaaagcatccacggatggagggactcagctggcctggccgcagtgtggagcacagaggtatgaggcaagcaagggcagatctgagagcctgtaatgctaggcaggtgcagctggtgcgaggcgggctcccaccaggtgtaaggaaggtgggagccacagcctcttcctgggcccagaagcagccggcgccaggagatgcaggcccagggaatctgtctaaggcagcttggtctgcaccagccttctttccactcacaactcactgctcctgggagagcaggaggggcacacctttaaagagaaactgataagggaggaaaggcaggaggagatgaggccagccccactgatgacaccttgggccaggcctcacagctgcaggcatcagccggaaactccaggctgctcatggtcactggcggtgctgaactgtctctccactttcttttggtccttgatcttgagtccaatgtccactctcttctcaaagaagttcaccagcacggactccgtcaggatggaggccaggatctgctcaaaggagatgcaccagtcggtgtcgacggtgccgccgatgcgcgctgtggggctgcaggcctccccgcccaccagcaccgtgtcgtctgcaaggtcttcacattgcagggagcccgtgctgaccaccgagtaggaggacatggacatgtcgtctttggtttcatcgtcagacagcagctgggagggtgagccctgtccctcgccgctgcccccctccaccaccacctggctctcctgtggggcttttccgaggtgtgtgtctccgcctgctttggcttgggggtctcctgcagctgggggctgaagctccctggctgcgtcctgatgcagttcgggtgctggtggctcgtcctcctcagtggcacagtccctgggcttcctgcctgtgcgggctgagaacttcttccccacctctccgatgcggagcaggaggctggccacggtggcgatggcgtggtacaggtcctgctccatggggtcttcactgaacatgttgtaaagcgtcttgcacagctcaatgaactgctcctggttcatcttgggaagatccttaatcgtctccttctgagcctctttctccttggcccacattcgaaggtagtgccgatagtccggagagctggtccccttctcctctcctctctcctcacttccacttccttcttgctcttcctgtggtagtgcttcttctgaggagctgtcctctgtgaaataatgggccgcctccagggctgactcggcttcctctgggctcagagctgggggaaggtgtagcttgtagagcaccttgagcttctctgtcaggtccccgtggtacatcccgctcatccctgtcacgaactccttgaagttgatcagcgagtccttgttttcgtccaggagcctgaacatgcgccctgccagcagaggtgtgtgggagccacaggcccagggtgtcaggctggcaaagagttcccggaactggctggcatcaatccggtactgctccaggtagggcaggctggggtcccgacggccggccattgtgcggctgcacccccagtactggctagccaggtgcttggccttaaacaccatgtaaaggtcctccagctcttcaatggagaaaccaatgtccacaggtatagctcggaccacactcctcttggccgtgtcctccaaggactggatcactttcagcctctgttaaaccgccctcgtgccgaattcggcgcgcctcgacttcatactcttcccccttaa

SEQ ID NO: 139068 - DNA, 713 bp, Homo Sapiens
tgggcgtgggactaaaggtccttggtcttcacgtctgcccgtacctggcccccgcactctgtggcgtgggaggcctggaagccctttcgctggaccgagttatctgagtagaagcgcaggaacatgcggctgcctgtgggcaggacgggctcgggcttcttgctcccacagaagcggccgaggacgggggccttggcgtctcgcccgtcgaacacctctaggtggtcgtaggcacactcaggctgggactcgatgtccatctccatgaaggtcagcttgacccggtgcccgggggtgctggagatggcccacgtgcactccttcttgctgggatacttgtcaggccagttggggctggtgatggtaccactggtggatgtcaccttgtggtcacagccggcttctttgcagtcgtgcttgttgtcatggaggacgaagccactgcggcattggcactcataactgccgaacgtgttgacgcagtcctgctggcagccgccgttatccttggagcactcgtccttgtctgcaggggagcaaataagggcagacgctgggtctgtgcagggctgaggttgggatgccccaggggaagtggaggcctggctggactttctcccaccgggacagagcaacagctggcagagctggccaggccaggtggccgggagtgggaggccaggcgacaagggggtccaaaggggcactgcatc

SEQ ID NO: 139069 - DNA, 946 bp, Homo Sapiens
  misc_feature (16)..(16): n is a, c, g, or t
  misc_feature (24)..(24): n is a, c, g, or t
  misc_feature (33)..(33): n is a, c, g, or t
  misc_feature (47)..(47): n is a, c, g, or t
  misc_feature (88)..(89): n is a, c, g, or t
  misc_feature (91)..(91): n is a, c, g, or t
  misc_feature (102)..(102): n is a, c, g, or t
  misc_feature (141)..(141): n is a, c, g, or t
ctctttccactgaccngaagtttntacacttgnttcatctctttaangggatcttctagcatattttggcatttcaggtttcttgganntngttctacccanaagtctttccagcattggctcttttctctctcgtttctntaatcagatcaacagccagatgtactttggtggagccccagtgcagggggaggcaggggcggtgggggaggtgaggggtgtggtgtattggtaccaaatgtggtagaatctaagtcacctgcagtgagattttgctgctcctgctgggtcacaattttggcaatctgagctctgagagcagcaagttcattttcgagagcgcaaatcttctgcagtgcttcctcatttgccagcgctggggtcttcagctgaggctcttcttgagacaagtctggtaaggaaatctgtctgcttggggccttctcaaagaaaagaaggtcatcctgaaggggtggccttgatctgacctctgtccttagtcttgctgaacactctccttcttctttggctacccatccaacatcagcaaaagacgccactgcatcctctcctgggtggctgggactccattctgttgcatggctgttaatctgaaactgaactcttggacactgaatcagagacaaattagtaccaattttccttacgatacttcgagacgaaccatatggcttcctagaccaaagtaccgattgcatgcttactccaacttgttgaaaaaccatcctaattaggcgcttaatccagccaagcatttatatggcaaagtctccccaaatttgcatttcaagtacttcttcaggcatacatagcagcacatggtccataaaacacactcggccgcgcggcagccagcaccctctccgcggacgcgtgggcggacgcgtgggtcgacgatatcccgggaattccggaccggtaccac

SEQ ID NO: 139070 - DNA, 1021 bp, Homo Sapiens
  misc_feature (19)..(19): n is a, c, g, or t
ggagcgaggcctgggtggnatttcggacgaggaccactgctgcttctccccagctgagaatgccccctcctccctgactcctctctgcccatgcaaattagctcacatctttcctcctgctgcaatccatcccttcctcccattggcctctccttgccaaatctaaatagtttatatagggatggcagagagttcccatctcatctgtcagccacagtcatttggtactggctacctggagccttatcttctgaagggttttaaagaatggccaattagctgagaagaattatctaatcaattagtgatgtctgccatggatgcagtagaggaaagtggtggtacaagtgccatgattgattagcaatgtctgcactggatacggaaaaaagaaggtgcttgcaggtttacagtgtatatgtgggctattgaagagccctctgagctcggttgctagcaggagagcatgcccatattggcttactttgtctgccacagacacagacagagggagttgggacatgcatgctatggggaccctcttgttggacacctaattggatgcctcttcatgagaggcctccttttcttcaccttttatgctgcactcctcccctagtttacacatcttgatgctgtggctcagtttgccttcctgaatttttattgggtccctgttttctctcctaacatgctgagattctgcatccccacagcctaaactgagccagtggccaaacaaccgtgctcagcctgtttctctctgccctctagagcaaggcccaccaggtccatccaggaggctctcctgacctcaagtccaacaacagtgtccacactagtcaaggttcagcccagaaaacagaaagcactctaggaatcttaggcagaaagggattttatctaaatcactggaaaggctggaggagcagaaggcagaggccaccactggactattggtttcaatattagaccactgtagccgaatcagaggccagagagcagccactgctactgctaa

SEQ ID NO: 139071 - DNA, 657 bp, Homo Sapiens
  misc_feature (198)..(206): n is a, c, g, or t
  misc_feature (489)..(503): n is a, c, g, or t
actcagcttattcaaattagagccaaaataaggtaaaaattaagtgatacagttagtcccacagacatcagatacgatcaacttacaaaaaagcatagtatttaacattcatcttaaccattcacacagattctatcatagtttggagttcctttccattttatcttttagaaaagtttaccccaggaagctagttgnnnnnnnnnggctcctttcttaaaagaaagctatgtattaagctcatgaactatgccagagtggaaaggaatgccccattttccttcacactcttggaaaaaaataacaatactgattttgtgactggaaatgaaactcagaagccctttgacagttttctagctttaaaaggctacttcattgtcaactgagaagactcagtcatggtggcaactgggcgtaccgctcaatacacatcatgaagattttttttctgtactcaatatttacacctagatttcttatatgagnnnnnnnnnnnnnnntctttgaaccatgggtaaagtttatataaaataaattaaagtgcagaagattagcaatcggtcacaaagactagcatcctatggtggtcagggcatataaatagtgtgcttgttacagcaattcaggacagccacttcctcacttattagaaat

SEQ ID NO: 139072 - DNA, 800 bp, Homo Sapiens
gagtactatattcttaaaatagtttaaaaccaaatgctttatgaatttcaaaactttcttaaaattttgcttaaaatgaacataattgttggataaaaactttcagtgcatactaaaaatttagtaagttggtctcactagatgagttataacattaaattcagttgcaaatgagtagagccacatgggaaaaagaatatgcagataaatctttaggctaaactaaccattaaaagaaattaaactgagtgacaacttagggctccttccaattctcctgtgttatggttagagatgccattttatcctataactgatctttggtggttttactcagcttattcaaattagagccaaaataaggtaaaaattaagtgatacagttagtcccacagacatcagatacgatcaacttacaaaaaagcatagtatttaacattcatcttaaccattcacacagattctatcatagtttggagttcctttccattttatcttttagaaaagtttaccccaggaagctagttgaaaaaaaaggctcctttcttaaaagaaagctatgtattaagctcatgaactatgccagagtggaaaaaaataacaatactgatttttgtgactggaaatgaaactcagaagccctttgacagttttctagctttaaaaggctacttcattgtcaactgagaagactcagtcatggtggcaactgggcgtaccgctcaatacacatcatgaagattttttttctgtactcaatatttacacctagattcctcgtgccgaattcgccacccagc

SEQ ID NO: 139073 - DNA, 1620 bp, Homo Sapiens
  misc_feature (582)..(591): n is a, c, g, or t
aaagggccatcatgttattctgtaaagatgtgatatataaaatgctgtaagacctggtaccttttcaatttataaacacagtgaacttcattactgtacatgtactctgcaactacagcttagctgtaaatcctccacacacaatggtatggacattattccccctctatccccgttaaactgtacatcgagacaatacaaatttactgtcccacccacccccttacaaaaaaataatactctaaaagcaaccctactgcaactttttaattaagacgattacatatattttagaccaattgctttaaagcaagaaggcagtataaaccttctaggaaaatttttataaaagaggttaagaaatataagacaatttatacatttaaaaacttacaataaataagagaagagatgcaggcatttttgaatactagatactataatccatacaagaacatcttcatgttctgaagccatatgttgaaattcattgttcctcatgtttcctctccatgcttttaatattcatttaacatgactgggtactatggctcattacttttcacaaatactgtgactggnnnnnnnnnnggttaattttgctacgaaaatgttataatacgttttgtatgatcagtcatcatcctaaagagttcaatagagtcaatgaacaatagcagggttatagcccctcccccccaagtcaaaacaatatttgttgaagtaataagaattagaccccatcacaaatgaccttcactgagaagataattgtaacttaatcctgcagcgaaacatccatttttccttgttcttttcttgcacagttccatcaaatgaagattcacagcatattcataataaagttatataactgattcagcaccacaaaatgaattgggagacatgagcgtctgtcctgggttgcagggttcacagggttagccaggagagtgcattgtactgttccaaaacaaacctgaggacatctgaagtctgatttgagtcaagtgggtgggagtgtttactgtgaagcagctcgtcagattgcactgaaggcacgtggaggtgcaaagaggccttaagaaaaaggggacactgatattgtgcttgaggacatgctgaccagaaccagtcaggtaatggacctgctttggcagttgatacaaagtaaccaagggccaatggttgctgaagaatattaggtacttcctcatgaggttctgttgatagtagccgatcagtactctgacccttgcccgcatcacctccatgggggtaatgagatcctggagaatgtacaggagaaccagttggagaagcaggaaggatattaatgatatcagggtcaagatcatctcctgtgtctaacaaatcaaagatacccattccatctgctccatcattgttgggattgaaagctaaatccaaattttcagtggtataagtagctgaagctacttgcacagaagcagaagtaggaaacacaagtatatgagtacatgatgtatcctgtggggtatttagctgagatgtctgccgacgcgtggtcgacgatatcccgggatatccgaccgtaccagccctgctttttgaccactggtctatattcacatcgct

SEQ ID NO: 139074 - DNA, 621 bp, Homo Sapiens
  misc_feature (156)..(156): n is a, c, g, or t
  misc_feature (588)..(588): n is a, c, g, or t
gggagctctctgatgaagttatgtctccccatggagaacctatcaagatgcgaattggactgcactctggatcagtttttgctggcgtcgttggagttaaaatgccccgttactgtctttttggaaacaatgtcactctggctaacaaatttgagntcctgcagtgtaccacgaaaaatcaatgtcagcccaacaacttacagattactcaaagactgtcctggtttcgtgtttacccctcgatcaagggaggaacttccaccaaacttccctagtgaaatccccggaatctgccattttctggatgcttaccaacaaggaacaaactcaaaaccatgcttccaaaagaaagatgtggaagatggcaatgccaattttttaggcaaagcatcaggaatagattagcaacctatatacctatttataagtctttggggtttgactcattgaagatgtgtagagcctctgaaagcactttagggattgtagatggctaacaagcagtattaaaatttcaggagccaagtcacaatctttctcctgtttaacatgacaaaatgtactcacttcagtacttcccctcccccntcggctgtcccccccggttatcctttcttggtg

SEQ ID NO: 139075 - DNA, 551 bp, Homo Sapiens
cagtgacctgtcagccacagagaagggctgccatctgctaaccctgccccaacggtggcagagccatggggtcagcctctccatgctgtaggagaggcaagcaagtccgtcttttcagccaacagatccaccaaatttctacccaacacgggaggccctaacaagcaccctccaaatcgttccttgggcccgagactccggacatggcttaccctctggagggccagtccagcaccccagggattctgtctctcacattggaattaaggccaaatggttctggtgttacagaaggaagcatctcccgaaccttcccaagcctgaagcagggagacctgcggagagaaggcacggagtaaaactgagtgaaagaagctgcggggccgactccccagaagtgaacctgagtgaggccaagaagggccctgacgtagcagatggcccctggcccccaccccaggccctccctgacagcccccaccaccagggggatacagagcggtgcccagctctgccggggacaagagagactgcccaacataacacaccag

SEQ ID NO: 139076 - DNA, 1335 bp, Homo Sapiens
ggaagttaccctggttctgaaacaggccaagccacccgcttcagcacacccattgctaccactggaaacctaatacactgataaagtgtgctcaattctgccactagttcagaggcccctttgttctcgttgcaacacaattgtgaacggtttcgacagcttttgacgttgacttcagctcatctttattgatgctcactcgcttgttcttcttccaggtctcaaccacgcttgctgcgtacgccaagatgtggatgtatttgtgcttgtggtcctggttgatccgagcccctggtttaaagagtgactgcatgaacaggtccaggaaggctggaacgcggataagttcaaccggaggagggtccatgcttgtgaacatcttgaacaggacggtgatgtcagcagggttcagggctcctttggacagcatggccccgagagcctggcaggcctggggtaggaggcagctgtgcccaaggctagtgtgatctgactggcgtcatgacctttctcctgggcaaagcgctgcacttcctgggcgatcctgcgcacagcggagcccccctgctcctcctgggccagcacggacatcatggcctgggcaaacaggtacgtgtgctccccgtggcacaccatcttggcaaactcagggagatttttttcaaggttttcttctcctccatctaaaattgtagctagagaggtccggagcactctcgagaacacttctagctgctggcatgctgtggacacactggtgatctccccctggtaccctgcgtcagaaataagcttaacggtgaagttcagcatcaaacagtctggatgggcttcagccagtttataaaaaaggtcccgccacgtggtatgtgcaatcatctgttccagccacgctggggtctctccttcttcagtaaaaatagaatctgctttgcgggggtcaaaatgtttgatcagcaaactcttcaagtgattttccacagtttcctgaacctgcactggctcaacacctgtctgaatgagccactcggccagcaggttcacagtctgggccacagcggtgtagttttcagataagagctggataacattctctggagaccctcctgcctgaaaatacctcttcagagtgttgaagatggagggttccatgatataatcccgggtggaaaatttatgcaggcattcttgctgaacctccgcatcatcctctccttctccagaatcatcctcctgctggccgccgtcagcctcgtcgccccactcggccgcgctcccgtagtagtcctcgtccatgatggcgcccggcacggcccccgccatgccctccccccc

SEQ ID NO: 139077 - DNA, 968 bp, Homo Sapiens
aattagaaacaccaaaaaaatccagaaacttgttcttccaaagcagagagcattataatcaccagggccaaaagcttccctccctgctgtcattgcttcttctgaggcctgaatccaaaagaaaaacagccataggccctttcagtggccgggctacccgtgagcccttcggaggaccagggctggggcagcctctgggcccacatccggggccagctccggcgtgtgttcagtgttagcagtgggtcatgatgctctttcccacccagcctgggataggggcagaggaggcgaggaggccgttgccgctgatgtttggccgtgaacaggtgggtgtctgcgtgcgtccacgtgcgtgttttctgactgacatgaaatcgacgcccgagttagcctcacccggtgacctctagccctgcccggatggagcggggcccacccggttcagtgtttctggggagctggacagtggagtgcaaaaggcttgcagaacttgaagcctgctccttcccttgctaccacggcctcctttccgtttgatttgtcactgcttcaatcaataacagccgctccagagtcagtagtcaatgaatatatgaccaaatatcaccaggactgttactcaatgtgtgccgagcccttgcccatgctgggctcccgtgtatctggacactgtaacgtgtgctgtgtttgctccccttccccttccttctttgccctttacttgtctttctggggtttcctgtttgggtcggttcggtttatttctccttttgtgttccaaacattgaggttctctctactgggtcctcttaactgtggcggtggagcgctctatatttggcgttcatctctggctggcgtgaacagcgacatttgggccaagtaaatcctctctgagtagaaactgacagtccgtactcgtacccattgttccagttccctgccccgcaaaccatatccctaca

SEQ ID NO: 139078 - DNA, 1275 bp, Homo Sapiens
  misc_feature (39)..(39): n is a, c, g, or t
gaggccaggacactgggatagatggaagatggaggcagnatgtgatcccggagcagcccacagtcacactcatggcccaccgcttgcaggcagtcatcgtggatctctaggtggcaccatacacaatgcagcccggtcagactgtggtagatccggatctttttctgacagcggtcgcagcgcccggactcacagcctcctcgcacccacacatgtgattggacaccaatgtccttccgagacttggcataggtgctgacttcacaaggcagggctttcatggcacactggtcgtgaacagtgtacttacagaggttacagctcagtccctgttttccaagacccaatgcttgactcgcctagattgccagtagactgttctggggaacctcttgggcctcccacatgtgctgtccgtcgtccttcagagtcatctccaggccccagcagcactagcagtggcacggtggtggccccagcccggacccactcagcttgagagacagagccactgccatcatagtcaatctctttcatcatctcctgaagaatcggcctcagctcagacacatcccaatccaggtattcagccactcgcatcatctgtaggataattttgtccacttctgagctgtccaggatcccatttctgtccgtgtcgtacagcttgaaggtgaattctaacttgtcttctggccgaccaccctccagaagggaaaagtagcaggaaacatcattgagacacaccacatctttttgtcacatttgtctcatttaagcagtgaccagtctcaaaggattgaaacagtgccaggcttaggtgtctgggaacattatccacttcgagatagattttcaggaattgctggaatccctcgtacccaatggcatctccttggacatatttagccatctcgccatcctcgaagagctttaggacatcactgacctttttggtggagtattccatgtatttttgcagctgggcaaaatcactggggcttattaggcccctctccttggccatctgtctatttttctcaaggatggccagaaaggcagcttcgtagtagtacttccgttgcttggacctcttcagagggtaggcctgctggtcttggcaggtggcacagaaggccctggccaaaagtagggagtgaaaggtcctttcagcttcgcctgcctggagtctcttctagagtcattaaggctcttggggtcgcatggatggtggtgaaggtggtacagcagggagagagatggaggcctagggac

SEQ ID NO: 139079 - DNA, 1000 bp, Homo Sapiens
  misc_feature (44)..(78): n is a, c, g, or t
aacgaccgagcgcagagagtcaatgtgagcgaggaagcggccgnnnnnnnnnnnnnnnnnnnnnnnnnnnnnnnnnnncagtcgacggtaccggacatatgcccgggaattcggccattacggccggggggggctcctgcagcatggctgtcagcaggaaggactggtccgcgctgtccagccttgcccggcagaggactctggaggatgaggaggaacaggagcgcgagcgcaggcggcggcaccgcaacctgagctccaccacggacgatgaggctcccaggctcagccagaatggagaccggcaggcctctgcttctgagagactaccgagcgtggaagaagcagaggtgcccaagccactgcccccagcctccaaagatgaggacgaggacatccagagcatcctcagaacacggcaggagcggaggcagaggcggcaggtggtggaggctgcacaggcccccatccaggagaggctggaggcagaggaggggaggaacagcttgagccctgtgcaggccacacagaaacccctagtctccaagaaggaactggaaatcccacctcgccggagactgagtcgggaacagcggggcccctgggcccctggaggaggagagcttggtgggcagggagccagaagagaggaagaaaggggttccagaaaagtccccagtcttggagaagtcctccatgccaaagaagacggcacctgaaaagagcctggtctccgataaaacctccatctctgagaaggtgctggcctcagagacgacatctctatcagagaagatagcaggtgtccagagaaaagaaacggttcagagaagaagtctgttctagaaaaaagcagtgtctctgagaagtcgctggccccggggatggcactgggctcaggaaggaggctggtgtctgagaaagcttccatctttgagaaggcactggcctcagagaagagcccaactgcagatgctaagccggccccaaagagggccac

SEQ ID NO: 139080 - DNA, 709 bp, Homo Sapiens
  misc_feature (67)..(67): n is a, c, g, or t
ttcagggcttgagccaggagtaaaggaaagaagaaagcaagttatcctagacatgaaggaatggaanaaagaaatggagtcctatcctgtgtctgtgctccccaccaagggccaatgccagtatgcaccagtttagcctaaccaactattaaaatgttgaaatccttccatactggaaagaagccactgccctgagccctccaagtacctgtcaactgccctggcctgcccccaggacccctatacctcccagcacagcaggcagcctccaggatcctatttagacctatggctcaagcatctgttctgattcattgttgtcccctctgtacccatgttatgctttcacctctcaccccaatggagtcacacaggcctgagtttgaacagttaacacagcttggaagggacacatgcctgattcccatccttggagaacaatatcatgctatgaggagtaggaagggcaagagatatgaaaagaacagaggaaatgtggttcctagaagtcagaaggcatcaagggtccatcagtgtagaagtggctggggcgggagacgtaaacctcatccacggtgttctggccaggcaacagtgggtcaccattcggcatgatttcttcaatctttgcacagtttctgaagatttccattggctcagtgttcaaatgtctcagatcacagggcaaatctggctctggcactggctg

SEQ ID NO: 139081 - DNA, 731 bp, Homo Sapiens
tttagatttctaactggaagctggagaataataaaaatcttccaaatgatgtagtttagatcctttgggttgcaggcatataacataacttgttctcatcttgcatgatgctttcccttgtctcatcttgcatgatgctttcccttgttctctgtgttctcctgtaaatgccattagccagaccatttatggctacaggatttggaaagagaggggtgatgaagttggggccaagttgagaggggcaatcaaactgttgatgatctcagtcaactgtgcactctgtttttcgatgtttcgaagaagtaaagtagggctgcttggtgacatttcaaaatcttgttccggtacaggatcttgacactcctggggaacctgaggattccctagaatgtttagtgaagctgcttggtctgcaaattgcatttgttttttcaaaatatcttttggaagctgacattcttctaggaccactatccccttggaggcacgaatttgcctgtgaatgtctgttagttgttggattttgcattctaggtctgaaatctgagcttgaagccaagtccatcggctgccaactcgtgctctgtctacaagccacttccattcagtactacagttaactgccacattttttctaagggtatattcatccaaatcgtcatcagagctgctatcagttgcatcggaatccaaaccctcttcaacatgagacaacagccctgtagcag

SEQ ID NO: 139082 - DNA, 1776 bp, Homo Sapiens
gcacgaggttttcatacaaaaatagatccatttgcaaaacaatttctcagccaggaggctccacctcccatttccttgtagacagagggtgaggtgttgggatggtcacagtacaacccatagtccagatgagatgcaccaaagctcagggaaggcatgaggagggaaggtggctcagtagcctggggttggtgcagagcgtccagagaggcaagggcataaagcgtggcagaagctgggggcaggtcccacactgtcgctatgccctgcctgcctgcccacaggctctggcctgggccacagcacagcagggaaactggtccagatcctttgctttggaggcctttcccaggaaggtggggtaaaggtgggatttgctccctgcttccttaggagcagctcccagtgccacaccactaataataaataaccacagccaggagagggaagagcagagacaacagcaatgaaaggagggatctagcccaaaggtttacaagccccatgctattctcagggccagagaaaccacaaaagaaaagcacaaatccagcaagactgacctaggggggaaagcccattagaaagtcagggctgagaaaaagcaggctgggccttgtctgagatgaggccctctgagtaacagagaggagacagggttaaggcagcaaacatggaccctgctttggtaatacaacagccagggctggctaagtcgggctcaggcctcccctgcactgccctttccttctggcctccaggcagctgaagctgtatgtgatgttgagagagcagcaggccagagagaaagacagggtcagggtggtgggagtggccaccccagaggaatatccccttgagcctttaggcacatgctgcagggcaggacagtctgcggctccgctgaggagctgccgcggtcacaggacccacattagcttgcacggccaaccaactccttggcttcctcaaggattgtggggaatgtctcactgttcttggacaccttggcaggaacagcagccatggcatcatccttggtcagctccgaagctagcagagatgtgactgcacacccggccttcctgttggcttgacggggccctcttcttccgtcggaatgctgcccctgactgcagggcttctagaagactgtccatcacacctgtctcatcgccctctgcattcatgtctaatgagttgctctctcttctgctgcttctctagccgctccttctctgccttctccttggctaagttttgctcgcctcatcttttcttctgtctcccgccgcttctggttctccttgactgcttgcaaaaacatattccgaaaattgtgaagatccatgaaaaattcttcaacagacaacttcttggggtcaaagaggaagtactcgcccagctccttatagagggtctccatgttagaatgcatcatccgcagcttgttatactgttcctgtgcatccttcacaaagctggtcattttttcaacaaacttgtctttttcatctgtggcagctgggaaattctgaacatcacgttccacatcagaaatttgtttcttcatctgatctaggttcttttgcaagttttcagcagaaactcggctggctttctccacatgggcaagctcgtctggaaacttgaggacatcgggatagtcattctcacacaactcagccaagaagtgtaacaacgtcatcttctgatctgtggacttggtgtctcgaagcttacagaggaagctgatattgaagccaaaagcaccag

SEQ ID NO: 139083 - DNA, 848 bp, Homo Sapiens
  misc_feature (266)..(266): n is a, c, g, or t
attggggggcggcttctttaaagggaagtgttcttttggaggtaaaggccctccatccctgtgaggaggagggggttcaggcaggattccttgcaaaatccctagggagggagaatgttgggctgaaaagacttcagagttgggtgcctgtcccctgctctttgggagaagaaatctttttggcacaagacaagggttccttgaggacagtcacctgtcctgcccgcctggaggggccttgctccctggctggggatgctgcgctntggccttctcctctagctccaggttcctcctcctgaagaactgctgcagtcgagctctctggagctgctctctctgttggatcctcagcgtcttccccacctggcggcaagtggtcacattgggacggcagcggcggctttcacggatctcttgcctgcgctcacacttggcctcatagctctcagcccaccgggccaagccaggggagggcctggggtctgggctgatcatgatgacctccaagcacctgttgcgcttggcttccagttcctggaatagatgcctggatctgtcagggttaatgttggtgccaagtctgctttccttagcccagacacagattgtgccatccaaacccacaagcacatgaattgtacctcaataaggctgctcctagtcccaggctccaactcaagccactcgggaaagcattccagtcctgggcagatcttggctctggtctcagatggagcaagacagcagatgggtaaagcacacgctttcaatccataggtctgggccccattaacacgtcccttcttggtaccgtctttctttttgcacagcagccttgctgaccc

SEQ ID NO: 139084 - DNA, 818 bp, Homo Sapiens
agcttttacgaggtatgagcacttttctttcattagggggaaggcgtgaggaaagtaccaaacagcagcggagttttaaactttaaatagacaggtctgagtgcctgaacttgccttttcattttacttcatcctccaaggagttcaatcacttggcgtgacttcactacttttaagcaaaagagtggtgcccaggcaacatgggtgactggagcgccttaggcaaactccttgacaaggttcaagcctactcaactgctggagggaaggtgtggctgtcagtacttttcattttccgaatcctgctgctggggacagcggttgagtcagcctggggagatgagcagtctgcctttcgttgtaacactcagcaacctggttgtgaaaatgtctgctatgacaagtctttcccaatctctcatgtgcgcttctgggtcctgcagatcatatttgtgtctgtacccacactcttgtacctggctcatgtgttctatgtgatgcgaaaggaagagaaactgaacaagaaagaggaagaactcaaggttgcccaaactgatggtgtcaatgtggacatgcacttgaagcagattgagataacagaagttcaagcacggtatcgaagcagcatggtcaaggtgaaaatgcgaggggggtcgctgcgaacctacatcatcagtatcctcttcaagtctatctttgaggtggcctttcttgctgatccagggggtacatctatggcttcagcttgagtgctgtttacacttgcaaaagagatccctggcccacatccgggtggcctggtttcctctctcgcccca

SEQ ID NO: 139085 - DNA, 1397 bp, Homo Sapiens
  misc_feature (38)..(38): n is a, c, g, or t
  misc_feature (88)..(88): n is a, c, g, or t
  misc_feature (133)..(133): n is a, c, g, or t
cttttcaaaaatccaccccctccacagttactttgggnccgggaacttgttcctttgggacccttggggattagtgaaaagagtactnaattcagggagacaaagtctgttttgctcctttgaccgttacccncctgctcccctgtctggtatggacaagatacatagccataatgattgcttaaagttcaatttcaaacgtcttctgtaagtcactggagaaagggttggtaggggagggattagtacgctgcttggacttattttctaatgcagcccactgggcttcaaaaggatccactgggcaggtgcctgtaggaacctctgtatgcctgtctgctgaggccaacctgccatcatctacaccattgaaagctgcagaaccgttgaggtgctgagcaggaggcttaaagaagggactggtggtagcactgcttgcctcgtagtgagggaatgtctgctgcctgaccaggctgggtgactgatggggatgggcagcctgagggtggcctgcagtgccaaatacgttggccaccatctgggagggagtgatgcccaccacaggcacattaggggctggatagggcattccattggccacaggataggactgggcagggacaaaggctggttgcagggctgggaccacacccactggcacaggctgagaggtgaggaatgcattcccttggaaaggtgatgctggctgggagatggcagtgggtggaggaggctggagaactggctgcagaggagcagctgaggcctggggctgctgagcccggacgctcttagacacctcttctaaccatcggtcggcctcagagggagtacgtctatgaccggcctggaagagacctggagaggcagcaccagaagattgaccccactcggtcccttggaaggtaggagattgtggtgccaccactgtcactggtttggtcatcggagcagatgagaaggggtcctcaggtgtgctgaaggcattggtgatctgtgagcacagggagctgatgctctctgcctccccttctacttctggcactgcatttttaatggggaaatcagtcttcctctgcatagtggaaggcaactcattgatgcgtagggatagttggcgtttaaagggtgacatcttctggctaagagcaggaaaacctcggaaagagccttggcgagcaagctgttcaattggagcatgccggcgtgggatggcatgaggattgttcatctccagagaggtcgtggcatcagaagtaggagaggtgggagaggatggggatggggcagtgttgccaggggcaactgatgaaccaacgactatcttatctgtttcagctttcttggcatcttgcatttgtttcatgatctcctctctttctgcttgttcagtggct

SEQ ID NO: 139086 - DNA, 768 bp, Homo Sapiens
  misc_feature (489)..(497): n is a, c, g, or t
tgtttatcgatgccaccaaatttcttgatgtgttcgcagtgtcacccaagagtcagaactgtacacatcccaaaatttggtggccgtggaacacattcccggtgatagaattgctaaattgtcgtgaaataggttagaatttttctttaaattatggttttcttattcgtgaaaattcggagagtgctgctaaaattggattggtgtgatctttttggtagttgtaatttaacagaaaaacacaaaatttcaaccattcttaatgttacgtcctccccccacccccttctttcagtggtatgcaaccactgcaatcactgtgcatatgtcttttcttagcaaaaggattttaaaacttgagccctggaccttttgtcctatgtgtgtggattccagggcaactctagcatcagagcaaaagccttgggtttctcgcattcagtggcctatctccagattgtctgatttctgaatgtaaagttgttgtgnnnnnnnnnaaatagtagtttgtagtattttaaagaaagaacagatcgagttctaattatgatctagcttgattttgtgttgatccaaatttgcatagctgtttaatgttaagtcatgacaatttatttttcgtggcatgctatgtaaacttgaatttcctatgtatttttattgtggtgttttaaatatggggaggggtattgagcattttttagggagacaaataaatatatgcctgtagtgggcacaaattggcctttgatttagcttgcaggccaa

SEQ ID NO: 139087 - DNA, 1431 bp, Homo Sapiens
  misc_feature (133)..(153): n is a, c, g, or t
  misc_feature (263)..(263): n is a, c, g, or t
  misc_feature (347)..(347): n is a, c, g, or t
aacttaggtttccaaattaccgggggggatggaaggggaaacccgggccttgagaatggctcagattgggggggccaaaatggttttcccttccacggccagtccaatgggatttccttgccacgaaaagtannnnnnnnnnnnnnnnnnnnntaacctgggttcttccccggaggttaaactggttttcttgggtcattccaaccaattccaaacccttttttctgggttttaaaaaaagttggggaaggggtcctaagtantctagacttttcaagggataaaacctttcccactgcccagggccccatcccccagaaaaaccaaccaaacctcccaccctttcnttcctggtaaagtttaatatgaagcccctgcccccagacaagaaaaaattaaggtgcagcctcttgaagggatctcctgccccccaaaatttgttgagaaaaagtattcttctccccttctctctccaggaatgatatatgcaggagaacacaatacagtatgtccattttccaaagaaacaacatacttgaaaggtttgtgctgagaaccataccaaagtaaaccttgtgagactccaagggataccgggaagacaggaggggaaaggagaccaaagttgctttcatgggccagaatgatcaaaagcacaaaggtcttgccctataacatgctggtagggctacaatcacggagaggtgcaaaaccaaaagcaccaaatgaagacaaaagaatgtccaaggaggaggagatgcgtaggtcaattcaggcagaattccagggcataattcccaacaggacgctagtgtagaatcttctcatggatatggcagaagcctgcagggcttaaaatgcagtccaagctgcaagaatgtctgggcttcaataagcatccatcttattctccaaatagaagagagtaaacatggacccaaggcttgtattcatcttgcatttccacaaacttgtcttattagattagaataatcaataagccttgcagatacccagtgaaactgacgaattgcttctcttgcattatctgaataagaacatcttctctttcctacctctagaagctggctccagagatttcttcatttctctcccggatgaccttcatttgttcctcagcagcatttacaaaagtcagttatgtctctacactggaggtggactctctcacgcataaacctgcatgttgttgtgtggtggctcagacatgtgtgtcccaggtccccgctgacctcctccagcacccccaggggtagggctggtggtcacatctgaccagtcagaagcagagtggggtgatgaacttgaccactggtcaggagactctggggatggtgtcaggtagggatgctcaccctggaggtgaccactgtgactgggtgttcgctcagccgcatttgaggaagcata

SEQ ID NO: 139088 - DNA, 796 bp, Homo Sapiens
  misc_feature (141)..(141): n is a, c, g, or t
aaataaggttaccctgttcggtggaccggttgctaaaggattcaggggcggtttgggccattaggaagagccaggtttgggttttcctttattaggggttccccgagaaaagctggaaatagagtatcttggtgtcttttnccaaagactttgggaatgaaaaacaaatccaggttttctgatccaaggagcttttccttggtatagtatttcttttctgtagaggcacaggtaaagctttgcttcagtggttcctccgtttgggacactaagaaccaacttgtgaaagtgcatattggccttgtactggctggaagatgaagacttttttctttcagtcttagggtcatttttgctttctgttttacagtcgttcttatcacttgctaaagaggcaccatcaaaactggattttgaccataggctaatgattttcttctggtctggggagtccgcctccacagatggggtaggggattgggctgttggcgacctgcaggctttctttttctcctccacaccattctcagcctctgagctgaggaacaccgagctggggctgtctgtggagctgcgtgaggcctccacgttggccttccttgggctgcccggagtctcaaaccggaacaccgtgtcactagaaggcagccttttcttcaccattgtgcgcttattgacccgcaagtcaaggaacaaccttaaaagctcatttctgagtctcccaaataatatgaaaatctctgcgtttcagctttgtacagtccttgaattgcaggccgctctttcttcatgtccc

SEQ ID NO: 139089 - DNA, 2588 bp, Homo Sapiens
atacattttgctctgctaagtattgttttctatcgttcacttccttaaactgcgtcacatttttttaacctttcgtactctactcctttccccttgtgcactactctatgctcccctgtttgtttctcttaatttttccagaccagggtgtcttgtgtcaccttaactaactctactgttatgtaacccttacttctaatactcgctttgggcaacgcttttccttcccacggatgtgcttacatgggctttgaggccgctgttgtccaaggatttgggaagtcaactgttggtctgtttggatattaggagtttcccatcatggatcctgaccccgtggcatggtagtatctcgtgcttcctggtatgtccggtatctacttgccaggatggatcagtatgatgttagatcggggatctgtgccttgatggtcaaatggatgtgtactcctacttggactagtaatatactcgctgggaagcctgctctgaaaccaggtgcactgttgtagttatcagggctgtcatgctgttcacaagggtccaagcacctgaggctaccccaggtacgctgtactgaacagtgaaagaggcatcttgtagcaactcgtgaggacagtggaccatctccccaggcactggttatgctggcacctgactactatgcaagtaagactgtctgaagtgattgaaaagtgtggctgggccaaatgtaggtggcaaagacttatttgctgggtttatgtgcatctgagaaccattcataatgttcacagctgaagaaagctgcactgcagctggtgggccttgaggtggtgttaaagtaactggattcgtaacaaaaatagactggggatcctggtgaatagttgcatttggtaccatggagtaaaaagaacctctgggctgcattcgatgagaaactcgaggtgctggtacagctaactgaggtaaattactggtgtcctgattatcagcagcaaccattctgggtgatgtcaaagtcaatggagcaggttctgagttagatgcaaaaggcattgacataggacttaaatcagacacactggatggctgtgcctcctcttgtgtgttactggaagtaggagtgggactactggatgggtgagtttctggagctcccggggtgttgctggcagagctactgcaactgtttgcagttgaagatggggtacataggtttgccatgggctggtcctgtgtggacactttctctttggtgggtggcacagcagagaaagactccatcttttgtgaagaaagctgtgcttgagaagtacttgcaaggtagaaatgtggtgggagcttgcccgctagtgataggtgcagaggagacagaaggcagggaactacaagtgcttgtcacagaagaaatcactgttgctggaggacttgtcttaggcacacaggcaaacaactgctttctgactgatgaaggagtccgggtattagtgacacacagttgctgactggcagcaactacagaagagacagtgataggacaactggcagtagctagtccagcagactctgagggtaaaacagtcccgttctggttaggtagacggcttgtgttattatgctttggagagctatttgtgttgccaggattcacaggtctcactgggaatggtccccatgtgttaggagaaggtgagaaggttcctccaaactgggccatgggtaagcgaggatgccgaatctgttgcatagtttgagcagccagcagggcaaaatgagggtgaggataagctaagggtagagaaactgggaaagaagaacgtacatttgttggaacattcttattaagtttattagcgggctggaacgtagataacgttgttgcctgtgaagttacaagagttggagcacccaaaggaaatgcatttttactggaagctgctgtggtacctactccagatgagaagttagcatgaattgatttggtgctggcaggtgttctgatatgatttttaggaatcaagtcttccagttccttagcaggatcttgaatgagtgcattgattagttgaactgcatatcttgttgattctgtgccaccccttattgtgatcattctctcgccattcttatctttttgtttatccacatcaatatgggcaccagtaacatcctgtattgcagtgatgttgcatcctcctcttcccattatcctcgacaccactgaggctggaacagacaatttctttgaccttcgtacaacttctttccacccttcttctcttttctgaccccttttagggctagtgagattcagctttatgtttggagagcttaatggcaatgacactgtcttgtagctggttgacaaggaattaggagtcacttcaccttcaagtcgtgtctgagttttggaagtagcagtacttgtcttttcttcttgggaatgaaggagcagtgaggggtatttagaggaattcacatccatcacaaaatttaactcttggcttttaccaccactgctactctcactgttgcagtgtgcttccgcggaagcacactgcaacatggagagtagactgcagaatgccaaaagaagtagttcc

SEQ ID NO: 139090 - DNA, 633 bp, Homo Sapiens
aagggaactatcagctgctgtgcgatagcggcttttatatttaggtcccactgtgtgaatgatgaaccgggcagctagattgaatccttttgtcaattttgcttcacctgttcggcaccctttaagtttctggagatcttccttcaaatcaggccctgcaagcatgaagatactttctgacacaggattcttatctgtgagactttcattgctggtattcacaatggctgtacagttcagtaatgccacatctcctttccaaagaaccacttttccattgacgtccttattataaagaaaaggtgatcgaacagtgtcttcctgaaatatttcagctgtagtatcagaggaatttaattcatcttggcatgagtcaccccagcttggtagtgtatccacatccacaaactgggaaggtgcacctaagggatccatggaatgggaactttgatttgtcttttcccaaaatcctcagcaattcaatattcactggagactttagagcactctggtggtcccatccgggcggcgggcggcacggatcaggctcctggtagaaggcggccgagcgacatctccggcgaccctcagcaggagcgcgccgagtacggcgagtcaaagtcccaggagact

SEQ ID NO: 139091 - DNA, 1256 bp, Homo Sapiens
agggttctcagctctgtgtcagcgtctgctgcagccatgttgcgagcctccccatcgcacagataagcgcattcgtgggatatagccggtacattgcctgcggagagcgacgcagcacacatgcacacgagagatagtgcaccagcgccagatagatggccagcagcactgctcacagagatgtgtctggggcccccactgggtagttgacggacaacttgctggttgcccattggaatgcccttgtgagtaccagaggacccagaaaagagttatgaacagaccctcttttggtagtaggttccatggacagggccttctgtggcactgggtttctgtggacagggcctccatggctgccagttggagttggtctgtgcctccgttggctgtggtttgagtggtctgggcctccgtggctttctggtgcagtggtctgtgcctccatggctgtggtttgagtggtctgtgcctccatggctgctggtggagtggtctgtgcttccatggctgctggtgcagtggtctgtgcctccatggctgctggtgcagtggtctgtgcctccaggcctgtgggttgagtggtctgtgcttccgtggctgctggtggagtggtctgtgcctctgtggctgccagtggagtggtctgtgcctccgtggccgtcagtcgagttgtctgtgcctctgtggctgccagtggagtggtctgtgcctccgtggctgctggttgagtggtctgtatctccatagctgctgaatccgtggacaggttccccatgttggccagctccgtggtcagctctgtgactgcccctcctgcatccaggccagtagaacgccttgcagcaggctccacagtggtagactcaggggttccaggcccagtcagaggagtggtgtcagtgctgttcctcagcatttctggaggctccgtttctggcaggaaatcataatctaggtactcatattcggtggcctgtctccggtcccgggcaagcaggggacccaaggctttctcggcttcatctgcccaggtgtcccacagctgcaagctgttgccagggcccagtaggatcagcaacaggaggagttgcagaggcatggcaccaccgtgctcagcagagcatgggacagctgcctcgtgggcccagaagaagtggcttctctgctttagtgacaaggtcccagcccacgctgccaggcactgctgtggcaccccctgcggcagtcccggatcccagcaacccccaaaggct

SEQ ID NO: 139092 - DNA, 857 bp, Homo Sapiens
gcttcaggacagggctccatggccgccagggagtggtctgggcgtcccgtgctgatagggtgatggtcttcgcccccgtggcttctggtgcagtggtcctgtgcctccatggcaggttggtttcgagtggtctggccactccatggctgctggtggactggtctgcgcttccatggctgctggtcagtggtcttgggcctccatggttgcctggtgcatggtcagcgcctccaggcctgtggggttgagtggtctgtgcttccgtggctgctggtggatggtctgtgcctctgtggctgccagtggagtggtctgtgcctccgtggccgtcagtcgagttgtctgtgcctctgtggctgccagtggagtggtctgtgcctccgtgggcactggttgagtggtctgtgcctccgtggctgctggttgagtggtctgtatctccatagctgcgtgaatccgtggacaggttccccatgttggccagctccgtggtcagctctgtgactgcccctcctgcatccaggccagtagaacgccttgcagcaggctccacagtggtagactcaggggttccaggcccagtcagaggagtggtgtcagtgctgttcctcagcatttctggaggctccgtttctgtgcaggaaatcataatctaggtactcatattcggtggcctgtctccggtcccgggcaagcaggggacccaaggctttctcggcttcatctgcccaggtgtcccacagctgcaagctgttgccagggcccagtaggatcagcaacaggaggagttgcagaggcatggcaccaccgtgctcagcagagcatgggacagctgcctcgtggcccagaagaagtgc

SEQ ID NO: 139093 - DNA, 1328 bp, Homo Sapiens
  misc_feature (119)..(128): n is a, c, g, or t
  misc_feature (280)..(350): n is a, c, g, or t
  misc_feature (464)..(478): n is a, c, g, or t
ggcccccgctgtttttcccccgcggggggagaatatatttattattcccaaggggggccaaagagggctgggattcccccctggggacgttccagggtttcctccactcccgccttttnnnnnnnnnntttccccaggtgggccgagaaagaaggtttaaagagagtttccacccccctctcctcccaaaaaaagtgccccggggcgcgggggtttaaattttaattttggagggtcgcgcctggggcccccccttggaaaagtaccccgcgaaaagggnnnnnnnnnnnnnnnnnnnnnnnnnnnnnnnnnnnnnnnnnnnnnnnnnnnnnnnnnnnnnnnnnnnnnnngggggaattccaaaccccattgccttgcccgggttttctttgggaacaaattttggcccagttccctttccctttggggccccccgcccaaacaaaagttttgaaaaatttttnnnnnnnnnnnnnnnccgacatggaaggttttattagaaaaaatattcaagggggggtgtacaatcattggtctattaagaatgattttctagaacattgagtcaatataataaaattttcggtttcatactttctttttcttttaatgctgtgatacttaaatgttaaatcagcattttcatgtgatctgaagtatttcaattatatatgagcattcattgttttttgcaaaaactcagtattaggtaatagttacatactactacaataacattcctctgctgtacaaattaaaccatttaaaagaaatgagcattctaagaattatatacaaaagaaaccttgaagcagtgttgaaatgaaatgcaaggtgtcattgctagctctactgttttaaagtatctttgaaaagtaaaattaacaaatacccttcaacatatccaggtttacaagtctcaagaaaatcaaatgtcaaaaaattctagaaagctgtgaaaagcatatatacattttccttatgatcttatgaggcttctttacacttttaagaagttgctaagtttcagtatcaatttattcgcatgtcaactttagctgcccccaaactcccattttggatagctcccctctgatttcagataaagctctgcgtcatcttccttcagcgaaggtgcgcgacctgaaggtgcgcgatctgacgcagggatgccaggtgtgcacttgccacactgcactcagatcgccaacaaagatgggtgcaaacacataggtctaatctgatatcagtgccctctttcctaaaccacactctcatccatacatttgccttcatgaacccagccatgttcagaactcccgtagcac

SEQ ID NO: 139094 - DNA, 861 bp, Homo Sapiens
cctccaacctggagaaaaaaagtcttcatcccggggaggcaccatccccctttttttccaccctggacagggctgctggctgccggatcttcttcggtttggtggggctgctcaccttggggccctcaggacaggacacaggggcaggcagggctgttgagagctcttcagccagttcctgaagatacagaagtgccactggggcagcccttcggcggggtcgttccccagaaggggtctcaaagtcctcagggggcctctttggagattgagattctggccgatctaggtcttttgacaacttcagcagcagcagctctgccttggactttcgacctcgtttcttaggcatgggggtggacagagggttggattgatctaagagaccaggaaccagtggggctgatggaggattaggctgttggggccttttggggccttttcgtgtcctaccacctctcttccggccaggctttgaggccctaggctttgagacctttgacatctctgaagaaagatctggctgttccagtctggagaggctttcctgctctggagggagcctcctctgatcaggagaatcctcaaatccaggcaaaggggtaggtaatgacatctctacggaagcctctgcactggtcatttctgaagaggtcttgacatcaagctgatttagcacctcttgtccaggagagtctaccacagtcatgttccccacggggccggcctcccccagggcaacatagccgaccccgcaggtatccatcagcaccccccaaaatggctgccccctcgccaaagtccttccggaagtctaagttcgaacctcgttgccgattcaaaccaggcctcgtacctagc

SEQ ID NO: 139095 - DNA, 982 bp, Homo Sapiens
  misc_feature (29)..(29): n is a, c, g, or t
aagggcagttgagagcacattcagcatancaatgttgactgttgcagcaaattatgtttcagtaaagtttacttttcctgctctactcattcagaagtggcaactttctgaatgaatttaagtttttgctactagtacttaagctactgatgaaaacttacaacagctaggcaggtttgtacgcaagtgttgacagcagggagagcacgggaagggctggaagcatgcctagtcccagccagggcagggcatgttggagtcagctcccactcaagcagcctgctgagtgcagcccagcgagcgtccgcgtggtcggggggcttcctaagtctgtggaaagaggcttttcctatatccacatggatgcgccctgaagccaatggaaaacaggactcaatgttctcccagtccatagctggtcagtaccattgctatccctggactcaggcttagaagcaagtttgaatcaacatatttgaaacatgatcttaagattctgagtgcaatgacaggcaagattgttattgaaattggtatggtagggcatgggcagaacaatcggcctcacccttgactcatctcccacattccttttaaagaacaggtatccctgtaccaaccacttcaattcatatccgaaccatgattctcttactttctaacttaggtaaccaagctacctaagccctgcctgcttccttatggccctttccaggtaatagaaaatggaaactgaccacatgcctcacatggccaaatgtttgccaagactagcagagtttttcttttaaacattctgtatgaaatatgtcagactgggggacgggggatctcttctaattcattgtttttcttttaaacattgtgcacaagcttatattcacatagaaagcatatacatcttataaatcacagacttttttttaagtagtactccagtttatcagctcattttacacacatatttaggcaacagaatgta

SEQ ID NO: 139096 - DNA, 1209 bp, Homo Sapiens
  misc_feature (79)..(113): n is a, c, g, or t
aacttggttcactcactatagggcgctccgtcttttgcgaacgacgagcgcagcgaagtagtgagcgaggaagcggcgnnnnnnnnnnnnnnnnnnnnnnnnnnnnnnnnnnncagtcgacggtaccggacatatgcccgggaattcggccattacggccggggaggggcgaggctgtcacttgccaggcgcgaggagcctcagcgcggcttggagaacttggccccgcgcagcgtctggtcactcgctctcctctggggactgcagagaagcaggacctcgggccatggggtgttttgaatgccgtatcaaatgcctggggggcattccctatgcctctctgattgccaccatcctgctctatgcgggtgttgccctgttctgtggctgcggtcatgaagcgctttctggaactgtcaacattctgcaaacctactttgagatggcaagaactgctggagacacactggatgtttttaccatgattgacatctttaagtatgtgatctacggcatcgcagctgcgttcttgtgtatggcattttgctgatggtggaaggtttcttcacaactggggccatcaaagatctctatggggatttcaaaatcaccacttgtggcagatgtgtgagcgcttggttcattatgctgacatatcttttcatgttggcctggctgtgagtcccggctttcaccttcactgccagtttacatgtacttcaatctgtggaccatctgccggaacaccaccattagtggagggagcaaatctctgcttggaccttcgtcagtttgtcattgtgacaattggagaggaaaagaaaatttgtagtgtctctgagaatttcttgaggatgtgcgaatctactgagctgaacatgaccttccacttgtttattgtggcacttgctggagctggggcagcagtcattgctatggttcactaccttatggttctgtctgccaactgggcctatgtgaaagacgcctgccggatgcagaagtatgaagacatcaagtcgaaggaagagcaagagcttcatgacatccactctactcgctccaaagagcggctcaatgcatacacataaatgcatcttcctgttctttctaccatttgaatgcattggtgtttaactaagggccatccaaccatccaacctttaaaaaacaaaacgaaagtgcttctcatcaatgatatgtaaggtg

SEQ ID NO: 139097 - DNA, 966 bp, Homo Sapiens
  misc_feature (98)..(132): n is a, c, g, or t
  misc_feature (810)..(821): n is a, c, g, or t
cagaaaaaaagactacaagacatatatacctcatatggcgcatcgctgttttagcgaacgaccgagcgcagcgagtagatgagcgaggaagcggccgnnnnnnnnnnnnnnnnnnnnnnnnnnnnnnnnnnncagtcgacggtaccggacatatgcccgggaattcggccattacggccggggagttgtcgtgtgttctggattcattccggcaccaccatgtcgaaggtttcctttaagatcacgctgacgtcggacccacggctgccgtacaaagtactcagtgttcctgaaagtacacctttcacagcagtcttacacgtttgcagcagaagaatttaaagttcctgctgcaacaagtgcaattattaccaatgatggaataggaataaatcctgcacagactgctggccttgcagttgaaattcagccataaagaaaatgaagaaatgtttttctaaaacatggttcagaactgcggattattcctagagatcgtgttggaagttgttaatatctgctacttggaacatacgattgcctttcagaataaatattggtatttttgttgttgtaaaattgaaatcaggcatttaacatactatgaaaacaccaggagtcaatgattaatgaaaggtgactcatctgtccctttttgttgtccatactcttcctatgacgagggaatgcgtatgaattaaggctactactgtcacagaagatcatagtctttgatgctacctcacaaacaaacaggtagttcgttgggggcaatgaattagccaactgttactggaagcttttgataannnnnnnnnnnnagaaacaatttgtggaacattaaaatttactgaatcgtatatattcatctggagataaattttttaagatttttggacctggatgggcaattgcttgatagcatctgatttgcagactcattatttgattttaattaatatttcg

SEQ ID NO: 139098 - DNA, 1174 bp, Homo Sapiens
  misc_feature (523)..(533): n is a, c, g, or t
gatcttcagatctgtgcaataatactctgttcctgaatgctatttagaaatactatcctcaaaacaccagtggtttcttgaagctacttgttttaaatgttgtatcaaaagagattgataaaggaatgtataactcagcaaaggatgcttctactgtaaattcccaccattaaaagtactggattctataggtccaccattaaaagctggtatgggacaccaatttatacacataagggttagattaaaattttaattttttggttgatattaaactgaaatttatataactgaggtctgaatcttaaaaaaagtaaatgataaaaatttaatatagttaactgttcactgatatgtctattcacttcatcataacctatatatttaattaaaaatcaaattatgagtctgcaaatcagatgctatcaagcaaattgccatccagggtccataattctttttatatttttatctcagatgaatatatacgattcagtaaattttaatgttccaaattgttctnnnnnnnnnnnttatcaaaagcttccagttaacagttggctaattcatttgcccccaacgaactacctgtttgtgttgtgaggtagcatcaaagactatgatcttctgtgacagtagtagccttaattcatacgcattccctcttcataggaagagtatggacaacaaaaagggacagatgagtcacctttcattaatcattgactcctggtgttttcatagtatgttaaatgcctgatttcaattttacaacaacaaaaaataccaatatttattctgaaaggcaatcgtatgttccaagtagcagatattaacaacttccaacacgatctctaggaataatccgcagttctgaaccatgttttagaaaaacatttccagcagtctgtgcaggatttattcctattccatcattggtaataattgcacttgttgcagcaggaactttaaattcttctgctgcaaactttaagactgctgtgaaaggtgtactttcaggaacactgagtactttgtacggcagccgtgggtccgacgtcagcgtgatcttaaaggaaaccttcgacatggtggtgccggaatgaatccagaacacacgacaactccgcgggggtagcacgacttcctctagtgtgctggggaccgccccccc

SEQ ID NO: 139099 - DNA, 1061 bp, Homo Sapiens
  misc_feature (94)..(94): n is a, c, g, or t
gctggaaaattcattttctttctttaggaaaaagtgtttttttcattcaaggcgaaatttggtcccagtctccttcagtttccatctttcatantgaataggggatcccacaaggtttattgtgcacatgcattagacctttaaaagtatttcacagtttaaactcttaattctaaagtagcatcttcatcgcattcaaaaatattccggggatgctgctggaaagcgggaaacagtccacatgtgattgactccttcttctattgctttgtacagggcaaatgccttgtgtgcccctgttataaggatcattacttctctagcatccaatcactgtccccacaccaacagttagagccatagttggcacttttgataaatctccatcaaaatatttggcatttgccaagatggtatccattgctagagtctttaatcttgtccttgacactaaactggatccaggctcattgaaagcgatatgaccatctggaccaattcctccaacaaaaagatctattcctccagcttcttttattttgttttcaaaagcatcacattctgcttgtaaatctgcagcattcccgtcaaggatatgtgcattattaggatctatatcgatatgcttaaaaaaattattccacatataagaatggtagctttcaggatgatttcttggaagtcctacatattcatccatattaaaggtcttcacatatttaaaagaaaggtgtccattcttatgatattctattagttttttatagcatcctaaaggtgtactccctgttggtaaacccagtgtaaaatatctgtcctgtccaggtttgaactgaatgatgcgattacagatgtatttggctgcccattcactagccaagtcatagttatcaagaattacaagcctcattacggtgacgcacagcttccagaacaagttcaaaccggcagacccaatggttcttcgacgctggaacagcgggaacaagcaacacccaaccacccgagagcgaccccagctgaccagtggagcgcgaatcccacggacccggatgcagaat

SEQ ID NO: 139100 - DNA, 857 bp, Homo Sapiens
  misc_feature (256)..(266): n is a, c, g, or t
gaacacaagcatcttaatttgaatccacaaagtttcatgtaatgaaaagaaatacataattttaattcaacccgagtgttttccaagaagattgtatttgcttaaattgctacagtaattcaagagacagccctgtctggacacagagttactgtggatttttaagagactcagttaaagaatttaggaatttctgattcatttaaaggatttacaaattcatcaacccctgaaaactaaagcaaattgaacaggnnnnnnnnnnngaagatgggtttttaaagtccaatatatgttattttctatcttttttggagtcaaagtacattgccaatatgaaacttatcagtgggatgaagactatgaccaagagccagatgatgattaccaaacaggattcccatttcgtcaaaatgtagactacggagttccttttcatcagtatactttaggctgtgtcagtgaatgcttctgtccaactaactttccatcatcaatgtactgtgataatcgcaaactcaagactatcccaaatattccgatgcacattcagcaactctaccttcagttcaatgaaattgaggctgtgactgcaaattcattcatcaatgcaagctcatcttaaagaaattaacctcgagccacaacaaaattaaatctcaaaagattgattatggtgtgtttgctaagcttccaaatctactacaatttcatctagagcataataatttagaagaatttccatttcctcttcctaaatctctggaaagactccttcttggttacaatgaaatctccaaactgcagacaaatgctatggatgggctagtaaacttgaccatgcttgatctctgtta

SEQ ID NO: 139101 - DNA, 693 bp, Homo Sapiens
acctcttccaaagtgagatctggtttgaaaatgagcttgctctggcctctgaggtaaggagacacagaaggacagttgtcaagttctaccttcttcgtggatgcttcattagtcagagtttttcccttccccaaaatgagggtcttatggaaattagccatgaactcctttgctttaggaatctcttgaatggcacccacgaagtagttactggtggcccacccaaccactgtcaggcacaaagtcaacagcaacagtaatcggaatttgtaggaaaggtggaaagtcaggttgaagcccatgttttttattacgtgaataatatctatctctctgcttcactgcaggcaagaaagcttcaagttgagcttttccaatctgattgcgaacttgatgacaactgaagatacaatgcctggtttttctcagtagttctgctccaacagtctttaacaaatggcacttttggtcacacccactgccttccgctcctctgcctctaaaagtgatcttctccttggcttggggaggaagtgttgcgtggcctgcctcttccttcatgaagccacaaagtgccactgcgtgagttccgtggcacattggaacacagtgtacccgcctctgggcaagagccgtggaaatccacacatgaagccaggtggtccccggaggcggccgcggcgagctagcact

SEQ ID NO: 139102 - DNA, 500 bp, Homo Sapiens
tttttcaggtacctatcacttatattcaagacttctcagtattttatccgtcttgtttcatctgttctcccactttgggatgttgttctcatatttgacaggaaattgcagacattgagatcattacggttagtcaaggtccatcggggatgggttttcagtttgtgctggagtgaatcatttcaggatagaatttccatttgaaacaacgtgtcttttgtgattgcgttttagactgttggagcagaactactgagaaaaaccaggcattgtatcttcagttgtcatcaagttcgcaatcagattggaaaagctcaacttgaagctttcttgcctcatttatccttgaaaggagtagaggaaattcttgtctcagagtgtggagttatgggttcaagttctgggaaattttactgcccttaaaggaacctctggaggaagcctgttttgtgagcccttccatgttagccaatgactgccctcagatttccccggaggct

SEQ ID NO: 139103 - DNA, 551 bp, Homo Sapiens
ttttgagttttgtactttcttgtacatgttatatttattttatttgaatgtatagtttttgtgacacaggagatatatatatttatggggtacatgagatgttttgatacaggcaagtacatattatacttaaataaaaagtttgcatactacttaatcaaaggaaaaaagcaacacttactgaggtaaggagacacagaagggcagttgtcaagttctaccttcttcgtggatgcttcattagtcagagtttttcccttccccaaaatgagggtcttatggaaattagccatgaactcctttgctttaggaatctcttgaatggcacccacgaagtagttactggtggcccacccaaccactgtcaggcacaaagtcaacagcaacagtaatcggaatttgtaggaaaggtggaaagtcaggttgaagcccatgttttttattacgtgaataatatctatctctctgcttcactgcaggcaagaaagcttcaagttgagcttttccaatctgattgcgaacttgatgacaactgaagatacaatgcctgt

SEQ ID NO: 139104 - DNA, 581 bp, Homo Sapiens
tccgatgtgatcacttccttctgcggggggagcttcaccttccactgaagaaagaggatgttcatgatggcaaggagagggcaagggccgttagtgctctgggtgatgatgggtgtctgttctcctttccaagggatccacttgacacagtagaaatctggctcaggctgtcgggtcctgggggactgaggaagctccttaaagaagggggtgctgttccaagattgagaaggagggttcagccgtggcaatgagatgggggagataggtgcaatgaagggggctgccagtgccagctgccttccagctgtcaacgcctgagcttatacaggtttacacagctttataagcgacggtccaggctgggttgtggccacttccggactcacgcccagtactgggggcactggaggagggtgaaggcaggcagggacacagccaaggtgctccaggtcgctcagagagtcttcaggattcctgagtcgccgagtctatggcatgcgctccgggccctgactacaagctggttttcaaaggaagtttgtggtttttcttttcgtctctctctcttttttattctc

SEQ ID NO: 139105 - DNA, 1314 bp, Homo Sapiens
  misc_feature (1076)..(1109): n is a, c, g, or t
tgtgccagtttagcagcactggtcattgcatcatccacattctgcctgaaattaagctgaagtccctctgacttctcctggggcttgatgtacaggagcaagtttccaagatggccatgagctcatccgatgtgatcactttccttctgcggggggagcttcaccttccactgaagaaagaggatcgttcatgatggcaaggagagggcaagggccgttagtgctctgggtgatgatgggttgtctgttctccgttccaagggatccacttgacacagtagaaatctggctcaggctgtcgggtcctgggggactgaggaagctcctggggcatggagcatgcccttattgtctctacttcaggcagtgtcccaagggttggccccggctggacgctgagctagcttcaggcagaggggactcaagcttgtccccacactggctagccagcaaagcttggtctgctggctacccgcttctctagcctccccatctagcatctcttgcatctgtgtcctgagggtgctcatctggggccctgccagaacctcatgggttttcaggggatgattgcttctgcagttcccggccttatccaggggctggatcttcaggctgatggtactttccagtggtcaaaagggacctcggttagaggggcactgaaggtgtttactaacctcacgggacttgcttaagccaggcttgggatgccaaagagtgaccttaaagaagggggtgctgttccaagattgagaaggagggttcagccgtggcaatgagatgggggagataggtgcaatgaagggggctgccagtgccagctgccttccagctgtcaacgcctgagcttatacaggtttacacagctttataagcgacggtccaggctgggttgtggccacttccggactcacgcccagtactgggggcactggaggagggtgaaggcaggcagggacacagccaaggtgctccaggtcgctcagagagtcttcaggattcctgagtcgccgagtctatggcatgcgctccgggccctgactacaagctggttttcaaaggaagtttgtggnnnnnnnnnnnnnnnnnnnnnnnnnnnnnnnnnnatcaggacgaagaaaaattaggcaaggacaagctccctggaggaggaggggcctgcccagcgctggtggatttccatcaggactttctgacccggtcagcagctttgtgatcagcagagagggagcgagaaacaggagagaaaaacaacagaccctttctcttccatcccgggaatgccgaagcggtcctgtttgattgttcttc

SEQ ID NO: 139106 - DNA, 581 bp, Homo Sapiens
gccatgatttgtgccggcttcctgcaggggaacgtcgattcttgccagggtgacagtggagggcctctggtcacttcgaagaacaatatctggtggctgataggggatacaagctggggttctggctgtgccaaagcttacagaccaggagtgtacgggaatgtgatggtattcacggactggatttatcgacaaatgagggcagacggctaatccacatggtcttcgtccttgacgtcgttttacaagaaaacaatggggctggttttgcttccccgtgcatgatttactcttagagatgattcagaggtcacttcatttttattaaacagtgaacttgtctggctttggcactctctgccattctgtgcaggctgcagtggctcccctgcccagcctgctctccctaaccccttgcccgcaaggggtgatggccggctggttgtgggcactggcggtcaaagtggaggagaggggtggaggctgccccattgagatcttgctgctgagtcctttccaggggccaattttggatgagcatggagctgtcacctctcagctgctggatgacttgagatgaa

SEQ ID NO: 139107 - DNA, 832 bp, Homo Sapiens
gaaaacagttgcggcgggatttgttttacatgtacgtacaagtaggtattagccttgaaatgcttcttgaaggtagagtacatgagaattctttggcttgatcacaaagagctcccaatcttgagttttgtggattgaggattctgagtcactatactttggcttttagactacattaaaagcacatgaacactttcagtgtaacttaacatgtagtgaagttcacctcctaacaatacttcacaggatccctccaagaatgcccagtgctgatgtagcaacactagcagtaagagcttattgagatggctgactgaagtgacacggtgacactgttaatcgtttggtttgttctgaaaaaagtttgtaaaggaccaccctcctccattagatttaggagagtcttcatctttaggaggaatcaaaaattgtcgggaattaatggagcatggacttccaaatgagacaatctcactgttgctgtctatggatctaggagagtctggagacactaaattccatgtatttacattggcctgaggtctgtaacccgcagttttatctaagtcctcttctgcagctatatcttgcacagtagaattaatggggaggtgcatctgtggcttatagcctgcccctcctacagggtcattttcttgttcttcttctggttttgcttgaggctgatacatcgactgaacatcaatgtaaataacctgtgcagtccctccagcttcatctgcggctgggtttggtatttcttcctcaatgatgggtggacaataggacacaaccacatggttttcaggctctgcatcagagcgatcttcag

SEQ ID NO: 139108 - DNA, 798 bp, Homo Sapiens
agcgggtggccacactttaaccacttcccagcatctttgttgcacgttgattggcctcatcaattctggttttgttggaatcagccttcgtccatgatcctgtcgatctggcgattctgtgtatcgatctcattgcccatatccagggccatgtgacggaggttcccgatgatgccgctcacctgctctaggttatcatccatttcattcttctcgggcatcatttgttaccctgcggatgaagccgccactgatggccatctgctcccgttcgtccactacacgagcaggctggctggccaccactccgtcctgattattgccccaggcttttttgtaagcatcacttgactttaagcttgttacagggacatatgcaaagctccgcagcatgtgttcctaggtcttttaaatttttttctgcttcctttcactgtctttgttgatttggttcatgccttcttcgatgcgttcgagttgttctccttgttcatccaacataaccaaagtcctgataccagcatctttactctcttcaaccagttgcagcatacgacgggtgctttaccagcgactgcatcacgccaaactggtcagcccttcgctgcatctcctccagctcattgcgcatgtctgcgtcttcggccatggtagcggtggggagtggctgggcgcctgggctggggggtcagtgacgggtttggctctggacctgggcttctcgggagggttgtgttctccgggcctctgcaggttgcaactgtggtggagccgccgagcagggagggaaggaaagac

SEQ ID NO: 139109 - DNA, 1157 bp, Homo Sapiens
gctggtacggccggaattttgggatgaaaggcaagctgatgactcccaacggcccggaagtccacgggtgagccaggatgcaaggctcctggtcctgtttgcagcgcggccaatgaggcgctgggaggggcaaaaccatacggatgcgctgcgtgtctgagaggaagggctgacacttgctggcatggcctctgcctggcttcgtcatcgcatgcactgatgcccggggacctggctgtcctgggcttcccctcgtgctccaggtgaggctgcccattgcaggcactgggcaggcctgaccttgctggggctcatggccctgtagcgcttttgttacttgaatgtctagctgagcctgtttttgatggagctactactgtaatgcgtgaactaacaaacctgtgaacgtgtaaataggcccctggaagcacgtgcttaagcccttttgctgatttttaagaaatatcatctagcgcacacgggactggtattctggctgtactaatgacaagctgagtccagaccctggagggtcataggcttgtaaaggcccacgccacactcggcaggggtctctcatgtgtgtccatctgcgtgtatgtcaaggaagtgagatgccaatttggggtcttgaggctgaccagttggggtgcttgggtgatctctgcttcgttagtcatgggtggaagaaaaaccacaccccccggacccctccgttctttctgcatagactcacttgtgaaatagcagttctggtagagagtggagttactgcagggaagctaccggacctgcctgggagccagtgaagggcgagtcagggcacgcgtcctggaggctgccagcgtccttgtagcagagcagtttcttgccgcttgggtcttcagcacgccaagccccccaccaaccctccaccccgagtgaaggcttcgctgaaattgctttggtcctcatagagcctgtggtggctacttttggtctgaaacccagttggcccaggaaagagaaaaggttgtatgttttgtgttggtgtttcctattttctgcactggaggggaggggactgttgaggttctgtcttttttcttcttttcctcttccctcttcacatcacttggcttcctttcctctctgatgaccgtccgcctatggggttc

SEQ ID NO: 139110 - DNA, 900 bp, Homo Sapiens
cagtttctggctccaaggtttgaaccatcacgtggagagattaactctcaaggacctgttctggatgagattcccctctttgtttattgtgaagttgaagataagagtccgtttttcgggctgggtaatcccaaagtgagcttgtttttttccacaaaatgttgtttggatttccttcgccgagggccacgtgatcccggcaggaaaacctcgttatgtgaacttgagctcttcacgtacggagaaaggctgctcgacttctcctccaggtcactgtcgctcagctctgaaaacggcttgctgcgacgggcaccatgctcatagtttgggcttaaaaattcactaccaagtaaagaagctgcactctgtggactctctttctgctcgccttttcccccggagagttccattgacgtctcctgggaagggtagaggggagccaaaggcagattttctaaagagctgtccgtggactccggcaacgcttccacagacagcagctgcccttcctccttcttactcttccagttcgggtcatagcggaggtctgaatatttgtcttctattggttgttgcctgttattggcgccctggtcccaggtatggtggttttgctcgcgagccatctgagctgcttttccacttgcttcctcttccatctcgtgtaggcttccccatcgagggctttcctcctcgtctaagctgtcgggctccataccgttgccccggattcgatcatcaaactcagaatggcacataatctcttgcgtgaggctttctgaatcagattccaaggagtcttttgcaatccgatgtaagtccacacacccacctttgaagaaagaagacttacatctgatcctcgtgccgaattcaacacccaggcctcgtactagcctt

SEQ ID NO: 139111 - DNA, 1102 bp, Homo Sapiens
  misc_feature (818)..(818): n is a, c, g, or t
agaaagcatgaaaaaagtgaaatgcatttgaagtcattggaattttggagagaataccaattttgtgatggagctgtcagtgacgatttatctattcattcgaaacagattgagggaaataaaaagtacctaaagcttataattgaaaatattttatttcttggaaagcagtgtttacccttaagaggaaacgaccagtcagtttcatctgtgaataaaggcaattttttagaattgttagaaatgagagcaaaagataaaggagaagaaacatttcgacttatgaattcacaagttgacttctataacagtacacaaattcaaagtgatattatcgaaataataaagactgaaatgttgcaggatattgtgaatgagatcaatgactcctcagcattttcaatcatatgtgatgagacaatcaatagtgccatgaaagaacagctttcaatttgtgtaagatacccacaaaaatcatcaaaggctatcttaattaaggaaagattcttgggttttgttgatactgaggagatgactgggacccacttacataggactatcaaaacttatctgcagcaaattggagttgatatggataaaatacatggccaggcctatgatagcaccactaatttgaagataaaatttaataaaatagcagcagaattcaagaaagaagaaccaagagctttatacatacattgttatgcacactttttggatttatcaataattaggttttgtaaagaagtaaaagaactccgaagtgctctaaaaactctcagttctttgttcaacactattttgtatgtctgggngaaatgtttggcaaattttcgaaaacattttataggctaagtcaaaaacaaaacatggcaagaaacatatatcacaatcatgttggacagtccatgatcgtacattactatctgtgattgacagtcttccagagattattgaaacattggaagttatagcaagccattcttcaaatacaagtttcgccgatgaattgagtcatttgctgacattggtttccaaatttgaatttgtcttttgtttgaaattcctgtatcgagtgctgagtgttacaggaattctt

SEQ ID NO: 139112 - DNA, 585 bp, Homo Sapiens
cccaaaagatgtgaaatctgtacctgggatcttttttgtggggtctgtgagccaggatgaaatttgctgaggatgaaataaataggagtgtcaattaagggcagaagatgattactagtgttaacttttcaatgtggattcctggtctgaaatgtgtttccccctgcacttacatatttggtcctatctttccttacatgtttattaaagcaatattgtgccattaggcaatgcaactcccaaagacattactggaatgaggtcattgcttcaggctagtgggagaatataagagagttcaaacaggttatttgttgggtaagaacccctaaaagcaagaggtttttgttttgtttgaaagcaaagtcaaaccgattctcaaagtgaatatgatatgatgaagacaggatcattatgaagctagaaacttgacaacatcactttaaaagctcaagcatatgtaacccacgactaaaggcgctgcaatgttatgcaatatgactgtcaggggaacgaatttccaacctcatgactcacttattgaacgtttccttcattaaagaaaaaatatgaacataaaagtgc

SEQ ID NO: 139113 - DNA, 878 bp, Homo Sapiens
ccagaaatatttgtcagcgtccaacagacatggcaaggctattccatattcttttcttttcaggaaagctctgcccttctcatgatatcccatagctaacataagggcttttctttctgatgggggaattctgattgatctgcctgtctggttagctatgtctaagtacggtgtcatttctggatccaccactgtctctgctgctctctttgccagtatttctagtcctctcttggtcctctgaatttgtttttctttgagtttggcctcattttgctcctcttcctctaactggaagtttttcctcgcgtcctcttcagattgttttagttcaagcaccatcgctttcacattgtgagccacgccttgttcttcaagggttttccctagttgtagttgcttcttatttatgacaattttgatataattttcttgaagtccaaaggtttcagctattttggacctcagttctctgccagtgatgtgcaatcgggtctccaacaagtttttcctatctttttttagtcttggtggtaaaaacacctcgattgtagcaattcccgttgttctataattgtcatttcctgttccacgctcaattgccttgcaacgtatttcttctattaccttttctacttcattttcacagcattctagtctgtcagagtactgcttagcaaggtcctttaatgccaaaccaacttttttattttcatctgtatatggaggtttccaaagttgaatcctgtcttcccttaaaaactgggtcaattttgcttgaagatatttcttttgtgccatccctgcgccacgccactcccgccgcgaccagcagagtgcccggattcggcagcggccgccgtttgttttcattccgg

SEQ ID NO: 139114 - DNA, 897 bp, Homo Sapiens
  misc_feature (17)..(17): n is a, c, g, or t
  misc_feature (184)..(184): n is a, c, g, or t
  misc_feature (186)..(186): n is a, c, g, or t
caggtaagcccacattnttgccaccgggtggaacacatggcaggggtctgggtttccccaaaactgccagctcaagccccagccccagcccacgttccatggccagtcgcctctgtgagcctcgctcaagggcagggtggctctgactcttgttgtagaagttggagtatctgttcaaagtgcncntcaggtaggagggcaggcaggttctggggttcagtgtgtggcagattgaggcaacaggccaggagtgtcgggacaggacaagcacagacacttctggcattgccccttcatagtagaggtcctcattctcctcctcttcctcctctccctccgccacatccaccactgctgctgccccagcttcctcttccttctcgctcttgtgctccttgccactggccccaaggcccacctgtattttcttctctgtatcctccagcttcaggagttcctgatccagctgctggagctggtagacgtggaactggcgctgcagctccttagaggtgctcaggctctgcaacatctgctgggggaggcggttggggaagcagggaccgatctgctccagcacggccccctccagccagctcgagaccacgcccaggagacggtccgccatgtagtgctggtaataatgctcaaaagtggtggctatctccaagccggagaaaatcaggacagcttgcaggcattgctgcagctgtgccagcctctccatttcctgggctccaccgatccggctgccctggatctgctggtcaatgtgccgggcgaactgctcactcacgtgggcagctttgagaaaagggagcttcagcaaggctcccgcacagccattttgcagcgccagcaagaaggctgcccgaggcccaaacagttcagagcttg

SEQ ID NO: 139115 - DNA, 767 bp, Homo Sapiens
ccagaattctgtcaaaggctgatggcgtcccacccctctgcacatgccccaagacagtaacccgggtgtcatatcccagacgcttaaccaccagattcttgatgtcttctgaggtgattggttttccattcttgtcaattgcaccctcagccacaatgatgatgttgagacgagaaccacgggtccttgtctcgctgagtcggcgacaaaggtgttcctcccagtcgtcatctggtggacattcaggaataaaaacccagtcggccccacaggacagagaggtgacaagggccaggtatccacagtggcggcccattacttctaacacaaatgtcctctggtggctctgggcagtggtagtgatggcatctacaatttccatgatccgatgcagggcagagtcagtgccaatggtcatatcggtgccacagaagtcattgtcaattgacccaaccaggcccacaatgttcaggtagctggacttcgtagcctcctcatctgtgatcttacctgctttctggaggtcactcaacaagtcactccactcagaacggaaggtgtcagccccagtgaggctgccatcacccccaatgacacagagattggtgatcccacgcttcaccaggttgtaggcagctcggagtcgtccttctcgttcccgaaagtccttgcaccgggcacttccaatcaccgtgcctcccagactgaagcatcatcgcctcgtgccgaattaaacccccaggcctcgtacctagccgtaacgtttt

SEQ ID NO: 139116 - DNA, 988 bp, Homo Sapiens
gggccaaaattccctattcaaatgggggttggggctccccaccttggctgcatggtgaccaagcaacattcttcctggctgtcgaaagatggccgtcccctccttcagagtaccggttgaaaatgaagtccagtggtatagttctcattgcacttttcattccttaacaccaagccccttttcacagttgttgtcatcttttgcaccagatgttcaacatttgcctgcagttctcgaatggtgaagggctcctcaaaaatgtaggcagcatcggccccagctgccagtccagccatgttagccaggtagccacagtagccacccatagtctcaatgataaacacccgacgcttggtgccagctgctgactgcttgatgcggtcacaggttgtgcagatagtattgagtgctgtgtcagccccaacgctgaagtctgagccagggacattgttggagactgtagcaggaatgaccacaaatgggatgcagagctcatcaaactgcttcctgccctccatcagttccaggccccctgtgtaagcctcaaagcccccaatgatgacaaggccctgaatgttaaacttagttatattggcactgatctgttcaaagctcttcttgggtagagtccttttagtcccaagtttagagccaccttggccagtccagcccccaacatagctccagccagcttcctctatctgccccttggccaggccctcgaaaccatcatggacaacgagcactcggttgccctggataaggccaatcctcacagtggagcgaacagcagcattcatgcctgcagccggagcccccacgttcatcacagccactgtgtgcgaaccactcttagataccgggggtctgacatgagctagaagcttgtacacctcccagttgttcatgaagctccggcctctcagcttcagggcttcgtaaaatttcttctcatccatgccttgtcacatctttgtcacctggacac

SEQ ID NO: 139117 - DNA, 1491 bp, Homo Sapiens
aatgaagtccaggtggaatagtttttcattggcacgtttgcatttccgtaaccaccaagccccctttttcacagttggttttcatcctttgccaccagatgttcaacctttgccctgcaggtttggaaaggggaaagggttcctcaaaaatgtaggcagcatgggccccagctgccagtccagccaagggagccaggtagccacaggtagccacccatagtctcaaatgataaacacccgacgcttggtgccagctgctgactgcttgatgcggtcacaggttgtgcagatagtattgaggtgctggtgtcagccccaacgctgaagtctgagccagggacattgttggagactgtagcaggaatggccacaaatgggatgcagagctcatcaaactgcttcctgccctccatcagttccaggccccctgtgtaagcctcaaagcccccaatgatgacaaggccctgaatgttaaacttagttatattggcactgatctgttcaaagctcttcttgggtagagtccttttagtcccaagtttagagccaccttggccagtccagcccccaacatagctccagccggcttcctctatctgccccttggccaggccctcgaaaccatcatggacaacgagcactcggttgccctggataaggccaatcctcacagtggagcgaacagcagcattcatgcctgcagccggagcccccacgttcatcacagccactgtgtgcgaaccactcttagataccgggggtctgacatgagctagaagcttgtacacctcccagttgttcatgaagctccggcctctcagcttcagggcttcgtcaaatttcttctcatccatggccttggtcacatctttggtcacctggacacattccatgaggggcaggcgcacagcctggttaccagagaggctcactacacaggctggggtatctggggtcccctccaaaagtgccatcactgcttccacacccatcctgctgcccagaattctgtcaaaggctgatggcgtcccacccctctgcacatgccccaagacagtaacccgggtgtcatatcccagacgcttaaccaccagattcgttgatgtcttctgaggtgattggttttccattcttgtcaattgcaccctcagccacaatgatgatgttgagacgagaaccacgggtccttgtctcgctgagtcggcgacaaaggtgttcctcccagtcgtcatctggtggacattcaggaataaaaacccagtcggccccacaggacagagaggtgacaagggccaggtatccacagtggcggcccattacttctaacacaaatgtcctctggtggctctgggcagtggtagtgatggcatctacaatttccatgatccgatgcagggcagagtcagtgccaatggtcatatcggtgccacagcctcgtgccgaattcgccacccaggcctcgctaccttaagaccgttatagtactgcccg

SEQ ID NO: 139118 - DNA, 987 bp, Homo Sapiens
  misc_feature (25)..(25): n is a, c, g, or t
ggttaatttcccaggccgcttaacnccaccagattctggaatgttttttggaggggattggttttccatcttggtcaattgcaacctcagccacaaatgatgatgttgagacgagaacccccgggtccttgtctcgttgagtcggcgacaaaggggtttcctcccagtcgtcatctggtggacattcaggaataaaaacccagtcggccccacaggacagagaggtgacaagggccaggtatccacagtggcgggcccattatttctaaccacaaatgtcctctggtggctctgggcagtggtagtgatggcatctacaatttccatgatccgatgcagggcagagtcagtgccaatggtcatatcggtgccacagaagtcattgtcaattgacccaaccaggcccacaatgttcaggtagctggacttcgtagcctcctcatctgtgatcttacctgctttctggaggtcactcaacaagtcactccactcagaacggaaggtgtcagccccagtgaggctgccatcacccccaatgacacagagattggtgatcccacgcttcaccaggttgtaggcagcttggagtcgtccttctcgttcccgaaagtccttgcaccgggcacttccaatcaccgtgcctcccagctgaagcatcatcgaaacgctctcccaggtggcttccttgatgtgatctccaccatccaccaggccttgataaccctcatggacaaagaagacacgggcaccggtgaagataccaactcgaaccacagccctgacagcagcattcataccttgggcatctccaccagaggttaagacagcaatggctttgccaatccccagggttttggctgcatggtgctcttcatgggtcatgatccactcttttagtcttagctctcctccgccgctgctttcttgcagattgtcccccggccgtaatggccgaattcccgggcatatgtccggtaccgtcgactg

SEQ ID NO: 139119 - DNA, 1086 bp, Homo Sapiens
attctttttcaaaaaaggggtttgaaatggggggtttcccccaacccctttttggcaacaatgcccccccaaggaccaggtaaccccggggggtgttcatatcccccagacggctttaacccacccagatttttggatgttttccggaggtggattggttttccctttcttgtcaaattgcacctctcagccacaaattatgatgttgaggaggagaacccacgggtctttgtctcgttgagtcgggcgacaaaggtgttcctccccagtcgtcatctggtggacattcaggaataaaaacccagtcggccccacaggacagagaggtgacaagggccaggtatccacagtggcggcccattacttctaacacaaatgtcctctggtggctctgggcagtggtagtgatggcatctacaatttccatgatccgatgcagggcagagtcagtgccaatggtcatatcggtgccacagaagtcattgtcaattgacccaaccaggcccacaatgttcaggtagctggacttcgtagcctcctcatctgtgatcttacctgctttctggaggtcactcaacaagtcactccactcagaacggaaggtgtcagccccagtgaggctgccatcacccccaatgacacagagattggtgatcccacgcttcaccaggttgtaggcagctcggagtcgtccttctcgttcccgaaagtccttgcaccgggcacttccaatcaccgtgcctcccagctgaagcatcatcgaaacgctctcccaggtggcttccttgatgtgatctccaccatccaccaggccttgataaccctcatggacaaagaagacacgggcaccggtgaagataccaactcgaaccacagccctgacagcagcattcataccttgggcatctccaccagaggttaagacagcaatggctttgccaatccccagggttttggctgcatggtgctcttcatgggtcatgatccactcttttagtcttagctctcctccgccgctgctttcttgcagattgtcccctcgtgccgaattcggcgcgccgtcgacttcatactcttcgcacccta

SEQ ID NO: 139120 - DNA, 1059 bp, Homo Sapiens
  misc_feature (327)..(327): n is a, c, g, or t
tggggggggtgtccccacccccccttttgtgggcaacaaatgcccccccaaaggacaagttaaaccgcggggggggtaattatttccccaggagcggtttaaacccacccagatttccttggatttccttctgaaagggggatttggtttttcccatttttggtccaattcgcagccttcaggccccaatggatgatgttgagacggagaacccaggggtcccttgtctcggtggagttgggggacaaaaggtgtttccttcccagtccttcatctggtggcacatttcaggaataaaaaccccagtgcgggccccacaggacagangaggtgacaagggccaggtatccacagtggcggcccattacttctaacacaaatgtccttctggtggctctgggcagtggtagtgatggcatctacaatttccatgatccgatgcagggcagagtcagtgccaatggtcatatcggtgccacagaagtcattgtcaattgacccaaccaggcccacaatgttcaggtagctggacttcgtagcctcctcatctgtgatcttacctgctttctggaggtcactcaacaagtcactccactcagaacggaaggtgtcagccccagtgaggctgccatcacccccaatgacacagagattggtgatcccacgcttcaccaggttgtaggcagctcggagtcgtccttctcgttcccgaaagtccttgcaccgggcacttccaatcaccgtgcctcccagctgaagcatcatcgaaacgctctcccaggtggcttccttgatgtgatctccaccatccaccaggccttgataaccctcatggacaaagaagacacgggcaccggtgaagataccaactcgaaccacagccctgacagcagcattcataccttgggcatctccaccagaggttaagacagcaatggctttgccaatccccagggttttggctgcatggtgctcttcatgggtcatgatccactcttttagtcttagctctcctccgccgctgctttcttgcctcgtgccgaattcgccacccaggcc

SEQ ID NO: 139121 - DNA, 583 bp, Homo Sapiens
catgcagttagaatcttcttgacctgtggttaagagacgaccactgggatctacagctccagatgccactgcgctgccagttccatgaaatgttgtgccaacacacacgaactcaacttggtactcgaagatcccaaaatctaacagtcttatcttgggaaccagatgcaatcatccagccactccaggtataaagtgctaaaatatgcccagtatgtccactcaaagcatggaggccctgtcctctttgacaatcggttgtataaatgttacaatcccctgctccagcacttattaaaatagctcctccgctttctgggccttccataaatgccaagtctctaattgttccatcatgcatactaaattccagatctggtcctgttgcgttacaagtctctgcattgaagggcagcactttgacgtatttgtcatttgatcctgttgctaataactgcccacaaggactccaggccacacagtaaatggatcctttatgatgtttattccttttaaaacgtaccaccggctgcttaggagtctcatgtgcacttggatcgattacatctggataggcacatac

SEQ ID NO: 139122 - DNA, 585 bp, Homo Sapiens
ctggtgcttttttggttaatttatattctttccatgtaattcatgtaattgtatgtctgtgtgtgttttatgtgtcaccacctttcatgtttttgattgccctacaaagagaaaccaaatgagctgattactgactataagttctcagcctttatggacctaatcttatttttatttacttgagtaatgtttattctctgcatgaaccatgatttctcctgtgagccattccagcataagctgtgaatatgtattaacaaatatatacatttctatttttataatccataaggatatgcctgttttaaataacatacatattaacaatatctatcaggaaaaccctcaagacagcttctagttaaaacctttgttgctgtcctctcaaactatatttataaaaatttgctagggccaaatccatacttgcagaataattcatcaaattttatttttaagtgaaaagtaacctttcaggcatttcagcagcatacattgacaatctagggtatatatgtatgtatgtttcttattgtatgtctatatatgtatgtggggaggacaggagtgaatgttcacacactt

SEQ ID NO: 139123 - DNA, 1623 bp, Homo Sapiens
atacacaaggctcaagttctggggtttcaggttttatttataagttttctttaaaaataaaattgccaacccccaagtgaattaaaggttgatctgggctcgcagaggtaatctgctctttgtaaccaagtgctctgtagtttcttccactttagacctctccagtgtgttaatgcctctgttttctttgtcttttccatgtgattttttatgctggaaaaatggaaccccgccaattgatgaacaatccacaccagcatctacagatggctcttgacttagaggttcttcagtatactgccccagaactgcctcttctacatccacatccggaattgtctcttctttgttgttttctgaacagtttagcatcattaacagctcaggctgtttccttttcagctgatcaaggagatgttcacgtggttcagttctttaccagtgtttgatgggtataaataacttttcctctgtggtgtcgtacctgttgggatatccagtttcagatcctgttccagaaagcaattaagcttagtcaaaccaatttttatggtttcattaagttctagattttgtgctatcaatttatcttcatcaatagtcatctgatcaagaaaaatgttatgctgtttctcatgagctgccttacgtccatctgatttctcagtgatgtctgaacttgaagcctcacaacattggcttacaacctccaataagttgtgaagttcctgttccctttcatttaaggaagatacccactgttcagaaaaataaactgttcttggtgttcagagattcacatctctgttcagtctcttgagatattttttccaggttgccattgagtttatcagagtgtttcacagattcttcaaccaattttgtaccttcttggttaaaatttctgagtttcctgtgagaagccatcagaatcagcacaaaatttttgactgtgaaaagtcattttgttgactatatccttagatttctgctgtatattttcctggacactactaagtggtttctgtatattttcacacttttcctccaaagcacagaatctctctgtccaaagattcattaacttgcaaagttcctgggaatgggtctgctttattgtcttcaggtcttcagttaggtttccacattgcttttgtgactcaaccaaggaacaatggtattttcttgtagttcatgtagattgttacacagtatactgagaaagccatctagttcctttttttgatcttctatcttatcggccactgtcaatgaagtcttgaaaatatgctttagttgactattgattttcagtatagacaccacagggggataaaatcatttccagtgaacttagaagatcagtcttgagtacattaatccattcctgtagtacagttttactttctgctgctaatgattgttcttttagtatcatattaaaaatctgagaaacatgagtagacacattttctggaatagatgtgagagatccagtgctactgtagtcatggtatctaatgcagagacctggaagacagcagcgacgcgtgggtcgacgatatcccgggaattccggcccgtaccgcctgctttttgtaccagcttgttcatgtccaatgc

SEQ ID NO: 139124 - DNA, 643 bp, Homo Sapiens
gtggatttagcacaagtgctgagaccacagtagagagcggggcaaggatttaggattctgtgtgtcagccactgctgggtctgcctagcttcttggatacatgattaacaccaagtcccaccccaccccaactgtacccacactttccccttcccggctgccaggcacatgccctcttctaccttcggtgtgaatatacctcctcttttctcagttatgcacactgtacctttctcctagtgtgtcacattctgccttcttggtgtgcacacaccctactctacccccatatctcagaaatctttcatggaatcactacaactttattttggtagacgggctcaagacaggggtgggctgcacacatggaccctcctttggacacaggtgttgggggtgagcttggtgggtaaaggcagatgcatcacgatgttcctgctctgcagcttagcggtgccaaggggccctcccatgtacacaggacacgagtacacagtcaggtcggctggggctggcaggtcactggtgcccggggcctgtgtgctgatgctgacgggaggcagagggctgggttggctggaaggactttcctgcaaggctccagctattgggtcccactccgcatgtaggacctgtagcccga

SEQ ID NO: 139125 - DNA, 920 bp, Homo Sapiens
ttgctcggactctggtgcagagccccgatagtatcggcacatgggtcattggttttaggaatggagttccatgaaagcagtaagagttcctgttgaggtcagtgccgaggcatttggagttttggttcttggaacgagtgttgttctcgcacatgcggttctttggtccatgaccggatatagccgatcgacattgaacacaggaagaatgttgggattcattcggtccaagagtttggtcataattttgtttctcccataagttttggttgcctgatagactaaccactggcagaatgctggggagacccattctcgtgcgtgaatgccacaatccagtgaaaatagcctttcttcttgtcattctggtttccccaatcttcagaacatatagtggattatgcttgcaacagtagatccaagtttgtaatacgagagaccatttcaggatacttatccatcatcgttttcagtccaagccacaatcttttcccaattattgtattttgcgtagctgtgcctgcctgggatatcttctttaacatcaaactgtttctcaatctcttcttgtagatcatgaatcaagatttcatagtgcattttattttgatccaaggcagactggatggcttgggattccttctcactaactcggaaatccaccatcatattagcagctacgtggtgggtggcacctggataccagaagtcaagctcattggttttggccaagtcctttatgatgtctgcttgtttttcatcctggggcttcacgcggaacaccttctccctgtcaaagcggacaggagcaattgcaagagtggtagcaatcaaacccacaggcaggatgagcctcatggttcttctttccccggccgtaatggccgaattcccgggcatatgtccggtaccgtcgactg

SEQ ID NO: 139126 - DNA, 1211 bp, Homo Sapiens
tactctacgggctatcggttcgttgtgctcctctgctcatggcttgtttgtcggtccactctgctttgtcgacgcgtctgttcgctctgtgtcgcccgcttcttgagtggttttgctgccaccttcgttattgtgccctgccgatggttggttttgtatgttaggtgtcgcgtcgcgaccaactgctatgtagcgtcgtcccgctgctttttttggtggtgtccgcttgtccccgcgcggcgccttgggggtccctatatttatggtcgtctcccgttctgggaattattgtcccacgggaattttgtgccaaaggtctccggccaaactgcacaaggtttcccagttaggctctgaatgataatttgagactggatctttccgaacatacccaggtacccatcatcactggcagacccagctcctgggactgtgcagagtcaataacagccacgatcatgttcacagctctccgctcctcaaggtttcatctggaaactcctgtgtagatggaggcgtgagtggcacaggagccgcacatcgtcctcctggcaggccttcatgtccatcatcaggcaggtgtgcagatcgcccagctgggtagcctgggcaaatgactcgtacaggttcatcttccctgcggcggctttgctggccctcaggtagtagagcaggtggtagccaatcttgggctgcttctgatatagctcggagagaaggtctagaagtagagagaagctgctgttgtcttcctgcatctgacataggttcctaaatattaggtacagaggctttcctacagactcctccagggactcctcagtaatctcctcaggcaggacctcccctcgaaagtgggccttgaagagctcctgtaggcaggaagcaaggacagacagctgctccgagtcaaagtcttcctccaggacctggtccacaatttcctgcatgacctcacactgggcctccgtatcactccccttctgtagctggagtactttgtccctcagggactcatccaactggtcaaggtaaggggtgatatcaactggctcctccacaactgtctccttgatagggtggaagcgaaactccctcttctttcctttgctgttgagatcctcttcatcgtcactgaaggctgcctctgcattgtcatagcaactcttccctcgtgccgaattcaaacccagcctcgtacctagccgtaa

SEQ ID NO: 139127 - DNA, 689 bp, Homo Sapiens
cggggtgaagcctttctctacattccctatcagcaccaatgccttttggggtgtgtcacagatcaccatggcgatatcagccttgttgacaatatgtacgatggcttctggtcccaaggtgtcatacagaggtacagctaccatagagtacgtgtaacaagccaattcggagatgatccactctggcctattctgagcaaagatgccgacaaactggtctggtgatgatttataacctttatgcaagagacaggaacccaggtactctgctctatcagacacctgtttgtaagatagccatctgtagggctggtttggttttctatatcccaagcagggcccattgtcagacacagcgagtcctctttggaaaacctcatacatagtcttggcatctgagaagcagcaacttgttaggtcattgttcttctgggaaacccccttccgtgctcctccctcaattcccacagactgattgttcaggtcaagaagaggtaagacgggttgaggtctggtgatcagccacaagaagatggcagctccaaatgtcaggatgcagatcaacgccggggtcggaagtggggaaaacaaaaagttaaagataaaaagcatctttgtgaacagcagcaggaaattcagaccttggaagaagactctcccttcctgggtccaggaagtgctcccctcac

SEQ ID NO: 139128 - DNA, 672 bp, Homo Sapiens
  misc_feature (194)..(264): n is a, c, g, or t
atagagtcaaattggcagccaacttttccttagcacctataaccaagctttaactcccatttggaatatagaattaggatgggaaaacactgtctgattctgcacacaaaagtgggtttcaaaaatacatccttttctgtgtcatgaaaaccccccgaagccattgacttcatcttacctgtgttctatcatgnnnnnnnnnnnnnnnnnnnnnnnnnnnnnnnnnnnnnnnnnnnnnnnnnnnnnnnnnnnnnnnnnnnnnnnaattatttgaagaacttgtggcatttgttaaagaatccttaatatattttaccaaatttttagtaactattatgaaatacaatggtgttccaaaagaagaaagcactaaaaactcaactagcaggaagcggttttgcttccattgagccacgtcggtggtgtcatcctacatgtagcataatagagtctctcagcctttgcttactggtgtttccgacagtattaacccagtgcgtggcatgtctttgaagcaaagcctgtcccgctagcctgtgtgttcacacaccaaaggagaagggtaggcgaggggttcggagtgtattttcaggttggaatgtgaaggttcctggcttccatgtgacttgtaagtgtgccttgttttttatttaaactatgtctgtagttgac

SEQ ID NO: 139129 - DNA, 875 bp, Homo Sapiens
agtactataacggtcctttgttaagcgaggcctggggtggcgaattggcacgaggagccggtgctgagagaaccgtggctggcaaagatgattcaggcgattctggttttcaacaaccatgggaagccacggctagtccgcttctaccagcgtttcccagaagaaattcaacagcagattgttcgagagactttccatctagtcctcaagcgggatgacaacatctgtaacttcttggagggtggaagtttgattggtggctctgactacaaactgatctaccggcactatgctaccctctactttgtattttgtgtggattcctcagagagtgaacttggaatcttggacctcatccaggtttttgtggaaactctggataagtgtttcgaaaatgtgtgtgaattggatttgatcttccatatggataaggtgcactacatcctccaggaggtggtgatgggtgggatggtgttggaaacaaacatgaatgaaatcgtggctcagattgaggctcaaaacaggctggagaaatccgagggtggcctttcagcagcccctgcgcgggctgtgtctgctgtgaaaaacatcaacctgccagagattcctcggaacatcaacattggcgatctcaacatcaaagttcccaacctgtcccagttgtctgaggatcaagtatggcctgaaatagagtccttaagacaagcaaagacaaagcgaggcaagcacgtctggaaacagaacccattttgagccttagaagagtcaagcctcaggacctggaaaacttgtgtctggggaagactgttgggctggaatacggaagggcttcctattgacctggtcgggtgccccagttccacagtgcgcatgcc

SEQ ID NO: 139130 - DNA, 955 bp, Homo Sapiens
ccatgtgagagggtaaagggtgcaaatgacttggggcatgttgactcccctacggaggaagggcaggggcccttcacatctgcagtggcggtatgcatcagagaaacggcatgactgccacatgtgagaactgggtgcacccgagcagtgtcaatagaaatcccttccctattccatgccaaccagtcttccccagacacaaagtttccaggtcctgaggcttgactcttctaaggctcaaaatgggttctgtttccagacgtgcttgccttgcttgtctttgcttgtcttaaggactctatttcaggccaatacttgatcctcagacaaactgggacaggttgggaactttgatgttgagatcgccaatgttgatgttccgaggaatctctggcaggttgatgtttttcacagcagacacagcccgcgcaggggctgctgaaaggccaccctcggatttctccagcctgttttgagcctcaatctgagccacgatttcattcatgtttgtttccaacaccatcccacccatcaccacctcctggaggatgtagtgcaccttatccatatggaagatcaaatccaattcacacacattttcgaaacacttatccagagtttccacaaaaacctggatgaggtccaagattccaagttcactctctgaggaatccacacaaaatacaaagtagagggtagcatagtgccggtagatcagtttgtagtcagagccaccaatcaaacttccaccctccaagaagttacagatgttgtcatcccgcttgaggactagatggaaagtctctcgaacaatctgctgttgaatttcttctgggaaacgctggtagaagcggactagccgtggcttcccatggttgttgaaaaccagaatcgcctgaatcatctttgccagcccctcgtgccgaattcgccacccaggcctcgctacctagga

SEQ ID NO: 139131 - DNA, 1290 bp, Homo Sapiens
ccccgttaaaaaaccctggagtggaattgggcggcccggggggaagagggttcttttttgccaaaaggatagatgggtttatccaccccttttttggcgggggttctggttttccagggatcaggaagcagtgaagccttcagaccctgcagggggggtcctaaatcgaagccttgggctggggactcttctaggaagcatctgaaaggatttatttatggcgcccgaggggaaaatattaagtgaaactccaaaatttttctccattaaccaacattttcaggaattgaagttagggtgcttatttctataacactattcctaagagcttagctctctgccctgcaaagggaaatgcattttagttcggttcctttccatttccatcctcgctgttgttgctgatggaaaagtgctcaactgctcagcatgttcagtcggagctctcttaccagtaaagctcagaggggagtctggacaaggcacatcagtgctcctacaggaagtgcctccttgtttcttcacttgtactcctctctcaaaggaatgatctgcagagcaagcagctctgccaccttggaaaatgatgcacaccagcttctgggacttcacccaggctacggagagatgctggagagctgctgcttgtgaattacaagaaagccttcaatttggtggtccacaagaaagaatgtgatatggatcccctcatttatgtgttaaaaatataatgcatctcaaagtcagacactagagctcagattccaccctggcccttggaaaacatctgtgatgcagtttccaccccctctgttcatcacctctttagaatattctggctctttgcatcttaaggtcttatgtttgtataacttaaaacattcactgtgtgtgcatgtgtgcaagcatgtgtacacatgtcagaggtcccagacatgtcaacttttctccttatacacctaaggggacagtcaactggttctgaatctcaggaggagaggactaaccacatgcatggttaccctaaatggaaagcaaccactttactgtcccctaagcttcaatttggtctaattactcttgttcctacagttttacaaaagtatcttaacagcattaaaaatcaatgtgcatatatatactctctctagagtagatattattatccatatcaaatggttacttggctttataaactccatggctttatgtttaaagtccaaacatttcaaatggttaaggcccaaaaatgaaacgttttgcttctcctactccttttctacatgattt

SEQ ID NO: 139132 - DNA, 2882 bp, Homo Sapiens
  misc_feature (228)..(228): n is a, c, g, or t
  misc_feature (454)..(454): n is a, c, g, or t
  misc_feature (1047)..(1077): n is a, c, g, or t
  misc_feature (2742)..(2813): n is a, c, g, or t
aaagacgtgccgcgccagactgcgacgagtaaaaatgtgcggcgagtaagacgtacgatgcgtgatggatcatcgaatagagagcggccttcaggcggctgggaaggcgcgggctcgtgcgggtaagagggtcgatatgtaccgccattaccagagcgctagaactgtgccacattaatttgcacttctgaatgttgaccgccaaagagacggggcgagacagatctnctgtggtgggcgcgctaattatgtattgacgtcggcaacaggagcagtattgccgcgaccggtatgatgcccgcgcaggggagggggcgcgcgacacgcaactaatgtgggcagagcttattgcgcaactgcgccggggagcgctcttacagagaaagagtgggggctcccttgggcgcgtttttggaaccccactccgcgagggggtggttagggccatggtacnttctgaagttctccccccgtagggatccgcgcccagcgtcacaaagctcgccgaggggagaaatgagcagaaaagcatttttggccacaacaggaaaaggctgacccccaggggtacagcttaatcatgaggctgggcgccagttggcccccatgggagaaaaatggtttaaaatatttgagggaaaagtaaaacaaagaagggggtttaataaatggccaagaagggggaagtaggagagggtcattcagtgagatgagtgcctcaggagggcctaagacccaccactaaatgggcggagggagaaccctgggggctgggggtccagtcttcctgatcgcagtgccagtgcccggtcactcctctctgcctcccggaacccagctaatagagacaggccacagagggcctgtttcagaatctgggtgggcttcccaggcactttggcaggctcagtatgggcagggcagacccaagaagggagaaggttcctaagccccagcagggccgtctccctctgcagccctgcctgcccctggcccctcaaatgcacgatcccaggcacagatctgcgcactcatacacacgtgtgnnnnnnnnnnnnnnnnnnnnnnnnnnnnnnntcactcctatttgtctggcacactggagatgtctgagggctccgagagaggaagtgcgtggcatcctcctccaaggtggccttgagctcccagaacgcgtgagccagcggggacaaccccaggctgttgtggagaaacagggagggcagatgggacaacacagggacaatccctatgacagtttccacaaataccctctaacaaaccacaagcctttgcagtatccagagaggaaggcgtctggtggagaggagtggggcaaggacaacaaaagaggtttcgtaaaaactctaagtcaaattactgataaaattgcaaaatgagcacaggttcaagagcaccttgctcacttctctccacagcctcccaacctcccagcctctcccactctggggtggccagaaccaaggcagaattcagtcactgatgcagttccaggctccatgcagctgaggaggagaggaggcagatgtggacagttctgtctcttcgtttaaaaaatatattcctgtagagagttattgcttgtcctcccgtgggcaggagggcgcggtggctcagtgggccagagccgcagcctccagggcccgagctttcttccgcctcttcagcagcagagggttggatgcatcttcaatcttttttatcttgatctgctcgtagtcaacgcgcattgtggccaaggcactggtcatctcctccttgacatcctcccaccgctccttgtcctccttcaggacccggctggtgtgcagtggggtttgagggacctttgttgattgcatgatccaagggtggttcataaactcggtgatggtcattctctgggtgggctctgttttcagcagattccgaatgagcatcttcacttcctctgatacttctgaccattctgggttgggaaattcatactggcccattcggatgcgagtcttcatgcccggagagatggcaaggccgtggttggagtagaaggggggatacccacacagcaggatgtacatgatgacacccagggaccacatgtcacaggacttgtcatacttctctggacccagcacttctggagccacatagtacggtgtataacaaggagtggtcaaagagttgtggctggtggtttccttggcaaagccaaagtcagtgagtttcaggatggcgttgggccttttggaggtgtataagagattctcaggcttgacatcccgatgggcaatgttgattgaatgcagatactggatggcctcaccgatgctcttcatgatttcggatgcttctctttctgtgaatgcctggtctcctcgatcctggattcggctaaagagttctccaccgtccaaacattccatgacaatcagcaggcacttcctccctgcgtacagattctcgtacacatccacgatccgtacgatgtgcgggcactgggaggcccgccagtgcagctccacctccctgcgggccttggggcagtcctgaagcattttgagggcgaatttctcctgggtcctcttgttgaagatctgcaaaactttgccgttgatgcccagccccaggacctggctggtgaccttgtagtcatcgatgatggcgttcttcttgatctgcaggccggacttgacgtggaactgcgggaactgctgcggggtcgtcgtcgtcggctgcgcnnnnnnnnnnnnnnnnnnnnnnnnnnnnnnnnnnnnnnnnnnnnnnnnnnnnnnnnnnnnnnnnnnnnnnnnctggccctgggagttggacagcatggtgcccggggacgccggggcacaggcgggggtgcccgcggccgc

SEQ ID NO: 139133 - DNA, 489 bp, Homo Sapiens
  misc_feature (160)..(189): n is a, c, g, or t
cacttgagaggccctgcacagccccacagccttggccctgcctccagccctccacacaggcaaaatgaagcaggacgcaccccgcaggcgtgggcataggtgctaacccacagttacaccacgcacatgagatggaggcccatacatgtgtctgcgtgtnnnnnnnnnnnnnnnnnnnnnnnnnnnnnngggctcttccccttgtcctgaaagcctgggttcttaccttcctctgatacttctggccattctgggttgggaaattcatactggcccattcggatgcgagtcttcatgcccggagagatggcaaggccgtggttggagtagaaggggggatacccacacagcagggtccagatgcagaacctggtagcccgggcctccaagtacgacttcttcatccaaaaactgaagaccggcgagaatctgcggccccagaacgggagcacctacaagaagccatccaagtacaacctgcggtggggt

SEQ ID NO: 139134 - DNA, 1388 bp, Homo Sapiens
ttaggggggagagagtatgaagtcgacggcgcgccgaattcggcacgaggagattacatgagctaatggatgtgaaaacatcttaaaaactctcaaatacttttcaactttggaggattattatgattttcattctgttcagcggctatactcagactttactctaaaagtcaaatcttctgacattctttgaagtgaagcattctatgaatgtgagctgaagaaatgaatgaaatgaaataatgcagcatctagtgctttttgcatggcccaaaggggctctgtgctgctccactacagaggaaacttcaagaaatgctggtttgctacagtgttttagcttgtgagattctctgggaccttccctgctccatcatggggtcacctctaggtcattttacctgggacaaatacctaaaagaaacatgttcagtcccagcgcctgtccattgcttcaagcagtcctacacacctccaagcaacgagttcaagatcagtatgaaattggaagcacaggaccccaggaacaccacatccacctgtattgccacagtagttggactgacaggtgcccgccttcgcctgcgccttgatgggagcgacaacaaaaatgacttctggcggctggttgactcagctgaaatccagcctattgggaactgtgaaaagaatgggggtatgctacagccacctcttggatttcggctgaatgcgtcttcttggcccatgttccttttgaagacgctaaatggagcagagatggctcccatcaggattttccacaaggagccaccatcgccttcccacaacttcttcaaaatgggaatgaagctagaagctgtggacaggaagaaccctcatttcatttgcccagccactattggggaggttcggggctcagaggtgcttgtcacttttgatgggtggcgaggggcctttgactactggtgccgcttcgactcccgagacatcttccctgtgggctggtgttccttgactgggaagacaacctgcagcctcctggcaccaaagaggaaacctcggactttgctgaacccaccacctgcctcaccaacaaccagcactcctgaaccggataccagcactgtaccccaggatgctgccaccatccccagctcagccatgcaggccccaacagtttgtatctacttgaacaagaatggcagcacaggcccccacttagataagaagaaggtccagcaactccctgaccattttggaccagcccgtgcctctgtggtgttgcagcaagctgtccaggcctgtatcgactgtgcttatcaccagaaaaccgtcttcagcttcctcaagcaaggccatggtggtgaggttatctcagccgtgtttgaccgggaacagcataccct

SEQ ID NO: 139135 - DNA, 376 bp, Homo Sapiens
ttttgccattcttttgtgatattcacaaactccttggaagaaaggggcttcccatgttgtagatgaggagactaacatgctccgagaagcactctgctgagtggcagagccagattatacccgattctcatctccatgcccaagctcaccgctcatcaaccccagcttccttgaagtgtttctctcaggtcttcctcatatgcagaatgttcctcatgtgcaaactggagatggtgacaccaacctggtctggagagccgcgatgcctctcgactgagtggccgggacccctcctcatggacagtcgaggatgtgatgcagtttgtccgggaagctgatcctcagcttggaccccacgctgaccatgtgcctcctg

SEQ ID NO: 139136 - DNA, 1232 bp, Homo Sapiens
tttggtggccccacttggggttgtttttagggggttgccttttttctggggttcaaggaactttgcccctggtttttcagccggggtcaaaaggtggttagggaggaaccttgaaagtgccaggcccccaagttttcaagggcccaatgtaacttccatcattcatgttcattgcgcagccagcagccagggcccttgccttcgatcttggtgtttgcgaaacaggtcagcgtggggtccaagctgaggatcagcttcccggacaaaactgcatcacatcctcgactgtccatgaggaggggtcccggccactcagtcgagaggcatcgcggctctccaggtatcggtccgaccccctggagcatagcctgcgcacagctgaggcagtgcttggtgggaggccacaggatgaaagcaagggccggtgcctttgggaggtgctgacaaggttggtgggatttgaggcagagtccattgagtctgagtgtggttccaaggagcgggccagactattccccaggacaaaggtttcacctggtaggtacctgtcgtggctgtggctgtactctatggcagtgagtgacaagtgagtctgtgtaaagggctggttgccaaacagattgtcactacgaaggttgtggcagagtttctccaggaagcggaggacgtaggtgatgctgttgactgctgggaggttgagggtatgctgttcccggtcaaacacggctgagataacctcaccaccatggccttgcttgaggaagctgaagacggttttctggtgataagcacagtcgatacaggcctggacagcctgctgcaacaccacagaggcacgggctggtccaaaatggtcagggagttgctggaccttcttcttatctaagtgggggcctgtgctgccattcttgttcaagtagatacaaactgttggggcctgcatggctgagctggggatggtggcagcatcctggggtacagtgctggtatccggttcaggagtgctggttgttggtgaggcaggtggtgggttcagcaaagtccgaggtttcctcacttaggctgcatagtcaatggactaaaaaccggtctaggggttaagaagtttgggatttatccctggatccaccaataccttgctctgacttctgacaagtcagtttctttgtatgctaatttctccatctgagggcgcggcgggggcgcggggcggctcactcccttcccgccgc

SEQ ID NO: 139137 - DNA, 839 bp, Homo Sapiens
  misc_feature (764)..(798): n is a, c, g, or t
tccaaggtccccacccaggtgattcattccatcaaactcacagtatctccaaatctacatgtcgaacttcaggatttcgttttttcagttccttctcaagtctatctacttcagctcctaaagtatcaataatattttctccatgtttaagcataaaggtctctagttcttcaggagttttcacttcttgaatttcttgtaacatttggtcaaaatcttgtttttccaaatatgatcttgtaacaactcgcccatcaaaatctacttctgccttaaatcttactttacctaatcccagatctgtggctttaacatcatgaattgcccttactgatgggtcattctccaggagttcagtgagccgttgtacttgttctggctggatggaccgccctaagagtgcttctgtgttagtgtagatgaggaatgctgagaccatgcctaataaggtgcccacacccaaagaacctaggctgtcatacagtggattgcctgttatagaagtaaggcccatgcaagtggctgctattataactcctaagactgcagcagtatcctccaatactatcacatttgtactaggatcacgactttccattacatacttgtaaaatgacattcctttagcccgagcattcctacgaagttcatttacagcaacaagaagtgttgctccttcagatactaatgatcctgctaaaatacatatgccccccggccgtaatggccgaattcccgggcatatgtccggtaccgtcgactgnnnnnnnnnnnnnnnnnnnnnnnnnnnnnnnnnnncgggccgcttcctcgctcactgactgcgctgcgctcgtcgt

SEQ ID NO: 139138 - DNA, 798 bp, Homo Sapiens
tcttaattgctcctggtggatcaaaggggctcttttccttgacctaccacaaccaggggatgagaagcacacagtaagcataaaactggtcatcccttggagagatatgtgcctgctgtggatctggggacacatctggtggaagtacgtttgttgctgagcagctttcccagaaatcagaagccgttacatacacgctgtcacatacacacaaggggaggggatgattttccactgggggtagcaagccttcatgtgtcctcttcttcactggcaccactgggtccttcctcatcgccctctgcctttggctcagctgattcattagaggtatcaagttgttccttggcttgggccatctgagtcatcaacctatccatgtgggattggatgtctgccagtatctcagtcacatgagctgtggccattgcctcttggatgtccactagatgaagggccttctgctcctcatcagcaatcactttctgaactttcttaaattcctgctgtataaacatcttcatttggtcccgagttactttagggtctgagctcttgaacttcaacctttccaccaattcgatcatagcggccttcagtccacctgagtctttgcttcttaattcttcaaaggcttcgtctagggtggagagttggtggccctggtgagccccaatgactggacacaggacacagatgagctgcctatcttcctggcaataggtactcaaatcaagcccatggtccggacacttcctcttgccctcgtcggaatcgccacccaggcctcgctaccta

SEQ ID NO: 139139 - DNA, 791 bp, Homo Sapiens
aatcttacatttaagaaaggggaaattctccttgtaattgaaaaaaaacctgatggttggtggatagctaaggatgccaaaggaaatgaaggtcttgttcccagaacctacctagagccttatagtgaagaagaagaaggccaagaatcaagtgaagagggcagtgaagaagatgtagaggcggtggatgaaacagcagatggagcagaagttaagcaaagaactgatccccactggagtgctgttcagaaagcgatttcagagcagataaacactgttgatgtgttaactacgatgggagctattcctgcagggttcaggccttccacgctctcacagcttctggaggaagggaatcaatttcgagcaaattacttcttacaaccagagctcatgccttcacaactggccttcagagatctgatgtgggatgctacagaaggcactattaggtcgagaccaagtcgtatttcattgattctgacattatggagctgtaaaatgattcctcttccaggaatgagcatacaggttctcagcagacatgtacgcctctgtctatttgatggtaataaggtaaggttactgagaagtaaatcaattcatactaggattatggagaaacattcccttagattcttttccattcaactcctccccaattcccaagagagtattttttacctagtaccaaagaaaaatttgaatgactctttgaaaaattcattttttaaatgagatacaggttaaacagtacttagatggaaatttatagttttaattgtgtatat

SEQ ID NO: 139140 - DNA, 1596 bp, Homo Sapiens
  misc_feature (174)..(213): n is a, c, g, or t
  misc_feature (262)..(262): n is a, c, g, or t
  misc_feature (392)..(392): n is a, c, g, or t
  misc_feature (397)..(397): n is a, c, g, or t
  misc_feature (424)..(424): n is a, c, g, or t
  misc_feature (441)..(453): n is a, c, g, or t
  misc_feature (460)..(461): n is a, c, g, or t
  misc_feature (464)..(465): n is a, c, g, or t
  misc_feature (467)..(478): n is a, c, g, or t
  misc_feature (483)..(485): n is a, c, g, or t
  misc_feature (487)..(489): n is a, c, g, or t
  misc_feature (492)..(566): n is a, c, g, or t
  misc_feature (568)..(570): n is a, c, g, or t
  misc_feature (572)..(577): n is a, c, g, or t
  misc_feature (579)..(581): n is a, c, g, or t
  misc_feature (583)..(599): n is a, c, g, or t
  misc_feature (601)..(609): n is a, c, g, or t
  misc_feature (611)..(630): n is a, c, g, or t
gtttgtgaagcgatatgttttttgtgcaaagacaatattgttgtgtggtatggggttggaagtgagtatataaaagagagggttggggggggagaaataggggtggatgtttataggtaaattgagagggtgggaggtaaaagaggtgggggggttggagaaaggtaaatggannnnnnnnnnnnnnnnnnnnnnnnnnnnnnnnnnnnnnnnttgtatgtttgtggatatgagtagggttatgagaggggagggtgtggantttaagtgtaaagggggtgggtagagggatggtagtgaagtgaaaggtaatatgtggggagaaaggttggggattattggggaagagggtttgtagttaagaaaaaatagttggggaggtgaggtgtgangggtntgtttggggttttgtggggttttgggntgtgttttgggggttgnnnnnnnnnnnnngggtggnnttnntnnnnnnnnnnnngggannngnnntgnnnnnnnnnnnnnnnnnnnnnnnnnnnnnnnnnnnnnnnnnnnnnnnnnnnnnnnnnnnnnnnnnnnnnnnnnnntnnngnnnnnngnnncnnnnnnnnnnnnnnnnntnnnnnnnnnannnnnnnnnnnnnnnnnnnnacaaatgtacactttttggaaactaaactggttttgaaaccccttcttccaaaaagaagggcagaagagaaagatgaagagaggaaagaggatcgcaggtgcccaatccccgctccccccacaaggtcacgtgccgaatgttcaatgggtgggccaaggcagtctgtagaggagaccgcctggtgctgctgctattgccccaggggctccagcaagattcccagctccatggtaatactgaatgcgtgcagagtggccaatgaactgcgcggttaaaaaaacaaaaggcaaacacaaatctaaagacatggataaagcccaagagagcccaggcccacactgggtgggccctgggggaggggaggctggtgggagatggtgtgcagacaaaggaggtctatacagcaaatggtttatattacagatgactggcagtttagagtctcttcccagttcaacagctgctccagcccaaagaggctaaatcaaaggaaaggaggaaaggtgggacgctgcgatggggcatgcagggtcagaagcagcaggctgggtgtgctcaaataagccctcgtcgttttttgtagtcttccaagttcagagatctccttggagccccatccttggctggcggagccttggaggtgatggctaaagcctttgactctgagctgggaacttgtaagtcaatcttcacatcaaaatcgtgtactttgaacagatcttctgagaggtcactggctgacttagaattcaaatctttatctttgccttgacccttgctcatttcctttggagcatctggtaacactccagaaccgtattttgcattcagctgggccaagatggcagcttgaacagctgggtctctggaattagaaacgatggtaggcttgcactgccgccgagtaaagggatccatctgttggttgtgtgtcaatgcctgcgtggcgcggagttataaacctc

SEQ ID NO: 139141 - DNA, 765 bp, Homo Sapiens
ttttatttataagaacagtggagaaagttatcaagcaccagatcctggtaatggctcaatacaaaggccttatcaggacacagttgcagagaacaaagatgcattggaaaaaactcaaacatatttaaaagtacattctaatttggtaattccagatgtagaattagaaacatatattccgtattcaacccccacactgacaccaacagatacattccaaacagttgaaacgctgacatgtttgtctttggaaagaaacaggctaactgattattatgaaccattactcaagaacaattccactgcttattcaacaaggggaaatagaatagaaatttcttacgaaaatttacaggtcacaaatattactagaaagggaagcatgttaccagtgagctgtaagttaccgaatatgggtacttcccagagttacctttcctcatctatgccagctggttgtgttttgccagtaggtggtaattttgagatcttgttacattactatcttctcaattatgccaaaaaatgccatcaatcagaagaaaccatggttagtatgataatagctaatgcacttttaggcattcccaaagtcctttataaatctaaaacaggaaagtacagctttccacatacatatataagagctgtccatgcactgcaaaccaatcaacccttggtaagcagtcagacaggtttggaatcagtaatgggtaaataccagctactaacttcagttcttcagtgtttgacaaaaatattaac

SEQ ID NO: 139142 - DNA, 757 bp, Homo Sapiens
ggtccaccggcagggccctgttgctgcagaatgatgggcctgctggtggcggttcttatccagctccgtccgcagcttcgcgttttctgccagcagcaccgagtaaagttcaaccggcaggttctctcccatagaacccaagggaaggccagaggctgagagcatagggaagcccgtgtagggctttccctgctgcctgttcagaggagggggcttgctcctgtcctgcagcctgtcctccagcacccgctccatcttctcgatcaccttctcttggtgccgcacagtctcctccagcgccttcatcgttctgcagcttgccctggtactgcttcagcagagcggcctgtggctgctgggcctgatacagaaggagcagctccttctctcgatcattctttcgaatcagctcattctgcaaatgctgcaccctgtccctcagtttcttcatatccagctcactcagcagcagtttctgcttcatggacaccgtgttctgggcctcattggctttgccctgcccctcgttcctcctcctgctgggccaggcggctcctcagtatgcggttctctccttccaggatgctggcctgtctccgcagagacaggatgtcctctgccatcttctgcatggcccgccggtagttgttcatctcagagaagctgtcaatgaggcctggggcacgccttgggggctggaggggatgggggccctggctcccccatctttactgctagcagtcctgttccccaggat

SEQ ID NO: 139143 - DNA, 883 bp, Homo Sapiens
cccatacagactgggcattagtggggctaggattctccattagtggagtgagggctttgatgtgagttgtctagaagagcaagttcatggtcagataattccaagagacagttgttttcccaggaaaaagaaaagcttcctcctattcagcagagtgaatttaaatgtccaaacaaagtgtggtgtcatcgctcagtctgcaaggacgttctgttaatcccgtggacgttttagtggatcttccgtttgtcatccagatggcaaacgttggaagctgcttttggggaccaataattggagctttcaaagagcatttcccccttggcctggcgcctgtgcatcagtggtaatagatgctgaaggcatggagaatgtagagcagcgtggcgatgaaggcgaagaacgaggctgccgaattaatgtagtaaattcttgggtccagcagtttctcagaaacaatcgtggcatgtacttgtaggacggcagcgctcatgtacaggatgccagtggtcccgtggtacaggctgtccagaactctccaggattcaaatcttttgtaaaatccaaacaagtaagacaacaggaacatcaaggagatgagaaacgaggtgagcgagacatacatcacccatccttgcagcaaggggtatactatgtgggtggcggctaccatggtccagaccaagaacccaaatatcagctcgggcaggaagaaggcgaaagggatggtgaggaacagcgcgacccccgagggcacgtcggacggggcgtagctggtggcgggcgggtcgggcgaggccatgctgtcagcccctgccgggtgctccgcggcccccggccgtaatggccgaattcccgggcatatgtccggtaccgtcgactg

SEQ ID NO: 139144 - DNA, 777 bp, Homo Sapiens
  misc_feature (95)..(123): n is a, c, g, or t
aggggtttggcgcaggaccctgtcgcgttgttgcgcttaaatttgtccaaaatttgtccaatggaatttaggtggtacccacttcaatttttttnnnnnnnnnnnnnnnnnnnnnnnnnnnnngccggctcccaaaagatagtcttatcgcccttctttaaaaaaaggaaactgttccttttaactttacacccaccccacaccccaatttcaaaacatcatttaattgtcttggtcatggacatttccaagatgagattttatatttcgctcccacagcttctggttatcagaaaacccatgctttcctttattgaaggagtttggtccagctgatgttggtgtatcccttccaatattcttcatcctcatctttgcttctggaggcatttcctctggttcactatcttcatcttcattaaaagctgctgctactgaaagagtttttggagcaagagttggaacagtttctttaggcttacttgatccaagtttgatggatatggctgatgctttctttgtcgtctgactacctatggcaaatccaaacttggagatctttgtaggctttgttgggaggtcggcagcttcttcttcagctgatcgcttctcagcgctgcgactggaactttcccctccattactggaagaaacagtcttagttttcacaggtttttctgcttcttcttcaggtcctccggcggctccagctcgctgcgacttttcaggcttctcgtctcccgccttcccgtccgccattttccccgccgcggcccc

SEQ ID NO: 139145 - DNA, 815 bp, Homo Sapiens
  misc_feature (189)..(215): n is a, c, g, or t
  misc_feature (229)..(229): n is a, c, g, or t
  misc_feature (278)..(278): n is a, c, g, or t
gtaccccaatttcggggattttcgttttaattacttcggggaccccttgtgggaacacttaattccccatggaaaccttcccaaaatttaggccaaaggtccttgaaaattcggtaatataaaaccataaaattcccttctaattttcaaacttcttcatttattaggtgtacccactcaattcttttnnnnnnnnnnnnnnnnnnnnnnnnnnngcgggctccaaagnatagtctattaccatttcttaaaaaaagggaaactgttccttttaactntacaccccacccccacaccccaatttcaaaacatcatttaattgtcttggtcatggacatttccaagatgagattttatatttcgctcccacagcttctggttatcagaaaacccatgctttcctttattgaaggagtttggtccagctgatgttggtgtatcccttccaatattcttcatcctcatctttgcttctggaggcatttcctctggttcactatcttcatcttcattaaaagctgctgctactgaaagagtttttggagcaagagttggaacagtttctttaggcttacttgatccaagtttgatggatatggctgatgctttctttgtcgtctgactacctatggcaaatccaaacttggagatctttgtaggctttgttgggaggtcggcagcttcttcttcagctgatcgcttctcagcgctgcgactggaactttcccctccattactccggcggctccagctcgctgcgacttttcaggcttctcgtctcccgccttcccgtccgccattttccccgccgcccc

SEQ ID NO: 139146 - DNA, 3709 bp, Homo Sapiens
  misc_feature (62)..(62): n is a, c, g, or t
  misc_feature (232)..(232): n is a, c, g, or t
cccccccgcggggttctccacatcacgccccggggtggggcccaaccctaaaaaccttttgncagcccaggttaagttcggactccaagttccttttcagatttttagggtccagcctccagaataaggctttcctagttcccaaatccaggagcccctgtccccttgctggggtgacaaccggagcccagcccccaagggcccagtcctattcctagtgggtgagactggntggggaggatgttgcccagagctgacccctccccaaggacatccctcgggggctacctttctccttcctgctccccccgggccttctggaaaacctgctcagaagttcagcagagctggggcagcgtgtggcctgtggggcaggccaggcactggagggggacgacagcctaactcctatgagagcagagggaggggtggtgccacagcgaggaggggcggtggtttgggcagcgctgaggcactattctttagttgagaagcaaggggcagtcatgggtgtggagagggcagtggcccaagcaaccctaggcagcatctacgagaagttcttgaagacgtccaggtcgaaggccgtgtccaggaggcgctgcagctccgtcaggtgggtcttcttgttgccggtggctggagcagccgctgggtcccggccggcataccagacgggcttggcgcggctgatggtggtccgaagtcttggcttcacgtagtcatagtagccttggttcttgtgctcctcctggcaccaggccagctcagcattggggtacttctgcacctccttcagcaggaggtcaaaggggaatggcgacagctgctcaatccttgtgatggccacctgccccaccatgtcgcgtgctttgcgctcccgggtgaggtcataatacactttgccggtgcagaagagaagccttttgacattttctgggttctgagctgcagggccatcttctgggatcacccgctggaagtgggttcctggaagcatctcatcaaagctggatctggcctcggggtggcgcaacagggatttgggggtgaagataattaacggcttccggaatggcagcaggatctggcgtcgtagcacgtggaagaagttgccaggagtggagcagttgacaacaacccaattgcagtcatatagctgattgatgtcgaagttggcttctttaaggtctggcaggacatctgggtcatcgttgcacatctgcaagaaccgctctgggcgggcggaggaatgttctggacccatgccctccatgccatggggcagcagcaacacgatgccattctgccgcacccacttggcttgtcccgggcagatgaactggtcgatgatacactgggccgtgttgtggaagtcaccaaattgggcttcccagaggaccagggcattaggactggccatggcgaagcccagctcaaagcccagcacgccgtactcagacagtgagctgttgcacacagtatagggggcctgattgggccagagatggttcatggggatgcaggttctcttgtccacattctggtcatggagcacatggtggcggtggctgaatgtgccccgctccacgtcctggccgctcagccgaatgtggatgccctccttcaggagcgagccaaacgccatgtactccgctagagcccagtccacagtccggttcttcaccatttccccacgagtcttcaagatccggctcagccctccatgaatagtaaagttttccacaggcacagaactagccacattcccgatgtgtgtcagaatatcctccgtcagacccgtggaggggcaggacatgctcctgggctgcccgtccagggtgaagaagccaggccagggagagtccagccagtgcttaatgtgcaagatcttctcatctttagatctggcaaaagcttcctcacagatcttatcatacttggaaatttcctcctcatactcaggctggttgaccacaccctgcgacaccagcagctcagcgtacttctgtaacacaggcttctgcttgcggatctgcttgtacatgagcggctgcgtgaacatgggctcatccatctcgttgtggccgttgcgccggtaacacaccaaatcgacaaccacgtccttgtggaaggtgctcctccactcggccgccactttgcacacgtacatgacagcctcggggtcatctgagttcacgtggaaaatgggggcattcaccacttcgggcccacgtcagtggggtagggggaggagcgggccatccgagggtcggttgtgaaagccgatctggttgttgacgaccacgtgcacggtgccatgagttgtgtaggatggcaggtcgctgaggtggaaggtctcgtacacaatgccctggccagcaaatgcagcatccccatgcaacaggatggacatgacctttttcccttcagtgtcgccacagtaaaactgttcggctttggtcttgcccatcaccacggggtcagcggcctcaaggtgggaagggttggccaccaaggacaaggtaatgttcctgtcggtgacacgattgatcctgcggtgatacatgcccaggtggtacttcacatctccggagccctcatcagctgcctccagctttgaatcgaattgacagaagatctgttccagctccttcctgatgacatttgcaagcacgttcagccgccctctgtgtggcatgcccatgatcacgtagtccacgccattctcactagacttgtcaatgatggtcttgagggcagggatcagtacctcgcagccttctagaccaaagcgcttctcagaggaccacttccgctgtaggaactcctcaaacctggtggaccgcacaagcctggccagcagggtccgtttctcctcatttgtgaactgcatgatcccaggggtctcaaacttctgccggatccactggcactgctccaggtcattgatgaacatggactccaccccaatatgctggcagtaggccatctccagccgacggatgatctcccgcagaggaagtgctgattcctgtcccccgatgaaagtggtggtgggcaagtggaagaccttgtcgaggtcagactcatccaggccatagaacccaagtttgtctgtggatgagataatgtcagcgggcacggaggagtccagatcagcatccaaaatccccagggggtccagctgtgctacatggtgccctcgtatctgatatgccctgatgagcgactgcactgccaggtggtcctccacgagcttgtccacgttgggctgtgcttctaccagggactgtgcatgggccacagcagccagggagcctcggctcaggggaaggggactctggtaggcagtgcccggtggggctccggcattcgtgttgcgaaaaaaaatgtcccatgacttatgtacacttttggggttttccagccaagcacagtacatctcctccacatagttcgaactagtcccactgagaaagggctcagcagcaacaggtgcagaatagcaccgaatctgttgaaatgtcctagctgctgctggtctgttttgtgaaaatgtcttaacagtctgggaagccgtcaatggcctcaacttagcagcacaagtccttaaatgaaacatttttgtcctgaagtttttcacaactgcctgtctccggctcagcctcgtgccgattaacacccaggcctcgtacctagctaagtt

SEQ ID NO: 139147 - DNA, 975 bp, Homo Sapiens
tcaagcttggcccagcagggtccgtttttccttcatttggtaaactgcatgatccccaggggtttcaaatttctgccgggatcccactggcattgctccaggttcattgatgaacatgaactccccccccaatatgctggcagtaggccatctccagccgacggatgatctcccgcagaggaagtgctgattcctgtcccccgatgaaagtggtggtgggcaagtggaagaccttgtcgaggtcagactcatccaggccatagaacccaagtttgtctgtggatgagataatgtcagcgggcacggaggagtccagatcagcatccaaaatccccagggggtccagctgtgctacatggtgccctcgtatctgatatgccctgatgagcgactgcactgccaggtggtcctccacgagcttgtccacgttgggctgtgcttctaccagggactgtgcatgggccacagcagccagggagcctcggctcaggggaaggggactctggtaggcagtgcccggtggggctccggcattcgtgttgcgaaaaaaaatgtcccatgacttatgtacacttttggggttttccagccaagcacagtacatctcctccacatagttcgaactagtcccactgagaaagggctcagcagcaacaggtgcagaatagcaccgaatctgttgaaatgtcctagctgctgctggtctgttttgtgaaaatgtcttaacagtctgggaagccgtcaatggcctcaacttagcagcacaagtccttaaatgaaacatttttgtcctgaagtttttcacaactgcatttcatccaaggtcataggctactaacagcagagtcaggatccaagcggaaagttcacaaggacgctgcctgtctccggctcagctccacccgaatgaggcgccgacaccccactccggggctccaaaccctcgtgccgaattcgccacccaggcctcgctac

SEQ ID NO: 139148 - DNA, 1002 bp, Homo Sapiens
  misc_feature (17)..(17): n is a, c, g, or t
  misc_feature (51)..(51): n is a, c, g, or t
  misc_feature (68)..(68): n is a, c, g, or t
ccaggggccccaggttnccaagccaattggggggtaacttttttgccaacntcctttcagcacagganagttcaaaagggggaatgggcgaccagctgctcaaaatcctttgtgatggcccacctgccccccccatgtccgcgtgctttgcgctcccggggtgaggtcataatacactttgcccggtgcagaagagaagccttttgacattttctgggttctgagctgcaggggccatcttctgggatcacccgctggaagtgggttcctggaagcatctcatcaaagctggatctggcctcggggtggcgcaacagggatttgggggtgaagataattaacggcttccggaatggcagcaggatctggcgtcgtagcacgtggaagaagttgccaggagtggagcagttgacaacaacccaattgcagtcatatagctgattgatgtcgaagttggcttctttaaggtctggcaggacatctgggtcatcgttgcacatctgcaagaaccgctctgggcgggcggaggaatgttctggacccatgccctccatgccatggggcagcagcaacacgatgccattctgccgcacccacttggcttgtcccgggcagatgaactggtcgatgatacactgggccgtgttgtggaagtcaccaaattgggcttcccagaggaccagggcattaggactggccatggcgaagcccagctcaaagcccagcacgccgtactcagacagtgagctgttgcacacagtatagggggcctgattgggccagagatggttcatggggatgcaggttctcttgtccacattctggtcatggagcacatggtggcggtggctgaatgtgccccgctccacgtcctggccgctcagccgaatgtggatgccctccttcaggagcgagccaaacgccatgtactccgctagagcccagcctcgtgccgaattcgccacccaggcctcgctaccttggaccgtgtggggcgtggga

SEQ ID NO: 139149 - DNA, 455 bp, Homo Sapiens
  misc_feature (79)..(80): n is a, c, g, or t
ggccccggtgtctgtcccggtcactgttcctagctctcctgtgttcctgttctgatggttccctgtgctgccgatcctnncccgtcctctccggggatgatccttcacgctccctgcttcactttgactgttgagtggtgaggacttcggtttctcttactgcgaggagacttgcttcttctccctgaggccttgtttttctttttgggtggggaccggctaactcctcgggctcggttcccgcggtggcccgagcgggccggctcgctggtcggcggagacgggctaccaccggagtggtccggacggcggtgggcgggaggtgcgacttctgggctgagacgctcctgcttcaccaccacccccgccggcagcaccacgtccccgtcccggtgtcttcgccggctccctcgctcccgttcgctcttcaccgccttcattctgtgattttggct

SEQ ID NO: 139150 - DNA, 1352 bp, Homo Sapiens
  misc_feature (438)..(438): n is a, c, g, or t
ccatggatccgtatcccaggccttgcagtggaaggtgcatgtctttgttttgttgagacaactggatatttgagcctggatatgagtcctgcagattcgtgctgatggtagttaatgagctcagggatgctgctgaaaaggtgcttctcagccaggtaatactggctctgaggtcgtggacacactacataatgacgtatcaccccttgagggtcccctgtggatttagcaaacacagacactgtatatttgccagctttgctggagtctctgacgatgaaaccttcttctttgcccctcttgctttagcagttgcttcagcctgattcggagtcatgtgtttggaataccactcatacatttctatggagtcttctgcttcagtgacatagttactagggatgtagccttcctgcccatttgttatctcgtgctctnccaccatggtaagttgctttcctccaagataaaatattcatcacccttccgcagctgtagatcatttgcattcattggcatgtaatcataaagggccacaacctttttcagctcacttgtggagactggtgcctgctgctggctcaggcggtagtggctttttcaaagatctggtcctcctcaggcgttgggggaagaggcttttttgtcttccggtgagaactcccaggttttaagcttccattcctgttctccaaaatttggcagcccatagcatttttggctgtctgagagcagcagagatactgcccatcgatccagaagcaagggtgatatttctgaaccagatcactgttgtaccggattacgtttttgagctggtgaatccaccgcttccttagttcttcagttggggagaagacgtagagaggcccttcatcatatacaacctggaagggataagggaacctttcaatgattgaaatttgctccatttcactggactcttcacctcttctcggaatctgtctttctggaggaggatttttttcaggaaccactgtttcaacacaagtgatcttctcaacatctattgaacccttcttactgcctcttctcccacgttcaaagtcatactcatagtaggagagtttgtgcacggtcaagagaaacaggcgcttcttgaagtttagaggtgatgttttctttttctgttgggatcgcttcagaaagatgctctccagaatcactgcggccatagcttcttctttctggagttcacctgtgtgctcagtcctgacttaatgcaggtagcttcccagatgcattgagatgccaggacttggaaggtgggactcgatcgcagcagacactggccctggagacatattcttacacgtccagagaggaaggac

SEQ ID NO: 139151 - DNA, 1101 bp, Homo Sapiens
  misc_feature (990)..(1025): n is a, c, g, or t
aatgtcttttaatttcttcaactccatctggtcctgcacctaatctgtttgcaggatttcgcttgaaaagcattcgtaaaagactctgcgcttcaggactcaaaaactgtggcattccaagtttggctttaagaatcatagtcattgtttcttttcgatcttttccttggaaagggagtgtaccagtaagcatttcaaacattaacacaccaaaagaccaccagtcagcactctgagtatgacctcgacgattaactacttctggagccatatactccacagttccacaaaaagaatatgccttcttttcatggtcaatagactctttacttaggccgaaatctgttaacttgatgtgaccttcttcatcacagaagtatattttctggttttaagtctctataaattattcccaggctatgtagatggtctaaagcaagtgcacagttcagccaagtagaatttgacatcttcttctgtgaacatcacctctttggataagcgtgtaaacacatctcctcccctgagaaaatccaaaataagatacaacttcccttcagtttgaaaagcataatgcaacttgacataaaaggatgattaacctctaccaagatatcacgttccatttttgtccgaactcggtctcgaactttcagtgtggccttcttcataccttcatggcataaagctgcctagcatcagagcctgagatttttttaactaagaaaacctttccaatgatccctgccctaatacttttaaaagttcaactgggaaggatctgccttttcatgtccttcctttacatgatgtgtgattgcatttctttgatactgacttcttcctgtatagagcgaacacgaaaagacaaaaatttaaacatggctacgaaaccatgatggtgataaaagaatttctgacggtcaaacttaagctagccccggccgtaatggccgaattcccgggcatatgtccggtaccgtcgactgnnnnnnnnnnnnnnnnnnnnnnnnnnnnnnnnnnnngccgcttcctcgctcactgacatcctgcgctcggtcgttcggctcgcagaactacgccctatagtgatgatcactt

SEQ ID NO: 139152 - DNA, 1093 bp, Homo Sapiens
  misc_feature (30)..(30): n is a, c, g, or t
  misc_feature (62)..(62): n is a, c, g, or t
  misc_feature (65)..(65): n is a, c, g, or t
  misc_feature (68)..(68): n is a, c, g, or t
  misc_feature (585)..(593): n is a, c, g, or t
ccggaaaactttcctcttcttccaggcagncaggggtttcggccccaccatatgttaatccnccngcntgtggcattttctatgggctcaggtacactttcccagctgggtgtttctgtcccaggaacgtttctttcagcctacagctcactctccagcaggaacccagtgcaaagctgggaaacagtcccacattccttacagccagcaacggccctctggaccagggccaatgaaccagggacctcaacaatcacagccaccttcccagcaaccccttacatctttaccagctcagccaacagcacagtctacaagccagctgcaggttcaagctctaactcagcaacaacaatcccctacaaaagctgtgccggctttggggaaaagcccgcctcaccactctggattccagcagtatcaacaggcagatgcctccaaacagctgtggaatccccctcaggttcaaggcccattagggaaaattatgcctgtgaaacagccctactaccttcagacccaagaccccataaaactgtttgagccgtcattgcaacctcctgtaatgcagcagcagcctctagnnnnnnnnntgaagccttttcccatggagccatataaccataatccctcagaagtcaaggtcccagaattctactgggattcttcctacagcatggctgataacagatctgtaatggcacagcaagcaaacatagaccgcaggggcaaacggtcaccaggagtcttccgtccagagcaggatcctgtacccagaatgccgtttgagaaatccttattggagaagccctcagagctcatgtcacattcatcctctttcctgtccctcaccggattctctctcaatcaggaaagatacccaaataatagtatgttcaatgaggtatatgggaaaaacctgacatccagctccaaagcagaactcagtccctcaatggccccccaggaaacatctctgtattccctttttgaagggactccgtggtctccatcacttcctgccagttcagatcattcaacaccagccagccagtctcctcattcctctaacccaagcagcctacccagctct

SEQ ID NO: 139153 - DNA, 783 bp, Homo Sapiens
tggactcctaggatatgtcgtgctcaggcagatcaccacgtccaccttcttttttatgtttgggcaaagcttcaacacgtcctccttgcaggccattttaaacttgtaagaaaaccgaaaatccttcatctgcaccagctggaagtgggtaactccgatggcacacttctcgttcatgtccttctggtgtttgttctgtatcagacactccatcaggtccccagagtctatctggttatctgccacatcgtggcagaagttctgaattatgggctcacaggctctcatcagcaaggcttctatttgaatatcctctgattctaactcagtgaggttgccaactatatctctacactccaccaccaagtcatccagatggtcctgaaggcactccagctcctgtccagtctctgttttctcactgcaccattttcccagatcaatcaggcacttatcctggagggcaggatccagcttgacatccatggcacgctggtgtaggatcctttggacttcagctcggcactcccgtgagagcctccttccctgttcctcagtgcggtaggcgtgtctgtataaacaagagaacacagctccctgaggcataaattcactggtctcattccaaccgtgggtgtggcaaagacgagaagcgtctccctggcacttgcggtacaggacagggtccagcttccaatcccgggcgatgaaattctgcagctctaagagacggagttctcagtcttaaaccatcttcagtgagtacgtatgcatcgtcaggca

SEQ ID NO: 139154 - DNA, 1102 bp, Homo Sapiens
  misc_feature (898)..(914): n is a, c, g, or t
agcgcccgcccgttgtagaagaatatctcacgcgcctcgggtgttctataaaaaacacactacgcgttacgtgttggggaagctatgtttttaaccacaccaacgacttgttgtggggttggtggcgaacaaaaagcgtattcttctcggccgacacttatataatattgatctttcttttgtttttccccgctcccatattatataaattccccgttgatataaacaatgtggtccacccccagagaacccgcccaggtggagaggtgttccacaaggggcggccccgaaatttcccaaaatagagttgtttaaaacctttttaccgcgggactggataaaatttttgccccccctccttttagcggggaagggggaaaccctaaaattttattgtatgggaaaggggctttgagggtgggaaatttaagccccagggtatacttttttgccaagtttaaagttttgaaaaagcccaggtgggtttttcctttcccatttcacttgaaattttccaaacatttgaggaaagctttagggttagtaaagggtttccttgggaggaatccatcatttctgagtattgaaggttttaatatacattgaaagctctttaacaaaccaatgctgtgttagttgtaggataaaacagagttgcccccaagaaattaagggactgttcctcattatgacttagaaaaggcagcacctctctagtagactaagagcatgtctggacatccactggtagtgtaagaaaacggcattttttaaagaaggcaacaccattgcacttggcaaaactgaagtttttcttaattaaaaattttccattacacatttggggtgagagggtatctcagtaagagtacatttttttctggtttctttttcaggnnnnnnnnnnnnnnnnngtagtacagtctgagccagtagatgagtaacagtgtttgtgatacctctggttgttcctgaagaaaacatgttcagataacaagggggtttgttttcaaaatcaatgcaactgctgtttttgtttccaggtagtttacatcacaccacttaggtacacagtaatttgtgagacatcattaatgattca

SEQ ID NO: 139155 - DNA, 1143 bp, Homo Sapiens
  misc_feature (832)..(880): n is a, c, g, or t
tttacagcaaagtcaaagtttattaaaacaaatacagttactagaaattcctaggtatctttacataaaaaataatttttaaggttgacaaacccccattgataacaataacaaatatagtaaaatctaggctgctttcaagttttcaaatcacattcattgcactcttaagagtgcttttctaataattggatctaatctagttcatttatcatttaccaattagtcaagaacccaagcttgcacataaaagttaataattattaggtttaggcatcaagtgtctatgcaataccaatattttttatttatgtctatgttcgccccttgtaatgtccaacattttgacagtgtggtgctgatgagtagaagactgaggcagaccaaggaaacctgagagttccacactgcatttgaatgaagttcactgtgccttgtagtattttgtgtaaagctaacttacagaacatagccacaggcaaaaagtacgttcacaatgacataaagttctgaagatgaaataagttcaagatcgcatcagtttcagttgaggactctgaggtcagaatactggtgtggtgagaaagatagtagattaaaggtcagatgtctgtggcttccgatcccggttcctcctaactgttgtataatctaagaccagtcactgtaagaccggttcccactgtataatagtagtccctgggaagaagcattaaattatgtaaaactttgcacactataatgtaatcgacaaactgttgttaaaaaattatgatgtgctctccccccatatacagaaatagttacagaagcataattataacctacatannnnnnnnnnnnnnnnnnnnnnnnnnnnnnnnnnnnnnnnnnnnnnnnntttttaaaagtagattaaatttaatttgattaaaactgtaaatgcctgggtcctaccacaaacagataaaatggaatctctcagggcgtgacccagggtctgcagataatcctaacatgcaactggggctgagcagtactagccacccctcctaattatgataaagccccatctgaattattttttaaaatctgttttagactatccaaatctcccggccgtaatggccgaattcccgggcatatgtccggtaccgtcgactg

SEQ ID NO: 139156 - DNA, 2717 bp, Homo Sapiens
agcctaaataactctaaacgggatgggagggcaaattttaggtcagttgacatcctggagaagatatcctaggtcctgtctcattccctagaccgcataacactccaaccgtgtaaatctcaggaccctgaagaagacagtggtaggggagaggaggggagctagcttccaacgtactccacacttgactcccataggacaacagtaagtgtaagggcatttgcaaaatcaagtggaaagtacctctaggctggagaagtaggatattctagccatacagattcaatggaacagagaagagaaaggaggttccattggcaccatagtgagccattcatttgcccagggaagtgggtgggggctaaggggctaggtttggtcccatggctacattaaatgcttggcatgactccagggctgctctagttagtggctccagcacagtatgagttaggtgagttaggtgtaggagtgtggggacaaggaaaaagggaggaggggtccctagaggctgggtgcccattacatagactcaaattcgtcaatgcgctgcttggtgttgccctgccggatctggcgcagggtcttgtatttgtctcggcccagtcgcatgttctcagcatggatcatgtcattggcagtcttcttggactcatctctggcattggccagctccgaagtgagggccttcaggtgcttctgcacacgctcattcttctctgcctcagtggtacgttcctcctcactgcggtccttggccatagcatcagcccgtaggtcagcactagcctctgccccattctcatcctgctcatcctgctcattctcagcaggctctgccacatgaggtgtactcatggcagtcttcagctcagcacgggtcttctccaagtcttcctgtaccatctgggccttctgctgccactccacagcctcactctcgttgttctgtcgggccatctccagctgggagattcgagctgtcagctctgccatttccaaggccagctgttcctgagtctttttctggtcccgggaggcctgcagcaaggcctccttggcctcttcagtttcttgacgctccttggccagcttttcagcctcgctctgggcacgcttccgttcctgctcaagttccagagccctacgggtctgttcttccagttcttgctgagccttcttagtctgttcctcgatctgcttcagcctctccatcagctcctccttctcccgttcaatcttctctttctccttctctgccatttcacgcttcttcttctcattttccagcatagcacgctccatctgcttctggtgcttctcctcccgggcctgtgccttcatctgctgcacctcaatggtatcaggcttgcgacggcgcatgtatagttcatggttccccatgcacaaggccaagatccgcttgttaatccgcagccggggagcatagaagacgaagtccggggcttttttgtcaatgggcttgatgacaaatttcttatcattgaaagagatgttcctgatttcactccaggggaagcctatcttgggagttagtctgtcattctgctcatagatgttgagacccagggcatccacccccagccacagctctgagcctttcttgttcttgatgctgaagtagttcacaccatacatctccagatcttgagcaatcttcagatattccaggacagcatcctccctgagcatgccacggtgttcctcatgccacacctggatccgctcctcccactggtccttgttgagtttgtgctgttccaggactctctgcgggagcaacttgtctccggccaggtagccagacttatgcacttccttattgaagtcgccatacttagactggacagcatacgaggccagcagcacagcggtctcaggcgggcagtaaatatcatcattgagaatgccctctttcacttgcagaaagaacaggcgctgagtgatgtcctgaatcaattcctcggacacatcctcagggtagaacttggcacggaacttaaagagcagggggctttccttccgcacatcctgggcagtcaccttcttattgagtttcagccaggtggagaaacctttagtgtcctggtactgcagaccaaagaaccaaacttccctcaagccaatagttttcaccacctggtcaaatagctgcttcccggtggtgttgggctggatggcaaactccagctctgcatccatggtggtcacacgcacactgatcgttttgggtatgttgtcggcaaaggcagcggagttggcgaagtttagctaggactgtcgggcagtgctgagcacgcagtacacacggcttggattcggctgtccggggactcagattgggtccctcactagcgtcggggcgactgttaggcttcctgctaacgggccacgacttcacaaacccccattgataacaataacaaatatagtaaaatctaggctgctttcaagttttcaaatcacattcattgcactcttaagagtgcttttctaataattggatctaatctagttcatttatcatttaccaattagtcaagaacccaagcttgcacataaaagttaataattattaggtttaggcatcaagtgtctatgcaataccaatattttttatttatgtctatgttcgccccttgtaatgtccaacattttgacagtgtggtgctgacgcagagaacgacggttggtag

SEQ ID NO: 139157 - DNA, 969 bp, Homo Sapiens
gggcgttggggtgttgggtcgtgtggggcgtggctggggcggtctcttgtggcttgcgttgagtgggagtggcgccgtctgtgtgtcgttgttctgttcggtggaggaggatcgctcgtgggtggagtgtgcgtggctggtccggtacatggacgttcgaggtcgtgtggcaggtgcgtcgttggccgggctgcagttgtccgccggctggtcgtatcggtcacagttgatgtggacagctcccttggatgtgactcttgttgtactccatgaagggcctgcagtcgattgatgacagggccctgactcggcaggtgactcttgctgcatttggtcatcttcttgccaagtcattggggtagattattttgatgctggctagctgcttgggggtccctgacacagggctgcccaccccacttgatggacttagagagcctgtattctcattattgttgaccatctggttagcagggcaggtggtagaggttccgatggcagtggtggtggtgccagcggcaatggcttgggtttgggcctgattgtccttgtcgtaggttgccacagtgcagcagctggcactgctgcatccacaattcagcgagcgggcagagccgctggatgagggcatatacgtcagattcgcagccttgagggacacaacggtggtggcgatgacaggagggtggctgttactgcctgggttggcagagccaaggtaactagagtctaaacaaaggttgagatcctgaggtcggacgggcctagatagtgccactactaccctgtcgtctaaaggagacggaggcatgaggaggctgaaaactggcaattcaagaagaactcaagacagtttcataaataagtgtattcctccaccatctggcgctcctcttcagctatggactcgcacattcagcccccattcactcggcttcattgatctccagcagcaacatagttctttct

SEQ ID NO: 139158 - DNA, 805 bp, Homo Sapiens
  misc_feature (680)..(733): n is a, c, g, or t
cggtttggctgtggcggtgagcctgtgtcctttgatgtgcagaccgcccagatcttcttcaccaaaaatgggaagcgggtgggctctaccatcatgcccatgtccccagatggactgttcccagcagtgggcatgcactccctgggtgaggaggtgcggctgcacctcaacgctgagctgggccgtgaggacgacagcgtcatgatggtggacagttacgaggatgaatggggccggctacatgatgtcagagtctgtgggactctgctggagtacttagggaagggcaaaagcatcgtggatgtggggctggcccaggcccggcacccactcagcacccgcagccactacttcgaggtggagatcgtggaccctggagagaaatgctacatcgccctggggctggcacggaaggactatcccaagaacaggcaccctggctggagcagagggtctgtggcttatcatgcagacgatgggaagatcttccatggcagtggtgtgggggacccctttgggccacgctgttacaaaggggacatcatgggctgtggaatcatgttcccccgggactacattttggacagtgagggggacagtgatgacagttgtgacacagtgatcctgtctccgactgcccgggccgtccggaacgtgcggaatgtcatgtacctgcaccnnnnnnnnnnnnnnnnnnnnnnnnnnnnnnnnnnnnnnnnnnnnnnnnnnnnnntagagccggagcatgaaggcaggaaggtggtgggtttcttcactcggaatggcaagatcattgggaagaagg

SEQ ID NO: 139159 - DNA, 1521 bp, Homo Sapiens
  misc_feature (67)..(67): n is a, c, g, or t
  misc_feature (114)..(114): n is a, c, g, or t
  misc_feature (187)..(187): n is a, c, g, or t
  misc_feature (328)..(328): n is a, c, g, or t
gtttcttttcgctaaacgttttcctgaagccgaatctgaagtggggaggacgtcagtcgtcctcgtnattctcgttgaagtcatcgtcctcctcgtcgtcctccccgacgtagnacaccggagtctccaccctggagccgctgtactgagacccattggagcttgtggccagcatcccattttgcanccgtttgtcaggtcactggcagagaaccttgtgccgttagacgtggaccctgccgtcgtgatgaacacgcctccaacagttccctgagccatttctgtcacgtatggctccagagccttgggaccagacttctggccattntaaggtcttcggcagagcagctccccgactccagcccgcaagccatgcccatccgcttcagcacttctatgtcatcgtggatttcaaatgtgttgtcaaaattaaacagatactcaaatttgtcattggagatgctgcagtcgaatgaccgttcttcttgcttggtgttgacgatgatgaagggcagttggatgactgagttgggtgggcggtggccggctggcctgctgctccgcatgccggtttctctgcaccaggttcttgaaggcaatttgctgtagaataagttcttgaagttgagactgtttctgttttattctttcaagtctcctctgtctttccacctctaagttctgacattcctgagccgagttggtgggcagaccaatccacttgatctccttcttctccttggagatgatgttcatggccattagcacgtttaaggcatcgtagacgcgccgtcttatgtttttctggtcataagctgactcgtttggtaagatgtggttgtcggcagcactgaactccgcaaccagctcgtctgccacttcgttgtaggaagtggtccctttcctctgcaccttctcgcagaccttcatggagaaatgccgtaggcccttgccattcttctctcctttcctgttgcgcttcccggcagaccaaggtgaggagtcggaaggctggttctgagaggcaaagtgagtgctgggggtgtgtgggcttcctaccaccagggtgtttgacgctgccggtctctgaggcgtaccaattaccacttgctgggcaatgttgacattggactgtccaaaggtttttggcaagagctgcttcccgagcgggttgacggtggaggggtgaacggccacgagggacaccacgcctttcccgggactaaggttctggtctatgaagaccttgagttctccgttggcttcaattagaccggcatcttttgccatgttaccagatccgggaaatcaatgctacaaatgttcaccttcccagagaagaaaaatgatgttcttctggctgcccggtccggccgcgcgggcggggacgcggagagggccggatcggagcgcgggcggcacggagaggcgcgggctggggccggccgggcggtcccgccgtggcggggtcctaccgacgcgtgggtcgacgatatcccgggaaaccggaccgtaccggcc

SEQ ID NO: 139160 - DNA, 633 bp, Homo Sapiens
taacctaagacgccactatcaaaccaatcacagcaagcattatgaccagtatatggaaagaatgcgtgacgagaagcttcacgagctgaaaaaagggctcaggaagtatctcttaggctcgtcagacaccgagtgtcccgagcaaaaacaagtgtttgcaaacccaagtccaacccagaaatcccccgtgcagcctgtagaggacctagctgggaacttatgggagaagttacgtgaaaaaatcaggtcttttgtggcatattctatcgcaatcgatgagatcacggatataaataataccacccagttggccatattcatccgtggtgtcgatgagaatttcgatgtgtccgaagaacttctggacacggtgcccatgacgggttcaaaatctggcaacgagatctttttgcgtgttgagaagagcctgaaaaagttctgtatcgactggtcgagattagtaagcgtggcctccactggcaccccagcgatggtggatgccaataacgggcttgtcacaaaactgaagtccagggtggcgacgttctgcaagggtgcggaactgaagtccatctgttgtataattcatccggaatcactctgtgctcagaagttgaagatggaccacgtcat

SEQ ID NO: 139161 - DNA, 587 bp, Homo Sapiens
ataaatcaaacactttcgggggcagagaatgtctgtgtcaggcaagaattagagacaagcggtcagcagagcctcagtgctgatcgtcggagcttgggagcaggaagatgtcgaatgaacttgatttcaggtctgtgcggctgctaaagaacgacccagtcaacttgcagaaattctcttacactagtgaggatgaggcctggaagacgtacctagaaaacccgttgacagctgccacaaaggccatgatgagagtcaatggagatgatgacagtgttgcggccttgagcttcctctatgattactacatgggtcccaaggagaagcggatattgtcctccagcactgggggcaggaatgaccaaggaaagaggtactaccatggcatggaatatgagacggacctcactccccttgaaagccccacacacctcatgaaattcctgacagagaacgtgtctggaaccccagagtacccagatttgctcaagaagaataacctgatgagcttggagggggccttgcccacccctggcaaggcagctcccctccctgcaggccccagcaagctggaggccggctctgtg

SEQ ID NO: 139162 - DNA, 587 bp, Homo Sapiens
cgatgtcaacagtgtgggttagaaaatggcccgttagtggctctattgcaataatgttagggacattatatgatttccacgcaggtcacaccatctgggcctgaggtagcagtgggtcactttgatccactttgcaggacttattctgtaacggtttgtggccaagttttgggaagtggttgattctctttgccttcatttcaccttcctcttcgtttacggttaggacatcgctgcttgatccttacaatactgtgcaactgcaatgcaacgtggccctgcttcaggtgatccgcgggaggggcctccacgccagcgccgggaaggctgctggggcctccacacctgcctcatcacggcggcgaggctacgacaatccggctgggagcatgaccttggcgtctgttctgggagcacagatgataagctctggaagctggcagtgtgtaaagcactggcaagtttgttactgttaaaatgtcaaataccaatgctttatatcgacgcgaagtgcttaacacagccgggcttgggggcagtcaggaggaagctggccatccgtggaggaggggccggtcctggactcc

SEQ ID NO: 139163 - DNA, 583 bp, Homo Sapiens
tgtagaaagaacatctggcccagttaccctgctgtattagtaaactggagtatgctcagatgtcaatactgtcactaataagtgttgagacactctcaacatgtattatgtcctaatgatctggaaaatttccttcagtatgataataatgatggcaaaaatgacacaaagtagaaatatatagctactccttggtttccttcttcttttggggaatataaaaactgattttgaggattctgaggcagctcagtattgtggaaagagtatcaaacctggagtaagatgggctagatctggtcacagtttcataatcttagggaagttactgaaccttttgatcctttcccttttgattctaaaattgagtccaagaatcttttccctaacttccactgacattactgagaggaaaaaaatgaaataatgtttgtaaaagtgctctcaaaaccatagagctccacataaatgtaacttatcactatcaaacaatctttgacattcctttaagggaaaaccattacattatagtttctttttgtccatttttaagcagggggtatttatattatcaattagcatt

SEQ ID NO: 139164 - DNA, 582 bp, Homo Sapiens
aatgtatcagaattttatgaaacatgaagtcttagacaccccgaagtacattttcaccccaaatgtatttgaacagtgttaggctgggggtgggaggcaggagtccttcttgctttgcctgtgcaatgaaatgaataccctgctgtgtttatctccttgtcatgtgattctcccaggttgtttcttcaagtttctgagccaaacttaactctaaaaagcaaatattctgtgttaaaagacagtaatcaacacgggagctacatcagacatcataggacaaattgtcatctagaagagtatatttttaatgcaggagagtttttaaaacccagattggtgtgatttcattccagagagctcagaaatatgctcagcaagtcttgcagaaggaatgtcgtcccaagtttgccaagacatcaatggcgctgttatttgagcacaggtatagcgtggacttactcccttttgtgcagaaggcccccaaagacagtgaagctgaatccaagtacgatcctccttttgggttccggaagttctccagtaaagtccagaccctcttggaactcttgccagagcacgacc

SEQ ID NO: 139165 - DNA, 894 bp, Homo Sapiens
  misc_feature (779)..(830): n is a, c, g, or t
attcaaggtcagacagtggtgcgccctctggataagtcatccttatagtagttttatttccaacatgttctgaatatccctcaactggtgcactgtttaaccttatcacaacatcgaactggttcagggtgtggcccagttctaatccgtgcaggtattcctccgcttgccaataaccacacagcgccgacaggtcttggctttcaagtgttcagggaggtcgtgctctggcaagagttccaagagggtctggactttactggagaacttccggaacccaaaaggaggatcgtacttggactcagcttcactgtctttgggggccttctgcacaaaagggagtaagtccacgctatacctgtgctcaaataacagcgccattgatgtcttggcaaacttgggacgacattccttctgcaagacttgctgagcatatttctgagctctctttacacggtcagggtccacataatgcatttttttcatgtcacattcttcagtagtataatttaacttgaggatataaaggatccacactccaaacacaagcaatgtacatttgaggatgtcttttaataacaagctgggccttctcatcttgctttgagctcgggtgtaccattgcagggaaggcctcgagcaatcacttctcagtttcacataggtgtactcacttggcattgctcggccggcaggtgccgccgctgcctcggtccgcggctgcaggggacgccgctccgcgcagcccgccgccttcgtccgcatactaatgagggggnnnnnnnnnnnnnnnnnnnnnnnnnnnnnnnnnnnnnnnnnnnnnnnnnnnngctctcgcgcccattcagctgggggccgccgctcccccgctcagatgcggaggaggggcgcgtg

SEQ ID NO: 139166 - DNA, 856 bp, Homo Sapiens
gccggggtttatttttcgcagggatttccttatcacaaatccgggtttgaggaaagcccctatttatccccgaaaagttttccccttgctcattctccattttccccccagtaggaatcctggccacggaccggcattcaggtaactgaaagcagtgagggggagcccctccctagccaacttcccgagattctcggaggtggtccatggttgctccaaaccgggtggtgatggcaaaaaatataaacgggtccctgccaagtgatgcaggcccgtctgccatgcagggccgacccagggaattcttagcaggtctcaactttcccctaacagtttaagaaacagtaacccaacttggggctgctttctcggccgcttcggagtgcccatcacctccaccttcctcctccttggagggggctgcatacttctccagggcttttgctacctgccccagtgtctccggcattccgcggagccgtgcaccagtcccctcaaataacctatcaaattctgtggcttctattagatcaccgaggtctttaagaactgcatcttttacattgcctcgtcgtgcctccgggcgggcaagacagtgtaaaatcttggagaaggcctgtccaaaggcggagtgagacaactcctcggacaaattagagtcttcctgcgatggggcttccagagcgctgtcaagctccattcctgactgcagcaccagaaggctggtctctcccacagaacgaggatggaggcggggagggatccgttgaagagggaaggcgcgatcacccaaagagaactgcaacggctcgcgcccgccggtgtctaacaggatccggacctagctcatattccc

SEQ ID NO: 139167 - DNA, 582 bp, Homo Sapiens
aagacctcatttatgttggtgcggcaagagttgcctgtcagactggcaaatataatgaaagaaataagtctccttccagataatcttctcaggacaccatccgttcaattggtacaaagctggtatatccagagtcttcaggagcttcttgattttaaggacaaaagtgctgaggatgctaaagctatttatgactttatagatactgtgatacggatcagaaaccgacacaatgatgtcattcccacaatggcccagggtgtgattgaatacaaggagagctttggggtggatcctgtcaccagtcagaatgttcagtactttttggatcgattctacatgagtcgcatttcaattagaatgttactcaatcagcactctttattgtttggtggaaaaggcaaaggaagtccatctcatcgaaaacacattggaagcataaatccaaactgcaatgtacttgaagttattaaagatggctatgaaaatgctaggcgtctgtgtgatttgtattatattaactctcccgaactagaacttgaagaactaaatgaatgcaatgagagccactatggaacacca

SEQ ID NO: 139168 - DNA, 582 bp, Homo Sapiens
ctagtgttgtttatccgagtaccaaatttcctcgcaaagataatctcaacccaagacacataaatcttccccttcctgctccccacgcacagtatgcaatccctaatcgccactttcatccccttccccagctaccaagaccaccctttccaattccacagcagcacaccttgttaaatcagcagcagaataatttgcctgaacaaccaaatcagataccacctcagccaaatcaggtagtccagcagcaaagtcagttgaatcagcagcctcagcagccacctcctcagctttctcctgcatatcaggcgggacccaacaatgctttttttaatagtgcagttgctcatcggccacagtctcctcctgcagaagctgtaattccggagcagcagccccctcccatgctgcaagaaggccacagtcctctgagagccattgcacaacccggccccattcttccttcacatctgaatagcttcattgatgagaacccctcgggattacctataggggaggctttagatcgtatacatgggagtgtcgctctggaaacattaaggcagcagcaggcacggttcc

SEQ ID NO: 139169 - DNA, 1874 bp, Homo Sapiens
  misc_feature (538)..(538): n is a, c, g, or t
  misc_feature (1295)..(1295): n is a, c, g, or t
gtggcgttgaggctgggagactttgtgatggctgaagctcaatcaccttgttggccagacaattttcatcatcatattttgcagaatccccaatcacgtcccggtaggtaagcagcatagatagcaaccgagcgacaggagcaatgtctgacttcacagggattgagatggaaaaatggcccttcatgtcttcctgcttcacaagcggtccatgagtcccagttcggacaatgcctccctttgccattatcagataatagaaggagagcttcttcagccccagcagggtgcctccattcagaatataatgtgccttgactgtctgagtatggccacagggtagttcatgagacatgggctcaaggtggacaaagctcttgcttggggagaacacaagataagcagtgtgatgtgcctcttcgtgttcttctgacacccactggtagccgtaacagggactacgatccttgtaattgaccctaacagtaagaggaggtacccataacaattggtggttttgatagaggactgtacaagnccatgctcatccgtggtagcattggagtaatagtttgcttcatttcctctgatgaatatgactttatttggtatagggacgcctttcccatctactaggcgcacctgcccaaagaagggaatttccctttcgaaagtgtgagtccactttcacaaatgagagttttgttatggttcttgtgatttcactggactgccttccagtcaattccaccactgttccttcttcttggatctgggcctcagtgtgaagtttcatttcatactccttcctcttcagctggaagaccttggtttttacttgctgatagaagcagccatggctgtttagctgtccactgaatttctcacagaaagcctgtgaatcttcaccgtggcagtcggaagcgtcactatactttctgcaaatgctcacagtcacatgtccagggacaggcttcccatatgtgtataggccacacactgatacattcatctcttcttccaagatggtgattatctcttggcactgttacttgtacttcaaacttgggaagaacaaattcctccacggtgaaagggtgctctgtccttccacctgatttgttcctgtaccaccaccttgtaggagccctggaagggctctgatgagaggggaaaagaaaattgcttgaggccaccctctaactggaaactctgccattgtgcgatgcgatttcctttgggatcctgaatgtatactagtggaatcaactcattcagggggtgaaagtttttantccatggagacaacacgaaatttccacttgtctgccctggtttgtagattgatttgtctgtctggacaaagaccagactgtcctcgttcttaaccatcactgtggtccgcttcttaaattcttgggttggtcctttcacttggacagtgaggaacattacctcctcattggatgaagactttgggacagcgaaggcgacacagtggagtacgtcattctccgcctccaggtcagtgaagaggctcctgtttcccctgacagactccaaggaagcacttacagtcactgtctcattcaggtagctcagaaggacacagcccttctcagtggtctcagtgtggagcagggaggggaccagaaccatatactgcggttttccagagactgaggcgtctgtgggcaggaggaccaagaggagaagaaccagacttggatgaaggagtttgttcttccccatgttgcagaaagaaggagctggaggagaccagactgtattgtaccctactccctacaatccatctggtccccccccggccgtaatggccgaattcccgggcatatgtccggtaccgtcgactg

SEQ ID NO: 139170 - DNA, 928 bp, Homo Sapiens
cagtcgacggtaccggacatatgcccgggaattcggccattacggccgggggggaccagatggatgtagggagtagggtacaatacagtctgttctcctccagctccttctttctgcaacatggggaagaacaaactccttcatccaagtctggttcttctcctcttggtcctcctgcccacagacgcctcagtctctggaaaaccgtgagttccacacagagagcgtgaagcatgaacctagagtccttcatttattgcagatttttctttatatcattcctttttctttcctatgatactgtcatcttcttatctctaagattccttccagattttacaaatctagtttactcattacttgcttacttttaatcattcttccccaactctctgaagctctaatatgcaaagccttcctaaggggtgtcagaaatttttagctttttaaaagaataaattttagatattcacattcatattgatctacttgagaccatgctatttatcttttcttatttcctctttctcaagggtccattttctattttataaaaaataaagacaattctctcccacaaccaaacatggaacaatgccctggagtataaaaatctatagagtgccaaataaaggaacaatttgaaatactggtgttgatattgaaaaagcagggactctaatgtcagaagagaaatcctttttgcagatgaggtggtgatgaattctttgtttcaacaacaactgaagggaggaactggaaggaaataccgggtgatgagtggatgagaagggattcttgattatagagtactagggtggatttggcatgttaagtgcgaagttgcaggaaggggtaacatggatgcgattggtttactggctatttatttacttaatgtgagccattctcttagagttatggtacg

SEQ ID NO: 139171 - DNA, 581 bp, Homo Sapiens
  misc_feature (109)..(109): n is a, c, g, or t
tgtcttcttcattggtttaattttccttcaaaatgttttgtcgcagttgctcacagccaagacagttcacaagagcttcgggctccaacagttcaccaaagccagaccncagggctcaatcgatccgctccactttgcccagaatccggccttcatacatcgggagcaccgtctcatcctcccagatctcctcaaacaccgctccacaggcaaactcatcgcttgcttttttgaagtaatacctataatttccctttttgctgagctgctctttaaagtggcccagggtcaagctctgagccttcagcatcctccggtatggaatttcttccccacagaaaaagtaagtgacaaccaactcactggcctggagcgcgtggacacctgccagtttctttggctctttgtgatcttctggagccaggcttggattggagaagggtgtggctcccgtctgaacagtggccgaatgattcctgtccctctgctgactggccacacagcaccgctgctttgggggcttcgacacctcagctagcctgcgacaggcctcctccagctgagccagcgtgttgggtggg

SEQ ID NO: 139172 - DNA, 671 bp, Homo Sapiens
attccaaactcctagttccacctttgcatttcaatgtagaaatataacagtgttggtaacaaagtaacatctgacattccatgataattcttggggaaaggaagtctcttttgtgaaatatagatggagtcaaatgccttaggaagaagttttggtcaaaacgtggtcctctacatgagctctagaagaaatcattcggctccttctactgctgtcgtggaaacaggtttcacatagtatggcccttcactcaggtaagttctgagcctcaaataatttgggttcccaaagatttctgcaattgtcttggaattggcaagtgctttcactagttcatatttggcatcctttgaagctttgtcatgctccacagaccggtccaccacatattctacaaaacctggactgttaaacataagtttctgagcccagggttggtttacaatggccgtaaacacttttaaggcagcacagtgtagttcagggaagggctgactactaatgccacggaagagctccagtggatcccgagataaagaagaaaaccaggattctgtcatcctcacaaggtcatcagtctgctgctcaggtggtaagtacagaagagatgaaattgcatccaaacatctaatttttagctccactggggcattctttgattgatgtcctat

SEQ ID NO: 139173 - DNA, 960 bp, Homo Sapiens
catgtacttttctatcaagtgttcttgtactgtttgatctgtttgtgcaccaatcatgtaccccacagcttcataaaacgtatgaacctgttgaggctgaagatcacaaataatagtgttaatgttgttcaaaatttcatcaataaatggcatcacttctccaacctgaacctgaacgaaatgcctgcggcatttttgggctattttaatgaaagtatcacaagccatatcctggactccatcatgggtctcatgcatgaattcgaacagcttgttaactacagtcttcagaaatttccagtgagctctcaaaaaacgtgggtattgacctactatgtacatgatatttgatgcaataatagctttattatctttgcctcttttctgttcacataatcctaatagatcctttataacagtaacaagaaatcgtttttcgtcctcttcatgcattgctccactaatggagcctattgcccaacacaatgtattcaaatttttccatgaccactctgtaccattcacttgattgtgaagcttctctgtcattattctttctgtatctacataatccagatgagtaagataaaccaatgtttccctcatattcttatacaaatttatggaatctgtatccttcatgaattctctcacaacttctccttgatcattctctacaaccaatacttcctctggtttagccattcgactaaccattaataaacggaccttgaataacatgggcaaatatagctgtctcctgggaggaacatcaaaatgttgacttccagaaagcaacggagaggcagatgtagagaatggactctctctatagagttcagcagccaaatgattccagtattcaagacaaattttaaagatttcagtttcttctacttcagataccaacaacatataatgaacctcgtgccgaattcgccacccaggcctcgctacctt

SEQ ID NO: 139174 - DNA, 577 bp, Homo Sapiens
ttctgtgtaggcccttcattatatgttgttggtatctgaagtagaagaaactgaaatctttaaaatttgtcttgaatactggaatcatttggctgctgaactctatagagagagtccattctctacatctgcctctccgttgctttctggaagtcaacattttgatgttcctcccaggagacagctatatttgcccatgttattcaaggtaacagagcggttggttgagtgttcttcctgttgcatactgtggttttgaggtctgaatccaaatacttctaatctgtgtaaataaattagctataaaaagagaacccaacaacttctccatgagtgtggaaaactagaacatgaaaggagttgagtctagaaccttgattctcaagagtgtggtccttctctcagtatcaacattggttgtgatttcgttaggcaaattcattggccacctgccaatctactaaaccagagtctaggaatgagacacaggaaactcctgtaacagaagttggttaaaaaaatcacattaaaacacacttaaataattataaagccatttttgtagaaggtacagtga

SEQ ID NO: 139175 - DNA, 582 bp, Homo Sapiens
agtctaaaaagtccaaagtgctaccttgaaatcctggcagaagtacgagattataaaagaagacgccagtcctatagagccaagaatgttcacataaccaagaaatcatatactgaggtgattcgagatgtgataaatgtgcacatggaagaactcagcaatcattggcaagaagagcaagagaaggcagaggatgatgccgaaaagaatgaagaaaggcgatcagcttcagtagattcacggcagtctggtggaagctatttggatgctgagtgttcacgacatagaagggataggagtagaagcccacataaaagaaaaagaaacaaagataaggataaaaactgtgagtcgagaagaaggaaagagagggatggggaaagacaccatagtcataaaagaagaaagcaaaaaatataaatgaagtacttgtacctatattaattatgcttacgccatgataaccaatatacagatatattaattggaattcctttgcataggagaatgtttttatgatctgtttagtgcttattattttttttatgatctgtttagtgcttattattttccagtaaatat

SEQ ID NO: 139176 - DNA, 1115 bp, Homo Sapiens
tgcatttagcggggccagggggggaagcggttccaaaaacccgggggaaaaggggtgaaggttcatcaaagggttgccgagggattagggttgaaccctccgtggaaaactcccttcccaaggtatttttgtcagtatagtagggtaaatttaagccatcccagttgccatttatgaccaatagtttctggaagaaatttatgactatagctttgggaagccccacaatatgaaaagggaatttcccctaaagacaaggaatgcagacaaattccaaacccttaagaacaacaacaaaaaagatttaaaaagactgatgactgtgaggcaggcacattttcctccttttgctgaactggggcatgaggcatttaggttaaccatggcttaactggtgttgggtaagctttatattataaaacatgaagatggcaaaggtttcacttaagtttttcttttactactttaatttgcttaaaagcacaaatgcttgtgcttgcagtaacttcctaaaagcagaagtaatgttcccttttactaccttaataaagcatttgcccctttgatacaaatgatttttttactgtgctaacagctgaaccagtggcacaaaattgagatggtatttactgcagcaaggtccctgtaaatcaaattctaagctttacataaaaatcttatttataaaaaatacaataccaagtacagtgagaatggagcatggagcagcagtgctccctgccagggccatgtggaagtggcttttgctacagtgcttgcttaatggcacaagtgaaaagctgaataaggcaaacacttgaagaggcagttttctgtaaacttctgggggtggggggaatttcctctcgggacagatactggtttgggatggctaagatcagaaggtgtgatatttggctgcacctgacacatcacagatttaagatagcttctgctggatgagaccagttaactcttttaggagagaggttatcactacagctttctgcctttactgttacaatgtgcagccgccagatggtatcctcctatggaaaaaaatcacctccaaaatcttcttggtacctaatagtgatccatcgtaatgacacttg

SEQ ID NO: 139177 - DNA, 585 bp, Homo Sapiens
ttttttaagtccttggtcaacattctcttattaatcatgtgactatgtaaagcattcagtaattcaacattcacgttgctctccaaacctctacggatatcagaatccaagttgtcccaagcctcattactcggtgcaaagtaagtgaaggatccctttccctcgatctcctccctcagttttgaggcgtcagaatagcgctgcgttgtggtggctcccacgatgcccagagtgccataaacatggtcaatgggcaaaactgctgggcagcctttcattccttccattctcatataaccagggcaacattcatataacacagtcgttttctgtccacagatggactttttataccagttcttacaagtgctgaagtatttctttttggtgcccaaaatctgttgaagggcacagacatttgggccttggtcccgacccctgatacgactatgagccaagatcttgtcataatgattgttggcgtttatagggttaacaataagcagcaatagtagagaaaacatgggtaaaaagggaatcatcttgagtctctccgttgcagttagtccccgaagagaactggct

SEQ ID NO: 139178 - DNA, 1399 bp, Homo Sapiens
cccccgggaggctccagcaacccttgccgggcctcccggagagaaaaccggtttcccatcggggatgaaaaccgaaggtggggtgatccccccctgggggccctcccaagcaaggggagaggggagccatcatcccagggcatacagccccagggaagcgcccgtaggagccacaggcatagaggggctgggctgggctgaaggctatgcaggagatgatgccgctctggccctgcttttttgcaaatgtggctcggacctcgcagtctcggccaggccgggccgtgaaaaaacacgcccagtccgttgaagccacagaagagctgggagccatccggggagaagcagagcgaatgggctgccgtcagctcatccaggtggttgtaggcgcgaaaggaagcccggagctctccagtgaatgcgtcccagatatgaatcgggttctcccggctgctgcttgccacttaggaggtttctggctgggcttgaggacatcagagaatagccagcagtaaatcattagatggtatccaccttccaccattcgaaggacaggggaccatttctgcatattccacctgctcccccctcatggtacagctctggggcaaggttataaattcgcaagatgttatcagcactattggtcaagatgcaggaaccgtcaggagcccacttacagcctttcaagaagttctcaggttgggtgctgaactctgaccaggaaccactgagaaatcgaggcagctgggagaagctgtagttccaagcggtgtctccctcgtcctctgcagcgggttccccagaggtatcttccatggcttttccagaccccaactctggcccgttcgcttcttcttcagaaaggctcccgtttgcttcttctgcaggaaggcttgtattttcagaaagttcttgctcctcgattcgaggactcaactcactaggggaaccaaactctgtttccaggggagtggagagagaaactgggtccccctcccgtagctcctgggacacagctgagccagccacaggatctggggacaaccggggcggatcccccctttcgggaggcggtggcatcagttcagagtccgcatttttattcatcggggaagcgtggggagaaggatgggctggagctgggtcctggtctgaaggacagcagtccggagctaacggttgagtctccaaagtcttcatactgtgcttccctcctcttctgggagtaggcagaagactcccgggaggagaggcgaacagcggacgccaattcttttgaaagcactgtgttccttagcaccgcgggtcgctacgggcctcttgctgtcgcgggatttcggtccaccttccgattgggccgccgcatcccggatcagatttcgcgggcgacccacgg

SEQ ID NO: 139179 - DNA, 1060 bp, Homo Sapiens
  misc_feature (931)..(965): n is a, c, g, or t
  misc_feature (969)..(1011): n is a, c, g, or t
aagtgtggggccgagtggtatacaaagcggcaaacagttgagctgtaaggaatcggtcatgtgctggtctccagccagacaaggtcataatcattgagggccacacgaagataatggcggtcactgccgtcagacaggtgaatcccctgtgtttcgttgcggatgcttgggccaccgagcatcgacatcttgaagtataggtctttgaaggtgaaatgtgtttctacaatgcctgtggtcttcactctcgtccgaagaacatcttgctgagttggaatgtagttagactgggatattctatccagatcatttagataatatgaagcagaatcattgagctgatattccctggatctgctgaagcaagcttgtaccccaccatctcgccataaccgtttaatcactcctgctagttctggagtcatgactccttcttcagcactgccagctaaaacaaataattgccgggcatcatctgccctggcagcttccccaaagtcaatctttagccgtcccatggctcttatgattgcaatgatggactgtatagtattgctgtagacaactactttatattgtttacattcatcctctgaatagccatcctcatgaatgattttcatctgtttcacaatggtgcttttaccagattctccagcaccgagtagcagcagcttcacttctttggccgctttttccccgtcctcccgtaagttgcggtcgatcatcttgcttcgctccactgccgccttgtcttcggcgctcaacgtgcagcccatggcggcggcgggagaggggacacgggcccggactcactcacaccacggaaactgcggctcggcaggctgaggcaccgtctattgctgggcggtggccctcccccggccgtaatggccgaattcccgggcatatgtccggtaccgtcgactgnnnnnnnnnnnnnnnnnnnnnnnnnnnnnnnnnnncggnnnnnnnnnnnnnnnnnnnnnnnnnnnnnnnnnnnnnnnnnnnataacgcgctagcgccctatagtgatctatcagttctttgtgggtgcct

SEQ ID NO: 139180 - DNA, 583 bp, Homo Sapiens
acaatgatgttgagtattttatatcgtctagttccccatccggtttatatcagttggatcttctttcaacagagaaagacacacatttcaaagtatatgccaccacaactccagaatctgatcagccataccctgagttaccctatgacccaagagtagatgtgacctcactggggcgcaccacggtcactttggcctggaaaccaagccccactgcctctttgctgaaacaacccattcagtactgtgtggtcatcaacaaagagcacaatttcaaaagtctctgtgcagtggaagcaaaactgagtgcagatgatgcttttatgatggcaccgaaacctggtctggacttcagcccctttgactttgcccactttggatttccttctgataattcaggtaaagaacgcagtttccaggcaaagccttctccaaaactggggcgtcatgtctactccaggcccaaggttgatattcagaaaatctgcataggaaacaagaacatcttcaccgtctctgatctgaaacccgacacgcagtactactttgatgtatttgtggtcaacatcaacagcaacatgag

SEQ ID NO: 139181 - DNA, 587 bp, Homo Sapiens
ccaacaaactgaaactcttaccggttaaaaaagaaaatgatacagtgatgcaatttatgccacaggaaaaccaatctcataattttatatttttcaaatcaccactcctattgtaaaccttagagagagaaaggtaaacaagcctctacatgcagagttttatagaataggagggtctttaaaagaaacatttaccaaacaaaagaaacatttaccaaacaatattatctatgcttcaaaagatttttacaaagttgaatttatggttcattgagatatcttactgtttagtacagactcaacatttctgaatgattcctatttaccctgaatattaatagacagtaaaacttcactgttagaactagatagatggcattctcagaattcttacaacagtagcaaatgtgtatttgagttagtcaatctagtagtgaaatttagttttaatacctctgtaatggcagcaaatgttttcccaatcaatattgtaagataaggtatctggtattaaatttaagggggttactgatatgctcaaatacatgacgtcgggtgtttttgaactggctgctatgggcctttta

SEQ ID NO: 139182 - DNA, 1161 bp, Homo Sapiens
cccatcgcgatgggtagactgtggccgagctgccggtccatggtaagtgctgtagcgcttgaacgtggatgcggcgggacacggtccccgcagttcaaaggtctccctcatcttcactgggggaagcctggctgcggctacggcttgtggctcccaacaaggagttgtcggggacgcggggagtctcatagagtaggacgttgagtgtctcctcatagattcgggcttctgggaattcccaccttggtctgcttcttctccgtggcatacacgatggaggtacagcacacctttgccagcttacggccctggccataaaaggaccagcagcagatctcgtcaccaatgacatccttgatgaagagcacgcggccgttgaagcgcagggagagcttgtcaaacagctcgatgtttttcagcaggtggtcgtcagagttgctggtgtaggaatacttgttgttgcttctgttgtacagcagcttcaccacgggcttggtggaggattcgatgagccgctcctcctcctttagggatgtgatgatggggatgttgcacacaggctggtaggagtccttcttgtcctgcagggcactctggcacatattcaccagcccctggatgaggtaatactttgcttcagccatcaattccttgatttcttgccggttctgagggagggtgatggtgtcatctcggaggtaattcaaaatggtgccaaagtgctttccacaacggtctatgaggatccagccttctttgtcggtcagcacctccatgcgcccactgaacatggccttgagcatggtgtcgtggcgggtcagggcccgcacagtggtgtagtacagagagccgcccacgttgagctggacatacttgttgcccaaccctcctcccttgaagccactgagcttgggcttggcccctgaggctgggcacaggcaggtgtcccccgacatctcccgctgcaggtagatcaccacacggcaggaggtaggcttggaaggctccgccgtggtggaaagggtcacgagtgagtggccagtggaggccagagcctcataatctcagtgcgtccccgggggcgcctctcctctcagctgggtggccagcggactccgagccgcccctagcctgcagccgcctgcccctcagcagtcccaa

SEQ ID NO: 139183 - DNA, 584 bp, Homo Sapiens
  misc_feature (233)..(296): n is a, c, g, or t
ctgaatgatgtcggctcggcatggacaccttgtgcatctttggtgaaaagggacctcaatgtcaggtgcagtttgccagggtgaccagacttcctgagcatggaccaggggaggtgaaaatggctggactccctgggtgagaaggaaggcttctccctgtggggcatgcactgtggcaggcaaggtgagcaggctgtccagggcagcttgtctgctgtctggggcagggtgtnnnnnnnnnnnnnnnnnnnnnnnnnnnnnnnnnnnnnnnnnnnnnnnnnnnnnnnnnnnnnnnnctttccggggcagtttgtctgtctgctgtctggggcagtttgtctgtctgtctgctgtccggggcagtttttctgtctgctgtccggggcaacgtgtctgtctgtctgctgtccggggcagtgtgtctgtttgtctctctgctgtccagggcaatgtgtctgtttgtctgtctgctgtccggggcagtttgtttgtctgtctgctgtctggggcagtttgtcatctgtgcagggcaccaactccctgtctttctaggagcctggcacacaggaggtgctcagtaaatg

SEQ ID NO: 139184 - DNA, 582 bp, Homo Sapiens
ctgaatgcgcgttgcaggatatgtcgaaagaaaggcgatgctgaaaacatggttctttgtgatggctgtgataggggtcatcatacctactgtgttcgaccaaagctcaagactgtgcctgaaggagactggttttgtccagaatgtcgaccaaagcaacgttctagaagactctcctctagacagagaccatccttggaaagtgatgaagatgtggaagacagtatgggaggtgaggatgatgaagttgatggcgatgaagaagaaggtcaaagtgaggaggaagagtatgaggtagaacaagatgaagatgactctcaagaagaggaagaagtcagcctacccaaacgaggaagaccacaagttagattgccagttaaaacaagagggaaacttagctcttctttctcaagtcgtggccaacaacaagaacctggaagatacccttcaaggagtcagcagagcacacccaaaacaactgtttcttctaaaactggtagaagcctaagaaagataaactctgctcctcctacagaaacaaaatctttaagaattgccagtcgttctactcgccacagtcat

SEQ ID NO: 139185 - DNA, 646 bp, Homo Sapiens
  misc_feature (401)..(401): n is a, c, g, or t
gcggccgctcagaagatgaactggacaatgtattttttaagaaagaaaatgtggaacagtgtcacaatgatactaaagaggagtccaaaaaagaaagtgagacactgggcagaaaacagaagatcatcattgccaaagaaaacagcactaggaaagaccccagcacgacaaaagatgaaaagatatcactaggaaaagagagcacgccttctgaagaaccctcaccaccacacaactcaaaacacaacaagtcaccaactctcagctgtcgctttgccatcctgaaagagagccccaggtcacttctggcacagaagtcctcccaccttgaagagacaggctctgactctggcactttgctcagcacgtcttcccaggcctccctggcaaggttttccatngcagaaatcaaccagtccagaaacgaaacatagcgagtttttggccaacgtcagcaccatcacctcagattattccaccacatcgtctgctacatacttgactagcctggactccagtcgactgagccctgaggtgcaatccgtggcagagagcaagggggacgaggcagatgacgagagaagcgaactcatcagtgaagggcggcctgtggaaaccgacagcgagagcgagtttcccgtgttcc

SEQ ID NO: 139186 - DNA, 861 bp, Homo Sapiens
ctggatttccgggatctgccattagtttctggatttctttttcaccaatacacatatttacttctagttcgtccaaatgtatatatagaagtacaggaatacaagtcattatgcgagtttccaaagtgccctttttctcacctctacttgggaacatttccaactatttttaaagggatgtctgctgtccaaggaactgcttctattcccaaattcttaaagagccctcgagaagacatagcaggtggttttattactccaccacttctaggatctagtttaaagaagtcacagtgaatcactcgtagttttccatccagattttttcctaaggactccaaatgtggaataaaagttttgtcactttcgagcgcaaccactttggcaccagcttcaagtaatgcctgagtcaggattccaggacctggattgcactccagcagtaggtgtggaggtctacttggttttcccaaatagatttgcgccagggtctcagccaatctccgatcggttacgtaacgcttaaagtctaagctggccttagacgccttccttggcggattcctgaaatccggttcgggccacagctgcggagaggagtcagagagcccacagtggttcctcgccggcaaatgctttcgcgtcgccgcttcagaccctaaaatgcaaaagcgaccagcgcccgccaaggcggagagcctcagccgccgaggaagcccgaccactgggatccacatgtccttgtctctcaggcccgctccaagaatcacctagtgcagctactacagtgaaccccacgcagggtatcccacgtggaacattttctggcgtccgggccaggtcaagcggaagtaaaacact

SEQ ID NO: 139187 - DNA, 1009 bp, Homo Sapiens
gccagtaaattgggagggttcttttttcccaaaatttatttcaggaccccaaaaaaccccatattcccttcactttatagcgccacccaaaagtccatacatagccctccaataccccttccaccattaagggcacccacgccttcaatccttttcaaaacccaggttccttctgccaattgttattatacccttgtggccagcccccgggcttatcataggggacctggcccgctgcatagccatgagctttcgaggggggatcatagtgggttcgaacttcagctcggctactcttgaagatctcaatgtacctgtgccctattctttccttgtgtttctttaaggccttctcagctatctcctgtgaagcaaactgcacaaaggcttcccctgtgcttcgcccctgaaagtccactggcagtgtcatcccatttggcacaatttccaaccctgaaaagaactgaacaatctcttccttgctacagccaaatgggagtcctctaagccggacgaagccatcgttggcagtatcagggctattcggacctgtatgcttcaacacccaatccatttcaacactgttagacttgaatacttcaacgtatctgtgtcccatggtttctctgtccttcttcaaagccaatttcacttcctcttcagattcaagttcaacaaatgcttcaccacttggtctgccttctctggtgtagatgaaacgaatacctgatgtgccattttggatcttgcaatcagagaagaagcgcatcacttcatcggctgagcaggaccagggtaggcccctgaccttcaccacgaacccctccctgccttccgtgctcagcatcatggtgattgttgggctcttggtggcaagtttggctcaatgcaattttggtgtagctctaacgataccgggtaattttcctccttcttccctcaaacggctatagcgagacggtagacgacgaccagaactacttctgctcacgtaagcgagtaatcacgt

SEQ ID NO: 139188 - DNA, 847 bp, Homo Sapiens
gaacagttgaccagatcatagcatcattatagccattgtaatcatcatagcctccatagcctccaccataagcaccacgccatcatcctctcaaagccagctcctctgccaatgctgttataccctctaccagccccaggtctggtcataaggacctggcctctgcatggccataagctttcgtggtggatcataatgagttctaacttcagctctactgctcttaaagatttcaatatacctgtgccctattctttccttgtgtttctttagagccttttcagctatttcctgtgaagcaaactgcacgaaggcctcccccgtactcctcccctggaagtccaccggcaatgttatcccatttggcacgatttccaaccctgagaagaactgaacaatttcttccttgctacatccaaagggaagtcctctaagccgtacaaagccatcattggccgtgtcaggactatttggaccagtatgcttcaacacccaatccatttcaacgttgtttgacttgaatacttcaacatatctgtgtcccatagtttctctgtcttttttcagggccaatttgacttcatcttctgattcaagttcaacaaaagcctcgccacttggtctgccttctctggtgtagatgaaacgaataccttgagccccattttgaattttgcagtcagaaaaaaacctctgcacttcatcggccgagcaagaccagggcaagccccggaccttcaccacgaatccctctccaccttccgtgcccaacatcatcgtctcttacgcggtccggcgtcgaaacaaactagacacgcgacttctgcgtggctaagacgaaatgccc

SEQ ID NO: 139189 - DNA, 653 bp, Homo Sapiens
  misc_feature (254)..(267): n is a, c, g, or t
cattgaagcatgcgcttacctatgctgattcttactaaaagcataggctggggtatttattggcgaaaggaaatgtgtagtgtgggctggactgttggtggaggctggctttttagcccacttgctatacatgctgccaatggatttaagacttgaaatgttgaaagttgagtggaattatttccctcctaaaacatttatttacagtactcctctctacccctaaggttgggctctgcctcagaggagtgagnnnnnnnnnnnnnnctataaagtttacattgtcttactatttattgagtgaatttctggtcattgcctatgcaaatataagaaatctggctttaaatattagtcagtttcatggctatgactagattgttttcttgtataactaaatacctgtataaaatgaactaatgttttctctcccctccctaccccttccttatgaacaatgctttaggtatattgaaatctttaagagcagtagagctgaagttagaactcattatgatccaccacgaaagcttatggccatgcagcggccaggtccttatgacagacctggggctggtagagggtataacagcattggcagaggagctggctttgagaggatgaggcgtggtgcttatgatggaggcggaggc

SEQ ID NO: 139190 - DNA, 451 bp, Homo Sapiens
aaatccattttctttcttcttttaagcagagagaatatggatttaattgtttaccataagaaaagtgacatatccaaccaaccatccatccccacctgtgccctattctttccttgtgtttctttagagccttttcagctatttcctgtgaagcaaactgcacgaaggcctcccccgtactcctcccctggaagtccaccggcaatgttatcccatttggcacgatttccaacccttcaacccaaggacaaataaccccagtaggggggcaatattaacatcacaagcccagaaatgattcttcttatagctttaaataaaccagaatttttaactttaggtgaatggtatgctttcaacaagtactctttaaatatgcattgcaataatatgaagttccattattataaagtataactattcttaacacacccatggtacagtatatatt

SEQ ID NO: 139191 - DNA, 642 bp, Homo Sapiens
caaggatagagagagttatgggaagctggctggaagcagcggtactacaagaacaaatttaatgtggatgcagctgatgagaaattccgtcggaaagttgtgcagtcgtacgttgaaggactttgctgggttcttagatattattaccagggctgtgcttcctggaagtggtattatccatttcattatgcaccatttgcttcagactttgaaggcattgcagacatgccatctgattttgagaagggtacgaaaccgtttaaaccactagaacaacttatgggggtatttccagctgcaagtggtaattttctacctccatcatggcggaagctcatgagtgatcctgattctagtataattgacttctatcctgaagattttgctattgatttgaatgggaagaaatatgcatggcaaggtgttgctctcttgccattcgtggatgagcgaaggctacgagctgccctagaagaggtatacccagacctcactccagaagagaccagaagaaacagccttggaggtgatgtcttatttgtggggaaacatcacccactccatgacttcattttagagctgtaccagacaggttccacagagccagtggaggtaccccctgaactatgtcatgggattcaa

SEQ ID NO: 139192 - DNA, 846 bp, Homo Sapiens
gggtgtctttccattcaaataatacctaacactgtacattttttaatatcatagaaaaacttggttcttccatgaaatcctttaaattcttgataaatttttcaatgtagacattattatgaatgaaaaacagccaacaaatgggcatctgtttttttaacactgaagatttacagacactttttaaaagttatcataatcttttttgtcttttttcccctcagcttcaaatccatcaactccatcactatctcttcttcgtttcctgttgttgtggatgttaaaacgttggctcatttgcggtaatggatccatgcctagaactttgtgtatctggcggaatgcaaggagtctcaatgcaaactgtgcactggatgtgatgtcttcacgctgctggtcagtcattgttgccaaggtatcaaagggatccttttcacaaggatccagaagtccaggactacctttaagaataatccctgaagaaatgcattcaaaaactcttctcagtgcatccccagggctctgagggctagaagcactgctgattgctttctctactagtaactccatagcccagcttggaaaatcagaccaagttggaactcgctgacagaggtctcgaagaatgcgtatgataatcacacaggactgcagaccattagctctagcctggaaccacttagcgtggcgtagagcagccagagcgtcaaggcattttgcctgtccaagacgtccggtgggtctttcaccatacccgaggttacatctccttccctcatgttctcttctcgaataattggagatgtcagtgtgatagtgacttgcattttgggttccacacatgaa

SEQ ID NO: 139193 - DNA, 1776 bp, Homo Sapiens
  misc_feature (89)..(152): n is a, c, g, or t
  misc_feature (1626)..(1639): n is a, c, g, or t
ccaggatgtttttggcttaaaattgtgggttaaaaaaaagttaggttttttggcctttcaacagaaaacggggaaattagggacgttannnnnnnnnnnnnnnnnnnnnnnnnnnnnnnnnnnnnnnnnnnnnnnnnnnnnnnnnnnnnnnngtcaattttgtcctttttttaagttgccattattttgttttcaccggcaccattgtttttagtacataggtttggggatttaaaaaaatgttgtggaggcgccctggttcgccttgcgccaagaggctcgcgcactcagcaggttgggctgcggcggcggcggcagctgtggaagctcaggcgctgcgcgtgagaggtcccagatacgtctgcggttccggctccgccaccctcagcttctcttccccaggtctgggagccgagtgcggaaggagggaacggccctagctttgggaagccagaggacacccctggctcctgccgacaccgccctccttcccttcccagccgcgggcctcgctcggtgctaggctactctgccgggaggcggcggcggctgccagtctgtggagagtcctgctgccctccagccgggctcctccaccgggccttgcaggggccgagagagctcggtgcccgcccttccgctcgcctttttcgtcagctggctggagcagcatcggtccgggaggtctctaggctgaggcggcggccgctcctctagttccacaatgtccacgggcggagacttcgggaatccgctgaggaaattcaagctggtgttcctgggggagcaaagcgttggaaagacatctttgatcaccagattcatgtatgacagttttgacaacacctatcaggcaacaattggcattgactttttatcaaaaactatgtacttggaggatcgaacagtccggcttgcaattatgggacacagcaggtcaagagcggttcaggagcttgattcctagctacattcgtgactccactgtggcagttgttgtttatgatatcacaaatgttaactcattccagcaaactacaaagtggattgatgatgtcagaacagaaagaggaagtgatgttatcatcatgctagtaggaaataaaacagatcttgctgacaagaggcaagtgtcaattgaggagggagagaggaaagccaatagagctgaatgttatgtttattgaaactagtgcaaaagctggactacaatgtaaagcagctctttcgacgtgtagcagcagctttgccgggaatggaaagcacacaggacagaagcagagaagatatgattgacataaaactggaaaagcctcaggagcaaagcagtcagtgaaggaggctgttcctgctaatctcccatgtcatcttcaaccttcttcagaagctcactgctttggccccttactctttcattgacctgcagtgtgaatattggcttgaaccttttcccttcagtaataacgtattgcaattcatcattgctgcctgtctcgtggagatgatctattagcttcacaagcacaacaaaagtcagtgtcttcattatttatattttacaaaaagccaaaatatttcagcatattccagtgataactttaaaaattagatacattttcttaacannnnnnnnnnnnnnaatgttatgataatgtacttcaaaatgatggaaatctcaacagtatgagtatggcttggttaacgagcgctatgttcacagcctactttatctctccttgcttttctcacctctcacttacccccattccctattac

SEQ ID NO: 139194 - DNA, 401 bp, Homo Sapiens
ccaaaaactatgccacatttatatttttcactgtttgaaaatatactgctagtttgtaaggcctgctcttgccaggtggaaggaaacctatacaccagagaatagaatactcacacaattatttcatattttttcaatttggtaacctcaactcaacttacctgctttacattgtatccagcttttgcactagtttcaataaacataacattcagctctttggctttcctctctccctcctcaattgacacttgcctgtaaagaaacaaacaaacttcttacttttgagacatgaggcagtattataaagattataaagatagctctgaaaataactttccttgatataaggactggttatacaggtcacattagtttaaaaattcattaatctgccacac

SEQ ID NO: 139195 - DNA, 513 bp, Homo Sapiens
gtgttcatgcgtttctgttttgctagttatattctttttccgagatgaggtattaggaacaactgcactagaaggtccacttgtagctggtttgctgcttgctttagtgctctttaaggtagctggtggtgttgggaggatctttgcaggtgtatacgtatttaaagatactttttttctcattattggactggaacgtaaagctgtagaggaaatttcagcggtcttccgtggaacgtcagatgatggagaagcaatggaagcaagaaattcatccacttgctttaaagatagggcattatgaagagtttctagaggacaaatagatggcaccatggaatacaattcaaagcctacagtaggattctgcttctgttccacaagagttcttggtgttctcaggtaattagcattttcagatacaacatcatttgtagccgtcttcctagatcttggaagtggagacttcctgtgtatatgaattggctctgataccattggtttaaacaatcc

SEQ ID NO: 139196 - DNA, 1113 bp, Homo Sapiens
agtggctaaaatattctaaaggaaactagaaaataaacagctcactatatctttcataaaataaacaaaaagtatttagaaattgatgtgctgcctgaacttaaatcacacatgactcacttcatttgaatagaagatggtggtttacattgtttgaaggacccacactctgagggaatttcccaacatccatcctggaagggatgaaagagttctctaaattccattattttcattccccccgggcaacaattagattctctggtatccagatgattgacaccttaggcggattttatagacacccatacccataaggcagagaccaaccacgatggccccaatcacaggaagcacaattgtgtagtcagacgagcactcatccacatttccaaagtggtcatcttcaaaatcaaaggcttgaagttggacatcggttgttttcacctgcaggtgggctgacaactggaggctctgttcactcacgcacttgaaggaatgcccgactgctgtctggaacatcaccaccgcatgtttgattccttggtaaattgtctctggatctgagacggtcaaataggctcccacttcactgatatgatatgattcttcatccttggtaaatgtgagattcacaaatccgccctgaaaattcaacagaaggttggattttcgggtgccacagttcccagaggcttgcgttgcgttggggtcgatgttgaagtattttccgaggctgaaaaaaccgacttcttgtcttgaacaatcagctgtatccccatctctgcttttatacagagtctgcttccgtttagaacctgataaattccagtcttgactgacgatggctgaggtgcaagggtgggcccaggaaccgtggaggcaggtgcagctgtgcgggtggtattgtgggcagctgccgttgttcctggggcatgggtgggttgaacaggcttctgaccggttgtgcttttgtgcagtgctatcgataaagttgctggaagggtggtctggttactgggttgagtggtgttcccagttgtgtggctgacggttgatgaaccccggccgtaatggccgaattcccgggcatatgtccggtaccgtcgactg

SEQ ID NO: 139197 - DNA, 2355 bp, Homo Sapiens
  misc_feature (26)..(26): n is a, c, g, or t
  misc_feature (116)..(125): n is a, c, g, or t
  misc_feature (364)..(372): n is a, c, g, or t
  misc_feature (411)..(419): n is a, c, g, or t
  misc_feature (1679)..(1688): n is a, c, g, or t
  misc_feature (2275)..(2275): n is a, c, g, or t
ttggaaaatccttttccaggaaaaanacccggggtaaagaataacttgggtaagggtctcccccagggctatataaaaaatttggggataagagggttgtttgcccccaaaatctnnnnnnnnnntttaaaacgggaaaccttttttattttaaaagggcctgggccaaatttatttccaagcccgggtttacaaaaatttttgcttccccagaaaattggttttaaaaggatttccagggtaaaaaattaaaaaggtttttcgttcccaagactttaaatttacggggaggcccacttggggttgtttgaccatcaagtttcaagggaattgggcaaaaaatggaatgaacaggtttcccttnnnnnnnnnaattaggaaaaatgccaaacccttcaaaggagctggcgnnnnnnnnnctccgaaaaatttgcagtatccttcacttcagggcttacttggccatttatagaattctgcctgcttttaaatgtccaataaaaatgtacgtcaagttgactgactttttcaagcccctgaagtgatatgtttcaacgtccacattcaggctaagagaaaagtcaactagaggcttactcaaataactgacttcctccttccctctccccacaaacacacaggactccctccctcccacagagaacacaaagttgttaactgaagaacaagataaataatatgctagtccattttactgattttaaagatactgcaatttttatacatttcgatgatttttcaacattttgcagctgtttggctttgcagcacagcaattcatacactatactgtacaaaattaccagcaagactggaatgatgtattaatagaaggcaccatcatgcttattacattaccagagaacaaaaatacagtaaagacaattttcactgtacacagcttaaagaaaggaaaaaaggggaggaggagtgtgttgagcagccagccatccctgtactgaagaggggcaggtagaaaaatcttagatatggagctactaaatctggtctaatagtcaagaccatcgcatttgaagttctaatttttattatttagttcataactaaaatgatttccttctggaatatacttgtagtcttgttaaggtttatgtgtacacacgctggtcacagcaagcagataaaatgccctcatcatttcacaaactattttctactggaaaagaagatgagattttttccctgttgcctcctgttgcagatgtcaatgttaatgagttcagagtacccattagtacattttgatgagtgcataacaagtttctgttggtttgtatttttggggggagccaagaaaaaaggcaagattctccaattgcacaaattgcactatttgtgttcccagcattaacaggcagaaacagtaacacttaaacaaaatgtgcagcagaagattttttttgtactcaaaggacctgaattcagtgggcatgtccttttaagttcactttgtcgtagatagtttaagatatggtcatttctcagtccttaattctccaagtctagatttataaattaacaatgtgaatcctgttgtgaaattggggaaataatgtccacctcaatttaactgataacccaagatgcttttcacatcaaagaaatgatcaaaaaggctgtgtcacattccaaagccnnnnnnnnnnttaacaagaatgcaaacacgatgaataatgtaccactgccaagactttgccaacagtggagcttcagcgacgctgtcctgtgaagcggccctccatttgcccggttcctcttccagagccaagtttctgtgccatgccaccccttggaggaggtcctcttccatcacgatcacgcatcattccaccacccacaattccacgtggaccaccgggacctcgatcattgcgcctaatatccctgcgatcatcaccaccacctctggtttctcgctctcttgcagctcttgtttttttctcttccacatttaaacgtacttcccctcgaaacataatcggttttgcaattaagattctctgaactggttcagagtcatcaaaaaccacaaaaccacaatttggaagctttcccccaacacccttggtattgatgcgaagttccacaacgtttccaaaactcatgaagaattcctttagctcattttcatcaatatcatgtggcaagttaccaacaaaaagttgatgactatctggatagcgaattattctacgtgtgtcagagtcattctgttccatatctcctctcctgntcttgtcctctaggagaaaacagtcttctctagtctgttcaccacacgagtgctgagtgacttctgttaattcactatcg

SEQ ID NO: 139198 - DNA, 800 bp, Homo Sapiens
tttcataggttttgtctggctctatggtttcctcatttttaattgtagaaagtggctctgaatgtgtaaaactgtaatttgtttctaacttatttagatagctcattatggaagtgtgagcaggagctgggtcatgttgaagttgtttatcatgaatgttcaagagtgatttggtaaggttattcccaggcttgcagcgagcgctgtccacactaagatcggagagaagctttgccatgctagtctgtaaagttctggttaattctcttagtcgagtcacctcagcatcacgctgacgtaatgttatccccaatatctggttttccttttcagcagtttctaacttaaactgggagcttttcacattgactagggcttcctccaattcaatttttattcttgttatctcaatatcatattgctgtttattttcaagtatagtttgatctttgtctttaaatatactactaaattttttgttttcatctttctgattttcaatcacttttaacagctcttcatttttactctgcagtaattcctggctctttagtgactcctccaattgattttgcagtgacatattcaatgactgaagagaaaacaattcaaggttgcaatccacagcaccagatggtttttgagttttctgttgttctctgagttgctggttcaaaattctcaactgccttcgtaactgagcattctcacttcttaatggttgcatggccagtgctatctcaacttgaatatctgtgtttccacttactgttggaagtacccatatacatgcctccatt

SEQ ID NO: 139199 - DNA, 1378 bp, Homo Sapiens
  misc_feature (28)..(28): n is a, c, g, or t
agttacgaatcatgtcactctcatttcntatctttacattctggatcaacctgtccaaattttcttccgtagttccattaatactgaagatataaagtagaattgctcttattttatcacaattatcatgatttttgttgagtagaactggaaggagtactcgcatggaatctttcaccttctgtccttctgcatcagttccaagtgcgaggtcctgttcagttttgcagagcttttctatattaagcttgaacttattcatgcaatcttctgctaagttaagatggacaacttgcttagtaatctgttttcggaaatggggcatctttttcatcagctgggtaagagcactaagtgatgtctttccttctgttgctttctttgttgatgaaatttctttcataagcttgggaatttcctctaacacaaccgcaatatgtcgatgtcgaattctaacccagaggtcatcttcttcttcaaggatggcctccttttcttttccatctgttttatatttgtatgtatcattctcaattggtagtagatcatatgccattgcctgaaaggtcagttcatgcaggacagtggacacaggatcaaagccacgatcaattattaagagctgtgaatgagttttaccctttattaggctcttttcatcaatcttgtagtagtcttcaagctttttttcaacaagctgtgcaagcttactggcattatctagaggtttacttttatatcttactccgggattttcatccaaggtggcacacactgtaactatctggtcagccattgtttccataatggcatcttttccctttgcattaccagggtctggactataacagtaatagaatgcatctggtacatcaagagtatacacctgagattcatgtggaatgaaggaaatatttatttctttacatcttcttattgacttggagcaagaagccttaattttgttaaagagattatcagggcaaaagtcagtgaagtaaatatatgctgctttatacttgttctccgatttacttgcaaaatcatgtaagaaacaatctacagactttgatgtcggagtgatgaaataaagagctttcatttgtctgacaggttcacggttcttataaatattctctacaacagtaataccttcttctagaagatctgtcattttgcaacacgatgccaaaagcttagtgcgtaaattcatctaaaagcattatcttccattcgccttctttcttgcagtcatcaaacactgttgcttttatcttctgccacacgacgctctttagccccctctctgccaccggcggcgccatcttcccgacactgcggagcagcagccaccaccttccactcccaacctacaatt

SEQ ID NO: 139200 - DNA, 572 bp, Homo Sapiens
atgtgcggatcttgtttcttgctagcagcatgtgcagcaaatcctgaggccaaccaggcagcacataaactaattttctttcttgacaatctaagtatttctcatggagatatgtgtacacatcacacgggaggcctggtgcgtagcgtttgaccgggttggagcctctccggcctccacccgcccggccatgatttactcggcttcttatactgcctgggcttgctttgtgtaggttagccgctttgcaaaagcagagcaagattacaatggtaaccacacgcatcctgacatccagctggccccaattacttcgtgttacagacggaacaatgaaagtattcctttgaaatccaagtctgggtaatcttaactaatgcagttctggaacaatgagacccagctggggtacgtggagtccctaggctgaacttggggaatggatgccacaagctcatctatctggacctctctggctgcacccaggtttgtctttcagtcttctctttgctgcggtgtgtgaggaagttctccagagaatgggctgcattcagccctcacgttataaaaat

SEQ ID NO: 139201 - DNA, 778 bp, Homo Sapiens
actaagctctgggcgacgttgctggcagaggaaatgagaagaagcccagtagcgtgagggctctgtccattgtcctccccatcgtgctcctcgtcttcctttgcctgggggtcttccttctatggaagaactggcggcttaagaacatcaacagcatcaactttgacaaccccgtctatcagaagaccacagaggatgaggtccacatttgccacaaccaggacggctacagctacccctcgagacagatggtcagtctggaggatgacgtggcgtgaacatctgcctggagtcccgtccctgcccagaacccttcctgagacctcgccggccttgttttattcaaagacagagaagaccaaagcattgcctgccagagctttgttttatatatttattcatctgggaggcagaacaggcttcggacagtgcccatgcaatggcttgggttgggattttggtttcttcctttcctcgtgaaggataagagaaacaggcccggggggaccaggatgacacctccatttctctccaggaagttttgagtttctctccaccgtgacacaatcctcaaacatggaagatgaaaggggaggggatgtcaggcccagagaagcaagtggctttcaacacacaacagcagatggcaccaacgggaccccctggccctgcctcatccaccaatctctaagccaaacccctaaactcaggagtcaacgtgtttacctcttctatgcaagccttgctagacagccaggttagcctttgccctgtcacc

SEQ ID NO: 139202 - DNA, 1003 bp, Homo Sapiens
cagcagggccctttgtgtctgcagagccaggacctgtctgtgtagcagctccatgtctaaaggcagccagcaggaagtaggattacagatcctgcgggtcagggctgcctcctcaaaggctgagcagtacagctgctcctccaggtcttccagcaaccggggcttgattagcagcttcccagtgacggagaacatgcgggcgagacccagtggagtacacaccaggagcagcagaacccccatggaaggagatgcatgagtagaggtaggggagatagtactcccaaaagtcatagagtgactctctgttggccttgttcttgtccacaatggctgatgccacccacaccatacctagcaccagcagagtgaggagcatcaacatcaccactgttctcatagacccggcccaggacaccctttctggagccagcaaagccctcagactcagtgaagaaatatgcaaagggcatgaggaagatgagggacaggttggagaagagaaaaacaaggttccagaggccatggatgagggagccgttgagccactggatgtagtagttccgaggcagggagagcagcacctcattgctgatgatggagaagggcaggagcaggacagcacccagggcaattgccagggtaaaggtgcacagctcgagcgcaatcttgttgacggtggcatcttcatcatccactgtggtgaactcagcaggcttcttgaagcgggtcaggaagatgtggcagaggatgtacagtgttgcaaacagaagtgttgatataatacactcgcggatcctctcgtggaatagctgttctcgcacggatagcacttcgtagtcaggtgcttccatactctgctcagcatgactgaagccgaggtgcctctgggcccggggaggacgagcggggaggaagccgccgccgccaagcacccagacccagcctaggggcctttcctcgcagcctgcgacagaaactcggggcagtctggggctcagat

SEQ ID NO: 139203 - DNA, 481 bp, Homo Sapiens
cccttttaacctctattagagttcaggaaggaggtggaattgaatgaaaggaaattgagcagcttcccataacacactgctcagctcaacctgaaggaacgcataagccaaaacaccagagccggtggcaaggggagagcccaaactgtctccttaaggaaagggcaattccattctaatgcactttcttagcactgtaaggtgaatttttttctcatctccctagaactattgtttgttggtttttccaaagatgttcccaagaccagtcctcttttctatctacacgtctaccagtggtggccatcttgaactgagttcaatttgccttggccagcagaatctgaagtcatcccagagaccaggaagtacaaacctagtatcatgaaggtgtcccatggttggagtggcatcttgtcattgtgatctgggtgtttagaaattacatatctagttttttgttccgttttgttttgttatg

SEQ ID NO: 139204 - DNA, 583 bp, Homo Sapiens
gactttaagccccaaaggacctcaaggcattcaatgcataccgttttggtttttattttctcctgtcctttgctttctggattttcatctcatgtaaagcatgtgggggttttatttttatatttttgtgtgtgtgtgcagtgtctgccccaagcaagtctcttgggaggaggaggcggcggctggctcgaaacaggtttaccattgattctgatgccgtctccgcaagcagcccggagaaagagtcccagcagccccccggtggcggggacactgaccgatgggtagaggagcagtttgatcttgctcagtatgaggagcaagatgacatcaaggagacagacatcctcagtgacgatgatgagttctgtgagtccgtgaagggtgcctcagtggacagagacctgcaggagcggcttcaggccacctccatcagtcaacgggaaagaggccggaaaaccctggatagtcacgcgtcccgcatggcacagctcaagaagcaagctgccctgtcggggatcaatggaggcctggagagcgcaagcgaggaagtcatttgggttaggcgtgaagactttgcccc

SEQ ID NO: 139205 - DNA, 634 bp, Homo Sapiens
tttttgactgaattacttttattaatatacacatcaagttactgtaacggtgacttcatgtagtttcccccttaaagatggcacttgcaggtacaaagatgcagagatgtctacagccttcagatgtttacttgaaaagattcttcaacagcagtttggtattgggtttcttcatctagctgaagattcacaaattctccataatcaaattgatgtctctgatttagatgactaacgaaatttctggtaatctggctaggatctccccaaggaagagacacacaaataggacatgtcacaggaactatctgaaataggtgattactgttacagtgatccagtaaacgctgtctggtaaaatttgattcttgacacaggggacacttaaaagtaggatgaccagaagaacttgtattctcttggtaagtttctgtgttatcagatgtggatgtttcactcctattgctgttccctactgaatcttgagagatctgaaagtttggaatgatagaagaaacaccatattcatcctgatacttcttacaagatttgtaatgatgtctcatgcgatagaatttaatctgttttgcacagcatctgcagctaccagaaaacttcctcattatatttacaa

SEQ ID NO: 139206 - DNA, 767 bp, Homo Sapiens
gtaatacaacttctttgacttttcagttgtaacacccccacacatgtaagactccttctgctgaaacacagtactgagaattcagtgaggatactggaatcgctaactggcactgaatctcgtcacaatcatcttccttctgcgtgagtattttatactggatctcacttccgttcattctcacatacacattgtacaccctaatgtaacaggtagtttcgggatcataatcgacttcctgctcgtctccatttacaaaaactgaagggtgaaatatgtcaatcatgatttgcttctcctcctttctgatatccagtttaggtggtccaatttttccatctcggcatacagcaaattcttctgactttgcataggcagattctttttgtccaaccctggctttaactctgacccaaagagaatttgatggatcaccaacatgatcagaaatattacaataatgatgagaaatattgatgcaggcatcaatccattctgaattcttaacaccatagttctttacctctacggtaaaaacagggacctgtggcatgatctggtactcccaatatacgatagggttcatgttataggattcaattgtaacattagttggtgtaggcactgaggacggccccagatccgcggtgcccatctcagccctgctcacaccctgcatgacaaggggtaggagaaagaggagagccatgctgctaccgacggtcgctggctccaaccccgagcgcgtgcgggaccagcccagaact

SEQ ID NO: 139207 - DNA, 885 bp, Homo Sapiens
gggatacttgtgcggttccaagtgtggagaaagcggctctgggtctagattgagggatactccccctttccaccatgggcaagaagggcaaagttggcaagagccgacgagacaagttttatcacttggcgaaggagacgggttaccgttcccgatctgctttcaagctgatccagctcaatcgccgctttcagttcctgcagaaagcccgagccttgctggacctgtgtgctgcgccagggggatggctgcaggtagctgccaagtttatgcctgtatccagccttattgtgggagtggacctggttccaatcaagcctctccccaatgtggtgactctccaggaggacatcacaacagaacgttgtaggcaggccctgaggaaggagctgaagacctggaaggttgatgttgtgctcaatgatggggcccccaacgttggggctagctgggtccatgatgcttactcacaagcccatttgacactgatggctctacgtttggcttgtgactttttggcccgtggtggcagcttcatcacaaaggttttccgttctcgtgactatcagcctctgctatggatctttcagcagctgttccgccgtgtccaggccaccaagccccaagcctctcgccatgaatctgcagagatctttgtagtctgccaaggattcctggcccctgacaaggttgacagtaaattctttgaccccaaatttgccttttaaggaggttgaagttcaggctaagaccgttactgaattggttactaagaagaagccaaaggctgaagggctatggctgaggggtgaccctcacctctctatcaacgtacccctcagtcactggacttccctcccgagctgcccaaaccctgttggactt

SEQ ID NO: 139208 - DNA, 861 bp, Homo Sapiens
cattatcttcagttgtgctgaggatcacagtgcgtcggaagcagcgagtacggaaggatggtcactcgcaagcttcacttggctttcttgtaccaatcagtacgtctagctgaactcacctcttaaagcaatttggggtcaagaattactgtcaacttgtcaggggcaggaatccttgcagactacaaggatctctgcagattcatggcgagaggcttggggcttggtggcctggacacggcggaacagctgctgaaagatccatagcagaggctgatagtcacgagaacggaaaacctttgtgatgaagctgccaccacgggccaaaaagtcacaagccaaacgtagagccatcagtgtcaaatgggcttgtgagtaagcatcatggacccagctagccccaacgttgggggccccatcattgagcacaacatcaaccttccaggtcttcagctccttcctcagggcctgcctacaacgttctgttgtgatgtcctcctggagagtcaccacattggggagaggcttgattggaaccaggtccactcccacaataaggctggatacaggcataaacttggcagctacctgcagccatccccctggcgcagcacacaggtccagcaaggctcgggctttctgcaggaactgaaagcggcgattgagctggatcagcttgaaagcagatcgggaacggtaacccgtctccttcgccaagtgataaaacttgtctcgtcggctcttgccaactttgcccttcttgcccatggtggaaagggggagtatccctcaatctagacccagagccgctttctcctcgtgccgaattcggcgcgccgtcgacttcatactctcccccct

SEQ ID NO: 139209 - DNA, 846 bp, Homo Sapiens
  misc_feature (266)..(328): n is a, c, g, or t
acaatgtgaagagtcatagggacaagaatgccttctacaagccaaggagagaggcatggaacagaggcccttccttgcagacctcagaaagaaccaactctgctggaatctagatttgggatttccagcccacagtacggcaatacaattacagtttaaatcagcaatctatgatgctttgctatggaagccctagcaaatgaatacaaagacattctaagtaaaagaaggggaaagaaaggaagagatggtctccgtactgcagnnnnnnnnnnnnnnnnnnnnnnnnnnnnnnnnnnnnnnnnnnnnnnnnnnnnnnnnnnnnnnnttcacttcttactttacttactgagcggcctttcctctccgcccgctccaggagctgccggtcgcgtgtctcctggcccagcaggttgtggtgggccacggtctgccggagctcttccttccgggcccttctgtctttttctttttccctgtcctttcctctgctgtgagacttttctgcctctcgatgtttctccttcagcttttctttctcccggtcttttgcgtctcttctcctctccctctgtctgtctctgtccctctccccacgaggactctccttagcggtgtggacttcggccaccctgtctctgctcctggcatcctggtcgggatccctgcacctcggctccttatgttcaggaaggtccatctcagactccttacgcagcttcttctctctgtgctttctttcttccttggaaccacctgactgtatggcccagagatgttttctgaggtcatctgctttccaggtatcatctttggttcttctcttcccggactccatcgcttccc

SEQ ID NO: 139210 - DNA, 1397 bp, Homo Sapiens
  misc_feature (75)..(110): n is a, c, g, or t
aatgatcaatcatatagggcgtactcggccgagccgaacgacgagcgcaggagtagtgagcgaggaagcgggcgnnnnnnnnnnnnnnnnnnnnnnnnnnnnnnnnnnnncagtcgacggtacggacatatgcccgggaattcggccattacggccggggaaatgagagtcatcttggacaatgaggagcagagagagctgcaaaagctggaggaaggtgaggtgaatgtgctggataacctggcagcagctacagaccagctggtccagcagaggcaggatgccagcacgctcatctcagatctccagcggaggttgaggggatcgtcagtagagatgctgcaggatgtgattgacgtcatgaaaaggagtgaaagctggacattgaagaagccaaaatctgtttccaagaaactaaagagtgtattccgagtaccagatctgagtgggatgctgcaagttcttaaagagctgacagatgtccagtactactgggtggacgtgatgctgaatccaggcagtgccacttcgaatgttgctatttctgtggatcagagacaagtgaaaactgtacgcacctgcacatttaagaattcaaatccatgtgatttttctgcttttggtgtcttcggctgccaatatttctcttcggggaaatattactgggaagtagatgtgtctggaaagattgcctggatcctgggcgtacacagtaaaataagtagtctgaataaaaggaagagctctgggtttgcttttgatccaagtgtaaattattcaaaagtttactccagatatagacctcaatatggctactgggttataggattacagaatacatgtgaatataatgcttttgaggactcctcctcttctgatcccaaggttttgactctctttatggctgtgcctccctgtcgtattggggttttcctagactatgaggcaggcattgtctcatttttcaatgtcacaaaccacggagcactcatctacaagttctctggatgtcgcttttctcgacctgcttatccgtatttcaatccttggaactgcctagtccccatgactgtgtgcccaccgagctcctgagtgttctcattcctttacccacttctgcatagtagcccttgtgctgagactcagattctgcacctgagttcatctctactgagaccatctcttcctttctttccccttcttttacttagaatgtctttgtattcatttgctagggcttccatagcaaagcatcatagattgctgactttaaactagtaattgtcatggccgtactgttgggctggcaaatcccaaatctacgaattccagacagagacggaccatccactgaagtctgaaaggcaagggtctctgtaacatagactcttcatacc

SEQ ID NO: 139211 - DNA, 411 bp, Homo Sapiens
  misc_feature (99)..(154): n is a, c, g, or t
  misc_feature (274)..(274): n is a, c, g, or t
ttctgtctttttctttttccctgtcctttcctctgctgtgagacttttctgcctctcgatgtttctccttcagcttttctttctcccggtcttttgcgnnnnnnnnnnnnnnnnnnnnnnnnnnnnnnnnnnnnnnnnnnnnnnnnnnnnnnnnagcggtgtggacttcggccaccctgtctctgctcctggcatcctggtcgggatccctgcacctcggctccttatgttcaggaaggtccatctcagactccttacgcagcttcttctctcntgtgctttctttcttccttggaaccacctgactgtatggcccagagatgttttctgaggtcatctgctttccaggtatcatctttggttcttctcattcccgggctccatcgcttcccgcaggcccgggcggccgca

SEQ ID NO: 139212 - DNA, 534 bp, Homo Sapiens
ttaagggctaccccctattccttttgagaactccctgaggaaaactgttcttatcctgtctcccaggcttatacaaagcaggccttcaaccagccagactgactgcctctttctcttttcattgcccaagaattatatccagatccgagagacagaagattctgaaagggttcaatgaagtgagagtcatcttggactatgaggagcagagagagctgcaaaagctggaggaagttgaggtgaatgtgctggataacctggcagcagctacagaccagctggtccagcagaggcaggatgccagcacgctcatctcagatctccagcggaggttgacgggatcgtcagtagagatgctgcaggatgtgattgacgtcatgaaaaggagtgaaagctggacattgaagaagccaaaatctgtttccaagaaactaaagagtgtattccgagtaccagatctgagtgggatgctgcaagttcttaaagagctgacagatgtccagtagtactggtagcccttaactgcgggatcct

SEQ ID NO: 139213 - DNA, 1034 bp, Homo Sapiens
atttgcccccctttgggggaggggttgcgggcccttccccttggggccttcaacagttttttcatccagtttttgggaaaggcagggacccaggtctggtcttggtgatctccaggcccccactgcttttcggagcctcggtgaactgttcagcccccatgtagcggacgcgccaggacttgtcttcagcggcctggcgcagagtgggcatcaccagggcctccagatcctcctggggcagaagctgggcgatgttcacgcacgcctccaccgccagcagccgcaccgagtcctgctcgtcagaggccaggttggagaacatggggatgatctcactcttgacgttgtccagctccagcaccttggcaaactcccccagcttggaggctgcggcccgccgcaccatgggggtgtcatctgagcacaggttccggaagtactgtcgaagttccgccttcacagcactggacactcgggggtagcagacggagaagaggccgcaggccgaggtgcgggaggtgaaccagtcgccgcccgccagccgcttcactagcggcacaaagtgcgcctccaggtcagagggcgagtgctcgtgtgagatggcccgtaaggactccactgccttgtcccgcaccactgtctcctccactgtggccagcgactccagcggtggcagcaggcagtgcacgtactctgggcctcccaccagggtagtgaaggttcccagctgttctgccagggccaggaggacctcatcttcatcatagatggtatctgtaaggaaaggcagaagctcacttcgggtcctttcaaccccaagggccaaggcgatggtggacagcttcttgatgctgttgaggcgaagctgaacgtcctcattgcggagttcgtctatgagcaccgcgatggggtacagcgagtcgtcgccgtcggccgccgccatcttggctccgtccctttcctgtcagactgcggccagcgctgtgctgaaacgtggcctcgtgccgaattcgccacccaggcctcgctacctt

SEQ ID NO: 139214 - DNA, 946 bp, Homo Sapiens
  misc_feature (713)..(713): n is a, c, g, or t
gggtctaggtagcgaggcctgggtggcgatttcggcacgaggggaaagggacggagccaagatggcggcggccgacggcgacgactcgctgtaccccatcgcggtgctcatagacgaactccgcaatgaggacgttcagcttcgcctcaacagcatcaagaagctgtccaccatcgccttggcccttggggttgaaaggacccgaagtgagcttctgcctttccttacagataccatctatgatgaagatgaggtcctcctggccctggcagaacagctgggaaccttcactaccctggtgggaggcccagagtacgtgcactgcctgctgccaccgctggagtcgctggccacagtggaggagacagtggtgcgggacaaggcagtggagtccttacgggccatctcacacgagcactcgccctctgacctggaggcgcactttgtgccgctagtgaagcggctggcgggcggcgactggttcacctcccgcacctcggcctgcggcctcttctccgtctgctacccccgagtgtccagtgctgtgaaggcggaacttcgacagtacttccggaacctgtgctcagatgacacccccatggtgcggcgggccgcagcctccaagctgggggagtttggcaaggtgctggagctggacaacgtcaagagtgagatcatcccccatgttctccaacctggcctctgacgagcangactcggtgcggctgctgggcgggggaggcgtgcgtgaacatcgcccagcttctgccccaggaggatcgggaggcccctggtgatgcccacctctgcgccagggccgctgaagaacaagtcctggcgcgtccccctaacatgggggctgaacaagttccccgaactccagaaaagccatggggggcccggaaaatccccccgaacagaccctggttccctggccttcccagaa

SEQ ID NO: 139215 - DNA, 777 bp, Homo Sapiens
  misc_feature (92)..(92): n is a, c, g, or t
  misc_feature (122)..(122): n is a, c, g, or t
  misc_feature (129)..(129): n is a, c, g, or t
cgtaagtgatattgataactggcacgttctgccgtggcacatggaatttcttctgagcggcactccgaccaatggtcagtctgtggatgagntcatcttgcacttcctccatctgagatttncttcggnccaccggaagttgtttaagtctctggctgtctcgcacgatactgccaccactgtcactggagctgctgttttgacgtgttatatttgctgggacctttgacacaggaacaggtgctggagtggaagggggaaggggaacaggaacaggagctggtgttggaggaggtgatggagcagggggagtatcagctggtcttgggccatactccatcctttgtttctgtatagtatgagtataaggtggatcaagcacgcccccaatccagattctggaggtctcacaatatccaaaatgttatttggcacaaatccagagtctccacttgcatttcgaactttccaccattgcttccgatcatcaagtatctctaaaatatcatcctttagaaccgagagctcactgttgttccttgctacaaagtcatacttggatttggcatatttcttgggttgtgttttgagtggttcataatttctatctatatggcaattagaagttggcttaaaagcaacagcagcttccccttggtccaggtgggatcctcttgtgtaaatgttgctactgaacgcatagccatcggctggatgatactctgatacactggaatgctctgtggataatctttttatttcctgtttgcgctgatg

SEQ ID NO: 139216 - DNA, 1249 bp, Homo Sapiens
  misc_feature (183)..(183): n is a, c, g, or t
  misc_feature (208)..(208): n is a, c, g, or t
ttttactgtaggacttcaaagaacttttaatttgctcacgcatactccaaagatttttataaaaaaagtattttcttaaacttagtttataaaaaagagggattccataggcacgaggacccccagtgaaccaagttttgggaagtgctgctccaccggtgggcccataagagtcttgtaaangatagaaaagtaggcccccaaaaancaaactcttttcccacccagccatcagttactatcttcaaaactgcagtgtgggctcaatgttgtcattctgtactctcctgtcttcagcagggtttatggtattttttccacttgctggtcaaatctcctggaagaataccctgcctggaaaaagttcactggagtcagaagatatttgagtgctagacccctgaattcagtagctagaagaggggtgcccttgctgctgtgggacaggggagaaccatggcccatccaggcactctgattccctgtggcttctggacctccatcatcatctcccatgggtaccaagggggaccctaaaccaatttcctccctggttttttgagaaataaactcctcatctgtagaccttaagtgcactgaaaatcccagtggggccgtcaacatagtcaccctcttttgagactcacagaaaggcactgccttgttccattctttgctatagagatctgggaacaactgcttcttgatccgcaaaggatggtgggaaggctgcttttcaaggtccgcaggccagggagaaagtttctctttcttggccttctttgagtctctgtcagcttgagattgatcagcactttcctcaggggattcaaacacaacaccttgggttctcggcctctttagcctcctttctaacagccagagaaggcttggttttctagaggaagaactcatgtattgctgtacagagtccggaatcaggggcacggagatcctggggctcagactgtcctgaaagcctccacagggccgccgacttacaatgggcaccacctggcaaggcttcagtgctgcgacaaaggcacgaagctcggagtaagaggaatggtcagagtaagggatgacgtggatatcagggtgggagctgtggatttttcggcttgtgggaaggatagcaatcgtagggtgggtctggttccaacgcagcatgttggaatggcagatctccatatggtctactgcatggatgcggccagccttctcctccactctgaacacatctgccagg

SEQ ID NO: 139217 - DNA, 587 bp, Homo Sapiens
gatgttaaggaggctctgattaatgccttcaagaggcttgataatgacatctccttggaggcgcaagttggtgatcctaattcttttctcaactacctggtgcttcgagtggcattttctggagccactgcttgtgtggcccatgtggatggtgttgaccttcatgtggccaatactggcgatagcagagccatgctgggtgtgcaggaagaggacggctcatggtcagcagtcacgctgtctaatgaccacaatgctcaaaatgaaagagaactagaacggctgaaattggaacatccaaagagtgaggccaagagtgtcgtgaaacaggatcggctgcttggcttgctgatgccatttagggcatttggagatgtaaagttcaaatggagcattgaccttcaaaagagagtgatagaatctggcccagaccagttgaatgacaatgaatataccaagtttattcctcctaattatcacacacctccttatctcactgctgagccagaggtaacttaccaccgattaaggccacaggataagtttctggtgttggctactgatgggttgtgggagactatgcatag

SEQ ID NO: 139218 - DNA, 966 bp, Homo Sapiens
gagtatgaagtcgacggcgcgccgaattcggcacgaggggagagttaagctcccgttctccaccgtgccggctggccaggtgggctgagggtgaccgagagaccagaacctgcttgctggagcttagtgctcagagctggggagggaggttccgccgctcctctgctgtcagcgccggcagcccctcccggcttcacttcctcccgcagcccctgctactgagaagctccgggatcccagcagccgccacgccctggcctcagcctgcggggctccagtcaggccaacaccgacgcgcagctgggaggaagacaggacccttgacatctccatctgcacagaggtcctggctggaccgagcagcctcctcctcctaggatgacctcaccctccagctctccagttttcaggttggagacattagatggaggccaagaagatggctctgaggcggacagaggaaagctggattttgggagcgggctgcctcccatggagtcacagttccagggcgaggaccggaaattcgcccctcagataagagtcaacctcaactaccgaaagggaacaggtgccagtcagccggatccaaaccgatttgaccgagatcggctcttcaatgcggtctcccggggtgtccccgaggatctggctggacttccagagtacctgagcaagaccagcaagtacctcaccgactcggaatacacagagggctccacaggtaagacgtgcctgatgaaggctgtgctgaaccttaaggacggggtcaatgcctgcattctgccactgctgcagatcgacagggactctggcaatcctcagcccctggtaaatgcccagtgcacagatgactattaccgaggccacagcgctctgcacatcgccattgagaagaggagtctgcagtgtgtgaagctcctggtggagaatggggccaatgtgcatgaacgggcctgcggccgc

SEQ ID NO: 139219 - DNA, 1662 bp, Homo Sapiens
  misc_feature (182)..(182): n is a, c, g, or t
  misc_feature (185)..(185): n is a, c, g, or t
catgttgatatgtgcaccattggtgctgctgaagagtttcatgcagaaattggccagcctcctgccgatgtgctctgcaaggtaatcgcctctaatagtttctcttaacgcattccagttggtctgtgttccatctcatgcagtgcgtgacccgcccatcccgcgtcagcacgtacaggagnccncactcagcaagcacatccactacatcctcaaagacggtgctataggctatgaacttgttgcacaggtcatagatgtttagaatctgcttgtcggagctctgtgaatccctgctggtaaactctgacttgggagaaaccttccggtcacgggagacaatgataaggtagcctctaaaccagtgggcaatgagcttatggccctcaaaggcgaagcagggcccacgttcatcaggctggtacaagtagacacactcatccccggccacaatgaactgcaggtcctgagaagggtcacttagggctgagcagcgcaggccacaaccatgggtgtccaactccacgcgagggtagtcttttccagaaactatataggactggacgttctctgttgtcacaacaaacaagtgagtggtctttcctgcttggcgaaaggccaatccagttacaggatagttgcccttgtgcaaaatctgggtcttgctatgccggtcccgggtgatgtctcctttgttcaatgtaacactgccatctgtgaaaccaatggccataaagttgagattttcatggacagtcaaacaagatacaacagttggctctgttcctggaatagcagggaagattcgagtgcagagtggattgccaccatctctcttctccaggttccagatcttaaccaaggggttgatgccctcttcatcttctccaacagatgccagaatattgtgctgcttcagttggtacaggtgtgtcacccgtagtttgtaggcttggaagcctgtaagctgtagggaacgtggcaagaaccagatctggccttccatatctccaaagaccaggctccctcggcctgagtcgcagacagtgatgccaggagggaggcaaaggaacttggaagcagcggatccagaagcaggtgtggccccgggagcggccccatcattgctcagcggctccttcaccagctccttgtcgaagaaaacgaagcgccgccactgcaggtaggccgccattttggcccagggctcccacctccgggagctttgtcacgtgagctgagccagcgaatcacgtggtcggcagcttccgggagcccgcgggcccaggagctcctgagtcggggtgacagcgtcccgctgctgggaaagtgggcggggccgcgcggggtagtcctagatctgcagtgtgcgagtttgccggatgtgactgtaacttcgctagctaaaatgcttgagagcggacccttcatccctttgagcatgtttcttcctaaaatgcgcggataccgggagatcaagatgagggatgtcatgtgccttgtgaactgtcacccaccgtgcgtaagtgaatgacgttttgacctcgacaggactgttttggggcataaatgaaacagtgtatgttaaaccaggttttcggctgtatgagaggagaaataaaattagaagtttgtgtctgccaccacgcagttttgaaccat

SEQ ID NO: 139220 - DNA, 376 bp, Homo Sapiens
ggataggaatgtgttatatgtaccttaaacagataatttaattttagcaatttatcataactgatacttagctaacaattgtccataacttgtttaagtgtaagaaataccatttcagtaatgaaaaagaaggaatactactttctaagaaagaagatcttataatagacatatttagtaggttaaactactcctttgaaagaataagttttggttcaaagtggataatgaagacgagatttgtttttctcttctctggctgatttttaaggatattatgtagttcatttagttaacagaattgaaatgtttgatatggcaagataggtatggtaatttcaaagtgaattgggaattcctctggctcatagaaccc

SEQ ID NO: 139221 - DNA, 856 bp, Homo Sapiens
tgttatttgcaaatttgtacaaacatttaaatggttctaatttccagataaatgatttttgatgttattgttgggacttaagaacatttttggaatagatattgaactgtaataatgttttcttaaaactagagtctactttgttacatagtcagcttgtaaattttgtggaaccacaggtatttggggcagcattcataattttcattttgtattctaactggattagtactaattttatacatgcttaactggtttgtacactttgggatgctacttagtgatgtttctgactaatcttaaatcattgtaattagtacttgcatattcaacgtttcaggccctggttgggcaggaaagtgatgtatagttatggacactttgcgtttcttatttaggataacttaatatgtttttatgtatgtattttaaagaaatttcatctgcttctactgaactatgcgtactgcatagcatcaagtcttctctagagacctctgtagtcctgggaggcctcataatgtttgtagatcagaaaagggagatctgcatctaaagcaatggtcctttgtcaaacgagggattttgatccacttcaccattttgagttgagctttagcaaaagtttcccctcataattctttgctcttgtttcagtccaggtggaggttggttttgtagttctgccttgaggaattatgtcaacactcatacttcatctcattctcccttctgccctgcagattagattacttagcacactgtggaagtttaagtggaaggagggaatttaaaaatgggacttgagtggtttgtagaatttgtgttcataagttcagatgggtagcaaatggaa

SEQ ID NO: 139222 - DNA, 414 bp, Homo Sapiens
agtggacttgttttaagtttagagaaactttgagtacagatactgtgagcttacattgaaaacagatattacagcttatttttttctacataattgtgaccaatacatttgtattttgtgatgaatctacatttgtttgtattcatgttcatgtgattaactcttagaagtgttgttaaagatgcagagtaagtattatgccccagttcagaaatttggcattgatcttaaactggaacatgcttttactttattgccctaacaattttttattaaatttatttgaaaatgcatcacatgatgaaaaattatagtagcttataagagggcatatacagtgaagagtaagttttccctcctactctcgatcttccagaagctgtacttttaccagtttctttgtcccaccaactt

SEQ ID NO: 139223 - DNA, 1753 bp, Homo Sapiens
aggttccaagaagggaggattgaaaccttgaaataaaccctggtggttgcttcttcccaaaagaagccaggaaaagggggggttcctattacggggcttacggttgctttggttaggggtggcagaaaccagtccccttccctgacagcatttcctttggaaaaataattcagataagctgaattcctggtttggccaagccaaacaaaaaggaatgaaaaccaaagccctaaagaggaactcacctcctggctagtgcttggcatctccatggctgagttacccatcaaggagtgaaggccttcagggtgcttcggttgctcctgtcatcccgcgctcagagacaccactgggcagaaccgccatcccagccagcaccaaccaagagcatagatggtgtgggcagggagtagatgtgtggccaagcatgtgccacctctgtaggggctgctgggagtttgctgtcctcagctgatgggcatgccagcctacaccatgcagtgcccacgggctccacggtcttcctgccgtggctcatgtttctggcccatgtgacagctctttggctttaccgtatgtgaggacagcatggctggaagccaagggtactcaagagaatcacaaagagcagtcgtgctagacctaggagtcagtgatgtgactatgatgtgggggtaaaatgtcctttctcacaggcaccctgtgaggactgccggtcccagcttagccatccttccctcctcggtgcactctgagctgctggccaggctggcaaagccagagctgctctgtcggatgtttgtttcttattgcttcctctttatcccctccctcagattgattctgcagggaagtggggattagggtagaaagacatgggtcaaggagattatcaacctcctgaataacagtacaaagtgctttaaagaaacagatcccacaggcatggagaagggccaagggttctgtcatatgtagggtcttggcaccctggagggcaaaagaaatgctcagtttcctcattactagatttagaattattcatttcctagattattttttaaaaaccaaacttatcaagcctgtgcttaaacaccttaggaaaaaagacgtcccactttctgcaccagggcctctacagcaccagaactgcctttcccccagctgaggcctaaggggcagtagcccttctgcacagggcctaggggaaggttctcagcaggaggtgggtcagtccatatgccccagggagcagaagcagctccgtcgggcaggaagggtgatggtgagcagataggacaggacgcagtctccagaagtgctcaggggcaaggcaggggaatgtggtccctcctctgcccagaccctctgacctctgagcagggcctgtcatgcctctgggtgctagagcagagacccaggcagcagcagcatggggtggccaatggggcgggttccacaggatgggagatagggcctcccgtgccctgactccctgagggtctggtcagtcgcgatgggtagactggtggccgagctgccggtcatcgtaagtgctgtagcgcttgacgtggatgcggcggacacggtcccgcagttcaaaggtctcctcatcttcactgggggaagcctggctgcggctacggcttgtggcctccaacaaggagttgtcggggacgcgcctcgtgccgaaatcgccacccaggcctcgctacgtagggatttttaatcttttttgcatcgtggttgtggg

SEQ ID NO: 139224 - DNA, 584 bp, Homo Sapiens
  misc_feature (143)..(154): n is a, c, g, or t
  misc_feature (484)..(493): n is a, c, g, or t
gattaagaaaattttcatctctttgaaaatcttgaaaaaagttttttctcccaatagtgattttaagttcctcactcccaccctcccccgacgccaatttggccttcctttctcaaaactagcttgcattttctttcttcttnnnnnnnnnnnntcacacagaattgcttttgtatcatgaaaagtaagcctccaaaatgatttatacttgctgtctgggcatcaaaaatttcaaaccagtttgtaagttagaaacttctgacagcttcttttcccaaattactctcaaaaggctgggctattttgtcatggtgtcttgggctaacatctatatttcattcctggaacattgctatcaaaatctaaagcctaattcccttcttcagagggttgctcgggatgcagccctgtgttctctggaaggtttctggtctccagttaaggtgcctaactgctggagagtgacctacagatgacagtgttnnnnnnnnnntggtagtaaaaggaaggagggagaaaggtctacagtaacgctcttgccaaaacattcttttgcccagccaatctacttgaagagagagctc

SEQ ID NO: 139225 - DNA, 675 bp, Homo Sapiens
ccttttcaagctcttcaatttctttgtaaaactggaataattcattgtcaatctctgatttttcagagttaaatttctgtttctctttttgtcctcctctgtcatttataccatttagaacatgtgcctcattcctcccttcattacgtttctttttctcagggggtttgtaaatgggtcctataaatgctttacttgtgctatatatctcatcgtctgcggatactaatggaggacgtgcttcctgtaaaacctgtgaatcaatggattcaataacatctggtctattaccaggcatctcatcatgcaaaggtctatgcaaatctgtagttttgattttgttctcctgcaaataactatgtcctctgacatcaatgatggtcacagggacccaatcatttccagttttctcttggattctgtgaaaatcagcattactatgattgtgaaaaacatacgactctgtggttgacttcaattttttacagcgtggctcactcgttacttcttctctaggtcccaagaatttaccttcaatttcaccataagacatcttactctacccctacgcattgacctttacctcccaataaaaccttcttttaggaagacacgaacctctgtgaaggtgaaagaaaagcggagacagcactaaagccgaggtctggagggacc

SEQ ID NO: 139226 - DNA, 583 bp, Homo Sapiens
tgcagcgaaccattcagaaccaacatgaactttcattctgaggtgtccaatttatgttacttgtacaaagctgcaaaacattcctggaatatccactttttaaatattttaacacacaggaaatgggtttcaatatctattatcaggtatccatgtttataaatgtgttttcctaagacatgcatcaacatcagaaaagttattttccctgcattttaatttgcatctacctttagacactgcagtgaggccctgtggaatacagtgacttctgagttatccactcttcccaggaatggccaggcatctgcatgaattcaggaaacaataaaacaacaagaagcaagtaccattgtcaaaacctaaggataatgttactgattttcttcctgttttacttaggtaggtaaagacatgtggacacctttcttttacagtgtttaattttgataacttgctcttttctcagaatcagcattgatggggaaaatatattatccttatgacctttaaaagagctgtatctttactcaccattggtgagctatgaaaacgatttctccagccattcatgctcaaggta

SEQ ID NO: 139227 - DNA, 826 bp, Homo Sapiens
  misc_feature (57)..(57): n is a, c, g, or t
agcatcctaaccagtgggttttgatctatacaatcaccccacgttgcagctgtgagntcctcgtccagcaaacttcaagaaacggagcagatggtgctggagttctgactctgtagtgcttgctgcctctgaatctccttcgaaatccgtcttttaattcttgtctcgccccggcctcactttcacccggaagaggccatacacagggcggtggtcggacgtcttgatcccggggcaggaagagtagctcacaggacagatgtcacccttgtggcggcttctgtacaagacgcggtccgtgtatgagggcgtcctctgcttggaggtgctgtcgtacgtgtccttcccgatgtcaaacttgtatgatgggaggaagtggatgtccggctcctggaagcccttgaagatggaccctttccgcatctcccggatgagctggtcgtgctgcagcagcgccggcacgtccaccaccaggccctggcacaggagggcgtccacgactgtgcgcccgccactcaggcggaagttgaagtctccaaaccagaacacctcatcgaagcgggtggtgacgtccgctgcgctggagcgataggggttggtgtcgggcacatttctgggcaggaccagggcttgtacagtcctggtgtagtccagcagccgctccgccaccttcccgtcgcaggtgaagtgggacgtgatgaagaggaaggaggtgccaaaaaaggtgaagctgatgcccaaggcccccttggtcttgatctgagacacgatgcgtgtggtcaccgtggagcactccacctctgagcagaaccagagaggtccctcc

SEQ ID NO: 139228 - DNA, 583 bp, Homo Sapiens
aatctttggaggcaagagggagatggagatcgccaagctgctgaaggagaatactaccctgctcaagctgggctaccattttgagctggccgggccccgaatgactgtcaccaatctgctcagccgcaacatggacaagcagagacaaaagcggctgcaggagcaaaggcaggcacaggaagccaagggagagaagaaggatctgctggaggtacccaaggccggggccgtggctaagggctccccaaaaccttcacctcaaccatctccaaagccctctccaaagaactcacccaaaaaagggggtgctccagctgccccaccaccccctccccctcccttggctccaccccttatcatggagaacctgaagaattcactctcaccagctacccagaggaagatgggagacaaagtcctccctgcccaggagaagaactcccgtgaccagctattggctgccatccgctccagcaacctcaagcagctcaagaaggtggaagtgcccaacctgcttcagtaggaccaggctggcaggcaccatctgccaatgccatgactgctcaggcctcacctcccaggg

SEQ ID NO: 139229 - DNA, 582 bp, Homo Sapiens
aaattaggcaggagtgcgtgcacagaggcaccctgtttgaggatgcagacttcccagccagcaattcctccctgttctacagtgagaggccgcagatcccctttgtgtggaaacgaccaggggaaatcgtgaaaaacccagaattcattcttggaggggccaccaggactgatatttgtcagggagagctgggagactgctggctattagccgccatcggctgccttacgcttaattaaaaagcactggccagagtcatcccccaggaccaaagctttggccctggttatgccgggatattccatttccagttctggcagcacagtgagtggttggacgtggtgatcgatgaccgcctgcccaccttcagggaccgtttggttttccttcactgtgccgaccacaatgagttctggagcgccttgttggaaaaagcctacgccaagctaaatgggagctatgaagctctgaagggaggtagtgccatcgaggtcatggaagactttattgggggtgtggtagagaccttccaaactaaagaggtcttcgagaacttttatgagattctagagaaggctttga

SEQ ID NO: 139230 - DNA, 909 bp, Homo Sapiens
  misc_feature (112)..(149): n is a, c, g, or t
  misc_feature (249)..(260): n is a, c, g, or t
  misc_feature (287)..(295): n is a, c, g, or t
cagtcgacggtaccggacatatgcccgggaattcggccattacggccgggggattacaatgtatctttcagggaaacctattattatcaatgtgactccacgggggagtccnnnnnnnnnnnnnnnnnnnnnnnnnnnnnnnnnnnnnnacacctctaaacttggaacaagtttaagactttatgagagaagaaaaaaaatcaccaacaagaattgtttgaggaaaaattataactatcctgtgttcannnnnnnnnnnnataaacaataagaaaaagttgtgggannnnnnnnnaaggatttcttttttgggggagggaattttgttgcagttttatggtggaaaatgcaaaaaccagagccaggtgcataatcttgtaatctgtggatatccctggagcaggactgagtaccagttaaaatactttttggggatacacatgtgagatactaagtacttgcagaagatttttgtctctctttttaaagtctctttccttggaatattgtgagaatatttgtggccatttaaggtttgtgtgattttgctaaaatgcatcaccaacagcgaatggctgccttagggacggacaaagagctgagtgatttactggatttcagtgcgatgttttcacctcctgtgagcagtgggaaaaatggaccaacttctttggcaagtggacattttactggctcaaatgtagaagacagaagtagctcagggtcctgggggaatggaggacatccaagcccgtcccaggaactatggagatgggactcccatgaccacatgaccagcagggaccttgggtcacatgacaatctctctgcaccttttgtcaattccagaatacaaagtaaaacagaaaggggctcatactcatcttatgggagagaaccaaggggaag

SEQ ID NO: 139231 - DNA, 1909 bp, Homo Sapiens
  misc_feature (1822)..(1822): n is a, c, g, or t
gtgatcaggtctcggggtactaagattctgcatctgctcctgagtggcagctgcagactcgccaggccagttccatctatgatgacagctacctaggatactctgtggctgttggtgaattcagtggtgatgacacagaagactttgttgctggtgtgcccaaagggaacctcacttacggctatgtcaccatccttaatggctcagacattcgatccctctacaacttctcaggggaacagatggcctcctactttggctatgcagtggccgccacagacgtcaatggggacgggctggatgacttgctggtgggggcacccctgctcatggatcggacccctgacgggcggcctcaggaggtgggcagggtctacgtctacctgcagcacccagccggcatagagcccacgcccacccttaccctcactggccatgatgagtttggccgatttggcagctccttgacccccctgggggacctggaccaggatggctacaatgatgtggccatcggggctccctttggtggggagacccagcagggagtagtgtttgtatttcctgggggcccaggagggctgggctctaagccttcccaggttctgcagcccctgtgggcagccagccacaccccagacttctttggctctgcccttcgaggaggccgagacctggatggcaatggatatcctgatctgattgtggggtcctttggtgtggacaaggctgtggtatacaggggccgccccatcgtgtccgctagtgcctccctcaccatcttccccgccatgttcaacccagaggagcggagctgcagcttagaggggaaccctgtggcctgcatcaaccttagcttctgcctcaatgcttctggaaaacacgttgctgactccattggtttcacagtggaacttcagctggactggcagaagcagaagggaggggtacggcgggcactgttcctggcctccaggcaggcaaccctgacccagaccctgctcatccagaatggggctcgagaggattgcagagagatgaagatctacctcaggaacgagtcagaatttcgagacaaactctcgccgattcacatcgctctcaacttctccttggacccccaagccccagtggacagccacggcctcaggccagccctacattatcagagcaagagccggatagaggacaaggctcagatcttgctggactgtggagaagacaacatctgtgtgcctgacctgcagctggaagtgtttggggagcagaaccatgtgtacctgggtgacaagaatgccctgaacctcactttccatgcccagaatgtgggtgagggtggcgcctatgaggctgagcttcgggtcaccgcccctccagaggctgagtactcaggactcgtcagacacccagggaacttctccagcctgagctgtgactactttgccgtgaaccagagccgcctgctggtgtgtgacctgggcaaccccatgaaggcaggagccagtctgtggggtggccttcggtttacagtccctcatctccgggacactaagaaaaccatccagtttgacttccagatcctcagcaagaatctcaacaactcgcaaagcgacgtggtttcctttcggctctccgtggaggctcaggcccaggtcaccctgaacggtgtctccaagcctgaggcagtgctattcccagtaagcgactggcatccccgagaccagcctcagaaggaggaggacctgggacctgctgtccaccatgtctatgagctcatcaaccaaggccccagctccattagccagggtgtgctggaactcanctgtccccaggctctggaaggtcagcagctcctatatgttaccagagttacgggactcaactgcaccaccaatcactccataaccca

SEQ ID NO: 139232 - DNA, 379 bp, Homo Sapiens
gatgcggttgcctgcctggaggccaggaccagtgcccgccgtacccctcccctctgcttctgccagtccagctgaagttccactgtgaaaccaatggagtcagcaacgtgttttccagaagcattgaggcagaagctaaggttgatgcaggccacagggttcccctctaagctgcagctccgctcctctgggttgaacatggcggggaagatggtgagggaggcactagcggacacgatggggcggcccctgccaagagtgaatgtggggtcaatagaattaggactcctctgtaacctggacacaggaaactgatgcccaagcgccagaatgtgtgtcctctgcattgattttcccaaccgcatcacccgttcgggta

SEQ ID NO: 139233 - DNA, 982 bp, Homo Sapiens
tgtgcctgagatcttgcctccccattctcacctctacctaggaacaccctccacaaggccaaatcatggataccgcaatgttttcaaatatgagaaactccaaccaaataaaaacaaaaaggaaatgtttccttactccctcctgctctgagctttattctcccccagggcccttaatgtaaatgaactggaaacctccttcctcagttcctgggttcaccactttctgcatcctggggagaggagaaaagaggctcaagaacagggactgaccaaaagcagaaggggaagggacaggagtcagaagtgttttctgaaaaaatggggaggaacactagggaggaggagaaaagatacgtaagtcgctgtcttgtacctataatacaaagtgaagaaagtttgttttggaaggtaagtcctggggggagttgacccccaagccccagagtagggggtaggaggccagtggcaacagctgcctggtgtttgttgctgaagcgttaaaaagtgccatgacggagctgtcaggaggcagcccttgggagccagggctcagtgtgctgttaccgtaggggttgtgtgctgaggggtagggatggaggttatttcttagctcttgtgctagctccatacttgtttgctgctagccaccccctcagttgctacaacactggctcttgttctgctgggactgttcatggagatccacaccccggcttcggcctgctgcacctcccagattctggggttcactctttggcaacttcttagctattgccaggaagagatcattcacgttcatagctgtcttggctgaagtctccatgaacaataagctgttgtcatctgcatatgcctgggcctcttcatactccaccatacgtttgttggccaggtcagctttgttccctgccagggcaataacgatgctaggactggcctgtcgctgtagttccttcacccatgtctttgctcgaacaaa

SEQ ID NO: 139234 - DNA, 1355 bp, Homo Sapiens
  misc_feature (77)..(77): n is a, c, g, or t
  misc_feature (104)..(104): n is a, c, g, or t
ggggatgcctttttttgggggtatccttaaaatccctgttgaaaagccattgcctttagggaaggctgttatgaatncccttcaccaaaaggcagccacctctnccagtggaagccatctcacatctcagaatggggtcagcatccctcaaccgggggccaggaaaacatgggagccttaattgcaacatagtcagcaggaattatgggatggtccaatgttggaagatgtttctcatcaacattctctccaatcatcaccttggtggccacatcaatgaagtcaaccccaagagtcttggaaacaaaggggaaggatcgagaagctctcaagttacactcaatcaccaagacatcatttcctttgacaagaaattggacgttgaatggaccagagatggcaaaaagcctttggcaattcttccgggtagcatccttcacctttttcaattggccccttggctgatggtttgtgtgggcagcatcagagtggcatctccccgagtggacacctgcatcttcaacatgttcagagatggcatgagagataaccctttccatctttgccaacagcgtccatttctacttctcgggccccttcaacaaattttgtcagcaccactgggtgctcctgagaaactctagtcgcctcttctaggaattttttcatctcatcctcagagaataccacattcatagcagacccactcaaaacataggaaggcctcaacaagcaggggtagtccacagactttgcaaattccagtgcttcattcaaagtattaacagctttccaaggtgcctgagccaccttcagctcatccaagacagctgagaagatggagcgatcctcagccctgtcgatctgcagggggcttgtgcccatgatcttgacaccattcttgtatagaggaactgccaggttgtttggaatctggcctccaactgatatgatgcagccaccacatgcctcctgatggtagatgtctaggattctctccaaggacaactcttcaaagtacagtttgtcacactcatcaaagtctgtgctcacagtctcaggattgcaattcaccaccaccgtcttcttgccaagttgacgcagtgtgcggatactagagacagcacaccaatcaaattccacactgctgaccaatgtgatatggaccacacgcctagcaccatcattccatggtcatcaaaattgacatcatgctcctgaccattgtaggtaacatagagatagtttgttgctgatgggtaaaagccgcgcgggtcgcccatatttcgaaaattccggaccggtccaagcttgtttgtgtatacacgtatttggtgattaaaggtgtaaggggg

SEQ ID NO: 139235 - DNA, 1268 bp, Homo Sapiens
  misc_feature (891)..(946): n is a, c, g, or t
tttttagtaagatcaattctaagtagagtatctcattgtggtttcaatttgcattttcctaatcattagtgatgttgaacatatttccatatactttttggccatttgcatgtcttcttttgagaactgtctgttcacatccttttcccactttaatgggattatttatattttttgctgttgagatgtttgagttccttgtatatttggatattagtcccttgtcgcatagtttgcaaatattctctcatattcaacaggttttctctgcactcttgttgttccctttactttgcacagctactttttagtgtaagatagtctcatttgtctatttttatctttgttgtctgtgctttgaggtattagccataaaatctttgcctaaaccaatgtcctgaagtattttcaatatgttttcttctagtagttttacagattcagtaggtccaattgttaaagaatgtgatcttcaggtacaatcctgtcatgcaacaaaggctccaggtcacttgaaggataacaaaatgcctgtaaccactggaaggtttggtgatgtaaagaaaaagaaggaacagcttcctataatatttgtagctaaagcagctgcaattatggagatgaaaccttcaacacttaaagatcttatactcgcaaactccacagatcctgacattgttgctgacatgtacacgtacttaggacaatgaatgacagttgtatttgtactgaacatgtagacttttttcttgtcatgattccctaaataatacaaaagcaacttatacagaatttacaatgcattgtgtattataagtaatctagaaatgatttaagatatacagaaaaatgtgcctagattatatgcaaatatgctgtttttaatatcannnnnnnnnnnnnnnnnnnnnnnnnnnnnnnnnnnnnnnnnnnnnnnnnnnnnnnntcagaaactagagaagactgtattcaaaagaaactgaagctactaaatgctttaccacattgtttacattcatagtggttctctgcagtttgaaatctttcatgtaactgaaatgaattaggactagtaaatgcatttctacattccttacagtagtaaggtccattgctagtatgttataataaccacctttgaaagtttgctagacaaagaaagttttttcatattcctcacattcattatatatatatttttgaagtatgagtttggtcatgttttcaaaaggtactgaaaaaaatggaaggttttagtacattattat

SEQ ID NO: 139236 - DNA, 969 bp, Homo Sapiens
  misc_feature (741)..(759): n is a, c, g, or t
gcggccgccacagaccttgcagttaactccgcgctgacccacccttcccgatgcagtccctgatgcaggctcccctcctgatcgccctgggcttgcttctcgcggcccctgcgcaagcccacctgaaaaagccatcccagctcagtagcttttcctgggataactgtgatgaagggaaggaccctgcggtgatcagaagcctgactctggagcctgaccccatcgtcgttcctggaaatgtgaccctcagtgtcgtgggcagcaccagtgtccccctgagttctcctctgaaggtggatttagttttggagaaggaggtggctggcctctggatcaagatcccatgcacagactacattggcagctgtacctttgaacacttctgtgatgtgcttgacatgttaattcctactggggagccctgcccagagcccctgcgtacctatgggcttccttgccactgtcccttcaaagaaggaacctactcactgcccaagagcgaattcgttgtgcctgacctggagctgcccagttggctcaccaccgggaactaccgcatagagagcgtcctgagcagcagtgggaagcgtctgggctgcatccagatcgcctgccctctctaaagggcctataacatggcaatctgccacagtcataatgccagcggcgctgagggaaggttccctttctccctccgtttccgcgtgttgcccaagggtcaaaccccttcacctcttctgnnnnnnnnnnnnnnnnnnnttttctataaggggagtcccacttatcccctcactgaaaaaaccaaccttttgtaaccccctttaccgtttttttaagcctgtggcgccaagcccttcccctggaccccctaccggtattaaaggccagcttagcccccgctttctttggaacagcttccaagggccgctcttgcccgcggtttttgttacctccattctccccccattc

SEQ ID NO: 139237 - DNA, 983 bp, Homo Sapiens
  misc_feature (177)..(177): n is a, c, g, or t
cgcccccaccctagctggcttcctggctttgtcaaagactggacccagctgaaagcagtgctcggaagctgttttactgggcttagagccagactgtagatcgggagagaaaggagtctccaccccctctggtgttgctggtgcttctgtataatcccacagaatcttttctgcaanacagagtgaattcccttcatctccaggacttggtagagcactgctttcagacagagaccagcctccatcacttcattcatagagcaagagggatgttggatcaagccccagactctcacaaccagggtatattctgatcacggaaatcctgtagcaaaatgcccagcaccaactcctcactcatcatatacttcataaaattttcatcatctgatggaaccccaaattgcaggtcatacgttactgtggcattttcaccactgaagtccactatttcaactgaagtaaaataacgactcagagagggcgatgtactgtacacatctgtgagcctttcggtgagcaggtgaggcaattcctcttcagcaacacactcctctggaatcttcagcatgatgaagaatgttttgtttgatgataattcaagtatttcattttcatcttcatcaacataagttactgcagcaagacataagcctatgatgatcactgtaatgacacctaggaaaatggaggtgatgatcatccacagtttgcatcttccaaccacattcttattacaggagctccaggggctttccttgttagcctcggccggggggacctcctcgtccaaagaagggaagaccttgtcggcaccattgagaggcgtgttctcttctggctgccgctcgagcaccgagagctccagctcgtctactggctgtgagggttgggccaggtccatgtgccggcagggaaagtctgagcggcctcgtgctgaggaaccacccaggcctcgctacttagggcgtgtaagggacggt

SEQ ID NO: 139238 - DNA, 822 bp, Homo Sapiens
tggagggttataagtgcattttaatcagtaggcaaattcatgagtacagtattcataaataattaaggatcacctgaatttgtttgtaaggagctttccgtttcctccctcccttttggggtgtgaagggccctccttttcccaccacaaagcagccggttctcacccgagcgcattctcctttcccaaagatctgggggatcgttccatacagagcttgcagggtcatcagccccttggctgcgtggtacaggctcgtctggtcaccctccaggtagcactctttgaatgcaccctctgattccatggataagagatccccatcgaatggaatgagatctaagctgtactcctccctgtgaataaaggatcccaagacacccagatccttcaaccgctgttcgcacaacaggctacggcgtggcacaaacagaatatgaaaatctctcgttgggcctcgtctatcttcactgagcacgttttcagcgattatatccatcaactctagcctgggtctgacaaaaaaaattatattcttcacatcagctgccggcaaacgatttcctttaagtgtgaacattttttccacttcatgttccttcaatagtgaatactgtgcaatcaggccaaagggtccagttaggtattcatcccaaactattgccttgcttcctgcgcacttgtccaggaactcgcgcagctcgcgacgcaccgcctcgcgcaacacgtttaggttcactcggccgtaggacagatgagccgccatcttgctccaccaccccctgccccacaacgccaaccgagtccgccggttcctacccc

SEQ ID NO: 139239 - DNA, 524 bp, Homo Sapiens
ccctgaacatggtttcattggatattcacccgaactgctacagaacaacacgctgcccgattacagcccgggggaatcttttttcactgtctttggggttttcttcccagcggctacaggagtcatggccggcttcaacatggggggcgacctcagggagcctgccgccagcattcccctgggctccctggcagctgttggcatctcgtggtttctgtacatcgtcttcgtcttcctcctgggcgccatctgcactcgagaggcccttcgctatgacttcctgatagcggaaaaggtatccctcatgggcttcctgttccttttgggcttatacatctcgtccctggcttcctgcatgggaggactttatggagctccccgcatcctgcagtgcattgcccaggagaaagtgatccctgcacttgcctgtctgggtcaagggaaggggccaaacataacacccgtggctgccatctgcctgaccagcttggtgaccatggcctttgtttttgtgggtcaagtga

SEQ ID NO: 139240 - DNA, 583 bp, Homo Sapiens
aaaacaaatctttcttgagttggtgagctagggtagcgcactacggttcactcttgctttctttgcttcacaggattggagaaggaggtgacaggaggagcccccgcacaggacctaagaatgctgtgaccagaagatgggatcgcggaacagcagcagtgcaggatccgggtccggagacccctccgagggcttgccccgaagaggggctggcctgcgtcggagtgaggaagaggaagaagaggatgaagatgtggatctggcccaggtactggcctatctcctccgcagaggccaagtgaggttggtgcagggaggaggtgcagcaaatttacaattcattcaggccctcttggactcagaggaagagaatgacagagcttgggatggtcgtcttggggatcgatacaacccacctgtggatgctacccctgacacccgggagctggaattcaatgagatcaagacacaagtggaactggccacagggcagctggggcttaggcgggccgcccagaagcacagctttcctcgaatgttgcaccagagagaacggggcctctgccatcggggaagcttctcc

SEQ ID NO: 139241 - DNA, 1060 bp, Homo Sapiens
aaaaaaagattgagctaggagcgaggcctgggtggttaatttggcacgagggggacttcgataggattggagaaggtttgtgttcccgacgccttggtagttggcataggctaaagaaaagggatctcagccccgaggaagggtcaccctcctagagatagctactaccccgtctcaggagaccctggtatttctagagcacgctttgctttcaccaaacccaaggaggtgacaggaggagcccccgcacaggacctaagaatgctgtgaccagaagatgggatcgcggaacagcagcagtgcaggatccgggtccggagacccctccgagggcttgccccgaagaggggctggcctgcgtcggagtgaggaagaggaagaagaggatgaagatgtggatctggcccaggtactggcctatctcctccgcagaggccaagtgaggttggtgcagggaggaggtgcagcaaatttacaattcattcaggccctcttggactcagaggaagagaatgacagagcttgggatggtcgtcttggggatcgatacaacccacctgtggatgctacccctgacacccgggagctggaattcaatgagatcaagacacaagtggaactggccacaggggcagctggggcttaggcgggccgccagaagcacagctttcctcgaatgttgcaccagagagaacggggcctctgccatcggggaagcttctcccttggagaacagtctcgagtgatatctcacttcttggccaactgatctgggcttcactgatagctactctcagaggcttcctggcgctctacagcaaaggatggtcaatttcatgtctgttggcagaacaagaaatccgatctaagaaggcgatatggcgtccgaataagagctcaggccgcacgacgctgaacgctggtgtgccctaccccgatggaacctctgtctctgggtggaccctcctgcacatctcgatgtggaacatcggacggttccgcaacgcacgtggtactggcctggcgaaacagacaggggtgtgagcgaagaccacagcaa

SEQ ID NO: 139242 - DNA, 822 bp, Homo Sapiens
  misc_feature (110)..(110): n is a, c, g, or t
  misc_feature (114)..(114): n is a, c, g, or t
  misc_feature (230)..(230): n is a, c, g, or t
cagcggccggttgggattgaaggaattgcctgattttcttttcccttttcccccagccagtgtggaccatgagatggggctgggggcggaagactggaggcccttccctntcantcataggagggcaaacccaaccaggtcgggctggagtccctgcagggaattcagcaccagggtggccctttgttgtcagatctcggttcaagttccgttcaggaaccatgaccacntgcatcccagctgccagggccgcctccaccccattgggagcatcttcaaagacaaggcacttctccatagcgggagggggagagaacctcttggcacaagctaggaagatgtctgggtctggcttgccatgctgcacttcggggtcatctcccagcacaatgtgggaaaacaagctgaagaactccttgtggcggcttgtcttcatatcgaacgatgcggaccccgagctggtggctagtgcaaaggggatgccatgtttccgcaggtggatgatgagtttctccgcccctggcatgagcgcagccatggggaacacttcctttaacttcgtttggctttcttccaccagctcctctttggacatcgggagctgcaagacgtctattataatctgtgccgcctctaatgccttcttacccataaccagggactttacatcccagctgtatttcttgtcatagcgattacatatttcttgaaacaccactgaatacagccgttcagtatccagaagaagtccgtccatgtcaaagatgaggtgggtgacgggctgcgggggcgccgccatggtggcgccttctgggtctgggt

SEQ ID NO: 139243 - DNA, 648 bp, Homo Sapiens
  misc_feature (11)..(11): n is a, c, g, or t
ctcgtgcaatntctgaaataaaagtgtatgatgtgttctgagtcactgtagaagtcatgcatttattatcaagatagaaaagagcagagaatgacgtggacattggtcctcggagaggctgcgtaggtggtgcggtccccgggggattctggatgctggtcttttgaccgtggcggcagcctcgcgcctgcccggatggctccatccagacatttggcaaggctgtcatctgctcttgggtcctttttcaagctgatttcctgcctccccaagaggaggtttgagccccattctgccttggaaataaatcctgacagatgtgcacagcatatttgcagggaatttgcaggcctcgattattgggggaatcagagcccattccacaccgagccccatccacgtggctgagcaacacccctgtgtcccctgtatctgtctcactggctgtctttctgccagtttcttaaagaaccacaccattactgcgtttgccgttcgaagcgttgtcccaacaatgcagatggttctgacaagggctctatatgctggcagaagggagcttccaaccttttaacttgaggaaaatgaatctctgagaggcttgagagtgttgccaggtggagcttttcaggagacaggggtcttgag

SEQ ID NO: 139244 - DNA, 806 bp, Homo Sapiens
aaacacaacgttccccatcatgttatcatcatcctcttcttcatcatcactgtcaattacaatgacatcatctcctttgccttgaccatcctgggatgaagttgtcgtctgctgatctgattgaagtggccaagatctatttgtagagactgagaggtttcttcactgtcttccataggtgtataatctccctgggtaactccttctccaatggaatcttgagaatcctggttgtatacctgagtctctacctctccatcagtactttcttctgccataacttcttcctcagttcctacaggtgtgacacttttcaacttctttggaagaggcatttccactgtatcatcagagacttggtctgatgcttctatggtgctatcctcttcctcttcacgtgtacgctttggcaaagaagaactgggggtagccgaaactttgaaattatataaatctgtgccaaatactgctgtggaagtagaaggccgctcaactggtgaactctgaacaacctctactatgtttgaagataactcttgattggcaggctcaatctgaggatgactctgttgagtgggttgcacaaaagctgtagcctgtgtttgttgctgaacagttaaaataggttgagagatagaaggctggacattaggactagtagaacgaacggatccacttgtgcttccaaaaactggaacatgttccacaggcccttctgactgcatagcttcctgtgattccacttgtgtagtgggcatcactgtagctgttggggtagtagtgggatttgtaacagttgcaggtgt

SEQ ID NO: 139245 - DNA, 238 bp, Homo Sapiens
tctttgttcccaattatgtagtcattttaatggctttatttgtagtctttgcaaatttttcatattttattagcttgtgaaaataaagattatgtaaagtctattaattgctgggttcagtggtaggattatctcatgattcctacttgtacagaatgattagttttgcttcttcactttttggagtttagatgttaagatttcacacagtcttgtttctctgcatttgtttctttgt

SEQ ID NO: 139246 - DNA, 1105 bp, Homo Sapiens
  misc_feature (1072)..(1072): n is a, c, g, or t
ttaagggggagagagtatgaagtcacggcgcgccgaattcggcacgaggggaatctgcaaatcgccgcctggcaagcaagacacaggaggcccaggccggcagtcaggacatggtggccaagctgcttgctcagagctacgaacagcagcaggagcaagagaagctggagcgagagatggcactgctgcgcggcgccatcgaggaccagcggcggcgtgccgagctgctggagcaggctctgggcaatgcgcagggccgggcagctcgagccgaagaggagctgcgcaagaagcaggcctatgtggagaaagtggagcggctgcagcaggcgctcgggcagctgcaggcagcctgtgagaagcgggagcagctggagctgcgtctgcggactcgcctggagcaggaactcaaggccctgcgtgcacagcagagacaggcaggtgccccaggtggtagcagtggcagtggtgggtctccagagctcagcgccctgcgactgtcagaacaactgcgagagaaggaggagcagatcctggcgctggaggccgacatgaccaagtgggagcagaagtctttggaggaacgtgccatgaggcagtttgccatggatgcggctgccacggctgctgctcagcgtgacaccactctcatccgacattccccccagccctcacccagcagcagcttcaatgagggtctgctcactggtggcctcaggcatcaggagatggaaagcaggttaaaggtgctccatgcccagatcctggagaaggatgcagtgatcaaggtccttcagcagcgctccaggagagaccctggcaaggccatccagggctccctgcggcctgccaagtcggtgccatctgttttcgcggctgcggcagcaggaacccagggctggcaagggctctcttctagtgagcgacaaacagcagacgcccctgctcggctgactacagcagacagagcacccacagaggagccagtggtcacagctccccctgctgcccatgccaaacacgggagcagaggtgggagcacccagactgacggccccccagacagcacctncacctgcctgccaccggagcctgacagccttct

SEQ ID NO: 139247 - DNA, 1127 bp, Homo Sapiens
tagtaggcacctggcatagcggtactgagccaggctgtggccctggctggcagccaactgataataaaggaccgccttgctaatgtccctgggggtgcctctgccatgctcatgacacaagcccgcattgtactgcgctttgctgtagccgcgggctgcagctttctggaagtaagaaaaggctgccgtgtggtcgccactcttcatgttctctgttcccaggaagttgaaagcgatggaaacactgagctggaagagctgctgaatggaagtcacagcctcctcaagggaaagagtttttgatttatcttgttccttttcaccagtgggctgaggctgggctggttttgcctcggactcgatgctactactggcatgcaggaagccaaaatcaccgggaccttcctcagaggggtcctgaggacgagctcctctcaaagagttgtgtgagaagttccggggctgagctgaggcttcttcctggccaagcctgggttccctgaggccagtgtgcctgggagctgggccatcggggctggggaggatgtgttgtcgcagtgaggagcatgggtgccacaagggagatgagaagaaacggtccaggggactgtgccaggagcagtgttctacccgctgaggtcctgctggcagggatgcctggaagtggatctgccttgccagctgcagggccagcacggccagagtgccccaagatatggcatcccatagggtgttcggggagacacgggaagacatccattggaaggcatccttccatccatgggaccttggacccccgctcgtgcctgggccatggggacctgacctgtcgaggttaggcacaggaaccagcaaagtggaggaggtagtctgaggcccatctgggctggtggacttaggagtcaccctccagaggctaggtcccagtgtacggggaagagctcggcccaggagtcccgggaggcgccacatgtcgctgccagcaccacagagagctcgcagccgaaagcgcgagaccaacccttgggacagcggctagaaaggccgccgcgatgccccgagtggccgagtacccgaggaagctctcctcgtgccgattcacacacccagcctcgctacctagccga

SEQ ID NO: 139248 - DNA, 869 bp, Homo Sapiens
cgggggcccccctccagttcctgtcccggaatgaaacgatgaacactgactgaagactgctgaatggaatccacctcctcaaggaaagattttgagttatctggtccttttcaccagtgggctgagctggctgtttgcctcggactcgatgctactactggcatgcaggaaccaaaatcaccggaccttcctcagaggggtcctgaggacgagctcctctcaaagaattgtgtgagaagttccggggctgagctgaggcttcttcctgccaagcctgggttccctgaggccagtgtgcctgggagctgggccatcggggctggggaggatgtgcttgtcgcagtgaggagcatgggtgccacaagggagatgagaggaaacggtccaggggactgtgccaggagcacgtgttctacccgctgaggtcctgctggcagggatgcctggaagtggatctgccttgccagctgcagggccaggcacggccagagtgccccaagatatggcatcccatagggtgttcggggagacacgggaagacatccattggaaggcatccttccatccatgggaccttggacccccgctcgtgcctgggccatggggacctgacctgtcgaggttaggcacaggaaccagcaaagtggaggaggtagtctgaggcccatctgggctggtggacttaggagtcaccctccagaggctaggtcccagtgtacggggaagagctcggcccaggagtcccgggaggcgccacatgtcgctgccagcaccacagagagctcgcagccgaaagcgcgagaccaacccttcctcgtgccgaattcgccacccaggcctcgctaccttaggaacagttatagtactgc

SEQ ID NO: 139249 - DNA, 1293 bp, Homo Sapiens
  misc_feature (111)..(349): n is a, c, g, or t
  misc_feature (374)..(374): n is a, c, g, or t
  misc_feature (1179)..(1213): n is a, c, g, or t
aaattttttaaatgggttaaattaaataaatttaatttttgggagaagggagtttttgctgttgttgccccaaggttagagcgccaatggtgcattttggggttcaccaannnnnnnnnnnnnnnnnnnnnnnnnnnnnnnnnnnnnnnnnnnnnnnnnnnnnnnnnnnnnnnnnnnnnnnnnnnnnnnnnnnnnnnnnnnnnnnnnnnnnnnnnnnnnnnnnnnnnnnnnnnnnnnnnnnnnnnnnnnnnnnnnnnnnnnnnnnnnnnnnnnnnnnnnnnnnnnnnnnnnnnnnnnnnnnnnnnnnnnnnnnnnnnnnnnnnnnnnnnnnnnnnnnnnnnnnnnnnnngctagtcttcgttttgaccagtganacattatagatctatccccccaattcatcctcttttttcaaaaatgagtttaaaaaggtctctctctttttcacaagctagaaagtatccttcgtatgatgaagattcaaattgcatcttattatcatgtcctgggacacttctctgaaagaatatgatgtcactttttgtatccttgatgttatcaggaggattcatttccttaaaggaaataattttgttctcacaggagagagttgaaattttctcacacttcacagagatagttacagccatacctctaggctggctatctttatacatacttataataaatatggtccggggtgcattatctctacagtcagaatcagtcatatcttcaaatagaggccgatttccttggtcaatgaagagaacttggtcattcaaatttcttatgactgataatttagattcaagcttgccaaagtaatctgattccaggttttcatcatcttcagctataaagtaaagcgtattgtcaataaatttcattgccacaaagttgatgcaattgtcttctactggttcagcagccatctttattcctgcgacaaatagtttgttgcgagaggaagcgatctggaaggtctgaggttcctttcctcttcccgaagctgtgtagactgcagcaggtggcagccgctttagcagccagagttggcagccaggagggcaaaatgcactgggagacaattccttgctgactgtccaggcagtcgccaggggagcccccggccgtaatggccgaattcccgggcatatgtccggtaccgtcgactgnnnnnnnnnnnnnnnnnnnnnnnnnnnnnnnnnnnccggccgcttcctcgctcactgactgcgctgcgctcgtcgttcgctgcggaaagctagcgccctatatgagtggtataga

SEQ ID NO: 139250 - DNA, 843 bp, Homo Sapiens
  misc_feature (553)..(574): n is a, c, g, or t
aaatgtgcagcacagaccttggaaaaaaggggtaaagctaaacccaaagtgaacgtgaagccatctgtggttaaagttgtgtcatcccccaaattggccccaaaacgtaaggcagtggagatgcacgctgctgtcattgccgctgtgaagccactcagctccagcagtgtcctacaggaacccccagccaaaaaggcagctgtggctgttgtcccgcttgtctctgaggacaaatcagtcactgtgcctgaagcagaaaatcctagagacagtcttgtgctgcctccaacccagtcctcttcagattcctcacccccggaggtgtctggcccttcctcatcccaaatgagcatgaaaactcgccgactcagctctgcctcaacaggaaagcccccactctctgtggaggatgattttgagaaactaatatgggagatttcaggaggcaaattggaagctgagattgacctggatcctgggaaagatgaagatgaccttctgcttgagctatcagaaatgattgatagctgaaggtggtagtgaggacactttnnnnnnnnnnnnnnnnnnnnnnctggacttagtttcatctattgtaacatttacctgagatgatcatttctttagtctgggaatttgccccaaatcagaagtatacctctgaattatctgtatgtgtcctggattcctttggggttcagattttttaaagttactttataaccattttgtccatttgatgccattgtttatcatcttttgagaaaaaagttctgtcatacccttctctccacaaaaaagagactgagagggagatcaagtgaagagggaggcagcgtagat

SEQ ID NO: 139251 - DNA, 1266 bp, Homo Sapiens
  misc_feature (48)..(48): n is a, c, g, or t
  misc_feature (142)..(142): n is a, c, g, or t
ggaacagcatccctatccccagaggggttccaggcctcctacctaggncctgggctctcctcgttaggttcccagcaataaattgagttcccattggcagcactcgcagtcattgctagtccacggcaagatctgtcttagnggatagtctgtcacagccgtgatgagaaagtgagggttttccacataatccgggatttcttggcaatgcccaaagactttctgggccttctaagagcaacagtggatcaagctggtatcccccatcagcactcagaaaagcagcatgggtattttagatgggggacaggaggagataaatcaatggattgacagtctttatcttagtcccataaataaagtgcaccatgaatggaggctataagccactcgcttgaggatgaggtatgggtagaaactaccatcaccaccctcagggtggcggatcatttccttcagccagaatcctggctgctgagactgtctttattgctttatttccttagtagtatggaacttttagctataaaggaaatacttggtgggcttggcagagagcgtgtcacaaaattacaggaactggctgatattcgatgactatacacgacaatctcaataatgttggatgatggctgtttttccccttcattctgatgaacttaggaaaactcaagttatttttaaaactcctatcaaattggctcatgatgcttctcttccaaagcaggatagctgtttatggccgacgtagtagaaatggttgtctttgtttacagtttttcagatgcattatggaagacaatcctcttactaccacatttcaggagactttactatgacatattggtgggttccatcaacttcttggaagctcttcaagagtgtgagaggaaaagcatgatgttatacaaagaactctgctccacataggattccgtggcaagagtactattttgctgctttcatgtaggaaggtattgccccccttgcagtcaggccctcaaagcgcttgtacgtgtaattgatgaagacccagtctttgttcttgtagtcagtctcaggatgattacttgtggccactgttggcttaagaatatcagattctggaaactcatcgaagtttgaggtatcatcaatgcttttgatttcaatagatattgcagcaggtctctctctgatatgttccctagtcaacgccttcaaaaaaagagttactttttatttcctcaactccaggagctccgattctatgttcccattcacagc

SEQ ID NO: 139252 - DNA, 582 bp, Homo Sapiens
cctccccaggccacacttctaaaggccagtttgctcaccgactctctgagtggtagtagggaggccacgagaggccggagcattaccagttggagccagatggcgaagagttggacgaggcccagactggcgtatagcacttggcattccttggaagcctgtgggactgctggcacaaagtagccacccgctgcaggctggaactgatttaagatggcattggcaggaagtgctctcattccagccactcgttgcatatactggttggtcaggtgagcctttctctcttccttcctctgggccagggcaacatatagtggcttggagcccacaatgcgtccattcatctcagtgactgctttggttgcttcttcaggagatgagaagcagacgaagccaaaccctttgcttcttccatcctccagcattaccttagcactggtaattgatccaaaaggagaaaattctttccttaatttctcatcatcaatagtgtcatccaagttcttaatgtagagattcaccccctgatatcgactaattctctcctgtttcaactgttcaaatttccgttttaactct

SEQ ID NO: 139253 - DNA, 377 bp, Homo Sapiens
ccagatcatttgctttacaggttttgtcacttgtctccataggtggattgcagactaaatgacttgataactttgatgcaatacctcacttgaaaagtcctggagtaatctgttcttaggctgttggcctgtgggagctgacgttttctctccttattgaaatgtgtttctctcttacagctgagcgggctttgggcaccatgaactttgatgtgattaagggaaagccaatccgcatcatgtggtctcagagggatccctctttgagaaaatctggtgtgggaaacgtcttcatcaagaacctggacaaatcaaagccatatggggagaaagaagagacaataagtcttggctattacaagccaaaataatttttg

SEQ ID NO: 139254 - DNA, 1690 bp, Homo Sapiens
cgttcccaatgacttgtggggcacgtccccatctgttccggggtcccccacaggacatcagcctcgcctcaatgcccgctggggcccagagttttggcgatcagctccgaaatggaactatttaaggggcacacccggggcaaccaccactacacaggcggctgccctaattctcacaacttttgggacgccgactctttgagtgtaataggtagccacgagaggccggagcattaccaagttggagccaagatggcgaagaagtttgacgaggcccagactggcgtatagcacttggccattccttggaagccttgaggtctcccaaccttgctgccagcgtggacttaggcctcatctgtgctaactgtttaggtgtataatatggaggccttccctgagcctgtgggactgctggcaacacaagtagccacccgctgcaggctggaactgatttaagatggcattggcaggaagtgctctcattccagccactcgttgcatatactggttggtcaggtgagcctttctctcttccttcctctgggccagggcaacatatagtggcttggagcccacaatgcgtccattcatctcagtgactgctttggttgcttcttcaggagatgagaagcagacgaagccaaaccctttgcttcttccatcctccagcattaccttagcactggtaattgatccaaaaggagaaaattctttccttaatttctcatcatcaatagtgtcatccaagttcttaatgtagagattcaccccctgatatcgactaattctctcctgtttcaactgttcaaatttccgttttaactctgcctgccgttctactttcttttgtgcacggcctacaaatatgattttaccacttatttcttttccattcatctcttccacagccttattggcatcctcgtgtttttcgtaactcacaaagccaaagcctttggatttcccattgggatctctcatcaccttgacacttagggtcttaccaaactgactgaatagctctttcagactctcatcatccacctcttccccaaagtttttgatataaacattggtgaattccttggctttggctccaagctcagcttcccgctctttgcgagacttgaatctgcccacaaatactttgcggtcattgaggagcatgccattcatcttctcgatggccttgtcggcagcctcttgggtctcgaagtggacaaaggcataacccttagagccgttctcatcacacaccaccttgcaggacagtatgtttccaaaagcagaaaaagtatcataaagtgccttgttatctatagatttgtccaggttcttgatgaagacgtttcccacaccagattttctcaaagagggatccctctgagaccacatgatgcggattggctttcccttaatcacatcaaagttcatggtgtccaaagcccgctcagcgtcggccggctgctggaagttgacgtaggcatagcccagggagcggcgggtgatcatatcgcggcagacccggatggacagcacaggccccgcggggctgaacttttcgtacagcatggcctcggtgacgtccgaatgcaggtcgcccacgtacagggaggccatggggtagctgccctcgtgccgaattcgccacccaggcctcgctaccttaaaccgttagagttactgc

SEQ ID NO: 139255 - DNA, 921 bp, Homo Sapiens
aaaggtgagaaaagaaggttgaaaggaaattggccgggatcccttccgtcccggtagtgggaaaggcttggagtccccatgggattgccttttaacctccttggttttttcaaaatccttggttaatggtaactttcttcctttcctatttcttccaccccagctgggccaagtaatccccccccagaggaggggaaccaatgatatagaggaccccaatttgatacgatgatgatgataatagggagctttgaggttctttcatacacatgggctcgagcaaggattttttgctggtagtttggaaaggtgacagaagaatcccacaagattttctgttttggtcaatcaataattccaatctttctcctcgctgagctaccagatctatgtttctgaccatgattcctttcagttcatccacttgggcttgagtctccatcactttgtctaggcccttattctcagagtgatgcttcagctgtgcagctaagacacttgagaactcgctattcatggcatatggaagtgctgtctgtgctcttgaaccgtaagtagtctggaacctcttctttatctcattcagaaaattaaaggctcgggaacgttcaaaatcatcatcagtgatacaaagatatacaatcctgtcttggcagatgtaatgaaacaaataattgccatgtgagtacgttagtttgttattttcagaaggtatcttagccagaatctgctctgtcacctccaggaagtttcctccacaccaagcatgtttggcaaggatagtggtccccctggcaacaacagcaaaaagaatcgccatggcttcagtctgtccgggcaccctctgagggcgcgcgggctcgggacggagggacgcgggtcagtgcagggtcgccaactgcccgctcccagaggaggctt

SEQ ID NO: 139256 - DNA, 582 bp, Homo Sapiens
agtgccaaggccccattggggtttcaaattccataccagagcacatcacctgtatgtgactctcatatgctcaaggatattcctggagttgaaaggaaaatacaaaatgagcataagaacagattacagacgcgtcagtatgaaagttgatactcgtgaaaaacagcagtttgctgagaccctggaagttagctggagcagtcaggcagaaatgactcgtgaccatggctgcaaatggggcttgttctcacaaagggctttccaccattcttttcttggcttgcaggtagaagatgcggttttcttcaggataagtaactttactgaggggcatcttgtagatgttggaattttttgtggtcatgatgaggaacaatagcgtggccaaacagaagggccaggtacaagctggcaatccaacctcagccataaagtttgccatgccgactccaagataggccgtgaacagggcacagccaagagccaggaggtgggtttgccaggtgagcgccatgaacattcctcccattgcaatgcaggccagagagctgttgaaaccccagagtccaaagtagatgtcct

SEQ ID NO: 139257 - DNA, 626 bp, Homo Sapiens
ctctatccctcttcccctgtctcttgcacctgggtcaggtcacgcaaggctttgagtcagctgcaggtcacagtggaaataggaaaaacatgctggttacaacagttcagctgctgttgtggtaatatcctgtacttgaaagacttgaaaggaaagccctgcaaaatgtctccaggatggtggcagttagatttttgatgttacttttgaagtccattcttcactcttccagaggcacacacacacagtagacttgagtggccaatatctcttactgccaatcctgcctgctccaggggaccccaacccacatctgtacttgagagaagccccccaaatagtcaaagtgaagacagctcagaataaaccatttttggtgccagtgattttgtctgaatttcatttttatggtattttaatatatgatatataagagtaatgcttaaagacgcaccaaaaattaccaagcaccaaagcatgaagtagaattgtttttataacctaaacttctgatcggtattgattaaaaagaacataaaatagtaagtcctcagagacagtgcaggtatttatagttaagggtgattgattcttcctaaccttgcccacaagcctgaagtaataca

SEQ ID NO: 139258 - DNA, 854 bp, Homo Sapiens
  misc_feature (101)..(101): n is a, c, g, or t
gtaaaagggcaagccttccatgccctgggcaagttttcacgtgtagggctttctcaaaaaactctttcttgatccaaattccttttttaggatccctgttnctttgtatgagcgatagaaaacagacctgaagaagcccgcggtctacagctgaacgattcatgataccagagtcttcctgattatatccagtgtatgatgcaatggccacaattgagttgatgcctgctggcagctctctaaatcgtagatattccatagaccgtgtagtcacaagtggctttttgaggataatagagaacatgggccaatgtgtccatgcgaacatggaagttggtgatgtaaactcccatagcctgcttacccatagcagactggtatgtgtttctaggggactggttatgatcaggaaagggaataatagatgcacagacaccaaggatcattgagggatgaatctcacagtgtgtatatgtggaacaataagctacttctttctcctgtaaatcatctggagtcattgcaagcatcactgtttcttcttccagggtatcaatatactccactaccccactggccacaagatcctgccaactatagttgttatattctctctctttcaattggtcaatatgcctcttcttcaaaagtagcttttgtttttccacaatcagaagtggtctacaaatacggcctgcatctgtatagatccgaatctccctctctcgaatatctctgatcatagaaacttcagacacaatgatgtccatctgacgtctcaatttccttagggtgttcataagttgttcgggatctttatgtattccaacccagcacccattaacaaaaaactt

SEQ ID NO: 139259 - DNA, 764 bp, Homo Sapiens
  misc_feature (412)..(476): n is a, c, g, or t
  misc_feature (536)..(536): n is a, c, g, or t
tttttcatgcagtctccgtttattggtgtttcagactcatgcagcatccgcctaagttgatgacgcaggaggcgatgatgatgaggactccccccaccagcgccacgatgcttaagagcttggctacccggcccagacgctgggccccgtccacgtccccctgctgcaggctgttccgggacatgacagcataagcgaaggccacgatgttgacaggccacatggggcagaagcaggacaggatggcaaggattatgtagtcccgaggtttctgggtgccttcacccccctccaccccaggacctgccagttgggagctggggtggcggctcaggctacctcggggagatcctggatgcccactgtgtgcccttctcattcgatcctcctcaaccagctgctgcagcactcnnnnnnnnnnnnnnnnnnnnnnnnnnnnnnnnnnnnnnnnnnnnnnnnnnnnnnnnnnnnnnnnnccctcttccccatcaccagcctgcaggggcaccactgccccattctcttgcttttccccnacactctcagacagaatctcaggggtggggtcctcctgggtagggagctctggttgaagggctggcttgggggtaggctgggaatctggccgggggtctggttggggagcaggctctggggctggttcaggtggggctgcagactccagcctggacccctggtctgcagtggcctctttgctcacttctggtttggacactgtttgttggcatgggtcttcgggattt

SEQ ID NO: 139260 - DNA, 734 bp, Homo Sapiens
tttttttgatgtcttaatcacaaagactttattccttcacaaaaacttgtttttgaatgtgaaaatagaattccatttcagtgaaggtgttgcttctagttttggttactgattttgataatattagagggatgattctttatctttttatttgtttcagggagatggctgggtttatcataaaccactttggaaaataattccaacaacacaaccagcagagtgacacatactatctaaaactcgaccaaatgaggttcttctctgtttaccctaaatcctcccagaatggagtcattgcactgagtgacctgcttcctgattgcgcagactgaaactagctaaacctgaatgtacctactagggcaccataatactgcagcaagaccaaagtggtaaagaaacacagtggaccttttaccaacctgttcatgtgatgtgagcaataccatcttaaaacttgttacctgaatcagtagatgaatcttttatccagttcttgctcctaaagttaagtttgaatcccctatttttgcacaggggcagcagatacacacaacaatgagaactcagtgactttgatttctttgtagtgaaaagtgaagtctccgtttcagagtttgtgtctttctttctgtccataactgaagtattcactactcttgtaaaccaaccaagaggaggagaaagatgacccagaagtggattcagccattgtgcctgaaatcagtgtt

SEQ ID NO: 139261 - DNA, 787 bp, Homo Sapiens
  misc_feature (33)..(33): n is a, c, g, or t
agcgttttaggtgaactatagacccacgcgttngtgtaaaagaaaatgcaggctgttacggtccggaatcccgggatatcgtcgaccacgcgtcggtgtatttcctagagaaacgctaccatgtgtggtggggcattatagaaagcttcctgaaggagcgttcagggagctctcgcgccttggcgcattgctcagggcttgagaaaagttcttgttacaagttgagtcacgcaagatgatcatctggtctgcgagaagatgttagatagaaataatatagcatgtttcatcagtatttttgttagtgataggaactcttcttttagccctactcctgactgcaaagggtacatcaaagagagtgtacacatgattgaagtcacaagtaatttgattaatgaaactctagcaaatcaccctgagtgggcaaattggcttcctgaggctcaggtagtccaaagagccctgacattctgcggctaacaacgtgtatcagtatggacgagaatggcataagctcacaagctccataaaattctaggagataaggtgaacaatactgctgtaattgaacaagcaagtactagaactttgggcacagactgtatcactcttggtttgtacaagaatgtaacacactctggaaggcacaaaggacagaagttgcagtgtcagtcgtcagaatagctggctgggagacattctggactggcaggctattgtttcctttgttcacgagaacattgagaccatttctttcgatcttggagtctctgtggatcgttaa

SEQ ID NO: 139262 - DNA, 989 bp, Homo Sapiens
gcgaagagtatgaagtcgacggcgcgccgaattcggcacgaggcgcctgcgggctctggaccaggctgactcgggctgccgatctctgtgcctcaagatcctcaaggccatatgcaagtccaccccggctctgggccacctcactgccagccagctaaccaatgtcatcctccacttggcccaggaggaggctgactggtctccggatatgctggccgaccgtttcctgcaggccttgaggggacttatcagctacttagaggctggagtcctgcccagtgccctaaaccccaaggtgaacttatttgcagagctcacccctgaagaaatagacgaattaggatacactctgtattgctcattgtctgagccagaggtgctgctgcagacgtagggcaggtgaaggccaaagcgggtgttggtggtcaggccctggattctccgttagatacacttggctacgtagttggtgcctcacagggttcctgctgcctggtgtcttgctgatcatcaccctggtcacttcatgctgattagaatgacatctctttcgtctcctattttgttacccaactcttcctatttttgttaccaatcactgtgctctctgccgccccctggctccaggctaatttttctggaatgaattgagaaggtggcgtgctggcctgagctgatggaccacttggtgttttgcgttttggcccatgtttgctgcctctatctggtctgccttgcccgtttgcctgttcctattcagtgtcttttctattttttcctctctcgttcatgccttctgttttgctcttgtccctggagcatatctgcctaattaagatgttgccttttagttgaatgccactgaagagctgtgatagcatgtttcaaagctgaactctacagagcgagtgctgagacagtatttagggtttctgggagtgaggctggtagaagagttggcctttgaccacggttcctggagtagaagt

SEQ ID NO: 139263 - DNA, 878 bp, Homo Sapiens
tgagctcggtaccagttgacggagactctccccgacctcagcacagttctgaaggctgagatcaggcaatgagcaagggaagtaatgctcagaaccccaggtcctaggttaagttgaggcaagagggacgatggatggccacatctctctgggggtggttctgaagctgtgggcccagcagagctgtggcctcacctgctgcgacagccatgggtccttagctgaaatgctgagacttgtctgatggttttccctggccaggacccgaaactgtacaaaaaaaccctcaagcggacacgcaaatttgtggtggatggtgtggcggtgagcatcaccacctccaagatcatcagcgaagatgagaagaaggatgaggagatgagatttctcaggcgccaggaactccgagagcttcggctgctccagaaagaagagcatcggaaccagacccagctgagtaacaagcatgagctgcagctggagcaaatgcataaacgttttgaacaggaaatcaacgccaagaagaagttctttgacacggaattagagaacctggagcgtcagcaaaagcagcaagtggagaagatggagcaagaccatgccgtgcgccgccgggaggaggccaggcggatccgcctggagcaggatcgggactacaccaggttccaagagcagctcaaactgatgaagaaagaggtgaagaacgaggtggagaagctcccccgacagcagcggaaggaaagcatgaagcagaagatggaggagcacacgcagaaaaagcagcttcttgaccgggactttgtagccaagcagaaggaggacctggagctggccatgaagaggctcaccaccgacaacaggcgggagatctgtgacaa

SEQ ID NO: 139264 - DNA, 582 bp, Homo Sapiens
aaattagaatgacggtggagttgaggatgttgcagaactccaggatataggaagccagagaaagtgcacagatgaggatgttggagagcctcgagcaccaaggggaggaaacaaggatctggtcagaggagaggatgctgtgagggacagtctccaagtcgactgttctgggagtgagaggcccacaggcaggaagcacagcctaccatggcctccagccttcactggctatggatgtgggacccgggaacaggaacaggcagtggctgtgaatggtttcatctctgccccctgtcctgagatgaatcctgtcccccactggggtgaagtcttcctgctggtgggtggggagggagagcatctggccagccagggcacaacccctgccagggatcatagagtggggatcagtccagcctcccagcaggcccaacctgaatcctggagaagacgacaaagggacaaaggggtggatccagagaaggcccccagcctgactcggcagtcccaaaaccctccgtctctgacagctcccttgggcatgccctctgcctgctcctgtctcccgtgtggcccagcccc

SEQ ID NO: 139265 - DNA, 680 bp, Homo Sapiens
ctggctgtcaggctccacttgggctaaacctattccagatggtcccgcgcaggggactccgctcgtatccctctgctccctcctgggcttgagccgcttactaagtgatttaaaattcagagattctgtcagctaaagaaactcctttctccacccatacttggcagtttgtgtctggttattaccctctttcgccatcactgtcacagcaatgaaaagctgggcagagaagcaggtgacaatttggggctgctccctgtcccaggtgcactgttcatgcttcgggcctggaatgatgccacccaacagaagattgtctgcacccgcactggcgctcacgagtagcagcttccgccatccagcgagctgagaagctggggccgttggctagtttggcactgatggattgggggatgtggcgtttctgggtgtcccctgtgtcttttgatatgggaatacagcatcaacagaagggagctgtgctagcgcctggctgtgaccaagtatctccagctcactgagctgtcaagaccggcaatcccactggctatgacaagcccaccagcaggcagggccgggaggggtagacctggggggagctcgacgacatacagtattgtcaggagaggaggtagtaactaaccctcgtgccgattaaccacccagcctcgtactgccta

SEQ ID NO: 139266 - DNA, 947 bp, Homo Sapiens
accctttatattggctgggggagagaaggaaatgaaatcaagtactacaagaacaacacggatgatgggcagcagcccttctactgtctcacgtggaccattcagtttccatatgaccaggacacttgcttctttgcacacttctacccatatacatacactgatttgcaatgctgcctcctgtcagtggcaaacaaccctatccagtctcagttctgcaagctccaaactttatgcaggagcctagcaggaaataccgtttacttgctcaccatcaccaacccatcccagacccctcaagaggcagctgcaaagaaagctgtggtcttgagtgccagagttcaccctggagaaagtaatggctcctgggttatgaaaggctttttggacttcatccttagcaactccccagatgcccagctcctcagagatatttttgtcttcaaggtgcttcccatgttaaatccagatggtgtgattgtggggaattatcggtgttccttggccggaagggatttgaacaggcattataaaaccattctgaaggagtctttcccttgtatttggtacaccaggaacatgatcaaaagttctcttttcacagttgtaattttaaggtccaaaaatgcaaagaaggaacaggacgagttgttatgtggcggatgggaatcctaaacagctacaccatggagtctacctttggcgggtccaccctgggtaataaaagagacacccactttaccatcgaagatctgaagtccttaggttatcatgtctgtgacacccttctggacttttgtgatcctgaccaaattaagttcactcagtgtctagcagagcttaaggagcttctacgacaggaaatccacaagaaattccatgaacttggacaagatgtagatttagaaggaagttggagtgacatctctttgtctgacattgaatcc

SEQ ID NO: 139267 - DNA, 576 bp, Homo Sapiens
gcattgatatcatggagttttgccacgcagactgctgctgttttccgaacatagggatcctcatccttcaagcacttgcggagcggctcacagagatattctgtaattttgtctacccggatgcaccccatggttctgactgccaaggctcgaatcaaaggattaggatcttcacagtccttcacaaagctgtttacagccatgatggccatgtctggctgactcttggcgtagttcatcaagtagagatacacaagcttctttagttccagattgtcagtctgcatacagttcactacgtctggaaagagagaactaacatccttccccacggtcatagcagcaatcactttcttcacagcctcctttctcttttctttcttttcattgttgagttcagcttttagttcaaatatttctccttttttattggttgtgaaatacttggagtcagtcatgactttggatctttaatgtgcaccggaggcggaggcgaaggcgagggcgggggtggcggcgggagccggagagcacagcccaggtggtggtgtaatggtttcctgcccgtcacagaat

SEQ ID NO: 139268 - DNA, 583 bp, Homo Sapiens
gtcccaataacatgcacagcatgcaggaggtggctgcgtaccaaggtagacactttttaaaataaaccttaattagtccctgggactcactgaaactaatttttagaagcaaatcatctagtctgattctaaccttgccagacattttaatatctggtgtttttaaaaaggtatcccaagctaccctgcctaaatcaaaacacacttactccaaattgcttctaatcaagagctagggagctaaattttaaggcttttacctcaaacaaggagtactggcttaggctgaagtagaaagctgagtcctggacctgctcagttcctgatgacaaaccaagtgaacctagacagaaggtgggtgagggaggactggtaggaggctgaggcaattccttggtagtttgtcctgccaccctactggagaagtcagcatgaggcacctactgagagaagtgcccagaaactgctgactgcatctgttaagagttaacagtaaagaggtagaagtgtgtttctgaatcagagtggaagcgtctcaagggtcccacagtggaggtccctgagccacctcccttccgtaagt

SEQ ID NO: 139269 - DNA, 582 bp, Homo Sapiens
gtaattgatagcattatcatgccggctgactccccaactgtttagcagatgggtcagctccccttcggtaagagaacatccacattcttccagcacttcatgcatcttgcatatggatatgtagttggttttggattgatcagttttggtgaatgctttgctgatatcttgatggcggtccataagcttatccctggctgccacagccttctctgtgctctgctgcagctccttcatctcttcctgtagctgctgtggctttgtaaaatgacccatgaagttgaaataatcctctgcacagggccgatggacagcaggcgaatagttaatacccaatttctgtaaaaattcctggtaagtaatgtgcccttttccctcggtgtcgtatcttgcccaaagcttttcaaactctcttggtgtgaggggaatatcaaaaccgtacagtgcgttctttatgtcccggcgtcgaagaatgccattgccctcattatcggtttctagaaaattcttagacaagtctgaccatctgttttttgctttggtaacaagatactgatgagcctgctcacaagctagttcttt

SEQ ID NO: 139270 - DNA, 894 bp, Homo Sapiens
  misc_feature (94)..(94): n is a, c, g, or t
  misc_feature (123)..(123): n is a, c, g, or t
  misc_feature (185)..(185): n is a, c, g, or t
  misc_feature (225)..(225): n is a, c, g, or t
taggatccaaatttcttcattttaccaccaaaaaggttttctggctggggaaggacttgtacatcagccagttagggtggccacacttgagaancagcaggaaagggcgtatatgccaaaatntatcagtttttccaaccatagactgtaccatcttcaaagcacagggggccatcaatagtaanaatctgcccttcacccatggtttaaatctatgagacgtcnaaggcatcccaaggaatcggtgctctggagctcctccaaattcgccatgcacatgatatataacttagatgggaaaggaaaaggtagtggaaacctgttgctctcacttcgttgattttgagtggctagggaatgtcgcagtgaccctctaccaatgccaagacagccgtctgtcaccaggacaacctggcaaggaattgcaccaccccattcttgctgaacgatattgcaaacaccaactaatgcagactccaagcaggttttgtcataatcatccatattacttagtgcttcctgtagggtattataatctctcgtgaaggggaccatcaactcccaaagtgatgaaaaaaccacaagtgctgtaaattcaagcttgtaatttgtggccatgtgctcaaacagcatcgttaaaccatgggctgctaggtgcttacgctggtattcctcggacccctcaatagacacaggtcgggtcatggaaagggatacatccattaccaccactgtcggcatgatgaaaatgatcccagtgttcccaatcagaatgcaaacagacagctataaacgaagaaatgcccgtgcccatcgccggacacagtccgtcggcataaactttccgtcggcataaactttccgtccgcgcgccacacccggaactataaagcc

SEQ ID NO: 139271 - DNA, 921 bp, Homo Sapiens
ctggaccggtccggaattctcgggatatcgtcgacccacgcgtccgcccacgcgtccgggcgcgcggacggaaagtttatgccgacggaaagtttatgccgacggactgtgtccggcgatgggcacgggcatttcttcgtttatagctgtctgtttgcattctgattgggaacactgggatcattttcatcatgccgacagtggtggtaatggatgtatccctttccatgacccgacctgtgtctattgaggggtccgaggaataccagcgaagcactaagtaatatggatgattatgacaaaacctgcttggagtctgcattagttggtgtttgcaatatcgttcagcaagaatggggtggtgcaattccttgccaggttgtcctggtgacagacggctgtcttggcattggtagagggtcactgcgacattccctagccactcaaaatcaacgaagtgagagcaacaggtttccactaccttttcctttcccatctaagttatatatcatgtgcatggcgaatttggaggagctccagagcaccgattccttggaatgccttgaacgtctcatagatttaaacaatggtgaagggcagatttttactattgatggccccctgtgcttgaagaatgtacagtctatgtttggaaaactgatagatttggcatatacgcctttccatgctgttctcaagtgtggccacctaactgctgatgtacaagtcttccccaggccagaaccttttgttgtagatgaagaaattgatcctatccctaaagtcattaacacagatttggaaatagtgggatttattgatatagctgatatttcaagtcccccagttctgtccagacatctggtcttacctatagcacttaacaaagaaggtgatgaggtgggtactggcatcactgat

SEQ ID NO: 139272 - DNA, 294 bp, Homo Sapiens
gtttcagttccaaaaaaaattttcataggcaaacgcattctgactcttccaactccataaatacattccagtggtcctctgtagtcagaggaaggcagagagggcacacagcctcacatttcatgaggagagctaaagggcccatcttgctgtgaaaacagtcagtgttgcaagaggaatgatgcgtctggaggcatagctctgaggctgtctcctttcagtcaggccagaggaggcactgcagaaggagctgtcctcttgtgtggctctgtccttcttttcaagtttgagggg

SEQ ID NO: 139273 - DNA, 1418 bp, Homo Sapiens
tgtagacagacgaaaataaaatgtcaagtggtagaagcaaataacaaataagtttttaacaaatttctcgaaccagaattgtaacatctacagatcaaaaataattaatttccctccaatctcaatggaaaagaggtgaaagtgtgatggtcagagtgagctgcttagtggtcctcttagtctcagctggtcctgttctatagtgtcctgggtgataatccagcaagtggacatgccactcacagccactggttccatgcaggacatgaaatgtgatgtccagctgctgcagacgtgtctgtgaagttggcatctccaggaattgagaggtaagtagagcacagattcctcctacaacgaaaggaggaggcagggcagaagtacatggacaggcagacagatacacacacacccagggcctcagaacagtcttcagggcagggacaaggccttggcaaggcgagtccagaaccaagatttggtgcaggggttggtgtagtcgcagacagtgatgaacctcaggatgctggggaactctttcttcattgccttgtacttgatggggatcagtcgcttctgatgggcacctggagagaggctgagtgcaaatttggtctggaagtcacattccttgctctgcaggtaatcatcagagacaaccaccaccatccggcggcacctctttttcgatgagctcactagcaatagaccagacacaggtgccaggcaggacatcgcggtcagacacacacaacttcagtcgatagtttgtctgttccagttgccggatcatctcctgcacaaactggatgtcgctggggcaatagcagatgaaggcatcgaaacgctcaggcatatgccccagggggtcatcaagtgtggtgatgcccgccagctctgctgtccgtgggacactgctgtctacagcggccacctgtaaaggcttctcagcctcctcctgctgctgcttcaagatatacttttggcaatcctcctcaatgctgggtcccagctccagcagcacgtcgtcgcggcccagcttggtaagcagctcgagcagtcggcctacagaggcgccagggcgtccctgccaggcgtccagcagcctgccagtggggtccgcttgtgtctccagttgccggatctccaagtactcaaagtccatctcctccgccagcgcggtccagtcggccgccacctgtgtccgcacgttcaagaacagagacaggcggcgccgcactcgcatgttgagagcagccaggggaagggaggatgtggaggagaccggggccgcagaccccgcgccgggacctcctgcagccatggcgggcggtcctggagcctcagcgcggtcgggtcgcattgtctgccctcgtgccgaattcggcgcgccgtcgacttcatactttctcccccat

SEQ ID NO: 139274 - DNA, 582 bp, Homo Sapiens
gtcccccacttccacctcccagtaatgtctccctgatgtgaagttttcacagccaaggacacagtaacgccattcaaatctctcagggttgtctggcagatcccgcggctcttcagcacgctgcacactcctctggtcctcagaaacaaggaggatggcgtttgccgtgtctggatccagaatcacatccgcaggtttgaagagggccattttccattcatgataggccaaagacttctctccacgagccatgtactggattttcctccacttgagttcctcctggagcttctctcttaggcttatttcttgctctgttgcagcgtatcccatttctttcatctctcgctctctttctgtctccctggacagagcaattttttccttctgttgtctccacaagaagtacctggctcctgcgagaagcagcaacgagataggcagggtccctgccagggccgcgatccagggctgggcgctcctgaagaaggggtctgcgatggatatgctggctgtcttttccaggccgaggagggaatttctgatgatgcaggatacaccgcccccagagctgcctcacat

SEQ ID NO: 139275 - DNA, 1070 bp, Homo Sapiens
tattgggttaggcagatgctgaggcaaccctcatttcaccctcctcttcccctctggacacaagatacctgatacctggggttttctctcctgacatcgatgagagagtcacatttagggcagactagggacaccaggctttggactcagacctcctcagcatggcccaagccttgcatgctgtggctcttaaatccaggaaaaatggctgaccccatggacacctcctcaaactctctgcagcagatgtaattctgtatccagacatggcaaacgccatcctccttgtttctgaggaccagaggagtgtacagcgtgctgaggagccccatgacctaccagacaaccctgagagatttgaatggcgttactgtgtgcttggctgtgaaagcttcatgtcagagagacactactgggaggtggaagtgggggacagaaaagagtggcatattggggtatgtagtaagaacgtggagaggaaaaaagtttgggtcaaaatgacaccggagaacggatactggactatgggcctgactgatgggaataagtatcgggctctcactgagcccagaaccaacctgaaacttcctgagcctcctaggaaagtgggggtcatcctggactatgagactggacatatctcgttctacaatgccacggatggatctcatatctacacatttctgcacgcctcttcctctgagcctctgtatcctgtattcagaattttgaccttggagcccactgccctgaccgtttgcccaataccaaaagaagagagttcctccaattctgaccgagtgcttgatcattccctagagataccagtaaccccgggcttagctaacgaaagtggggagcctcaggctgaagtaacttttctctgcttctccctgcccagctcagatctgagggcctccccctccacagcaaccaatcacaaccataaagctacaagcacgcactgaagcactttactgatactcattcaattattcatatgacagtgtttgagttggtaccaccttattttccccttatacagataggaaacctggggtgcaggaaag

SEQ ID NO: 139276 - DNA, 906 bp, Homo Sapiens
tgatactcgttaatattaacctcagaaagaagctctctcattgaacatttgttcgtgttatatcctgctgagtgaagatgcctggggggacaaacttgacagctggcttcccaagtacaggcgtaaatatgatgctatctggggactttagtggtgagaattcatgtctttagactcgatatttttctttaccgtgctcattgatgacgcatatgtgattcagatctctgaagtattcattgtaatctaaggcatatcccaccacaaataagtttggaatctcaaatccagcatagtcaggtctaaagccgtcacttctggatgttctcttcaccaacaaactggctaccttaatcatgttgggcttgtatttctctatattgctgagtagtgctttcatggtcctcccagttccgacaacatcctcaacaatgagaacattctttccagccagcgttgaaagatcatcgcctccgattatctgcatctcacccatggactggtcattcctgtaactttttagtctgatgaaatcaaccttcattgagacaaatcgatctgaatttcggctgatgttcttaaggtgttctacgagatcagcacagaatttgtaacctcctttaagcacacacaggaccatgatgtcactatatcctatgtctttcataatatccttggccagccgctcaattctgtccacaatgataccatgagggatgaggacatactccaagtctccataatagtgctgtgggtacgtgaataaattcaagtcataccctggccaatcatccataatcacgacgcctcgcccgtagtctggcgcctcctcgctgctcccggccatgtttctcccggggaacgcgggaagggaagacggcgcgggaagcagcagggagggagaag

SEQ ID NO: 139277 - DNA, 894 bp, Homo Sapiens
taaacccggccaactaggatgtttcagttgaaaataaagccccatttttctcccaaggaaatttcctgaaatgtttgcagtatgaaaatccaggaaccattatgcaggctttctaaagtaaaaaaatatcccaatgcctgaaaataaacatctttacagttatatttctatttcttaaaccttttgggttgtggggtggaaggctgtcatgaaggagaggttatagtttatagataagttattaaaacaactctctctggtacatttataaagattttctttttgcagtaaataatttaggtcaaagtgatgacctcccatgctctaattctgattgattaaaccaacctgaagggtaaactggagactctttggcctgttagtcaataacaaaatggtttgtaaagaaaagaaaaaataaataccatatacaaataagtataactagcattcaagtctgttgcacctgtgtgttttagtgaaagggagaatgaaacttgtatgcatttgacgtgagcaggtattcacacagctaggaaacaggaaaagacggtaggatggcaacatcaccttctattgcacatttagtttaagacagcactttccgttgaaacacaactaccccaatggcatagtcttgtgatgtgggacagctaacgtgatggacgtctgcgcagcaggcccgaggttaggacggccactctgttagtgcaggtgagtgtaggtgcctcctcagctacactatctggaggatgtcacctgagtgcaactgggcaggcccttccccaacacatgatgtaagtcagccacgccaaaaacaaaggcaacccagaaagttaaattacggcagttaaagaaaaatccattccaacagttttaaatttggctgtgcaa

SEQ ID NO: 139278 - DNA, 1206 bp, Homo Sapiens
ataaagcagcagtgagctttgccttggtggctggggcttgattgggaaggaggggattaccagcttactgggtgcccatgctgatgtctaagtggtgaccgcagcagtacccgggaaccccaacagttggttgtcttgtcttccagggtgcaggtcactgagtgacttccccagggtgcacagcgagtaacagatcaggacccaaacttgggcagtctgggctgggagcccacaccccactcaccagttctgctgcctcaggtcaggccagggcagtgctgctgcagagctagaaggccctgcagctacagctgcttcattccctgcattagtgcctggttactgggtacctcctgagtggctgtccccgttccagaacttgcatacactgagcgggctacagagctagaaggccctgcagctacagctgcttcattccctgcattagcgagcagttattgggtacctcctgcatgcctggtcccattccagacaggggcctctggcctggctgagttcacagcccagtctggggacagctgggtatgaggtgcttacggcacagtgtccagggcagctgggtgtgcagggactgggggctcccggaagattttttggaggaagtaacagctatgatgggatgggagcagtgggccctaagcaggcccaggggtgcgtagggacggtggtacccagatgcccaagttttccaggcaatacctggctcaggcccagcccccaatccatccccttactttctgccatggagttccagcaggtcactctccctggcacacctttcaggctgggatttttaatgaaacagactccgggaaggtagggggctggcagggaccctagaatccttgtgatttttcttagcaccttatgtcagggaaacctaaactgaggtcagcacttgggcccactgacagtgactgactgggggagaaggtcctgcagcccccttcccctgggtgggttctggggacctgtggtttgctggcggaaacaagtgatgaggctggttagcggatgtgggaggctgtgaccccagggggccatagggtgcggtggaactgcaggccctgcagatgacggcagccagctgcttccaggaaccaggtgtccaaggccacctctgcaggggtttcctcttcagcctgcctggggtgagaggtcagtgcaccacagccgaggctggag

SEQ ID NO: 139279 - DNA, 583 bp, Homo Sapiens
tcaagtaaatcttgtatctgagagagttgcacagctgcactcctacaaattttttataccatgtccttttgacatattgtttgcccttacactctgagtaagagtctgaattaaagggtctttcagtccagatggcatctcttcctgcagaaactggctcactcactcttgggtccgctgattcagtactgaatgccactgtgttgctgaccgggccttcaccaagcgggtttttgggtttcacctggaattcataactcgtgtttggtttcagattttctactgtggaaaatgtctgatttgtcatttgaatggacttgttcttcccactgaatgacccattttctctggatataacttcatattcagtgacagtgtcatttagtggcttttcccagtccaagatgacaaatgaggggcacccttccacggtgaccacagtgaggttggtgggtgggttctgtggtgggctggtggcattcccctctgtggcctcctctttggggaaccgtttgacagagtcagtaatggagcagggactgttgtcaggcttttggatgtatcgcccatgaggtcctaagaa

SEQ ID NO: 139280 - DNA, 1203 bp, Homo Sapiens
ctggtgcgccctgcgttgtgttccgttgcccgccttctcgcgcggtccctttggggtggttacttgtgatttctttcgcggattcccgagcttctttgaggctccggttcgcccgtttctcccccggggttaggattaggcttttccgccccatttgggggccgttatggccgtggcgtttttccatcttgacttccgttgtagctggttcgaaagcgtctcctgttcttagtcccacttttgccatgttcaggcaatcatatgggccccaccaccttgttaaacccggattctttggcccagttgatatgactcacactcctgccttcacagtgtggccccctgttggtgtctctagccacatcttcataaacacgtctgcaccccaatttccagccttgtgcagccataggtcaacatgtcacttaaatgtcgcttcatgcagtaatctggtctggtttcaatagtaattccaatacactttgtgaggcttctctcagaatacttgactgcctcgtaaatattgttggaagtatgtcctgataaggcatcatgtaaatttcgaataaaataatctctgtattcttctggaagggccataaacgttccacccatcacaataaactccactttatccacactatgaccaagttgttttaactgttctattcggtgtcttgtctgtaggaaagggtcatatctggcacggatagctctcatggaggttggctcatagccagtgtaagactgggtggaatactcaaaatcagaatcaggtccaccagggcagtatacacatatatttcctgtaaaactgatgtgtggacatctgtggggtttgcacatcacagccacgacagcaatcccactagcagttctgatgggtttcgcctttaacttgggcatcaagaccttgcgatactgaggagggacggcagcaatgatatccaccaggcggggctgggcagaaaggccatatttggcagctgtcttggttttcaccttatttagatcgatgtctttcccctgctcgtgggcttcaatcagttgtttaataacatctcctatagtcagcatcatcagctcagcagggctgagatctcctttccgcttctgcctcatttctgcgccgccgtagcagagccaccagagataaaaatgcagccacaaactcagcccacggggaaagatcccgggaattcc

SEQ ID NO: 139281 - DNA, 728 bp, Homo Sapiens
aggcaccgcaccgggcagtctccggatctgccgttctgccccgggccggaaaacccaggcgccttccagtgcccttcgaaagatggattctagttgacgtatctggcggccctggcgagcctggtggaaagttgggttttgccagattgcgccgggctcctctttgtgacgcgcggccagccccgcatcccccccggagccgggcttcccaggaagaatgaagcagtcaacttgcataaggcctgtcttgacttctctcctttgggggaagaggatcacattaagaagggtggcaggcttgcctggacacagaattccactaccaaacagacatcatttctgagaacttcagagtttatgatccaggtttcccagtgattaaattactccttggaaggccaagtggcatcagagctgagtgatggacgacctgcagtcccagaacctctccatggacatgactgactcccctcctgccttggctaataacagactggagaatggcatggctcagctgatcaccaccgaggcctggaacatcaactccactgacctggtaaagaaggccctggtgaccgtgccagccccatccattctgaacccccctgccgagtctcagagtggcatggctctgaaggtggcggccactgtgttgcagcccctgtgcctcggggagagcccagtggtgatgcccattcacatgcaggtggagggaagctccgcaccag

SEQ ID NO: 139282 - DNA, 744 bp, Homo Sapiens
ttttttttcagatggtaaacttgtctttactaactttaatgcccgtaactatttcgatataaccaaacaaaaatttttaaaaatatattccttacagctcctgattaacttattttctgatacattctgaggctagtaacaaaatttagaccagaataggttttcatatatcaaaaaaaggaaaggaacacggagagcacagatgagacgtatggaggctctatactatagacccatccttgctctgtgcgggaatcatcacaggaatcgcgcccattcgacttagattaggggcagctaccttagcaggtgggagagtcggactctgaggagtgcgttcaaagtcttcacttggtacttgtttatactgagtcttggaatatccttccatgttggaaggagacatggattccagggatgaatgattactgcctatgtagcttctggcagtggacgtacggctctttggaggtggcacatcttccctgatatcgtgatgaacttccttttcgtatttttcttctctgcgctttttacgacagcaaaagatgataagaccaatgagcgctagagcaagcaaagttcctataatggctcctgcaattagtccagctttatttgaaggagggacaacgtttagacgcaacaggcactgatcagagcccactctgtttctgactgtacagctgtatgtcccagagtactcagaagaggcattttttacagatataacagatgaagtca

SEQ ID NO: 139283 - DNA, 1133 bp, Homo Sapiens
cggtccggaattcccgggatggagacgatggactgagctgatccgcaccatggagtctcgggtcttactgagaacattctgtttgatcttcggtctcggagcagtttgggggcttggtgtggacccttccctacagattgacgtcttaacagagttagaacttggggagtccacgaccggagtgcgtcaggtcccggggctgcataatgggacgaaagcctttctctttcaagatactcccagaagcataaaagcatccactgctacagctgaacagttttttcagaagctgagaaataaacatgaatttactattttggtgaccctaaaacagacccacttaaattcaggagttattctctcaattcaccacttggatcacaggtacctggaactggaaagtagtggccatcggaatgaagtcagactgcattaccgctcaggcagtcaccgccctcacacagaagtgtttccttacattttggctgatgacaagtggcacaagctctccttagccatcagtgcttcccatttgattttacacattgactgcaataaaatttatgaaagggtagtagaaaagccctccacagacttgcctctaggcacaacattttggctaggaccgagaaataatgcgcatggatattttaagggtataatgcaagatgtccaattacttgtcatgccccagggatttattgctcagtgcccagatcttaatcgcacctgtccaacttgcaatgacttccatggacttgtgcagaaaatcatggagctacaggatattttagccaaaacatcagccaagctgtctcgagctgaacagcgaatgaatagattggatcagtgctattgtgaaaggacttgcaccatgaagggaaccacctaccgagaatttgagtcctggatagacggctgtaagaactgcacatgcctgaatggaaccatccagtgtgaaactctaatctgcccaaatcctgactgcccacttaagtcggctcttgcgtatgtggatggcaaatgctgtaaggaatgcaaatcgatatgccaatttcaaggacgaacctacttcgaaggagaaagaaatacagtctattcctcttctggagtatgtgttctctatgagtgca

SEQ ID NO: 139284 - DNA, 1316 bp, Homo Sapiens
  misc_feature (97)..(98): n is a, c, g, or t
  misc_feature (121)..(123): n is a, c, g, or t
  misc_feature (226)..(226): n is a, c, g, or t
  misc_feature (730)..(730): n is a, c, g, or t
aactatttataaagacgttttttcaaatagtaaatcgcctatcagaatgtggtcttaaaacatttgccccgtccccctatcactggcaatagacttnnaaacatggtcccgcacgggctcnnncccttccatgatgcaacaaaaggagatgtttcccggtctgaagagatctgggtcaagtcctagagaagcaaggaagaagtaggcatcaatactggaggcttcnatctgcagagagaaagagacgattacctgtgtggtttgccaaaggaagtgataccagcaagaaattaatggacaaaacgaaaaggggaggtcttctttagttaagctggcaattaccagaacaattatgtttcttgctgtattataagaggatagctatattttatttctgaagagtaaggagtagtattttggcttaaaaatcattctaattacaaagttcactgtttattgaagaactggcatcttaaatcagccttccgcaattcatgtagtttctgggtcttctgggagcctacgtgagtacatcacctaacagaatattaaattagacttcctgtaagattgctttaagaaactgttactgtcctgttttctaatctctttattaaaacaggtgtatttggaaaatgtttatgtgctctgattttgatatagataaacagattagtagttacatggtaattatgtgatataaaatattcatatattatcaaaattctgntttgtaaatgtaagaaagcatagttattttacaaattgtttttactgtcttttgaagaagttcttaaatacgttgttaaatggtattagttgaccagggcagtgaaaatgaaaccgcattttgggtgccattaaatagggaaaaaacatgtaaaaaatgtaaaatggagaccaattgcactaggcaagtgtatattttgtattttatatacaatttctattatttttcaagtaataaaacaatgtttttcatactgaatattatatatatattttttagctatcatttacttaattattttaagtacctttatttttccaggatgtcagaatttgattctaatctctcttatgtagcacatgtgacttaatttaaaacctatactgtgacacagagttgggtaaacgatgattatttaactttaagcagttcaccatccatttcaaagcctttgattggcttttttgtaaataaaaataacttgttaagaaacaaatatatctgtcatagaagaactagaaaatccagggaagtgagaaaaatgaaaataaaaatcattcatagttttactagtagctaatcacag

SEQ ID NO: 139285 - DNA, 743 bp, Homo Sapiens
ggctcggtaccccactttatgcgtggggaatgcataggcaagagtagcgaatgctgctcagtacttggaatcagctctcaggtagcacaaaggcattccttcaccagcagaacttcagagagatgacccattcaaatcagcagccttgtttttccaaatgcacactttagaatggcttatccatccatctttacagctctgcgtgccatttgtgaaaaacaaaagctacccaacaacctgggattataaaccaggccaaagtggtgagcacccagcagccatggtctggcttcccaccggctcctcacacagctccaagccaggctgtgttgggatggaagctttggtcctgctctcataagcctccctgttcttagagtgaccccacgcttctgtgcctcggcattgcaggcctggcgctggtgccgaggaagctctgtgcccactacacttgggatgccagtgtgctgctccaggcatggcctgctgtggacccggagttcctgcagcagcctgaggttgtccagatggcagttctgatcaacaataaagcttgtggcaaaattcctgtgccccaacaagttgcccgggaccaggacaaagtccacgaatttgttcttcaaagcgagctgggtgtcaggcttttgcaaggacgaagcatcaagaagtccttcctttccccgagaactgccctcatcaacttcctggtgcaagattgacagccaggaggctgcagctaccac

SEQ ID NO: 139286 - DNA, 536 bp, Homo Sapiens
  misc_feature (45)..(65): n is a, c, g, or t
  misc_feature (412)..(435): n is a, c, g, or t
aattttgtaaaaggctttctaaggctataagcagttaatctgaannnnnnnnnnnnnnnnnnnnntcacatataaaattcacccatgtacttaacccacccaattactaggttaattaaacatttcccattttcatattttggtttatcatgcatctgatgacagtgctgctttcttctttgtttagagtcactattttgaatgtgactgtgatgaagcatttaagcaaacgtgaaaccatttttgcaaagcatttatagtcttttgacttttgacagaggctataaatagaagcaaaatcatttcctcatttttttgttactgtgtctcagaaatggcaatcccttttgaataacatgttatacagtatagtatgcataaatattacactacaatgcattaaaataatttnnnnnnnnnnnnnnnnnnnnnnnnctccagtatgtgtgagtttatctgtattgagagagtttgtgttgtgctgtctattgttactgtaaagttaaattggccatttctgagacagctttggtttc

SEQ ID NO: 139287 - DNA, 1068 bp, Homo Sapiens
  misc_feature (960)..(994): n is a, c, g, or t
ttcgcttgtgcagctttctcatagtacaccctttgctggtaaactggaagaggttcagctggcatcatgccacagagacaggtcccattcggcccctgccctcttcagggctttctcattcccctcggggatctctctgtaccctctgcatttagctgccttgcctgttgggttgtacatacaactctcttcctgtcccacatatgggtaggcatcttcagagtcaataccccggttcttctgcacatattggaaggcattggtcatgtagccccctccacagccatcattctcagacacacaatccactaggttctggggactcagatttaagagtttgccagttttcttcttgagttggccctccagggcacccacagagctaaaagcccaacaggaaccacactgaccctgatttttgacaggagtaacatatcctttctttcgatagtcgacagagtctggggctctaccttcccattctgggatataaagggtgtcattactgcgggaatgagacaggggtactttgagtccagtcatcttctgaaccacctcttcactggtcatgtcccccaggtggttcatagccagttcatatgtatggacaccaagagaagcctcaaggttatggatggaaatatacttcaggtttttttcccaaattaaacgccgagagatttcatccaccttgttgttatattgcttcctgtgggtcttcttccatagctcccagtgggtgtccagtatctcctcagggtacagagcaaagctcaccacaggtagcagcagaaccttgagcccccacatcctgctgatggaaatctgttgtctggcttcgtttcggcagcaaagtgtgggcacaccatcaggggtgctagatttattccatcgggattgcggaagtcccccggccgtaatggccgaattcccgggcatatgtccggtaccgtcgactgnnnnnnnnnnnnnnnnnnnnnnnnnnnnnnnnnnncgccgcttcctcgctcaactactcgctgcgctcgtcgttcgaataaggcgcagccccataggatcgtatttcaa

SEQ ID NO: 139288 - DNA, 746 bp, Homo Sapiens
actatgggaccatttcccgcgggcccctgtgctcactctcaggcagcttcatattgtccactgagggcaagtacacatctcgatggagcttttcctcttctggggttctctccactgtcagttcaaacaacttcaaggaaatgacatcatgattatctgagagatccccagtgatggaggaggtgccgaagtagtagccgcggggcaggcggactccgggcactgtcaatgcagtccctccactcatgcttgccatcaatatccatcattatcgtcaaatgcctcttgacgtagcgaatcaccaggaaggtgtcgtaatgaagattgcggacaatggctgtgcagcctcccagctctgtaggccgcccatcccgctcatgatcatagctgagggagccgttgttcaccatggctgagatgtaggggaatacccgctggctgcatccgatcctttgtgtaccagattgccaagccatccccatgcagattcttctttccttgtccatggattttgaagtgcacctgcaactcccagtctctcaggaaacatggcctggtagggcttcgacagcgagtgctcccgtttcaagtactcgaacgtttgacccgccccgacttgctgtggcccctgcccagaccccaacaaaagaagaaggagtaacatcctggacccatcccgagccgacaaacatcgccgccactgctgccacgacccaaggggtcccagagtcgccgccatctgtccc

SEQ ID NO: 139289 - DNA, 870 bp, Homo Sapiens
gtgggaaagatggcggcgactctgggaccccttgggtcgtggcagcagtggcggcgatgtttgtcggctcgggatgggtccaggatgttactccttcttcttttgttggggtctgggcaggggccacagcaagtcggggcgggtcaaacgttcgagtacttgaaacgggagcactcgctgtcgaagccctaccagggtgtgggcacaggcagttcctcactgtggaatctgatgggcaatgccatggtgatgacccagtatatccgccttaccccagatatgcaaagtaaacagggtgccttgtggaaccgggtgccatgtttcctgagagactgggagttgcaggtgcacttcaaaatccatggacaaggaaagaagaatctgcatggggatggcttggcaatctggtacacaaaggatcggatgcagccatggcctgtgtttggaaacatggacaaatttgtggggctgggagtatttgtagacacctaccccaatgaggagaagcagcaagaggcccagaagaggcgatattctccaggagtccagcgggtattcccctacatctcagccatggtgaacaacggctccctcagctatgatcatgagcgggatgggcggcctacagagctgggaggctgcacaggcattgtccgcaatcttcattacgacaccttcctggtgattcgctacgtcaagaggcatttgacgatacatgatggataatcgatggcaaagcatgagtggaagggactgcatagaagtggcccgggggtccgcctggcccccgcggctacatactttcgggaccttcattccaatcaactggggatcttctcagacatatcatgatggtcatttccttgaagc

SEQ ID NO: 139290 - DNA, 948 bp, Homo Sapiens
tgagggggtttccaagcttggcttgggctccgggtttacccatttcccggacgggggggttatttattttggtttaagacccttcaaaagggtccacccatttgtccacagagagtcaaggtaggatccattattctgtgcttacaaactgatattggttgggtacgtggtcccaacagaagccactgtgtctaccaatgtctatggagaggtcctcttcagtggttttcaagtacacaggattgtcaaagttcatgcttttcatgttcttgtgttgccaattccgccacatcaagtagccacctactgctgccatcactaagagcaagagaggaagaatggcccatgcggcagaagtcccttttgggggaacactgacctctgatactgctgtggtcacattgatcctttgacagtctcggccattttcctctacattgtacccactgggacaggaacaggtatattttggagagtgatcattaatctgtggtgctggcaggcataggtattcacatcctccattctccatgtcttcttcacaccaatttttacctgatggctgtacaagttcatgatagacaatgatgtcttgggcatcattcaggttgttgactagagtggctagctctgatccagtgaatttattggcaccatagactgcttcattttccccatctatccagtagacacgatcctcaaatattgttagtgcaagaggatgagctaggaactccagagactttagtactatcctacgatcttggccattcaagtccacgctggataacatgtgcaacttagaatcaagccaatagaggcgactttttataaggtcaagtgtaattccgttaggccactggatatccgctgtcaccagtggacgtctatcgaatccatcggacgcgtgggtcgacgatatcccgggaattccggaccggtaccagc

SEQ ID NO: 139291 - DNA, 1763 bp, Homo Sapiens
  misc_feature (676)..(676): n is a, c, g, or t
ttttgctgtatcctgctctttattccaaaagagttccttaacaaagttttatgacccagaatgaaacaaaacaaaacattggtgttattgagggaattaaatctaacattgagagaaatttggatttaagaaatatgttatttaaaaagtatgttacagtattaacatctggcaatatataatctattcagtcctttctagccatttgttggcaagaaataataattaaattttttattaaaacaaaactttttacattgggagttattaagagcgcctccttttggtgtattcgtttacaaataaaaatgaaatatttatttgcatttttattgtgctttatgttgtttgctttatgttgttctcttgggcttacttccgagttggagatgggaaagtgcccaatgaaagaaatataaaagaatactaattggaagctgaacaattattttgctttataagggaagtcctgcaaagtttgtcatacagtttacgtcactataaaccaaaatacaatccatttcactttccatttgaagacttggaatgtatcatcatctgcgtttctgtcatttcacgtgaatcttcttcaggggctgacttcacagcactagaaatcgatacactgacttgccgtttcagcatcctcataacctttctctttatacccttacantgcaagaagtagataaaagggtcatgcagcaattgaagttcatcaggcatactgtaaagtgcagagaaatctggaacgaatgtctttggcttacattccaggaaattagagaaacgaagcttcttaatcatatgttgaataattgcaacatggtaaggtgtgaaacagagaacaaacacaacaataataagaataattgtgttgagagcctttttgtttacaccagatttctcagtgagtgggttttgtttggcagttctgaagagtttgcagcagatctgagaatagcagatgagaatgattataagtggaagtacatatcctatgaaacatgccccaagcagaatccagggaagagatttagtttcttcaaagtttggatactccatgcatgtaatcctttcagcctcctgctttgacatagggttgatgaggagtgggagtgtctgagcaaatactagaatccagacaaatatgcacacgccttttgcatgttcaatcctttttatcttgttgtagcgtagagggtgcaccacagcaatgaagcggtcaatactcaggcaggtcataaagttcacacctgcatatgtgttgatgtaaaacactagcgcagttatcctacacaaggcatctccgattctccagtcaaagcccattgcatagtaggctattcgtgtaggcaaagcggtggtaaaaagtatatcagaaataaccaaatttgttgaatagagggtggtagagttgatttttttcctgttttgaacaatgacgaccaaggctagtaagtttcccacgagcccaatgatgaagacgaggctgtaatgcagaggcattactatcctggccgtgctgtgatgtgcatagaggtcacagtcatttccctgaggagttgcagagggcggagtaaaattgtttgccatttgtatatccattggtggtggtccaggtgtatatcagtgactcgttcgggtctctgtgtagtagctgtgagtagttgtccaaactgaagtaagttttaactgtggcatgttgttttccccggccgtaatggccgaattcccgggcatatgtccggtaccgtcgactg

SEQ ID NO: 139292 - DNA, 1059 bp, Homo Sapiens
  misc_feature (250)..(250): n is a, c, g, or t
  misc_feature (934)..(968): n is a, c, g, or t
  misc_feature (973)..(1015): n is a, c, g, or t
taagcaagggggaaatggcaacggaaaaggtgtacccagggcctctcccgctattatgagataattggtgtggagggcctttgtggtcaccccagattctcagtggatggtctttttttgccagttctgaagagtttcaaccagattctgagattaccagatgagaatgattattaagtggaagtacatatcctatgaaacatgccccaacagaatccagggaagagatgttagtttcttcaaagtttgngatactccagtgcatgtaatcctttcagcctcctgctttgacatagggttgatgaggagtgggagtgtctgagcaaatactagaatccagacaaatatgcacacgccttttgcatgttcaatcctttttatcttgttgtagcgtagagggtgcaccacagcaatgaagcggtcaatactcaggcaggtcataaagttcacacctgcatatgtgttgatgtaaaacactagcgcagttatcctacacaaggcatctccgattctccagtcaaagcccattgcatagtaggctattcgtgtaggcaaagcggtggtaaaaagtatatcagaaatcaccaaatttgttgaatagagggtggtagagttgatttttttcctgttttgaacaatgacgaccaaggctagtaagtttcccacgagcccaatgatgaagacgaggctgtaatgcagaggcattactatcctggccgtgctgtgatgtgcatagaggtcacagtcatttccctgaggagttgcagagggcggagtaaaattgtttgccatttgtatatccattggtggtggtccaggtgtatatcagtgactcgttcgggtctctgtgtagtagctgtgagtagttgtccaaactgaagtccccggccgtaatggccgaattcccgggcatatgtccggtaccgtcgactgnnnnnnnnnnnnnnnnnnnnnnnnnnnnnnnnnnnccggnnnnnnnnnnnnnnnnnnnnnnnnnnnnnnnnnnnnnnnnnnnatagaacgagtcagcgccctataggtgatctatacattttttta

SEQ ID NO: 139293 - DNA, 696 bp, Homo Sapiens
ttccggcgattcgtttcttgctcggcttcctggagctgtggtccgtgtgggcttccacctcagacagttgcgctggctcagcggggccggaacatggctgcgtccggtctggatcatctcaaaaatggctacagaagaagattttgtcgaccttccagggcacgtgacattaacacagagcaaggccagaatgttctggaaatcttacaagactgttttgaagaaaaaagtcttgccaatgattttagtacaaattctacaaaatcagtgcctatttcaacacgcaaaataaaagacatttgtattcagtcaccaagcaaagagtgccagaaatcacatccaaagtcagttccagtttcttcaaagaagaaagaagcctctctacagtttgttgtagaaccaagtgaagccacaaacagatcagttcaggcccatgaagttcatcagaaaattctggcaactgatgttagttccaaaaatacacctgactcgaaaaaaatatcaagtagaaacataaatgatcatcacagtgaagctgatgaagaattttacttatccgttggctcaccttctgttcttttggatgcaaaaacatctgtatcacaaaatgttattccatctagtgcccaaaagagagagacttacacttttgaaaattcagtaaatatgctgccttcaagtacagaggtttcagtt

SEQ ID NO: 139294 - DNA, 669 bp, Homo Sapiens
gtttctcttctcctccaccgagttcatgcacttgatcaatctgtagcaccgccacacgcacttgaacatgtagaccttgaagataaggacagtgatgaaggcgatggaaaagatgatcatcatcttgatgaactggttatgaggcatatcctcctggctggggaggtaattcatgtggttcatggacttgaagttgagataggtgggcacttccatgtaggagctgcagagggtcaggatgctcaggcagaagtccagcagctgcagcgtcatcagggggaacttggaggagctagcacggctccgggaggccaacttgaggtaggcgggcagctcaatgtaggagcccagcagggtgagcaggcacaggagatagtccatgatttgcagggacaggaagggcagcaggtacttctcccggttcttgactacgccgatcagtaggctcaggctgatgatgaagagcatggtgatgagcaggaagctggagatcaggtcagcgatcctgaggtagcccatctgggagagcttgcaggacgccttgccatgggccacctctactgagtgctcgatgaacaacaagacgctcatgatcacatggtagatggccagggcggtggttgcgatgcggacattgaagcagcagcaggtctgtcgggctagtcgggg

SEQ ID NO: 139295 - DNA, 985 bp, Homo Sapiens
  misc_feature (969)..(969): n is a, c, g, or t
gggtttttgcattttggtttccctggggacagcttaatcttacccatggagactgggtttctatatttacatttccgattaggtcacttccaattgaaaagataatcttcggtccataccaattcagcccgttaggagtcttgctccccgttggggatcagtgggctttcttaggactactcttggggccatagaggaaggtcgtaaatgaatatccaggagcattagccccagccttcacgtggacttctgacggtaatggagggtgaggtctccaccgctcttccatatgaagtgtttcactgttcgaaggtccatatttggatccaaaacctggtcctggcacaaaagttcaattttctcctctgccaacacagcaatatcttcttctttttcctgttctcctggtttttcattattagaagagctagtggtttgagactcattatccaagttgataattttttcataaacatgttccataacttttcggacttggagcatgtcactagcagagagtctatctttttttaaggtttttgctcctgaagatgcatgaggttggaggtagaaaggaattttgttgaatttgggcatatttttatccacagtgatgtcaattacccattgtggcactgtttcattaagaagcatagactcagtctcacccccggaatctcggcagagcagcctgaacagtgtgcgacctccagcttcaccaaagatcacgggtgtatgtgggggcacttgaaaatatccatttcccttctgcactcggttctcctgctccccatttacatggtttacttcattttcctcttcatccattggattcacatgtgttctaggccaatatttcaggagtgcttggagtaaaagtcctcctaaattcaattttggatctgacccatcagggctgctgaaaccagcatcttttgcagaaacccaggcctcgtccgaatagccacncaggctcgctccttga

SEQ ID NO: 139296 - DNA, 913 bp, Homo Sapiens
  misc_feature (800)..(834): n is a, c, g, or t
gttgcatctgggcaatttttcctggtagaaatgatattggtttcgatatggaaccctctcataataggtctttttccaaagcagcaaacatggtatcttggttttcaagccccgtggccaagactggaaaccaaagcagaaccacattttttggtatccactttctccagaagaattcccaaagttccccacacacttgggccatggggatgtgagcaagatatcaacacccttaaactgggaggttgtacacagcatcattctcagagaagacacatccttgggactaaaactataacctggtactggctcatttaaggattctgtcccactgaggtacacaatctgcagccccgagcttccagtgaagatacctttacgacccagataagtaatgttttcagctaattcacatccatcagcatcctggaaatattttactgtttcctggttattagcaccaagcacatatgtctgaataggagctttcttgatgccagtcttatactcctcccattcagcatcttgggtggagccaaagaaatttcctacacacaacagcagatcaaagtttccacttttcttctgaattgcttgaactctattgaataaaatatcaaactttccttcaacatctccacaagccaagaggcgcagcggtttctgtgccatctgtccgaatagtatgggttgcgactgccacctaaaattgggaatgcgaatccgcgctccccggaaaaatgcgaccccccggccgtaatggccgaattcccgggcatatgtccggtaccgtcgactgnnnnnnnnnnnnnnnnnnnnnnnnnnnnnnnnnnncggccgcttcctcgctcaatactcgctgcgctcgtcgttcgctatagcgtaggcccataggttagcgttccataatcag

SEQ ID NO: 139297 - DNA, 795 bp, Homo Sapiens
ggattttatttcctaatgctaacatttcccaaaatggttaaactggcttaagtatatatatcacattactgatatataatgctccatactgctttttaaatttcatcattatatcttaccaacaatgaaagaaatgctcagatcttcctaaatcaatacatgtctacatgccagtcattcctccccaacacacccatatttaactgatataaaatggtgaaggatgatttataatgtgggatagttaaaccaacaaaaattaaaattttcaaatgggcacaatgttttgttcctccagcaacagaaaatgtggagataatcctattatttgtcatttatgaagttgtaattgtcttgattctatcagtaaccacacacaaaataatcaacaacatactcaaaatctctagtaagtgtcagagctagaatctaagaatgaatctgtctgactctaacacctgttttagataatatgaaaaaattacaaatggtcaagagggtcagcgtatgccaagatataaaaattggatgagaaattgtatttcaatcttcatcaaagattacttatctcacaaagaggtaataactactctggggtatctatcacaaacagaggtatggcatttcccttgtatattgttctgatcaataatttcaaaaacaggaaagggggacaataataattagcaaaatgcttcatctatctttctctccaacatttgcttcactgcgacctaattttactagtgttctaagcaaggagctggaggatatgaatattcacaactttttttc

SEQ ID NO: 139298 - DNA, 812 bp, Homo Sapiens
  misc_feature (25)..(25): n is a, c, g, or t
  misc_feature (30)..(30): n is a, c, g, or t
  misc_feature (55)..(55): n is a, c, g, or t
ataaggccatccatgctggggccanggaangaggttacaccatttccccaaactncgttcccgggggcacccttccccgtccaccgggcactgggggggctgatactccttctgtctgcccagtagccaaaacaggcccagggtcattttcttccccgcagctggggctcagcaagtcgggctttccgagcacggttagaaaagcctttcaccatcttgtagggtacttctccaagcctcaccattcttgctttcttcagccacgtgtccctggaatgcagagtgtgcacgcaatccctggagtagaccgcttctccacgacaatacccaaggatggcagctgtctcgggatagatggcctcatatttcaggagatgccgcttcagggcatacagagggtggttcttatataagccaatggcagtgggcaaaggctggtccatgtgttttgcctgaaactccaagtcttctttcttctccctgtccataaatgggctctggtatggtctcaaggtctcggcccaccactcagcatcaacccggcacttgcgggtcactgtcatccagactgggtcgtacctctgtgtgacatctcggacccagccgtcactgtcaatgcccaccacataggtcatgggcttggtggcgtacttgtaacaggtcagaggctggcccaccacaccgtgcacacagtctacacatacccacttttcctcctgctcacagaacacctctagccactggtctataccagctatgcttcttttttctgccttctcaccatcgctgcacattctcttgcctcttttact

SEQ ID NO: 139299 - DNA, 783 bp, Homo Sapiens
  misc_feature (553)..(573): n is a, c, g, or t
cgcgtggaacctcactacggcagtatcatcaagggatattttatttgtggttaaatgattgctgtgaacacaatctataaatatatgactaataggatttgtaactggctctataaactttaaattttgtatcattttacaatttacaaagtgcttgtatatattttgcatcatttgatttgcatgactaccggtcagagaagcacagcagatattagcccaatgttattagtggctcacagcagctaagtgtatgtccaaagctttacagcaaattagtagtggagtcagctgggcttcagatcagagtgtttccaccctacatacagcccaggctctttttgctaaccctgtaattttcaaactgtgtttggtgatgcttgaaggagatttctcagggattactgtaagaactgggggtgatactaatgggtagggctaagtgttgatatggtggctctatttttatattttggaagttcaacccatgctttaataaccactgtcctgcaacagcctatgccttgttaaaggtaaagaagaatatttaggnnnnnnnnnnnnnnnnnnnnnggttgagataggtgtatataaaaagtcaagagtcttttccaataaagttttaagaagctgtcatctcttgcagcagctgttgaaccttcttaatgtctggtctcttatttttcttttcatgcagacattgactagcaacagagtacatagcttcaactgaagtggaatcagcatcattcatctttttatcgatacatcttcaattgtaat

SEQ ID NO: 139300 - DNA, 712 bp, Homo Sapiens
atgagccactgtgactggctggcttgctgcttttttaaagaaaaacaacagaattaacaatcaaagttatatatatatactttttcttgcttttcatgggcaccaaaacataagttacataagtaaacaggtatcaaatgtaactaggatttttacttacactttcattttcaaatctgattccgaccatcgtctctgtatcagtaattttcccctttgaacacctcttttcacttctcaatgaacatagaggtccccttgtttcaacaagtctatctgtgaggatggtaaagaaaagattaaatgtttccttcatcgatgaataatatagttagaatttcagcttacagagtttccacaacatcaagacattcctctacattgaaatgctacagtgaattccaaagacactagcctccctatatactaagttgcctaaaaaaatgcatacatatctttgctgtttaaatataatctttactataaactgagtgatatctgcttatctggtaagctgtcatttagtggacagtaagtggagaagtataaggaaattgttatataaggaatataataaaatttcagctcacaaaatagttgctactatctagcagcttaggaataataatccagagccatgttatgaatctacttcaccctgaaacagcttttctactaaattcctagataagccccagtcaatgctgtgagg

SEQ ID NO: 139301 - DNA, 1629 bp, Homo Sapiens
ttatgtcatatgctgtttccctgttaaaactgaaattctacgatttagacttgtgggagtggtcaactcgagcaacagcgggcgttcagtgctgcgtctcgctgggcggagtgtgtgttgagttcatcaaactcccggcctgtgaaagctttttgactgtcacgtcctcatcctgcccgaagatgcctgatgcggctgacatgatgtgccacagcatgtgcccttgttgtccccagtgatcatgatgaccctggatgcctgcttgcctggcacagcttcacggagtgagtgccacctcgattctcggagtgatccagcatgcccacgcagccaacgaaggtcagattggtctcatatttaataaagttggcagagtcctcaaggtgcatttcttctcttctcagtgggttgtcatgagtggccagggccaggcatcgcagtgtgtcgctgccactaccccactctcgaatgacagacatgatcttctgtttgactccagaggtcataggaaccttagtacttccaactcgaatgtgggtgcacctgtcaatgacaccttcaggagcacccttcacaaacatcttgctcattgatgtcctgcttggtttatttggtgtacagtaaaccgacattgactttctgtcacgtgaaaactctagagtgaattcctttttcatcagctgtttaatgactgagttgcaggcatttgcacgttctattttagaaagacccttcaattcggtatcaaatacattcatcttctctactaggcaagtgagagcagtctctgtagcttctccaactttttcatacacaccctttgcctcattgtaatccaaagcagagtcattacaaagagcacaaattgttgctaattctaccagaccatcatactggtgacaattcactggtttatcatctttatgcacttctccaataggtgcataagttgatccagttatggtaaactcattaagggaacaagtatcaccttccactctgtccagaatgaacatcctgcagactgacatctggtttgttgtaagtgtaccagtcttgtctgagcagataacagaagtacaaccaagggtttccacagacgggaggcttcgaacaatggcatttttctttgccattctgcgagttccaagagccaggcaggtggtgatgactgcaggcagaccttcaggaatggctgctacagccagggccactgcaattttaaagtagtaaatagcacctctgatccaggaccctccatgaaccgggtcattgaagtgcccaatatttatgatccagactgcaatgcaaataagggagatgactttggaaagctgttccccaaaattcatctagtttttgctgaaggggtgttctctcctgttctgttgccaccatttcatcccggatcttgccaatttcggtgttaactccagttgctaccaccactcccatagctttcccagcagcaatgtttgtaccagaaaacagcatgttctttttatcttggttgacagctcgtgggtcagggacgggatcagtgtgcttgatgacagagacagattcacctgtgagaattgaccggacgcgtgggtcgacgatatcccgggaattccggaccggtccagc

SEQ ID NO: 139302 - DNA, 768 bp, Homo Sapiens
aagttctccccagcccccagacaaacacaccaaaaggctggtaccggtccggaattccttccaatcgtcgacccacgcgtccgcttccctcccagctttgtttattttgtgcttttagacttttcagtgttttctttttccagcccactgtataaacttggattgtccattcctcctgaagaaatcaagttggtatttttgatgtggaaaagggaacaaaagtggaaacatggctacttttggggagtgatattttaaaaaataagttgtctatgggcacaaagttttcttcatttgtgtagcaaacttcttgtgaatgtggattacaaaatggtataattgtgctactctcccctgggtggtttgcagccctaatgaaattatgtctaggatgattcagtctatttcccatttactagcagagtaacttgttaagatcagctggctttcttgttaaagttatttaagttttgaatgctctactacttcaagtctttaaatttcttgagactagaataattttaaataatatgaccctttgtcttctaatgaaataaagattgaagaggttgagtcaggactgagctggtgaagaaatcttgtgggtattctggaaatttgatacggagagaacttggtgagctatgaattactctcagtctcctttttacagggttgttgtgatccctcttttccagaaaattctgtggaatgtttctgtaggactttgttctccccaagcttgaattaaagcaggattcggtttcc

SEQ ID NO: 139303 - DNA, 743 bp, Homo Sapiens
gcggccgccaactacaaccaaggtagcactctgctcggcgccgctgctggtgccgctctgggtggtgcaatgggttatgctgttggtgacgtattcggcatcaccgacgacctgggtaccagcgctcgcatcctcaacggcggcgtcgctggcctggtaggcgtatcgttcagcggtctggctactggcctggtcgatgcactggtgcgtccaaaagaagcagagtaatcaagtaacgacgaaagggagtcttcggactccctaacgttatgttttatttttcatcccaatttaattacgacactgaggtaataatcatgcacaacaatttcaatcgatacgcagccatgaacatgaacatcctgggtggcaatcaacacgcgatggcttccgatgctcaattgctggaacagctgcgttacatgtccgcttacggtagtcataatcagacagctctgatgttgctccacgagctccatctgcgtgcagcacgggctttcggcaagacctttgttccaaccaaggaagtgcacggtggcgctttcctgtacacctcggtcttcaaggatggggttatgacccattacttcgtgatcgacgaagaaaccaaatccaaaattgacgcggtcttcaataagaccaaagtcgagaagactctggatggtgacgaattcagtgcagatcgcatcaccctgttgctggagctcggtcatgttttcaacgtgatctctgtcgacgagcag

SEQ ID NO: 139304 - DNA, 715 bp, Homo Sapiens
gcggccgcaggcctcacaagaggtgttttctgcactgtcaatgccagacgcttctttgccgtggaggttacgcaggtgggttgcacaggcgtacgcattcagttgggataccccgggtgaagactgcctgcttctaaatatcggccacagtggtttgcaagatgccgattacggcctaagagtgaacgcccttggctggcgagcgttgtattttctgcatgacttgattcctatcacacaccccgaatattgccgggccggggaggccgtactacatcaccagcgtctgcaaaccatgttgtccacggccggtgccatggtggtgaactctgctgcaacgctggctgatttgcaggcgtatgcacagggccagggtgtggctctgccgccctgtgtggtggcacatttagcgcccggcaggttgcctgctgcctcgccgcaacgcccactgcagcagccctatttcgtaatgttaggcactattgagccgcgcaaaaaccacttgcttgtgctacaggtatggcgccaattggtcgcacggatgaaagatggaatgccccgtttggttcttgtgggccagcgtgggtgggaatgcgaacaggtgctggaccttctggagcgctgcgatgtgctgcgtggagtggtgttagagcagcaccgatgctccgaccaggagcttgccacgtggctggcgcatgccctcgtgccgaattct

SEQ ID NO: 139305 - DNA, 1053 bp, Homo Sapiens
gcggccgcatgagctactacgtgatcggccacatccgtgtgctggatgcctcgcgctgggcggattaccgcgcgcgcgtcggtgccacgctgttgcctttcggcggcgaggtggtgatgcggggcggggtggacgtggtgctggccggcgactggccgggcaccgataccgtggtgctgcgcttcgccgatgcggccagcgcgcgcgcctggcacgactcgccggcctatcaggcgctggtgccgctgcgcgaggccggggccgaggtggtgctggtcggctataagggcgaatagcccgctggagccttctacgcccgggcgcttcagccggtggcccacaacacgaggccgatcagcacgacgttgaccgcgatcgcggcgaacagcccgccgagcaggaagtgctgcgggcccagcccctcggtggtgcggttgatcatccgcgcgcggccgatgccggtgaaggtgagcaggatgattttcagcgcgcgcagactgccgcgcagcaacggtacgggggcgtgatccatcgccggattgtgcccgatcggcaggctgctgcgctcgtggcatcatgcggcggatgacatccggaagcgatccgatggacgacaccctgtcccgcaccgatgcgcagcagcgcgtggatgacattcacgcctatcgccgcgaacaggcacggctgagcgccgacggcatggcggcggccgatgcggtggcgatccgcgcacatcacgacgcactgctcgcgcgctttgccgcacggcccgatgtcgacaccactcagcgcgcgcgccagctcacgctgggcctgcgcatcgcgtccttcctcggcgcgctggcgctggcggccagcgtgttcttcctgttccgccagtactggccgctgtttccggaagccgtgcaggtgctcgtgctggccggcgcttcgctcggcacgctggtgctcaccgcctggctgcaccggcgcgacgcttccggctacttcaccaagctggccgcactggtggccttcgcctgcttcgtgctgaacctgagcctgctcggttcc

SEQ ID NO: 139306 - DNA, 936 bp, Homo Sapiens
ggcaccatcaccgcgcgcaacaccgatatcggccagttgatcaaggccgacaccgacagcgacccggaactgttcaacatcgccgacactcaccaactgcgtctgtatgtgccggtgccgcagaactacgcgtcggtgatccaccctgggcttgaggccgagctgaccgtacccgagcaccctggcgagcacttcaaggcgcgcctgatcggcgactccaccgccatcgaccgccgttccggcaccctgcttgcgcagtttgtcgccgacaacccccaacggcgaactgctgcccggtgactacgccgaagccacgctgccgattccggccgacacccacggcgtgagcatcccggccagcgccttgatcttccgcgcccaaggcacccaagtggcggtgctggacgcgcagaaccatgtgcacctgcaagacatccacatcggcctggacctgggcgaacgcctggtgatcgaccaaggcctcaaacccgccgaccgcgtggtcgacaacccgcccgacgccctgcgcgaaggcgacccggtagagcttgcccaagccggaggtgcgcatgcgcgcaaggtttaaccccctagcggcgttggtactattggccttgcagggttgctcgatggcgcccacctacaaggtgcccgccgttgacctgccggccggctaccgcgaacagaccagcgatggcccgtggcacagcgcacaaccgtccgaccaactggcacccgaatggtggaagctctacaacgattcgcacctcaatgacctgcaacagcaactgctcaaggccaacccggacctggcggcggcactggcgcactttgatgcgtcccaggcgtatgccagccaattgcatgccgggctgttcccgcaaatcaccgccagcgcgcagccattgcgccagcggcaatcggattcgcggccgc

SEQ ID NO: 139307 - DNA, 551 bp, Homo Sapiens
ggcacgagggctgctgacgccatcaaggtgatggaaatgatcgagctggggattgaatctgcgaaacaacaaaaggcgttgccggtagtctgaccgcggcgttttattctcagggttcggcgtgccgaacccgtcttactcctcgagggatcctgacccatgtcctggttgcagcgtctgcgcattgataaatttttgctggtattgattctggtggtgattgtcgcttcggttttcccctgcgaaggcagatgggcaaccttttttgagcatctgaccaccgcggctatcgcgctgctgttctttatgcacggtgccaagctgtctcgtgaggcgatcatcgccggcatggggcactggaagctgcatttggtggtgtttctcagcacctttgcgctgttcccgctgctggggctggcgatgaacctgatggtgccgggtttgatgacaccgacggtttatctgggcttcctgtacctgtgcgcactgccggcgaccgttcagtcggcgattgcctttacttcggcggcgggcggtaacgtggcggccgc

SEQ ID NO: 139308 - DNA, 575 bp, Homo Sapiens
gctcctgagcacaaaatcttccagggtttcttgaaaatccttacatgggctctttctcaactctttctcccatttcccacaagagatattccaaaattacaccattctcttgaaactctataacctactaccttcctctccaaaaggcagcagaggccatgaggtagggaccacaagcgttggttcattgttcctaaatctctttattgctctggaagctggcccctcccttcaccttctctgtgggctctcagcccttggactagaaatgaacttgctacatccacccatcttccaaaaatcactccccgagcctgttgtccgtttcctcctcttcactgccgaataacttgtcctccaggctgcaaccttctcacatccattccttactccatccactcaactccataccctgttgcttccccacatctgctgtgggagaggccctcaatgaactctccattgctaacaccaatggacgttttttccgtctttaacttccctctcctctccactacatctggcatggccactcataaaaaaatcaattagtaatatttattttgacctcgtgc

SEQ ID NO: 139309 - DNA, 777 bp, Homo Sapiens
gaagtcgcgcgcctgctgaccgagcgtcgcgtaggtcatggtcgagccgaagcacagcatcgcaggccgatccgcgaaggccgccatgctggattcgaacaagtcgaccagggtcccgaggcctgccacgtcgatctccgccggaactccgggggggtaggcggtcagccaaggtcgatcggagaacccgttgccgggcgcatccggcaacggtccggccgcagcggcttgagcgccgtgctcgatcacgttcgcctcatgcatcgcgatgcctcccgcgggcccgactctcggtggccgagtcccgcaacgcctgtcgcgacgactctgcgggaacggcggccggcccgcaaggaggcgggctcaggcgaccggacgatgcctgcgcaatgtcgccagcaccgtgtgcggcagcgcggcggcgatcagaagaagggcggcgaggccggcctcgtccggccgcagcgcccgcttcggccagggtccgaatcccagatcggcggcgaggccgatgatagcggcgccgaaccacagggtcaggaaggcgagcgcgccgaagccgattcggcgcaggctcggccgcagcggccgatttgccgcgaccgcgaacagtcccaggatgccgccgaacagcagggccgccacggcggcaccgaggccataggccagccagagcggctggtgggtgaggaaggccatcccgccggttgcgaagccgccgcgtaatatgatgccgccgaaggtcggatagagcccggctgcggcgagtgcggccgc

SEQ ID NO: 139310 - DNA, 575 bp, Homo Sapiens
tggcatgaaagtggtttaataaagtcagtcatgatggaataccaggcagccattacaagtcaagctacagacaaataatgacctcaaaaaatgttcacaaaatagtagtacaccaagacaaaagtgcattttcaatatgatcatctgaaaaatacagtattctctttgcaaaaatgtagatgtacttacaaatgcattgtaaaagtctggaaggatttataccagaatattaatcaatattttcatcttattttaaaatttcctaaatatctgaaatattcttcagagaacctcaattcctttgtaatcagaaaaattagttaaaatattaaaagcaggcaagtaatatcaacaagatgatacactaggagatcccagctcttgtctccccaacaaaagcaagaatttaacagctacttgccaacaaaaatagctctgagtatactccagagtacagtgaagaagctgcaggaacccattaaagcacccccaaaccaaggacagctgtatataaaagtgttggaagcgttttatctgcatcacctcatcttctaccctggcacagcttggcaaca

SEQ ID NO: 139311 - DNA, 580 bp, Homo Sapiens
aaaaaaaggctccaatacaaggccccagagtagtgcatgcaaatcaacgaccctcaaagtgacagtcattgtcagataacaagcacaatctgctacagtctgtgacctggtaaagagaccaccttttcattttgagtcccatcaccaactatgccaatgtccaacctaccacacagctcacaatgactcagaggtacattttagtatctgaacagcaaagacatattgagctgcaagtacaatgagtaagtatccttagtgtattagacagggtaaatacaaacaaggcataaaagggaaaagccaacttcatctgatgcctgaatccctaagtctcttccatcttttctcatgatctgtgtctagggagatctgctatgccatatcaagaccttgctcatctggtgatgagacggggctgtttgccttggaagactaaagaaagggtgaatattcacatgaggtaagaacttgaagttgtggttataatacataggccaagtttgcctgctgtcaacccatctctgtaactccaactttgtgcctgcatgaattctgcgacatggtacagctgatgggt

SEQ ID NO: 139312 - DNA, 625 bp, Homo Sapiens
  misc_feature (174)..(271): n is a, c, g, or t
  misc_feature (309)..(318): n is a, c, g, or t
  misc_feature (343)..(356): n is a, c, g, or t
  misc_feature (365)..(496): n is a, c, g, or t
agggggccaagggtttttattcccctggggaatcaggtttatcaatccccttggggagggttccccttggggcaaaaggtttaagaatttcccccatttttccaaaaatggccgggcggggggtaatttgaatttgagctcccttgggctcccgttgaaaaatcccgtaaaggnnnnnnnnnnnnnnnnnnnnnnnnnnnnnnnnnnnnnnnnnnnnnnnnnnnnnnnnnnnnnnnnnnnnnnnnnnnnnnnnnnnnnnnnnnnnnnnnnngggaacaagtttggccctgtttcctttccttttggggnnnnnnnnnnaaaaaaaggttttaaaaaatttttnnnnnnnnnnnnnncccccaaannnnnnnnnnnnnnnnnnnnnnnnnnnnnnnnnnnnnnnnnnnnnnnnnnnnnnnnnnnnnnnnnnnnnnnnnnnnnnnnnnnnnnnnnnnnnnnnnnnnnnnnnnnnnnnnnnnnnnnnnnnnnnnnnnnnggtggcagcaaagttttattgtaaaataagagatcgatataaaaatgggatataaaaagggagaaggaggggaagggtggggtgaaaatgcagatgtgcttgcagaatgtaaaagatgttgacccttcc

SEQ ID NO: 139313 - DNA, 552 bp, Homo Sapiens
cagtgcatgtgcccagtataacatggatcagttcacgcctgtgaagatagaaggatatgaagatcaggtaataattgccttttagacaggctatgcctggcagatagtagagatcctattaatggaaaccaaagcagatgtctgaaccaggtgctgaataaatttgtcttagtttttatagtttttgtgtgtactgtacgtgttaggatattcttctctttctcataacactagcagtttctttgacaagaaaggagagcagcctcttaacaagaacagtgaaaatggaagtatttaagttttacaggttttccagctgtctttaattctccttgataagagtaacaacagacattatatttaatggaaaaacagaggcgttcctcctgaaatttagactacttatttattactttaggattttggtggttgggaaatgggatgagaaaacagttcactttgtgtattttttcatttttgaaccatgtgaatgtattacctattttaaatgctaagtgtaatggccctaaagtttcataatgactctggaaa

SEQ ID NO: 139314 - DNA, 616 bp, Homo Sapiens
  misc_feature (197)..(258): n is a, c, g, or t
  misc_feature (403)..(443): n is a, c, g, or t
aagttctcaaacttttaatgtttttcaataaagtaacacggttctccatatgcagatgttacatttcatgtgttagatttgctaagtatgatttaattatacatttccattttttgatcttcaacttaattacacttaaaaaatgagtattttgctggtgtaaacacctccacttctttttttaaaaaaacagggtnnnnnnnnnnnnnnnnnnnnnnnnnnnnnnnnnnnnnnnnnnnnnnnnnnnnnnnnnnnnnnagctcaaggcatcctcccacctctcagcctccgagtacctgggaacctgggcacgcaccaccacacctggctaatttttgaattttttgcagataagggcttttgctatgttgctcggactggtcttgaattcctgggctcaagnnnnnnnnnnnnnnnnnnnnnnnnnnnnnnnnnnnnnnnnngcctgggccactgtgcctggccccaacatctccacttctgatctcatttttctgttttctcaccatctgatatattttacttttgtcacatttactgtctctcactagaacatcagctccacaaatacaagcctcgtcacaaatcccaatttttgctggtcaactcagtgtcc

SEQ ID NO: 139315 - DNA, 585 bp, Homo Sapiens
gcctttaaaaaattttttatcagtaattacaattttcaaaagtggagatacttggtaggcccctgctttcttggcccctaaggtccctctctctgttaaactgtagagctccttagaaccaaaaccaaaccacctttcattttaatgaaaatgaaatgcaaaaactggggctccaagcaaggaagaaacgtctacctgcagttcatctgggggttggtgggagaggtggtggagagagtaaggctaagcgcccccagcaggcccaagttctctgtaccacacttggaggcaggtatatgggactgaaagtggatgttctcagccacaagcctgggcctggataggaaacaaaggtttagactggaagggtgtcaggtagggttgacccagagtcccagctgggctcacttttcacgccctccatccattcgtcatgagtatccggatacagcaccacacggttcaactcctgagcacagcagtaacctttacacagacagcctgatttcccagaatgaattctcgtgtttacttccagatttaatgactttgactttagtagtcatctgaactatttattttact

SEQ ID NO: 139316 - DNA, 326 bp, Homo Sapiens
tttttgaatcacaactaccattttattgttctgattattggggtacagaattgtccatgtgctccaggactagttgggctatgacagacaccacagattgctctgcaacttccggggaacattatctgagtcacatgcttctctggtcatgtttttccaacatcaaaatgaaacacttttctccatggaatgtggagtgacaaattatctcaaaccaaagtcatccttcatcatgaccggcatgtaccaaccaggccacacaacagcatagaactgaggggaccaagcttctttctataaacaaagctccttggcaacactggact

SEQ ID NO: 139317 - DNA, 364 bp, Homo Sapiens
catgttctttatggaatactacaatgtgttgtcacaggatttgttattcagatgtcaatcatttttatttatatatttctgggtaaaacttattagtggtgtgaggagtgcagaatatggaagcttacctaaattctttttctgccagccaacattttaaaagacaaatgatgcatcctttctcaatgctgctaattctttaaattttacatgtcccaatttattccatttgagatttattttaatgttttcaacccctgtgtaacatgtatcatgaggagaaagcactatcattgatcatcactatggattaaaatataggaatattttacagggcagtatgggtgggggtgggagacatatt

SEQ ID NO: 139318 - DNA, 697 bp, Homo Sapiens
  misc_feature (297)..(311): n is a, c, g, or t
  misc_feature (321)..(385): n is a, c, g, or t
  misc_feature (556)..(570): n is a, c, g, or t
tacaaaagtgcatctcaaatagttttaaaatgatgtgcaatatttagcaaccagtacagcccagcatcaaccaattagaagaagtgtctgactgttgagaacagatgcagccaaggtgtcaccccggtgtgtaccagctggacttcagcactgtgtagtgttctcaatatgaaaggaaaagctgaacagctaacaggagaagatgtaaaatatcttaacaactctattaaataagcaatcaaaaagcaaccaactgcagaacaagataattcatactgtctacattaaaaattaaannnnnnnnnnnnnnngagacaagtnnnnnnnnnnnnnnnnnnnnnnnnnnnnnnnnnnnnnnnnnnnnnnnnnnnnnnnnnnnnnnnnnggtcaagggaatctccctggctctggctcctgaataactggggaataacaagattgcgccactggcacccaagttaattttttgggatttttaaaagaaaatggggattttcccccaaagttgggccaaggggggggtccttgaactccccgtgggcctcaagagggaatnnnnnnnnnnnnnnnggggccaccgcaaaagagtggcgtggggaatttaacaaaacaccctggaaggcccctcaccccgcctcttaggccacaaaaaattataaaaagatttttcccgtggttcaccgaggggaagcgggac

SEQ ID NO: 139319 - DNA, 2149 bp, Homo Sapiens
  misc_feature (646)..(880): n is a, c, g, or t
  misc_feature (904)..(912): n is a, c, g, or t
  misc_feature (2031)..(2107): n is a, c, g, or t
gtaaatacatacagatttatcaggaaatattttctacatggtgcttcattcaggggttatcagtaggggccatgtatgtaagagctatacaggtagagactataggatctgactagaaagcccatttctagtactaggtgagtgattaaaacaaactgcatcagaagaaagcatcttgtcaaaattactacttgtgaactaaaacaaaggacacattcccactagaacagaaataaattttaattcattgaaaagtgcagcagtgaacagggtccttttgaagggcactttctaagtcaaatgactgagatgacacagagcaagggcagaataggaacagaggatgcaaacacaggaagttacaaaattcagtgggaactaagtggtggtaaaactcaagaacccaactctacccatctaattccattggtggatcagttgaattaacttttgctttctttaggatgaatcctgggacaactttcctttaaaaaagcactaaaccttagtttagacacttaataagtttaagaacacttctcacagaataaggtaaaacttccatggctatcattactattttgtacaacagccctagtgttgtcaattaaaatgtgtttgcaggccgggcacggtggctcacacnnnnnnnnnnnnnnnnnnnnnnnnnnnnnnnnnnnnnnnnnnnnnnnnnnnnnnnnnnnnnnnnnnnnnnnnnnnnnnnnnnnnnnnnnnnnnnnnnnnnnnnnnnnnnnnnnnnnnnnnnnnnnnnnnnnnnnnnnnnnnnnnnnnnnnnnnnnnnnnnnnnnnnnnnnnnnnnnnnnnnnnnnnnnnnnnnnnnnnnnnnnnnnnnnnnnnnnnnnnnnnnnnnnnnnnnnnntgacaaccgcgagacttcatctcnnnnnnnnngtgtttgcaacagcaccatttgtcaaattcaaagatgctcaaaaggtgttccctactttgcatgagagggagagctttgtaacaggaaattgtataaggcaaactctctattcattcctaaggcctctgttcattcctaatgtttacatggttctctactctgaagggcaccaacatggacctcaccttcttaacatggaaaatcaaaatctaaatgaatacaattaaaaggaggcagcaaccttcttgcagtgggtcccttaaacattatgaaaacatcagtgcattgtgtagtctgttacgctataaactgaggtctctttatgaaagattattttagcacaaattcagaatgaagccagtccaagaaaaaaagaattggaagctatttgaaggttagataggaaatataccaaaaatagaagagcgtagagagggctgcaccacatcctaccacgcaagcacacccactgaactgagtaagagtggcgtggctgaggtgccgtcagcagctgactatgtcactcttatgagttctgctcaggaacaagcataaaactgaataatatgacatcacagtccaagacctggtaagagttggtttctttttatttggaaataactatggtcaactttcattaatgtggaagttgactgataatgttaagagtcaaagtgaaaaagaaagccgatacccatattcaacagtgctttcagttacaacattttttgaatttccttctctaaaacattcacagcagaggtgtccatttcacttgcctgtttcacctctagataccaccacagttgctggggtcatgtgaggtaaaggaatatatccaattgactgttagcccaacatgactatctgcaattctgatagaaaagctactttcagccatgtcttacaaagtgcttaaagctggacagaagactttaaataaagctaaaatcgcttattgcctgagttgaacaagttacaaaccacagctcttcctcctcccctgctgtctcaccaccaattagccttcttgtgaggacaacattagaaatggaactggtttttgagccaagaaacataaaaatttaggtgttcttagccaagcgtggtggctcatnnnnnnnnnnnnnnnnnnnnnnnnnnnnnnnnnnnnnnnnnnnnnnnnnnnnnnnnnnnnnnnnnnnnnnnnnnnnntcagaatggtaacagttaccattctgatgttggagcggccgc

SEQ ID NO: 139320 - DNA, 411 bp, Homo Sapiens
tgtgcaagtgcaagataaagcagcaagtcatctaggagatctccctaagatcactgatgaagacggctttgctaaccaataggttttcattggagttgaaccacccttattttgggaaaagatgccgcccaggactgtcataactagagaggagaagtcaaagcctggcttcagagctccaaaggacaggctgacccttgctagggggctagtgcagctgatgactttatgttgaagccagtgctcatttatcattctgaaaatcctagagtccttaagcgttatgctaattctagtctgcctctgctgtgtagatagaacaacaaagcctagatgacagcacatctacttacaccagtgtggtttactaaatattgtcagcccacgtgttgttgagacctactgctcagg

SEQ ID NO: 139321 - DNA, 1536 bp, Homo Sapiens
  misc_feature (214)..(214): n is a, c, g, or t
  misc_feature (228)..(293): n is a, c, g, or t
  misc_feature (367)..(480): n is a, c, g, or t
cggcccaatcttttttctcatatgcatacacatacccagtcttggagataatcccaaaaggaaggaaaagagagtcatagttcatagtttattacaaatgcatattatccaactcagtagaaatccatgtaccccagaatgtacagaaggtatgcaatgttccagagtgtcattgtcagctctggttttacatatatattaaatgtatatatgntttgagacagggtnnnnnnnnnnnnnnnnnnnnnnnnnnnnnnnnnnnnnnnnnnnnnnnnnnnnnnnnnnnnnnnnnnctcaagagatcctcccacctcatccttctgagtagctgggactacatgcgcatgccaccacacccagctattannnnnnnnnnnnnnnnnnnnnnnnnnnnnnnnnnnnnnnnnnnnnnnnnnnnnnnnnnnnnnnnnnnnnnnnnnnnnnnnnnnnnnnnnnnnnnnnnnnnnnnnnnnnnnnnnnatgagccactgagcctggcctgattatctgttttttgaatagtgaccctaatgtgcttttccagttccagtaacttttgataaaatttttcagcagtgtcttcatctaggtccatcttctgggtcataatgtaatttcttccaaagccagtggtggcactcagatatttgatcagaggattgagagattcaggcttttggtggaaaagccataccagagcttctgttccattatatggtgtcaaagtgaatgcatttgcaaaaaagcgaagtagcaatattgccggcatcaacagcgtccatataaacggaggcagaattccatatgtcaaattggtcaatgctgtacctggacaggccacattggaatagagaccctgctggttgaagttcctgttcaaagccacactcataaggtcagtggcatatttggaagagctgtagggttccttgcctttgctgttcttgaagttcccttcgagtcttgaaattagatttccttgcactgcgagatgatgtccagatgagctgagatggattgtcactgtgacagaggagaggctccagttcccgaatcaggataaaatggccaaagacattggtctcaaacacctcctgaagtccatcagcagtgatcttatcaccctgggtcagcaggccttcagctgtggagaacatatgaatcacttttcttgaaaagaggccaaagaaaagtgctttgatatttagttgtggattaggcatgatcccagcatttagatatatacagtctaatctctgaaacctttgcttaagttccttggaggcccggaagaccgactgcaggttgctgacatccacctggacaatggtgacctcagcagtggggtgagaggccagcagagcagcacagacagcttctgccttgctcatgttcctgcacgccaaacacagatgaagctcatcatcttccgccagcagccgcttgcagagggccaggccaatgccacatgctagccccggtgatcaaaccacctttcgcatcttcgcgcactcacacttccagcagtgaagcaac

SEQ ID NO: 139322 - DNA, 699 bp, Homo Sapiens
acatgtatgactaatatttattatagctaatataatagtttagaacaaggaaatttagtagagttgtaacattttggtgctacatgtataattcagcataagccaaagcctttttaaaataaccaatactatcattttatgaaatctttacaagataagcacagtagtacaatatttaagcatctcaagtctccatttaagagttgactatcaaagaatgactgttataaataaagagctctatgatgttccacttatttagtcttaataaggtagggaaataagtgacatactttttagaagaatccatgcagtggacagaaagtcagattaggtagtccctagggatccatccagctctgggaatctatcatcagatggcctctaaggtttcttctagctcagaaaatagaggtacttggaacataattttttaaattttaaatggttatataggttaatagtattttttgcttttcaaaattcattgctggtgatgtctattacttatttgatgtcatgtctttggccaggaatgcaatcctaattagcattgttccaggaaaacatttcattttatagggagcatatcccagaaacattagaaaatactagtcccaatataagtaacatttaccaactagactctgggctacactttaaaatatctgatgttcagccaggtgtggtgcttatgct

SEQ ID NO: 139323 - DNA, 355 bp, Homo Sapiens
attacaggcatgagctaccatgccaggcctccttgcagggttttctatgcccttgatatctgtctccctgtcaacctgggaccttgctgtaagtcttgataggacagggagaagagggaggccctaccgaggctcgaggcttcagtgccgggtgacagcagtgggagtgtggtacagcctctggaaggacacagtgttctccccgccccttgtctgggagccaggactgtaccctccgaagccagacatcactgccaacatatcccccttgctggtgccctggcatctcagcacatgacacacacccacacctgcaggctgtggttccggcttggcctgctccccgtccggctgc

SEQ ID NO: 139324 - DNA, 662 bp, Homo Sapiens
tttaacagtaggtattgagatttttatttaaacagtaggtattgagatttttatttttctaccttataagacatacaataagacatacaatattgttgctcagattcagggtgatggtaacatttagctcagaatattcccattctgattaatttactgaatttaggagtgcaagtaatttttagataataaactatgggtatcacatctggctttcaattagctgtaaaatacttattgtgatcaatatccagttgttacagtttggaaggcaaagtaccactaccagaaaaatgctgacacctttcagctgaaccttaaatgccaataatactgtatctttatcatagtgggtttgccagccatcttgtttagtcaggcatagtgcctgacttaagaggaaactgtgggcactttgatggtgagaaacgtcctctttccaaccttcttcttaggctttgtggcatgtacatgacacaaactgggttgaccttaaaataatactcaatggctaatcctaatgagttataaggaaatagaaagggatggctttttatgcacaacctaaacacattttaattatattttcctaaacacattttaattatattttgctcatttttggagaaccattcccttttacatctattatgaacattcta

SEQ ID NO: 139325 - DNA, 606 bp, Homo Sapiens
tttttaaattttttcttttgggcaagtaatttgagaattctgaaattaagcatgatgcttagattgcagtttgttttgcatttgctataattttcaaaattatttttgaagcaagacaaaagtttaatgtcagcttaagtgcttaaatatatcatgctgaccagaatcctgttatttttatatgcatcataaaatttcccatttctgcattaaataaacagaggaggggggtcaagtgatacttagatattggcacacacaaggaacaactgttggcaggcagtatcgattttatgaagagaaagtgaagtttgaaaacttttcaaacttttctagttacaatccaatttttcagatttgataatgcttttccaaagtgaaaataagatacacaataatcattgctctgtgtgattacagataggattatccatctgcatagccttgtaaaagtgccattttatttttagtgctaaattcttgttaaataatgtagttttatatagctgatagaccaacctatatccaaacttttatgaaatattaattattcttgtttttctcacacaggcatactccagatgcttcttccagttcatttttcag

SEQ ID NO: 139326 - DNA, 586 bp, Homo Sapiens
  misc_feature (57)..(57): n is a, c, g, or t
  misc_feature (514)..(514): n is a, c, g, or t
ggcaaaaagattgtttattactcacagattccagagaacagtggccagcacaccttngcagggcttactggaagggcttggagacattgaggacacacatgcccagccaaagggtggggaccaagagagagggagggacctgtgggctggagcctttattggggttcagggcattatctaggtgagtttcccaagacagggttggcttggatactttgaagggagctcaaggctcagtaagggaacttgaaggttacattatcaggttcaccaggcttcatgcagaaggacagtagtcatttcatagtatggggccttttctatctagaacacacaaatggggactgggtgaggactgcctgaaaatatataggtcaagggtgacaagcagaggcagcatccctatggatgagagttatgacagtcagcatcattacaagtcatgttcactgcatgcttccattgtgccttgcacgttctaagtgctgtgtatgtgttgcctcatttaatccanaacataatctacaaggttggtattgttgccttttccattttatagctggggaactgaggcacagaggcgtta

SEQ ID NO: 139327 - DNA, 855 bp, Homo Sapiens
  misc_feature (251)..(251): n is a, c, g, or t
ttcttttatataggcccccccggggcacagtggtattctttcccccttgtgtacacattccttgttattggtgggtccccttaaagggtttcagtaggaaatcccccggcaaattccacttaaatggaggtgttctggattctaattaaggctgcttggggtcccccactttcctcggtctgggaggaggttccatcttagaggggttgtttgctgaggcagaatttcgagaggaaggtcttgtataattntcagcatactgtttgtcagatttttcatccaactctttttgttgtcgttccagttctctcatgcgtatatctcttgcttctgcccgggcagcccgttttgctgccagccttgcctctgcctctctggcaatgttactcaaagcttcatcttttgcagaaaatcggtctttcacaggtgttcttttccttccagaagcaggagtccccatcttgtgttcttaatagtcttttaactttgaaagtgatttaactgtgttttcagcccttagtgatggtagctctcctttccactgacatttacatctagaccccttcatttatcttcccacatctgtgttagggcgcgcgctgcgactgcgtcgctgtccgggaagggccgaagagctgctcgcccgcccggcgaccgctggggctatgggcgaggggcgcagctggacgactcagtcctgggtccccggccaggcgggcggggatggacgcggcggctcccggcactggcagccggctagtcggtcaggccgatgtgccctctgcgccgcggctgagacagcgggaaccggccccgggaggagccgcagcctgagcggccgactgaggaggcccc

SEQ ID NO: 139328 - DNA, 445 bp, Homo Sapiens
aaaagtcatagtccgttttattataactctatattatctgtaacatgctcctattacaagtattgaagtctaaggtgacatgatggatttcttcttgctttgatgttaagtgaaaagctgctttaagtttcatttttttgatcacctggaaacctactgagttcttccaaacgttctgagttttgagatacagcttccactgtggatcctctaaactcttcagtaactggatcaggttcaatgttacctctgctctccttccatgacagcaggtagttgaggctggtgagatctgcagactctatatagttgttcactgtaagcatcatctgatgagcttttgctattccatagtgaacttttgtctcatccatcagaggcatgctcattagctctactgttgtgtcaaaagcttgctgaaagcattcagaagctttgttgtagt

SEQ ID NO: 139329 - DNA, 668 bp, Homo Sapiens
  misc_feature (611)..(611): n is a, c, g, or t
  misc_feature (632)..(632): n is a, c, g, or t
acaaataaagtttattgtactgtttgggggatggtatatttattactgctaaaaaaattaccattttgaattgctaattggctataacaaagatcagtaatacaaatttaaaacattcataaaactgagctgaaaacatgctcccaagcctagtgggcagtaaggaatctggccaatatactgtacaacttgaacattcagttcttaagtagtttacaacatggtttagccctcttttaataataataataaaaaggtaggaatatcttgtattcctcccgctagttggatgtattaaagtgctttcacaaaactaagaccatggtgttaactcaatataaaaggttgaaaagatgttccttcttttcttcagaaagttaatgttccctctccatatttgtatttgctcaaagatgaagctttgcatctgggaagtccttgagtagagtgtctcagaaatagaaagcctggactctcaaggcttcattcctttggccaacatctttggagcctctcctttatgcaaaacacagtggccggtgccagggcagcacacaagcgtccacaggaggcaggccctgctgtgaggggccagggaagggcccaactangagtgccaacaaccgcctaanatacagcagggcggctgcacggttaacgtgcgtgta

SEQ ID NO: 139330 - DNA, 657 bp, Homo Sapiens
gtttgatacttggctttactttataaaaatacacaacttaaatacatatgacactctgtttacaagacataaactggtagatttaacattttcagttatttcaacagaaagaaaatatgtaaattaccttgtaagagcaaagagttcatttatagactctgctttcacagttaagggggaagaacgcccaggggcaatcaatgcaggaagctaaccaacactgtccagctctccagcaaaactcatcttgccaacagggcctctattgcaccgcctaatattgcactgctcgttagacaccatctcacttatccatgtcaccagtgtaagcttttgtcttctctagaaaagtttaatggaaaaaaacgatgtacaaacagtaaaactgtatcttacaattgtgctaaataccaattatgagaagtacgaacctctcttcactttgcaaagcttgcaatggaaagtggttagctatattttgcagctaagttcattttcaaaagttttacaaaacctttgattcagagtaagcttgatggggtacagtggcaaaggaggtgacattcccatgcctagtggaattagttgtaagacgcgcactgtcactgtcaaaggcaacaagcacatggcttacagctccacctttctaacttttgg

SEQ ID NO: 139331 - DNA, 1208 bp, Homo Sapiens
  misc_feature (1152)..(1152): n is a, c, g, or t
  misc_feature (1191)..(1191): n is a, c, g, or t
atatttgactttgctttaatcaatatcttctatttgcaaaagccaaaccctatttttaaaactccttacaatttccattatgacttggaaaggaagatggagggaatggggaagagttggcttgttttgtggaaggagattctgaaaagggcagttatttactttgaagtcataaagtagaaaaacaaatgttcttttttttgataatgaaaacccttgtaggtaaagaccagaaaattctggtcctgaaattataacatattacaatattgtttttaatatatgcagaatttatattactttttaatttcttttccctgagattgggttcacagtttggtagaaatactttaaagaggtagttagcaggggtgaagaggaaacaatgtttatactaacagcacctggaaaaataagtaacaactgtcattttgatctcagcatctacctctcccccttgaatctgcaaatgctatagaaggagatgatcattttcctttttattcttatctgcctggattctctctcctattaaatccaccccagtatcactaatcataaaaatgagttgcctttccaaagatatgctataaagcaaaccttcaatatcaggttgtttagatttagaagagaaaggctcaagtaagttcacttttattcatacagtcattagagaaaatgagcaaaatttccagtaaccccaaccactgccttttctccctggacctagtaaattcctatcaactctttagttgactctaagaactgggctctatgagatcctgacagctaaaacacaggtacagaggagcctgcataaacgttttggtccaggtcttggcctccagtcttatgatgggctggtagaatattgcttcatcagatgcttgtgacagggattgcaaactcgctcaagcttgatacttgaaggaagaggcagttcatttgttgaacaggcatcacagaaggttccgctgcagttcttacacacattctttgttaggctgccgtcttcctggcatagctgacacaactgtggcttttcagagagcagcagctgatcctgttcatccatagggtggggttgcagcctgtggctttcttccaggggcttttttagtttaacattttcctcttgcattttgtgcttcncatccatcttggattctgacttctgggaacccttcctgngatgctcctgtcgtttt

SEQ ID NO: 139332 - DNA, 615 bp, Homo Sapiens
  misc_feature (93)..(346): n is a, c, g, or t
  misc_feature (418)..(487): n is a, c, g, or t
aaccgtatacccgcctttgagtgaattgttaccgatccccgcaaccgaacgaccgtgcccagtgagtcattgaacgaggaaacggaagagccnnnnnnnnnnnnnnnnnnnnnnnnnnnnnnnnnnnnnnnnnnnnnnnnnnnnnnnnnnnnnnnnnnnnnnnnnnnnnnnnnnnnnnnnnnnnnnnnnnnnnnnnnnnnnnnnnnnnnnnnnnnnnnnnnnnnnnnnnnnnnnnnnnnnnnnnnnnnnnnnnnnnnnnnnnnnnnnnnnnnnnnnnnnnnnnnnnnnnnnnnnnnnnnnnnnnnnnnnnnnnnnnnnnnnnnnnnnnnnnnnnnnnnnnnnnnnnttgccctcgaggccaagaattcggcccgggggtttcccttttgattttggaatggccgcatacgcggtcccnnnnnnnnnnnnnnnnnnnnnnnnnnnnnnnnnnnnnnnnnnnnnnnnnnnnnnnnnnnnnnnnnnnnnngagatacacaattgcaggagattttattggccccatgacatccagtgacagtgtgggagcaggctactctccagggacatgtttttggaggcatatggagaagggggcccaggcgaggtggctcacac

SEQ ID NO: 139333 - DNA, 429 bp, Homo Sapiens
tgacgactgtgcctggcttccatcctcttctatcatttttttaaatctcttctcctatcataaaattaatttctcattttttggtcaggtagaattgggaaagtcccacactgtcctcctattaccttaacatcccaagcttcctttccttttttggtctttatgaatatatttatatggacagaattaagataaacaaaattgattgccccattctctcacttccccatcttgtcttcctagaccccacagagttaaaacttgggattcccctggcccccccagaacacttgtatattgtttgtttgaggttcgtgccgcagtaacagacacagtatttaattgcacatacagatgtttgctgggtatattcactgtaaattttatttaatctgtttttttgtttgtttgggggttatttggggtgag

SEQ ID NO: 139334 - DNA, 198 bp, Homo Sapiens
tcatgtttgaagaagagtttattgtgacttcaaacataagctgtaactggtaataagcgaagcagctatggaattatacaaggcaatccaatcaaacaacatggagcacactgaagcgcaaacatcaaattttacctttttcctcctaaaaactttattccctaattacatccattactttctttgtttctttctttc

SEQ ID NO: 139335 - DNA, 736 bp, Homo Sapiens
  misc_feature (669)..(669): n is a, c, g, or t
  misc_feature (696)..(696): n is a, c, g, or t
gttggtctccagggaatgctgactttgtttattaatgccacaacaaacgtgtctctgaataagggaactgacaggacacccgtctctgcattgaaacctgattaaaagcaagtccagccccttctagtctctcaggagtcttcacagtttctaagctgtcctttgtgagtcagtgatgtcgatggcaggaaaactccatccttgtttctttgggtgataatccacacatcacagcatgaatactcaagctctcacacgaagcaatggtcagggtgagatcccaaggtgtggatcccagagtacgaatcccacgatgtgcatcctagggtatgggtgcctaaaatggtgctgaaggtctgacttagggtgactctcactcacatttttcacagaataagttcagaactctgggctatcaaaagcccattgtcacatgtgtggacccatgcatccactctcacccttccatgttctgttcacagtgctgcctcaggtctatgacatccaatggcagcaggcatcgttcaccttgtgcgtgcccaactctgactcccagggcagtctccccacacctcacgggcttcatggcacatatgaagcagggctctgggggtggtctcagccatagcctccgagagtcttcgagactgttgctctgcaacaccagtnggtccttccaaccaatgtcctttcttngctccagctgacatggtgacatcatgctctccagcttcag

SEQ ID NO: 139336 - DNA, 592 bp, Homo Sapiens
gctgttgttgcttgtgcttttggtgccatatctaagaaaccattgccaaatccaaggtcatgaagatttattcctgtattttcttctcaaagttttatggttttagctcttacatttaggtctttgatctattttgaattaatttttatatatggtatgaagtacaggtacaaattcattcttttgcatgtgaatattcacttgtcttagcactattagttgaagacactgttctttcttcattgaatggtcctggaacccttgtcaaaaatcaattgaccatagtgtattggcgtaatttgtttctggactttccattctactctattgctttatatatttttataccagcacaacactgttttgattgaagtagctttgcagtaaattttgaaattggaaaatgtgagtccttcaactttattcttgttcaagattgttttgaacagacttgagtaccttcagtaacttgcaatcccatataaattctagggtcagcttttcagtttctgtaaaagggtcactgggactttaatggggattgtattaaatctatagactaattttgggagtaatgccatcttaacaatgt

SEQ ID NO: 139337 - DNA, 216 bp, Homo Sapiens
tcctgcttggatcttcttggttgtgaatatggaggattttattataggcatgagccaacacgcccatccataaatctatattcagtggattttttgaatggttcattcctttgtgcagagtgtctctgcctgagcaagactttgagaatccaagatgttcttcattctctcgtacatttccacagcacctgctaagtttgtatttaatgttttttt

SEQ ID NO: 139338 - DNA, 873 bp, Homo Sapiens
  misc_feature (254)..(284): n is a, c, g, or t
tttttttgccagaacagagactcaagccaggtttaatgatcattgtctagttttcagagcccagaggctccaagatttgccagcctaggtgtacacaagtgggaggaatggggtcttggacacgggaggcctgcttgctttgtcagcagagctacgaggaagtacagaggtaagaacacacagaaaactggatccatctgctttgctctccccagctggggtgtaccctctcctggcccctttcttgggccccnnnnnnnnnnnnnnnnnnnnnnnnnnnnnnntacacagattgtagagccctgtcatcctctgtctccagggacacctgcttcctgggagacatgtctggtttatgggtgtggggtagggtaagaggaggtggtgatctctcggccttttcttatacccacacctggcagttttcaacacagggttctagtgcgcttacatatgctgattattcaattctccaattaaaaagctacctttgggttctatcacctgaaaccacgggaagaaacaaatcaaatctcttggtagggcagccaggtacatctaccaggtgtctcaaactcaaggccaaactagtggatatagtcaggagacttaagagccacagggccttttctcattccctaaactgggtaggaattatgaagaaaacggccctcccagtcctcaggagctccatcacgatgccccagaaggcctgcttcatttaacgctcactttaaagatcttcagagccctagatggtgccaagcggggagactgcagcatggagatgagattttcccagatttcctgatgagtctgaggagggagtcctagttcctatagctccagtaacaaaattctcaggagtctctg

SEQ ID NO: 139339 - DNA, 535 bp, Homo Sapiens
aattggaagtttctttcaaactctgcctgcttttagatggctcctcttggaactatgcatctctcctgatacttggatgcttttcctctgactgatgaagatcctgaataccaaagagggccgctgacaggtttaggagtacacttttagcacctagcagagagaggcttcactacatcatgcttcctgacatctctccctttgaagagcagtcagactcctgctttgctcttcagacttaatttgggggtttaacaggtgaggttgctgggggaactcttttacaacatctctctgaaagaatccgggctgccagtttcatttggtttgggtgtcagtagcatggtggaaagacaaaaaaacccaacttgacatctgcagaaatgggttcaaattttacctgcaactcaccaattttgtggccttggttcagcaattaaactccctaaaattcagttttttctttgtaaaatggggttttgaacagtacctacttcaaaatgtgtttgtgaagattaaaaaagttaacataaag

SEQ ID NO: 139340 - DNA, 492 bp, Homo Sapiens
actttaaaatattgggtttattttaaaaactcagcacagtacaaactgccacacaaattactttatactagcaacaaccggtgctcctattaattcaagtgtacacatttaactccccaggttaaacaccttgtaatttaccttgaagctctttacattctgaagttatataaaattaagcaggaaaacattaacattaaatgaaaatcaattttgcacaaataagtgtgatcaagcagcttaaatcacctgaaattcttgtacttcagagaaaaatcccagatgacagcactggacaggttataaagagttcccttattccctgggggcgtctcaggcattctttctgcatgtttccttcactgagcctcaggctacgaattgagagaaagtctttccaggcagtggcctgattcttacgcacattccgtttctttttctgaattcagagtttctgaaaacacaggcttttctcttggaaaacatgatctg

SEQ ID NO: 139341 - DNA, 979 bp, Homo Sapiens
  misc_feature (447)..(482): n is a, c, g, or t
  misc_feature (501)..(578): n is a, c, g, or t
ggaccggtccggaattcccgggatatcgtcgacccacgcgtccgtaagttactcttcatgagatttcatccatttactaatactgtatttttggtggactaggcttgcctatgtgcttatgtgtagctttttactttttatggtgctgattaatggtgatcaaggtaggaaaagttgctgttctattttctgaactccttctatactttaagatactctatttttaaaacactatctgcaaactcaggacactttaacagggcagaatactctaaaaacttgataaaattaaatatagatttaatttatgaaccttccatcatgatgtttgtgtattgcttctttttggatcctcattctcacccatttggctaatccaggaatattgttatcccttcccattatattgaagttgagaaatgtgacagaggcatttagagtatggannnnnnnnnnnnnnnnnnnnnnnnnnnnnnnnnnnngagatggagtcacactctnnnnnnnnnnnnnnnnnnnnnnnnnnnnnnnnnnnnnnnnnnnnnnnnnnnnnnnnnnnnnnnnnnnnnnnnnnnnnnactatggatttctttaaggaatactggtttgcagttttgttttctggactatatcagcagatggtagacagtgtttatgtagatgtgttgttgtttttatcattggattttaacttggcccgagtgaaataatcagatttttgtcattcacactctcccccagttttggaataacttggaagtaaggttcattcccttaagacgatggattctgttgaactatggggtcccacactgcactattaattccacccactgtaagggcaaggacaccattccttctacatataagaaaaaagtctctccccaagggcagcctttgttacttttaaatattttctgttattacaagtgctctaattgtgaacttttaaataaaatactattaagaggtaaaaaaa

SEQ ID NO: 139342 - DNA, 533 bp, Homo Sapiens
tttttatcaataaatattgctttatttttttcattggggatacatttagtacattcatgtgagaggaaggccctgtgggtgtaagaaatttgtaaaaactgtccattacctttcactccttatttagattggaataattaactggagataatatccagtaaaatagattaaacttccatttataaagtcagaacctatctctgaaaattaatgtgagaaagaaatctctagatttgatgggtgtgaagattatgagagtaaagttttgaagactcagggatagctgtaatgcttttttctttttataacccaaaaagcaggtatgtcagtcgctttttctgcccacaatgataaattaaaaacagccactatccatttggaaaacttaaaagaataatgaacagttatgttctatctagattcagcaattgttaatatgttgtcacatttggtttgcttatacataatatttacatattttgctgtagtatttgagtataaattgcagatactataacacatcacatctaaga

SEQ ID NO: 139343 - DNA, 240 bp, Homo Sapiens
gagaacaaatcactcctgataaaatttcttagacaattgataatcattttaagaagaaatttaattgtatttagctctgtgtctcgcccctttggtgtcactcttctacctcttccatcactatagctaaatatttagaagtatatcttgacacctagcacaaatgttttggttaagtatcttaaaactgatggatggtatggctgggattacaggtgtgagccagtgcgcctggcctga

SEQ ID NO: 139344 - DNA, 748 bp, Homo Sapiens
ctttgaggctcactagaggacgcagaaccttgggagattgatttgcacagaactccccacctcccacttttacaatttccagtttctgattgaaaattttagggtttctccccactgcccttccctatctttccttcccctcaacaccatgaaggaaaaacacacacggcagggctttttgtagccctgaaggcaactttagacatttaaaatccagcactttaatctcttgttctctgtgaatcactatgagaagtgaatggttttaaaggctgtaatgctatgttggaaattggtttgttttgccttttattgaaaaggtaagatcatgtgattggaagaacacaactgttggcttgggaagaggactttgctgctgaagtgttttctaccttctgagtgtgtttaaggcaggatttggagggaaggaccagcttagggagagtgtctgagccacagcgtcaggatgggggaaaccacatgggatccatcaagttccagttgaacaggagcaagatcagaacttaggagggcagtgtcagctcccttgttggctgtcaaggaacaccgatctagtagaaacccacttggttgtgacccaggtagaggtagatgccatacatttgagatatgcgtccttaaggaacctgacaagcagactgaagggatggtaagtgtgacagcctgataagttttctcaaagcccaggatacagagccagtgttttctgttaactggagacctcagt

SEQ ID NO: 139345 - DNA, 905 bp, Homo Sapiens
  misc_feature (187)..(189): n is a, c, g, or t
tttgttacaacgcctcgggttcccccccgggcgttttttatgtggggggagtccaagccttttttcagttcccaggatttcctggagaaacagtatggcccaagtccccttaccttcgggggcccgcggcccaaaaggaaagggtcttaaaaagcttttctgggggcgaagggcgccccccatgtcnnncccaccgtccctgggttcgtttaaggtagtattcttggttagaaatattttagcaaaaatatggcaactagtggattataagccatttcactgaataaaggagtctataataaacttggttctcttgggaggaaaacgtatttccccacatccctgtgacaggaagatgcaaatctataaaaagtggtagaacattaataaaagatacaaacaatatcaatacagtacttaagaatagttgagacagtttttcgtaaatgaaatgctttaaaatgtttctcatttttggagttaaaaatcaaaggctagagggtccactggatgtcactgaagtccccagggtctcccaggcccccctctgcttctaagtaattcataaatgcagccatggctgtgtcatcattgtcacatagggcatcgaaatccaactgtgcaccatcactgaggagtggctcatggctgtggacagcaacagtactctggttttgcctggtagcctctagctcccccatttcagaaggacttggtggaaacaactccttatttgacatactcctgcagtttacagtatgagtatctttcattaaacctgttggactcgaatcatcaaggtatgaagaagactgtaacctctgtaaatccagaatttcatttgcaatatctgttccaatactaccagcaccaagtactggtccagtagacattccaggtacact

SEQ ID NO: 139346 - DNA, 435 bp, Homo Sapiens
attaattgggaaagttttaataagcattcaaatgtactttacattgataattgcaatattgaattttgtaaaactttaaatattttccttaaaaaaggttagtgatttttttattatttttgggaaatgtggcgatccaacgattatagcattaatgcaaccattccaggtccctaaggttgagttaacattaatatgtaagtaagtgttcgcatttcatgtctacaataaggtagattgtgaacttcccgtatctctgaattttagcaaaaattccatgagataatttacagtaatgtcaaatttttggagtgcaaactcatactctacatttggatcacttttttgctttgagttacctgacttgagaatacaaggcaatttttctttcctaaatccttggaaaaatatttttgcagtaagtcttgtgtctcc

SEQ ID NO: 139347 - DNA, 1130 bp, Homo Sapiens
  misc_feature (514)..(522): n is a, c, g, or t
  misc_feature (546)..(583): n is a, c, g, or t
  misc_feature (957)..(1075): n is a, c, g, or t
ttatgctttgggttgtctcctacctctcgttgttgctctcttaggtctggcgtcgttctgcgtcatttttctgtgcctgctctctctgctgctcgtcgtgtttgtactttctctttcgtctttttgtttgtcgcgttttgcatggtacgtgatgctgtgtcttgtttgtcgtactcttttttctgtcatgtgcgttgtgttgttcgccgccgctgctggtttcttgcgtgttgtctcggtctctctttctctgttacttggtttctcttgttatcttgagtgtgtttgtggggcgtgtgttcagtgtgtagatttccttccttgcttcatgcggctgctcatttcccttcttcccaaaagttctaacacagggtaaccccgggctttcccaatttaataccccgcccctcaattggggggccccccaatattttcccccctttgacacaaaaaaactgggtcacgaaaacacactatatgacccactggcccacttccaataccctcctttttnnnnnnnnnaaaaaataagaagcccccggaggnnnnnnnnnnnnnnnnnnnnnnnnnnnnnnnnnnnnnnaaccaatgagacatatgcagctttatttaataatctgtaaaaagtcatactctggcagagtgatgcattccttatctcagcagaaagcaaacagtctgtctgaaaagccccttcccaagatttggaactgtgtaaccctgagcttacatctcaatgctcccaagagctgggctcttgctatgtggtagttggtctccacaattctctcaccctccagcaatactctctgtctggctgtgactccctcacctaacagtagacatgaggctgaaaacaactttacctggacagggctacccctacagattggccctttctctcctacaaaagggagttcataggattaacaatctttctaatggctgggagcaatnnnnnnnnnnnnnnnnnnnnnnnnnnnnnnnnnnnnnnnnnnnnnnnnnnnnnnnnnnnnnnnnnnnnnnnnnnnnnnnnnnnnnnnnnnnnnnnnnnnnnnnnnnnnnnnnnnnnnnncttagctgggtatggtggcaggtgcctgtagtctcagctactcgggaggctgagg

SEQ ID NO: 139348 - DNA, 560 bp, Homo Sapiens
  misc_feature (16)..(16): n is a, c, g, or t
cacattttaacagggnaatgggtaaaatataaacccacaaaggaaagagggcaatttcccttgccctttaaatgggccaaatggttaaaatcacgcccaaaacctacatgtgaatccagccatttgggttccgatgtaccgtttgtaatattgcatagaaaaggcacagctttcaggtctgtgggggaaaggttataccttctttttgacaaaagccttccttaaaaaccatgcaccaaacatgtcactatgtacatcttttttcaaaatctcggtcatgcgcacatatggcctgcatttctcttccaaaacttgttatccccaaaagaagtccaactttttattggctttgtctgcaatagcatttgatcctggctaattttcaagaaccattcagactcattcttagaaacactgaaaacaattgtacataagcaggatgcacacaactccatgcctccaggtgcggggcagttacaggaaggtaaccatttacagccagaaaaggttaaatatactcttttcattgttttcagaaaatgtataaaggtccaatttgt

SEQ ID NO: 139349 - DNA, 1192 bp, Homo Sapiens
ggactcattgttaagttaaggttcatgcccaggaatggaacaggagtccttattctctcacctactagagaactagccatgcaaacctttggtgttcttaaggagctgatgactcaccacgtgcatacctatggcttgataatgggtggcagtaacagatctgctgaagcacagaaacttggtaatgggatcaacatcattgtggccacaccaggccgtctgctggaccatatgcagaataccccaggatttatgtataaaaacctgcagtgtctggttattgatgaagctgatcgtatcttggatgtggggtttgaagaggaattaaagcaaattattaaacttttgccaacacgtagacagactatgctcttttctgccacccaaactcgaaaagttgaagacctggcaaggatttctctgaaaaaggagccattgtatgttggcgttgatgatgataaagcgaatgcaacagtggatggtcttgaacagggatatgttgtttgtccttctgaaaagagattccttctgctctttacattccttaagaagaaccgaaagaagaagcttatggtcttcttttcatcttgtatgtctgtgaaataccactatgagttgctgaactacattgatttgcccgtcttggccattcatggaaagcaaaaagcaaaataagcgtacaaccacattcttccagttctgcaatgcagaattcgggaacactattgtgtacggatgtggcagcgagaggactagacattcctgaagtcgactggattgttcagtatgaccctccggatgaccctaaggtaactggcatctttggaatatcttcagaatgactctgcattaaaagttcacttattctcccagttccctgacggaaactgcattccacattcaaggtaaagatccctactatacagtgactgcagtatttctctggtattgaaaagtacttaaggcttttcagggctcaaacgggctgtgccagaggattgaaaaggatcagtgggacttaagttatgaaaatgagatccttggaatgatctcttaagaacagcagatgcctgaaggaaataaaattgcttaaggaagtagataaacttctgtagtatatgtggtagaataagcttcattgagaagtattttcaacaaacactggattaaagccgttttgatgatgaagcac

SEQ ID NO: 139350 - DNA, 533 bp, Homo Sapiens
  misc_feature (113)..(174): n is a, c, g, or t
acacaatcattaatgagatttgtcttcagccaccagtgttggccttgaagcagagggcacagcccttggtgtttgtaaaataagtatgaatacacagtgtggcagtgttgtgnnnnnnnnnnnnnnnnnnnnnnnnnnnnnnnnnnnnnnnnnnnnnnnnnnnnnnnnnnnnnntaaaccgaaatctgtggatgaaatagaagctggagccctcctcttggaatattcagcctaagaacctcataggactatgaattcacccgaaattctcatttgccatcaggccgagcttttaaagaaaaattgttctctaaccaggattgtaacaaaagtgtaaatactgtttcagagttgagagttggtggtgcaaatatgtatataatgaactgtatttttacaatgatcgccgcatgactatttcacaccctttttatactccatatctgtcttccagaaacgtcacctgcctttctcctgtggtctcttaatccagtaattgtattactgccattaaaggatgcagttattttaaa

SEQ ID NO: 139351 - DNA, 428 bp, Homo Sapiens
tttacacaatcattaatgagatttgtcttcagccaccagtgttggccttgaagcagagggcacagcctttggtgtttgtaaaataagtatgaatacacagtgtggcagtgttgtggtttttgttgttgtttttcctctccttttgagaattttcttttgtaaaagaaaaatattttttaaaccgaaatctgtggatgaaatagaagctggagccctcctcttggaatattcagcctaagaacctcataggactatgaattcacccgaaattctcatttgccatcaggccgagcttttaaagaaaaattgttctctaaccaggattgtaacaaaagtgtaaatactgtttcagagttgagagttggtggtgcaaatatgtatataatgaactgtatttttacaatgatcgccgcatgactatttcacac

SEQ ID NO: 139352 - DNA, 618 bp, Homo Sapiens
tattggcttataatgcaagtgtgcacaacattcttttctccttaacatgattatactgtggcagccctttaatgctaaatttgattcaaagcagcaaatacttttaccaaaacagccacagttagacttcaatatgaatttccacaaatatggaatttcattttcttatttattttttagatgcctttaggtcataataaattaacttaaaaacaaagagagcatattttgactaaacaaagaaaaatttcctgcaagagcatctttcaaattatgtttccctctacagatgtgactacatgcaacctgaaactttagaacactgtttactacttaagaccacatcctatctcaactaaccgactatacttcctgatttagttttgagtgttttgtgctctataaataatagcgtgtgtaaaattagaaaggaaaatgtatatacagtactctagtaactttatctgatataaatggcaaatttgtttctgaaaatattgaaacaactgccgtgcaaaacaggacctgttttgaggcagggttatttttcttccttttaataatgaagaaaatttttctttttatttacatatgtaattttatttgaactactattaa

SEQ ID NO: 139353 - DNA, 693 bp, Homo Sapiens
  misc_feature (490)..(510): n is a, c, g, or t
ctctgcaaatgatcaaatataattattatgtttatttgaagtgagatgatggaaaagatggcctggctgattttggaccgagtggcccatcacgatacctgaacaagcagttgtgagggtgggcctggcacacccctggatgtttacaggagcatctggtccagtcctgtcttatggctgtgcccagctccagctctggaagagtctctctgaggagcagggcctggagctgggcctgcaaagccagagctaccactagaagaagggctgggctggagcagggccaggaaaggagacctgtccaggggacaaggtgcacgcagccttcaggtgcagccagaacctgccggcagaccccaggccaccgacgaggcaggcctcaccaggaatgacacctggtgtctgaggtgaccttttattcccctaggtgcatgccatctttttaagtgagaagttttctaaagcaaagaataagcatctacatcttacnnnnnnnnnnnnnnnnnnnnngaagggatcctataacaaaaagcacttccttcttctagaaggaattctgagtctcaaataaagagaagatcttcttttaatatcgtttttctttctatgtaagaggagcagacgttattattcatgactatcaatcaatctgcatatgtaattataattgcaatgcaatacatatgaatataa

SEQ ID NO: 139354 - DNA, 723 bp, Homo Sapiens
  misc_feature (211)..(220): n is a, c, g, or t
  misc_feature (530)..(530): n is a, c, g, or t
acaataaggctcttgaaaattgtcattacttgtgttttcctatacattcatctgtgtgaaagcctttttcttctttgatttaaaaaaattaactatacagttaatggtttagaacttagaactacttagaattaatgctaaagtgtcagtaagaaattaatttagcttcaataattgtgactggcctcaggaattctcccttccacacctnnnnnnnnnngcccacctcacctcactgcaccgcaccgcaccagagccagagcagctgcttgtctgcagcaggacacagttcctacatacgtttcagttctttcatggtaagctcaatggactttgaattgtttacagtgctgtatgtccaattgttaaatgtaccattctgaacgatgttaaagcaagtgtggtttatttatggcatgaaccatgtaacttgaaatatgaacttacaaggaggggcactcattaggtaacaagttcttacaccaaactttccttgatgaaataagccaaaataatcctaaaattcattnagaagaacttgataaaagactcacataaatgttagaaagagcccgtaattttaggactcctactaaattcttccttgtttgttaatgctattaaactcagattcaagggaaatacaagttccactttgagtcactttgaatagttaatcaacagcacatgttagaatatattggagccaaactctgactctgc

SEQ ID NO: 139355 - DNA, 477 bp, Homo Sapiens
ttttttagtgaaattttccaaagtgatttacaaaactgtttggtttataaggtgtggtcaccgaagtctttttgtttccttaacaaatgttaagctaatgttttgacagtgattttctggtatgtcaggaaccaatcaaacaggcatatacaagaaaaacaaaaagaaaagcaagtaatcattgtccagcaaaatatgtctgtaggccatgcagactggctttgtgctgggttctttaaagccggcacaaagtgtgtgttcactcttgcactgagtgaagttcaagttcactcttgcacagagcttgcactgaggggagggatcggccaaggtaaaagtgtagggtcttcttatgacatttgtcagcatgtggcttaacctatgaatacgtgtgactttgtagactctcccatgtacgtgaatgaggcatgcgccaccacgcccagctaatttttttgtgtttttagtagagacgag

SEQ ID NO: 139356 - DNA, 623 bp, Homo Sapiens
  misc_feature (590)..(590): n is a, c, g, or t
gggggacacgacagccaccatatccactttatttttagattatttgtatacatttagggggtacaaatgcagctgtgttacatgaatatattgtgtagcggtgaggtccgggctatttttagattatttgtatacatttagggggtacaagtgcagctgtgttacatgaacatattgggtagcggtgaggtccgggcttttagtgtgcctctcacccaaacagtgtactgtgcacgtaagtagtgtacattgtactcaacaggtaggatttcatacctcatccccctttcatctcccaccttttgaagtctccaatgtctattattccattccgtatccatataccatgtgtactcactgtttagctccctacaacccactttttacatgagtttccaccaagtacactgctgtcttcctgagacctatcatgaatgtaaaaggtgtcatgaaggcacctcaataggtcagtcaacaagtagatgatacatgtcaggcaagaagtatttcacatgggacagccactgggccaccatcatgcattgtcattgtcactccactgagttctattttttggattttgtgtttanagtataaatcattttccagaacagcgtctattt

SEQ ID NO: 139357 - DNA, 715 bp, Homo Sapiens
  misc_feature (160)..(196): n is a, c, g, or t
  misc_feature (674)..(674): n is a, c, g, or t
aaagtggtcgcgatcgtgctttaacacttttagcttgttttcagtggaaagatcattctctaacagtatagccttatctgacttctgcttggagtcctcatattcgtaagtaaaacttttcaacttcagctcttggctgatggaacactgtcccttctcnnnnnnnnnnnnnnnnnnnnnnnnnnnnnnnnnnnnnacaactttcccctccttgtccagtttggggacagcgccctccgcgctggacaggaaggggctcttcttctccgacagggaggctcgcttcctgtgctcctgcctcttcctcactggcttcagcgattccacactggagccctcagaggagtagtcagactcgcttgtcagtctcgtccttgtggagtctgataaagaactgacctctgaccaagccggggaagaaatggttttccaattgtctgtccgccagtgcttggtgtgctggtctgtgtggctggggttctgcttctgggcggcagagctcccgtgagacgaggtggaggaggcaaagagggagctgaacagggaggggtccttcagcaccagcggggaccccttgaggcagccagagctccccagagagtccctgtcatcctccccactctctgaggactcgctctccgactccgaggagcaaacttgtcgctccgctttcncgagcgaactctctgcttttgtttcttctttcgcttctttt

SEQ ID NO: 139358 - DNA, 1469 bp, Homo Sapiens
  misc_feature (1364)..(1364): n is a, c, g, or t
cgtttgttacactttctttactatgtggtcgcctgcagcgcagatctcgcgcgcttgttgtatgtggctcgctaagcgccggacttgatttccagagatctttacatccttgatccgtgagctaatgcgtataactctcactcagttggctgaggacccgtcctcctgtttggtgctctctctatgatttgacacttccctcctggtccagtttgggaccagcgcctccgcgttgacaggaagggctctctttgccaacagggagctcgcttcctgtgctcctgcctcttttctcccatgcttcagcgatgccacactgtagccctcagaggaatagtcagactcgcttgtcagtcttcgtccttgtggagtctgataagaactgacctctgaccaagccggggaagaaattggttttccaatgttgtctgtccgccagtgcttggtgtgctggtctgttgtggctgggtttctgcttcttgggcggcagagctcccgtgagacgaggtggaggaggcagagagggagctgaacagggaggggtccttcagcaccagcggggaccccttgaggcagccagagctccccagagagtccctgtcatcctccccactctctgaggactcgctctccgactccgaggagcagaacttgtcgctccgctttccgaagcgaacctctctgccttttgtttctttctttcgcttcttcttcactttatttttttccttctgctgcttggcattagaaggctctcgtgtcttactaccaggcaatatcgtatgtgccgagagtctcagcttctctcctgtccccacggtgacactcgcgtcctcctcgtccgacgtgtctgacaggatacgatgggacgctttctttggtgcaatcgtgttatttttagtgtaacttttaacctccattttgggtatagagataaaactattggatttcgtttcttttctgtagtcctttttcaataggtgcttgtcgtccaccggagggaccctgtcctgctcgtcgtcctcatcaaactcatactcgtccttgacgggggccgtggccttctgtggctctgggttcttggccttgtgcttgaggcctttttcgaactcggagtccgtgttgttgccgtcgactgaactggaaggtgcgaaggatggtgcgtcttcctcttctgagctctccgtcgagctctcctcgctggaagtgtaagtgcctttgcctaacaggaggttcaccatcgtgggggagttggccactttcagcggcgtctcgcctttcctgttgctctgctgcgggttccctccgtaccgcagcagcagcttcaccaccttgtagtgcccgttgttggcagcgtcgtgcanaggcgtgtcgtcatctaggcccctgggtgtcacctccgcacctgcagccagcagctgcttcgcgacgtcgtagtaggcccgggtacaggcctcgtgcagcgccgt

SEQ ID NO: 139359 - DNA, 966 bp, Homo Sapiens
tctgtgcactgccacacctcttggtgttacctcattccagacgaggttggtctgccttgcaggtctaacagtcccacagtggtgacggggaccggcagcaactcctgcaggcctccttccacttggtgtaatccttcacctgctcaaatccaaccagacctacacggctagcggatacgagcctttcatagatggcacttggtgggaaaacctgtgagagggccgtcccgggctgacccagaagggggaaagctgggggcagacagagggcacagctcggccttgagggtgggcaaggcgaaaactcgctttcctgtgccccacatcatggaaccggctagctacggggaaacaaagctacagacccacccagatgccaggacaggccggatgtgtgaagaacggggggatgccaaccttgtagtgcccgttgttggcagcgtcgtgcaaaggcgtgtcgtcatctaggcccttggtgttcacctccgcacctgcagccagcagctgcttcgcgacgtcgtagtagccccggttacaggcctcgtgcagcgccgtccagcctgcgaagtccttgacgttgacgtctgccccctcgctgatgagctctttgatgcgccgggcgtccccgcggatggcggctcggtgcaggcgggtctctccacgctcgtttctcttgttcactttatctttggtttttgaggcagagttgggcgttcccttctgacacactgtagactgggaggggtgctttggtgttgtgtccactgggctgttggcagactcctcggccgtcatctgcatgagaagggccacctgctggcgctcggagagggggtagccggctcggattccagacagccccatgccaaacagcagcccggccttccgggtgacaggctccttcttaatcctcttccgctcagggccctgcttctctttcttcttccttcgtgccgaattcgccac

SEQ ID NO: 139360 - DNA, 756 bp, Homo Sapiens
  misc_feature (331)..(376): n is a, c, g, or t
agtcatggcaatttcactgcagcttttattgcctctgttggtaatatgacagggactgtaagaaacacaattgaacttacagagatatgcagatgatattcactaaagataatcttcatctcaagtattttttatatgtgggcacttctaattttatacatttttctatttaaaaagcattacattttaaaatttgtacctgttttgacatttggcaaaaaggaaactgtgcctatggttcagtttaaaacaaagaatcagcatggggagtttaccggaatgaggactgaaacacttaggagttaaagcaattcaaggggcgtgtgtgtgnnnnnnnnnnnnnnnnnnnnnnnnnnnnnnnnnnnnnnnnnnnnnnacagacacagactcaaacacacacagccatatgtgtaatcattttttagtacaaaatattccctgtagccagacatttatcttcagaataatcacaccacattaaatcagtcttctcttttcagccctagtaaaagttttgtttaattctaagatgccatcatagtgaacaaccttaacttttatgctacataattatattcaaagctttatgtatttttgtttataattacacagtaattataaatgtttagtaccaacctgatgacaaacactattttgttgaaaaggttttgcattttaaaagaaaaatatgtaaaatccaaggcactaggccacgaaccaatatgacttttaaagaaaacactttatattgaaaaa

SEQ ID NO: 139361 - DNA, 313 bp, Homo Sapiens
tttccttctactataccattttaagttctgacctcaggcctccatttgggccgatggcctcttggaggcttaaagttttctgtaccttgtgatgaatgttaataggtgtttttattatacaaagctgaatgtcatttctcgtttgtagctttctgtcactcattccatcttccttcagacatcaccacgtttctctaaagtcagaaaacattccgttttggtctttttcaaaaaggtcccaaatgctgcactctacacatgaaggccctctcacacagacgtgacgtcctgccagaaagagaatgaatgacag

SEQ ID NO: 139362 - DNA, 672 bp, Homo Sapiens
  misc_feature (595)..(595): n is a, c, g, or t
tttttacatgtgatacctttttttaatgtcttataattttagtttaaaaaaattttaatacacaataactgtacatatttatgggggtacatagtgatgttgcaatacatataacatatagtgattagggtaattagcatatctatcatctcaaaaacttatgtctttgttttgggaacatgcaatatccttcttctagctatttgaaactatacaatattgttaactatagtcatcctacagtgctacagaacactagaacttatacctcctatctagttgtaattgtgtattttacaactttgaagtaggtgtaattatccctatttagactatacctgtatgaaacagaaattattttcattttacagatgaggaaacagacgcagagaagtaatttgtccaaagtccatagggttgtaagactcataacaagaactacaacttgggcctatctgaatcttatacttctggtactatacttgttcacaggtttgaaaagagctttaatttctattatttctcaagaatttgtaatgctttctcttgtcactgtgctttcaacttagaggagttgcagttttgataaaagacnactgatttagcttctaggtttgttaaatatgtaattcagaggcaactccaggcttatatttctcctcgtgccgattc

SEQ ID NO: 139363 - DNA, 140 bp, Homo Sapiens
tctagaatcttaatatgtttagttgggaggtgtcccagaaatcctgatgaaaagtatagcaaaatcagaattttggtaatgattagcaagtataatactgctttgaactcagtacttttatatgaagcatataaagttac

SEQ ID NO: 139364 - DNA, 1087 bp, Homo Sapiens
ctcagcactggcacaggcctcaactgtcccttcacagtgatgttctttccgggttgtatatgctcaaatcctgcaaagatgagattgttatcttggtccctgtttcatgttcaattttcttcaaatttctgccttcttttccaatcagtcttccaaccaagccattgtgtgccaagattttcagaggaatctcttcggctagtttggtctcatctgcctctttctgcatgatttcaagaatcatgcggcatgcttcagaagtcccctctggggtggcatggatggtgacaggcttctctgcagctccagagttctcttttctatggatatctacccgggactgggtctgcttagtgatgttctttatggtcaagccctcctttccgatgatggcaccaacaaactgggtggggaccaggatccgcagcgggaaatcaatctgtctggcctgagaagtgcccccaggggcgtggccttgctcccgggaagagtggtccccacgctgggctcgctgagggggcgaaggggagctcacctcttcatccgggatgtaggaaatcttgaaggagtagttctcaaactgatgcccgcttagcttctccatggctatttttgcttcttctcttgttgcatatgtgacgttgacaacggcggtttctgtgtctgtgttgacttgttccacattctccactgtcccatattgagccaaaagtccatccaacacctcccactgcaggtgaggagggatgtttcgaatctgaattttcctgctccttagctttttagagactgagtaatcaacttccatgattttcccatgcaattccactttacccgagagggtctcgatggcgcggatggcccagttctggtcggggtagtccacgaaggcgtagccggacttcagcaggacctgtcccgccaggggcagcttcctgtccccaaagagctgccggaggtcgtcggcggtgacagcggggctcaggttcccgatgtaaagcttgttcatcatccgtctcttccccgagagcccgcggctcccccggcccggtacccggcgctcctcgcctcctccgctgccctcccc

SEQ ID NO: 139365 - DNA, 1003 bp, Homo Sapiens
tataaatatgtaactgtatttttcttcctgtccagaaactgttattgaataaaattcaggtatattcctccaaaacccacacagttcagagattttcaaacaccaggtttccatttgtattaaaatgggcaagataatgaaggcacaggctcactttgtatcaataaaggacatcaaacacagtcatgaggcactaatgacataagcaatcacaaaaagcaagtgttcaaagtcttcagtaactcttctccctttaacatttggcaaaactcagtccagatattttaatacctcagaaagaaaaaataaataagagtagctacattaaaatgtcagattacttataattagtctttagaaatataagggataaaatgaaaggaagagaacacagatttcctatattcttggattatccttcctttctgagggtctcagatgtctctatgcatctgccaaaatgccagctgtacctgaagatttaagagatttttggtagttgctggcatggtccctcgacacttaaagtttatatcacaaaacaaactaggttggttccagctctttagtcctttgttaaaaaccataaatcaaatttggttatttaaaagtgaccttaaaaagtttaaaggaaaatatatatattctatcttcccataagaaacagatttcatatttatacttaaatggcaaataaatatattttaaagccaagcaagttcctctcctctatacaggctaagaaaacagagttattatatctttattgctgatgatcacatcactcatcaagaactagtttcacaattttaggagacttttttcatgacataatataaaagataagggtctaacttaagtctgagcaggcagaatagagctgtgctcccaacatccctatcacaacatatgacgaatgaacacaaacactgaatctgtttacatcataaccacccggccgtaatggccgaattcccgggcatatgtccggtaccgtcgactg

SEQ ID NO: 139366 - DNA, 753 bp, Homo Sapiens
  misc_feature (325)..(325): n is a, c, g, or t
  misc_feature (684)..(684): n is a, c, g, or t
ttttagattcaaaattgtttaattagatacattttatatatcctgaacataatggctcccatagaaataaactagtattttgtacacaaactttatttactgtgccacattcataatatactgggccaagtgcaaacatttattacatcccctggtgtgtgcagagctctgctcccacaaacacctcattatctaggatgacagagaacaagattagacaagatggataattaaaatccacaaggtaataacaaaaatgtactttatgattataaactcttctccagctacagctgtaaccagtactaagcaaaacagtttattncaggttttcctccctaaatccagcccccaagccactgctccttggggcaggatctaataattgattagtggggttgctgaaaggcctagggccagaataatctagaggaaaaggtttagaaaattgacaacctggcatctcatatattgaaaatcctttggtttctcttgcccagaaaattgcattttttccccacatatagttgatatgtaccattaaaagttatcttaaataaggtttatttttacaattgcctgaaaattatggggtaggtattttaaaaataatccatgaaaaacaatggcttaatttaagaaaaacaataaaataacagcaaaagagagtaatctgcaccctgngtgacagcatatggaatcgatgagcttctggtcagcctctaccagtgctggtgtgtgcattgatcgctc

SEQ ID NO: 139367 - DNA, 790 bp, Homo Sapiens
  misc_feature (152)..(229): n is a, c, g, or t
  misc_feature (734)..(734): n is a, c, g, or t
  misc_feature (746)..(746): n is a, c, g, or t
  misc_feature (767)..(767): n is a, c, g, or t
gttaagtcagatttatttaggtataattgacatacagtacaattcactcttttcagtgtgcagttctatgagtttgacaaatgcatgcaatcttgtagccaccacctcacaatcaaaatggagaccatttccagcccccttaaaagtccccnnnnnnnnnnnnnnnnnnnnnnnnnnnnnnnnnnnnnnnnnnnnnnnnnnnnnnnnnnnnnnnnnnnnnnnnnnnnnnttctttttttgatgtgtctttgtctggttttggtatcagggtgatactggtctcctagaatgactttggaaatattctctcctcctctatttttcaatagcttgagtgggattggtattagttcttctttaaatgtttggtagaattcaacagtgaagccatcgggtccttggttttctttagtgggagactttttattatggcttcaaccttgttacttgttattagtctgttcaggttttggatttcttcctggtccagtctcagtaggttgtatgtgtctaggaattgtcaatttcttctagattttccaatttattggcatagagttgctcatagtagcccctaatgatcctttgaatttctgcagtgtcagttgtaatgtctttttcatttctgatttgtatcttgtctcttttttctcagtcttgctaaaggcttgtcagttttgtttaacttttgaaaaaaagcaactttttgtttcattgttcttttgcattgattnttatttcaattntatttatttatgctctaattnttattatttgttttcttctaatt

SEQ ID NO: 139368 - DNA, 692 bp, Homo Sapiens
tttactactaagcttttacaaaagaagtatctgttttattgtatagaacaagtacagcattttactacatagtatacaagtttttaatgagcatttaaaaaaataagtaaatctaggctatttgaaaaatacagttgagccagtgagcacattttataatttggaagacacaaatcaaatgtgaaggatttgattttctacatttaaaatgaagaaccaaaactctcttcttgattttcagctaaaggcaggagactactttccaactccttttgcttctggagaaggccctgtctcagttctgaaagtcccttaaggattgcttgctgtcgatccctatttttcaccatgttaggattaagaagtggatccctgacacagtcagaatcaaatagctgtcgtttttggccacagtcttgtgaattttggtactgagggtcctgggttgaaggcccagacaatggtgcatcgggatcaaggtaatagatctcatttgttcgaacatacggaataaaatgggatgattcagaaatcccagatgataattctgtttgattacttcctgagatcaaattctctctctcatagctactgttttttagtggtaaatgtaatgtattttgagtttgttgggttctgtttttcactactggaactggtgatgatggagactttccttgctgaatgaatga

SEQ ID NO: 139369 - DNA, 562 bp, Homo Sapiens
  misc_feature (62)..(81): n is a, c, g, or t
tgttttaatctttattctcttcaattagaaaaatacatactacaaaagtttcacattatagnnnnnnnnnnnnnnnnnnnnttcccccagaatcccaccctcagagatggttactcctttttggtaagtattcctccaggttttttaagcatatagtagtacataagcaggaaaaagtaaaatcctactatatataagcaactggtcttgagcaagttttcaaatggttctgacagatcattctgaccaatttctccagggaactttatggattagttttcagagaagattccatgacactgtgggtagacaaacctctaagatttttcttatcatttataataaatgttgtcccaagtgttaaatgtcaaagtttttaaaaatagtaaataaatgtgatacagaggaaaaaaagttcagaaaattatcccagtttcttatcaaaatcaaaactcctaagtcccaattccaacaagtaccataaaacgtctttaaaatgcgattttgagaaacaatcacttctttatcataaaatatagctatagaagtaattctacaattt

SEQ ID NO: 139370 - DNA, 659 bp, Homo Sapiens
gagtttccctttgtttatttttgcagccaacaaagtatgttttcgaggttaacaacgaagcacaggatagtacaagtggaagatcattaacatgactggataggaacctcttttaatttccctttcttggctttttccacaccctaggtggattacactcaccctgacacacctagaaaatacacccagataccagaattgcaaaattcaggaagaatgcactgcacactgtatccaggcaagccaagctcacctaaaaatggtctcaaaaagcaaagggctctgaccatcgactgatggggttgcaagcccagcctgtctgcaggaatttttaaatctgaaaccacactacagaaattattttatatattacttatttttaaaactcaactgtaaaaataagtgttgcaggaagagtgaggaagagggaatttaaaagaggaagttgggactgaatctattcgttccaacctccctaagcaatccacttattgatcagtgcttccaactcaaggaatatttaaaattttttaattaaagaaaaaattctatcaatcagagaatcttgaaggtagggggatcatttacaatcattttacaggtgaggatattgagaccagcagggagatgacctgcccaagcctgcacagatagcaagg

SEQ ID NO: 139371 - DNA, 676 bp, Homo Sapiens
gaatcaacctgatctctttgttgatggcgcccacagaaaggccggctggcagccctgcgagatgagccttccaaggtacaaactcttaatgagcaggattgggaacgtgcccagcaagctagtgtcttggcaaatgtagcacaagcattcgagagtgatgctgacgtgtctgatggtgaagatgacagggacactctcctcagctcagttgacctgctatcgcccagcgggcaggccgacgcgcacacactagccatgatgcttcaggagcagctggacgccatcaacaaagagatcgggttgattcaggaagaaaaagaaaatacagagcagcgggcagaggagattgaaagtcgagttggcagtggaagtctagacaatcttggtcgttttagatcaatgagctccattcccccctaccctgcttcctcgcttgctagctcctcccctccgggcagtgggcgctccaccccacgaaggatccctcacagcccagctcgggaagtggacagactgggcgtcatgacccttttgccaccttccagagaagaggtacgagatgacaagacaaccataaagtgtgaaacctccccgccttcctccccgagagccttcggttagaccggctgcacaaaggggcgctgcacaccgtcagccacgaggacatcagggacat

SEQ ID NO: 139372 - DNA, 1151 bp, Homo Sapiens
tgcggccgccaaatgaaagaacgcctggcttccctttccagtcatgtgacagaactggaagaggatctggacacggctagaaaagatctcatcaaatctgaagaaatgaacacaaaattgcaacgagatgtccgtgaagccatggcccaaaaggaagatatggaagagagaatcactactcttgaaaaacgctacctcgctgcacagcgtgaagccacatctgtgcatgacctcaatgataaacttgaaaatgaaattgcaaataaagattctatgcatcgacagactgaagataaaaaccgccagttacaggagcgcttggaattggcagagcaaaagctgcaacagacactgaggaaggcagagacgctcccggaggtggaggcggagctggcccagagggtggcagcgctttccaaggctgaagagagacacggcaacattgaagaaaggttacgacagatggaagcacagttggaggagaagaatcaagaactgcagcgggcaaggcaaagagaaaaaatgaacgaagaacataataaacgtttatcagacactgttgacaagctgctttcagaatctaatgagaggcttcaacttcatcttaaagagagaatggctgctttggaagataagaactctcttttaagagaagttgaaagtgcaaaaaagcagttagaagaaacacaacacgataaggatcagcttgtcctaaacattgaagcactgagggctgaactagaccacatgagactaagaggtgcttcacttcatcatggccgaccccacttgggcagtgtcccagatttcaggttccccattgcagacggccacacagactcctacagcaccagtgcagtgctgcggcgcccacagaaagggccggctggcagccctgcgagatgagccttccaaggtacaaactcttaatgagcaggattgggaacgtgcccagcaagctagtgtcttggcaaatgtagcacaagcattcgagagtgatgctgacgtgtctgatggtgaagatgacagggacactctccctcagctcagttgacctcgtatccgccagcgggcaggccgacgcgcacacactagccatgatgcttcaggagcagctggacgccatcaacaaagagatcaggttgattcag

SEQ ID NO: 139373 - DNA, 1753 bp, Homo Sapiens
tttttttcagattttctgtaaggtatattatttattgttagttacatgtggtcaatggtgacatactttcaataattaaaaatcgaataatactgaaataaccacagcagctttcagtataatttgcttaagttgttctagaaaacactgctaattttttgtttctgcagagtcaagtatagaagtgagcagattggtaaatttataaacatcatggaaagaattatagagaggaactggagccactcgaatgccatttggattccgcttgtcacaaaccactcctcttttttctagttcttggaaaacatcttcgtttggaacagaaaatgttattgttagctggcacccccgctcctctacatgagacggagtaattatgttcacaactggtttcttggttgctgctttatctttgccatagttatgcttgatcaggtattccagatagccagttagcaaaacagattttttccgcaatgccttcattgtcgcttgcttaaagatctctaaactagcatgcaaggaacagaccaacaaaatgggaggatttgaaattcggaatccacagaccccagggattaactgcagtttgttatccatcttaaatctggtgctgagttcatggccaaaccatcccactaatgcaggtttaatcgtatgggcatgcttttcatgaatgaaggcaccagcaattcctcctgctcctgcatttaaatacttgtaggaacaccagcaggcaaaatcaactccccagtcatgtaagtagagttcaacatttccaactgcatgtgctagatcaaagccaacataacaacccttcgcttgtccagcttttgtgatggcaggaatattaaagtgctgtccagtgtaaaaatgcaccccactgaacaggatcactgcaattgagtctccttccttctcaattacttcaaggatatcctctattcttaaggtttcttccccctctcttggctttatcatccgcatactttcttcaatgttaagtccgtgaagttgtagttgtgactcaatagcataatgatcagaagggaaggctttggcttctagaagaattttatatcgttttggcgtaggcttaaaaaatgataacattagaagatgtaaatttacagtcaaagcattcattagggctatttctttctcattggctcctacaatgtccttcataaggcctacaatactctcatctcctgtaatccaaggacgcttccccacttcatgaccataggctgctattttggcccacttatctagttcttcttcaagatatgttttaaccatttttggttgaaggccaagagaatttcccaagaaatagatggcattttcatctttattcactaatgataaatcaactggaggcagatcctgtattttgggaatataaaagcactccctgaagtgcctcagcttatcttcctcatctaggtggagagccaccctctcatccgttgggtggcatttgagttcagccgcaatgcgctgcactgtgtcagccggcagctcaagagatgaaggctccattacaagttgttctctaaaacagctaggatcccaatggagtgtttggctcccagaatctctccaagaacctctcaagaattccttgaaaatgtacaggcccggacgcgtgggcgtacgcgtgggtcgacgatatcccgggaattccggaccgtaccagcctgcttttcttaaccacgtggttctataggtcacaagtacgccttga

SEQ ID NO: 139374 - DNA, 618 bp, Homo Sapiens
  misc_feature (463)..(516): n is a, c, g, or t
ttttttcttcatgcatttattaagatgaaatttacataacgaaccatcttaaagtgaacagttcagtggcatcgagtgcatttgcaatgttgtagaaccacgactttagttccaaaacatttccaccgctgcaagataaaactccgtacccattaaacagtttcttcctatgccttcaccctgaagcccccggcagctataaatatacattttatttttataggtttacctcttctggatatttcatataggtggaatcataaaatgtgtgaccttttatgtctgggttcttacactgagcataatgcttccagggttcattcacatgtagcatatgtgagtgctgtattccttttcatggctgagtagtagtccattgtatggatggactacaatttgttattggacatttgggttgtttctatggtgttttttttctccccccacccctccagacagggtnnnnnnnnnnnnnnnnnnnnnnnnnnnnnnnnnnnnnnnnnnnnnnnnnnnnnntgtactcctgggctcaggcaatcctctcactcaacttcctgagtagctgggagtatacgtgcatgccaccacaccctgctgatttttctatttttttgcacc

SEQ ID NO: 139375 - DNA, 593 bp, Homo Sapiens
  misc_feature (384)..(392): n is a, c, g, or t
gatttggggatgcttaagaaattactggaagatggagtaatcaatattaatgagcgtgctgataatggatcaactcctatgcataaagctgatggacaaggccacatagagtgtttgcagtggttaattaaaatgggagcagacagtaatattaccaacaaagcaggggagagacccagtgatgtggcaaagaggaccatcaaagaactgcagggccagctggagtatgaacgactacgtagagaaaaattagaatgtcagcttgatgaatatcgagcagaagttgatcaactcagggaaacactggaaaaaattcaagtcccaaactttgtggctatggaagacagcgcttcttgtgagtcaaacaaagagaagaggcgagtnnnnnnnnnggtttcttctggaggggtgtttgtgagaaggtactaatcagtgaaataactaaattgacctgctagatttttctctttcattagaaaaattgatataaatgtgagtctatacaaactatctcagaattactctgatatgcttctgttccaattctgatggcagaaatgttatattaaagagatttagagattttttaaatg

SEQ ID NO: 139376 - DNA, 539 bp, Homo Sapiens
tttttttgtgttaggaatgtacttttattgaaaatgaaaaaatataaaagtaccatcttcaaagagcatctcacaaacactgtacagcaggtgaagcattgcagtaacatacattgaaacatacagagtcgagttatacaggactagccatctaacaggtcatctggtctccgacggttgtttaacgacacacagtagaaatagagaatagaacccatatctgtttccagagtccaaagtagtatatcaggctgacagcactcaatcagtgagggctcctgaggttgcaatgattctgcaacggagtagattctctaggaaaaaagaccttgctgctaaggaaagagaattaaaaacaaaacaaaacgaaaagctccccaaagaggtactctgctcaaaatggctggtgctactggtgcactaagttgtgaggaattacctctgctcgggacagaataaaaaatcctaggcctcaaggaaaaactggtggcatccttctgggtcttttcaagtccttgcatctaaaaatcaatcttgac

SEQ ID NO: 139377 - DNA, 366 bp, Homo Sapiens
tgtatagagtaaaatttattatagggttgtagaattcatgggacctaaactccttacagcattcagcacctacacaattttgtgcattccacaatacagatagtagtgagaaagaatcactgcattagttaaaaatgactgtctcatgaaaattgttcacatataagtcaggttaattacagagcacctaacagaactgcaaagatgtaatttctaagttgcagagagttgtgcaaaatgaaaaacaaaagaaaccaacaatgttgagatctgatatattttacacaaaaagttcaaaaacaatttaaaatatttcaaattttaaaattgctgcaccataagatgaataaagagcttacttaaagg

SEQ ID NO: 139378 - DNA, 594 bp, Homo Sapiens
  misc_feature (187)..(197): n is a, c, g, or t
  misc_feature (468)..(516): n is a, c, g, or t
gggcaattgtacttaaacagtggtaaaaaagcaggctggtacggtcggaattcccgggatatcgtcgaccacgcgtcgatagtgataccctatctcttaaaaaagaagaagtttttaaatttgaaataataataggtactggatttatgcaaatgtcttttctgcgtctttgagatgagtatcaggnnnnnnnnnnnccttttatcatctgatgatgaacttaatgtttccatttgtattaatggaatactaagtccctctgtgatttctgaaccaagctattcctaggcctgagttttattttgttgacacagaaataaattagaaggcccagcgtggtggcatgtgcctgtagtcctagttgctgaggtaagaggattgcttgagccccggagttctaggctgccgccaactttgattgcgcccctgcacttcagccttggcgacagactttagacgctgtctccnnnnnnnnnnnnnnnnnnnnnnnnnnnnnnnnnnnnnnnnnnnnnnnnntaaggcaatgacagtcctggcaaatgctgggagggaggcagcagtggtcagggaaggtaaccctgaagcaggactttg

SEQ ID NO: 139379 - DNA, 1037 bp, Homo Sapiens
  misc_feature (246)..(301): n is a, c, g, or t
  misc_feature (535)..(544): n is a, c, g, or t
  misc_feature (759)..(768): n is a, c, g, or t
  misc_feature (928)..(962): n is a, c, g, or t
tagacggcgcctggccccttgtggagccccgtgctctccctgcccccctgtggatgttccgagaaccctgtgttccccccccgggtttttttattggagagagcccgcgcgccgttgttgtccccggttctctcttgggccccgctgtttgtgccccggctcagcttgacccatagggccccgcggccctccacggaatgtgttgtaaaaaccttcttctgtggcctctgcgtccccgccacaaannnnnnnnnnnnnnnnnnnnnnnnnnnnnnnnnnnnnnnnnnnnnnnnnnnnnnnnttcctttgttgaaaacaccaattgtgtttactggccagtcccagattgaccagtatataaaggaaatagtaaatttttattttgcgcagaagataaactgtcgccagatttaaatgccctccatgttaacctgaagaaatggttttgaatcatataaatttttaagaaggaaaataaagactgtcccaagggattctcctagcttataacaccatttcccaggataactctccnnnnnnnnnnttccaaaatactcattgactaccttaaaaatatgtccaataccgtatggctttatgaaataacttctaaaatttatataatttttcttatttaaaaaggacccccagttttaaataagctgctagcagtatcattttcttcacttaaaagtgcatatctttgagggtgggacataacattttgaaccaataatgatttttaccaattaacccccnnnnnnnnnntcatttaaaatattgtaaggaggaagagagttttcaccaaatgtcatctttaaatagactgcagtagacgacattcttcctttttcctttttataacatcataattctccccggccgtaatggccgaattcccgggcatatgtccggtaccgtcgactgnnnnnnnnnnnnnnnnnnnnnnnnnnnnnnnnnnncggccgcttcctcgctcactacttcgctgcgctcgtcgttcggctcggacgagctacgcccatagtgatctatca

SEQ ID NO: 139380 - DNA, 891 bp, Homo Sapiens
  misc_feature (615)..(632): n is a, c, g, or t
ggtatttattaagtgtttattaaatgcctccctaaaggtcctggatgccactagaatctttagttaggactgagatgtatatgcaagagtggcacatatcaaaatatctgctcattggttcagatccaacgtaagttttccttgaaccagaacctcatattaacttaaagtactcaatggcacagcatcctctaatttaaagattttaaaacaaaaacataaccagaagacccagttttcaaaattgctgttaaaggccaacaaattagtgggagggaaggaataaaaaggaataacctctcttaaaataacaaatctacaaagtcctctgccacaaaagcagatctttgtcatttcccatgagataatcatcaccttgctgaaaatgagaaaggcaccccccgcaggcagggggaaaaaacccactcgctgaaacagcttctacttgtttttaccatatattccaggggttatgtgtgtggaggggttgtttttacatttatacagtttacattgcttgacccataagtaacacttgtaagattaatagggccatagttttaaagagtacttacatagccccaccatgcatacagagccttttttaatattggnnnnnnnnnnnnnnnnnngttgaattttccatcactaggcaatgtaaatttgaccatctacatttataaaccctgactaaaatataagcaatcagttcatccataaattctggttccctggcaaatctagcactgcagcgtaacaaacggcttacaattcagggatataaaaatatcagctttaaaatctgaactgtacagtatatacattaatatttgcaccgttaaattaggaatacacttaagtctatgaaatactaagttataaatagcaatg

SEQ ID NO: 139381 - DNA, 611 bp, Homo Sapiens
tttattaaaattcattgttcttttatatacatttctctttaaaattctgaaatgaacatttgtttatgcagtatgacatgaatgatttaataacttatatgacaagcttaataaggctgacattcaatgaacagaaaagtaatttaccttttagtaatcagaaaaatttccaatccatttttatcttatttttaagtgtctgttattaaagcttgtgatttttattaatgtgaataagccaaagggtgattgtttttgacacacggcattgtgccatagtaaaatgggtagtatccttctcagttaacctttaatactctgtacacactattctgaaatactgtggtgaagtaaggcctggcgtcttcgagcaggacgctacataagggagggttagctgcattggaagggtcttccacatcccagatttcaagcatactgcaaccaggcttagttctcacaacacaccatgcctcttctaaaacataataattcacatgtaactccaacaatttatctcttacttctttggcagattttcgactatatgtagaataaacattaggaaatcaaaagaaaagcatacatataaaaaacagttttttctaagc

SEQ ID NO: 139382 - DNA, 421 bp, Homo Sapiens
ttttttctgttattaaagcttgtgatttttattaatgtagataagccaaagggtgattgtttttgacacacggcattgtgccatagtgtaatgggtagtttccttctcagttaaccttcaatactctgtacacactattctgaaatactggcatcttcgagcctggcatcttcgagcaggatgctacgtaagggagggttagctgcattggaagggtcttccacatcccagatttcaagcatactgcaaccaggccttaagtctgcatcttcgtaatgtggatgattcacaatgggatgaagtgtagacagcttcacgcttgccattgtaggcatggcactgcgaagacagcatcttagataagtgtttgtagctaaaacacacgaaatatcacgaacagtgtggtctgaaacgcctaaga

SEQ ID NO: 139383 - DNA, 483 bp, Homo Sapiens
acaaagaatgaacacacataatcgaaaaaatagtcctcaggtctgattcacaacacaattcagctatatatttaatttaaaagacttcatgaaattgtgggaggggtaagggggaaaaaagaaagagaaaggaaggaccccaacaacagtaagactccttaccatctacatctcatctgtgtttctcttattataacccatgaaatatctctacctgcagtgcttattacaaatacaaataccatcctcactcattttcaacagctacctcactaattcttacacacttgacaactttagaactttgtccaattattatttggccaatgcttgaaaatgatttaaaggcataaccccaagtcttagaacagcttagagcaggagtataaatattcagattccaaagacaaggactactacccacatcaacctgcctgtgacacctcacaactaagaaaccagtttttagtagatcaaagatga

SEQ ID NO: 139384 - DNA, 688 bp, Homo Sapiens
tttatggggaaattttcttcatttttaatttacagcagaaagaatataaagcattcagaaaacattttccatattttaagggcaattcaaaacattttgcatggtttccagcagctgagttcttcaacagatccattgattcaatgatgctttacatgcacaattacaaaaataaaacttacaaaaaaagaagacatctagactagttttacatgcaagtctcagggaccccccattgggcgccaactactgtgtggaactgccataagcgaccgtgcagccagagaggggttcgtattattgtctttatttcgttcacacagtacagctgatttcgaatgggtaacaatagcaattaaatcttcaggagatagaataagattagctattaattttataatgaaatcctactcctggcacttgggaattcagattatccaagaaagctgcgcttacctatcatcttatattcgaaattaagattcataaccaagaaaaagcggtcagaaatgcttcgtttcagtggaagtgcatttttgcctcgcctaggattcacagttgtactggtaggttacactggtaggctttaaacctacttcctatcccctccatgagaaccctcttaattctatggaagtctctaccatctgtcattttctaatgtattcagctaataatgtaacatgtg

SEQ ID NO: 139385 - DNA, 642 bp, Homo Sapiens
  misc_feature (550)..(550): n is a, c, g, or t
tttaacacacattttctttactaaccaatgaaacaaaatataagaaaatatatatcataaatgaatagcttattccattaggaaatatctcattctacattctcttagaactggttttccatcaatttcatcacattttgtttctgcacttctgtttgggtgaaaactcccataataaacaataagaaaaagaattccaagaagaagagtaagaactatagttatactgataggtataaaatagtctggattaaaaatagtgagggggcaaacccagaatacagtcaatatccccaaagtgcccagtaccctaacaatataataacaagacattggacacttggtattctgtcccttaatattaaaaaatgtaaagataagaatgaatccaacaacaatcctatataagaattccatacttatacaagtacaaaactgggtgttgtttttaaatgcccatattatacctaacaaccaaagaaataacaacagaaataaagcaatcttaacatttaagaatagtagaagtacaacactcagcatccacgantataatgtaaacaacttggtaaagagatatgtgattttgggacataatccattaagaagctttttgtcaggcaaggatttttctaaagctac

SEQ ID NO: 139386 - DNA, 867 bp, Homo Sapiens
tttcaccaatataaacagggccgttgaccctttcattttattaaaatggcacataattattaaaacagcatactgatcactttatacttctgctagcccccaggggagctgctgggggcggcatgtgagtgccctcccgaagggtacagattcatgcattgagcaattcgtgttctttatcggttttcccaacagcatcaggatttgagagtgggtcgaggtcagcgaagaggctgaaccaggcagtcaggtctgaggcagccttagcaggttcttgtagcgaggcctgtaagtctttcatattttggtctaaaagctgcgaaggaaggaaacctgagcctgtctgggccttggggtctggctctcccagggccatagtgggcactggctccttcacttggccgtctccaaacacagcggcccactctttgctgaactcgccctcttccaaggaggaagcattgaagatctcactcaacagcagcaggtcatctttgtcagcaccttcaggttccggggtccctgccactgggtcccaggcaagcaccttcctcagatttcatgtctaatagttcatctatgggtcctgagcatgcagtatgtgtagagcctttgtctaaggcagataaaatactttccatcttcagtcttaaaactagaggattccttgcgctggttttcttcctctaatgaaattaattggctcggctcctgcacggctgcatctgtactttcctgctggttgattttcttcttctcttctttctcaactaattttttcatagggtcttgtaagctctttaaagtagtaaattcatatggttgataacctttgaaactctccatggatggctgccatagtgtgag

SEQ ID NO: 139387 - DNA, 568 bp, Homo Sapiens
  misc_feature (554)..(554): n is a, c, g, or t
ttaacagaacagaacaacccaaaatgtcaaggcagttatgaagagaactttgagggttaatctttaaaactacaaatcaaaggttttggttaatagataactggcaagaagtaagtacttttctgctgagtgttcatacaaaagcaaaattccaaaacaaaatccgactaaaatagaaaaaggtctaagcgctcacgagaagggatgcgagaaatacaatgctcaaatgtttctgtgttattaaaatacagagccattttacgcctccaagctatgttaaatgctctggaaaacgggagaaattatcgtgaacaacagtatccaatgtgtggggcgctgtgcatgcaatgtgtggacagaaactcgggatgtcagagtagcaacacatcttcaggcgtgcctggagcttagatctgactctggaatatactggagtttccctgaaactctttggtccattcccattggtgcctgggcttacgaaacacgtttgtgtccttctctaggagggcccgcccagcatgcggcccgtggcccccggccccagtggtggnccacgctggacggg

SEQ ID NO: 139388 - DNA, 808 bp, Homo Sapiens
  misc_feature (712)..(712): n is a, c, g, or t
gcggccgccgaggttttcgatgttctgcgcggtaatcgccatcacgctgcgcccggccaggctgccgctgttgaccagatcgcctgcaatattcaggttcagacgttgcccggcgatcagtgagccggagccgttgaggtcgctttcctgcacccgcacgtagacctgtggcaccagcacgttgcgggtttcgccgttggcgagggtgacctttttttgtaccagccagacgatgtcgctggtcagttgcgccatctgctcgggggacagctctacgccgggcaccagttgccattgattggccagggtgacggcgttgtcaatcagcgcccggtattgcgcttcgtcgttggcgtagccgtcgagaaagcgtcgccccgtcagttgcgcgacctgttcgcgaatcagtttctgctcatagaagccatcgccgaggcgctgctgggtcaaggcagggtcgacttgcaagcgctccagcatgtaatccgacgacagccaggtgcgatagctggcgaaacgcggatctgtttcgaccaggtaattgctggtggtctgcggatgggtggtgaacaggctgttattcggcaattccagggacgggcccccggtgcgaatttgctcggccacgccttgtgcgttctgggtggtctgcgctgcgacctgaacgatcggagctacttgaaaggtacgggcggccggagcgctgaccgtnaccggtggaagcgatctgctgaccgacggcctgagtaccgcgtgcgctgatctgggtgcccgtgccgctgaccgctgtgttctgcgcgaagacggt

SEQ ID NO: 139389 - DNA, 941 bp, Homo Sapiens
  misc_feature (74)..(109): n is a, c, g, or t
aataaataccagatttaaataaaggaggcgaagaagagcaggcagaggcaccatttgccagattttcacccctnnnnnnnnnnnnnnnnnnnnnnnnnnnnnnnnnnnngcaccaagcggcagatgagatgagccagggttggctgccccatcccaggagtttattggatgggcagcctgacgtgatggttgtcactcatggtccgccactgttgcagggcgcagagaagcagaggccagggaggcatgtgtggtggaaggtggaggccgctgaggactctggcaccaggatctggactttcggactttagacgtggaaggtctttccagaaagctgtccaatcgcatgagcctctccatgtgtagcgcacgagggtcttgttcttggtcgtgagagaattccatctcaaagacagctggaggggacacatccaactccagaaacattatgttttcagccctgtacctggggtgggaccccattgccatggcaacccgagcatactggctgataggcctcttgtagcccactgcagatgttggccgcttcttcatctggctgctactgacgccggctggcaccagtggctggaacttccactgctcctcctcacagtccaggaaaagccggttcatgatcttgttcttctcctccggcgggatgaagttctcgatgattaggtacttgagcttgagttcgcgggtctgctcgttctgcgcctcctccaggtcctgccgcacgcggatatactcatcatgctggtcctggatctccgccttcaccgcctgcagcttggcgtagagcttcttgagtttcttggttttgacctccacctcctgctgcagggatgtgtaggtgccccggagctccatagtctcctcgtaccggagcatcatctcctgcctcgtgccgaaatcgccacccaggcctcgctaccttg

SEQ ID NO: 139390 - DNA, 880 bp, Homo Sapiens
gccgaagtgcttcgccaggggtttctctatcattgagcgtccccatggcggcctcaaaactcgcttcagcccgaaactcgtgattttccatttgcgcgcgctttgcgctcaccgcgaacatgaaaatcgcgtcgtgcaaaagacctttatcttcaccgaagaagtgcgaacctttttgcgcttttttcaactcatcgtgggtcaggtgtaccgtgcatgagtcacgcatggtcacggtataaccctcgggtgtctcaataatgcgtttataaatgccctggggattttgaccgtacttcatcatcgcggccttgatcgcagagacggtgacgcagttgagttctgaaccttgatagaacccactccagatattgtcaggcttgacgcccacctgacgactggagaggtttgaaatgttcccgcccggtggcgccgacgaagtgttcgacggctgcatggcgagcatatagccatagtctttgacaacaggctgttgttttcccgacgagtatttgatgccatccagtacaaactcaccagcgtaattatccaagacggcaacggcgccttttttcaacattttttcgggttcgacaatgcgcaggaaaccgatcatccccatcccttttaatgcccggtacaccgtatcattaagcatgaccgcggataacgcgcgctcgaagctcccctgtttatcagggtccgtactggacagttgcacacgttttacataggccgccaagatgaaattggcatccatcacaataccgccgtcaccgccggtaaaccgcgagaccccggccgtgcgactcaattcttctttggacagatgtaaagaaaaaccgtccttcatggtgatgtcatagccctctgcggccgc

SEQ ID NO: 139391 - DNA, 721 bp, Homo Sapiens
atcggcacgagcgctcggggtgcgcttttccggtggcaacgccaacgcctggcgattgcacgcatggtgctggccgagcccaaagtggtaatactggacgaggccacctcggccctggacgccgccaccgagtacaacctgcaccaggcgctggcgcggtttctcagtgggcgtactacactgatcatcgcccacaggctttctgcggtgaaacaggccgaccgggtactggtgtttgatggcgggcatatcgccgaagatggcgaccatcagcagttgattgccgatggagggttatacgccaagctctacgggcatctgcaacaagtgcgttgatttggctgagctatcgagagcggattctcgcgtgcgtatcaagcagtgcatgtgcaagggatctcatgaagcaaaagcgtactctcgcagcgacgttaagcaagcctcggttgttgggcattgtctggccctttatcgccgtcgtgctgttccaggcattgctgggctgcgtcagcctctacatgctgtcagcggtgcgcggctatgtagcaggcgagagcttgtggtccaagggccagaaagacgccatctactatctgagcctttacgccgataaccgcgacgaagcgacgttcctcaaataccggcaagccatcgcggtgccccagggcggccatgagctgcgcgtcgcgctggaccgtcccacgcccgaccttgcggccgc

SEQ ID NO: 139392 - DNA, 687 bp, Homo Sapiens
gcggccgctgagcgcgccgcgtaccagctgttgctggggcagggtggtcacatccgcgggcaacaggtcgcccaagggtttgaagtcaatgccgcgctgcccggcctgggcgagcagttggcgaaaatcttcagccatcagaatcccttctacttctgcgtggatcgtatagacgttcagcttcgactcggcgaaccggtcaagaatgaagccgttgaaatctttggcagccaccaccggcccgacgacttcgtcgaaggtcggcaggtctaccggaatttgtggggtgcccgcactgccatcggccagggttggtcgaaacaggctggtgccccggcaatcactgttgtagcgaaagttgaaaccttgcttggcttgcaccacgcgctcatcggcacgccagccggcggctgcggaacagtcgatgcgttcacccaggatgtcgctcagggtgtccacgccacgacggatctgctcgaccagctgtgcgtcgctccagcgcccggtgttggcttgccaaccgtgatggtcccatgcgtgcaggccgacttcatggccggcggccttggcctggcgcatcaagtgccccaggtcacggccgatcggcttgcctggccaggcggtgccggccagtaagatgtcccagccatacaggccggcagcattggaacgcagcatcttccacac

SEQ ID NO: 139393 - DNA, 674 bp, Homo Sapiens
gcggccgcagaagccaattgatctgcaactgaaagccgaagccagcgctatgctggcttttttttgcgtgaaatttgagggcaccgtagaggacttgtgtgggagcgagcttgcatttgctagcaagcccgcccccacaggggttcagagcagaaagatcgtcgccaggcccaggaagatgaagaagccaccgctgtcagtcatggccgtgatcatcacactggcacccatggccgggtcgcgcccaaggcgcgccagcgtcatggggatcaacacgcccatcagcgccgccaacagcaggttgagggtcatggctgccgtcatcaccacgcccagtgaccaactgccatacagcaagtaagccaccacaccgatcacgccgccccacaccaaaccgttgatcaggcccacagccaattctttgcgcaacaggcgcgaggagttggccgtgctcacctggtccagtgccatggcacgcacaatcatggtgatggtctggttaccggagttacccccaatacctgccacgatcggcatcagcgccgcgagggcgacaagcttctcgatggaaccttcgaacaacccgatcacgcgcgaagcgatgaacgccgtgatcaggttgatcgcaagccacgcccaacggttatgcagggagcgccagacctcgtgccgaa

SEQ ID NO: 139394 - DNA, 608 bp, Homo Sapiens
gcggccgcggctgaaggcttctttggagaaggtttctgaaaagagatacggaattaagagaaatagaaaagagcactgacgaagcactcaggatggctattcaaggaattgggggatccacagcagctgtgcacaaccatccctaatgccagaaaaatggggtaagggtgaagggaactgggtctagagctttgcatgtttttttctggttaacccttagagtcaccctgaaggtgtggatcccatcttataataaggtgaggacactgagtcaggaaactaacttgctaaaatcaagtcctcccagtcctcccatcaggtccttccagatctggaggagccaggatttgaactcacatttgtctgacttcaaaatccatgctttttcttgtgttccaaattgcacaatggagtcactgccagttcaagctcctatgaaaagggatggatgtgaaaagtcatttgttgattccacagatttttagtaggtaccatgtctcctgcctttatcactatcctactcctctgctacaacttctctgctacaggcacccactgcagttacttgatatgagttaaatgaatccatccacctcgtgccgaattct

SEQ ID NO: 139395 - DNA, 519 bp, Homo Sapiens
atcatgagtagcatttattaagcatctgctagaatcaaagcactgcattagctactaaggtacaaagtaagacacagtttaataaggaagacagggcatctacccaagtcaacagttcagtgacatctgttatttgaaccacacaccaatgcgaccgaagtaaatgatttgtctgacttcaaaatccatgctttttcttgtgttccaaattgcacaatggagtcactgccagttcaagctccttagtaattgaagctatgaaatggatttgtctggtatcccttgagtaacaagtcttgagaaggcatgtgacaaagcaatgcaagaggcaaaaaccagataagctagaagtaaaagtgagaagagccatttcgacttcaccctttggttgccagacctctgttttctggctgtgaatagaagaacaccatggatcggtctttggtttaaagtctgtggtcatcaagcctcacagagttgtcccccagctgacagatagctgagctcttagcaggccat

SEQ ID NO: 139396 - DNA, 450 bp, Homo Sapiens
ggcacgaggcgcccatccatgcgagcgcggcgcacacgtcggcacgcagcgtcgcgtcgtgttcgccgatgccgccactgaaggcgatcaggtcgaggccgccaatgcaggcggccatcgcgccggcctcccgcacgatgcggtaggtgaacagttcgaccgcctcgcgcgccgctgcgccggcgtcggcacgcagccggcgcatgtcggccgagatgccggatacgccgagcaggccgctctgccggtacagcagtgactgcagccggtcgtggtcccagccctgttccatcagatagagcagtacgccggcgtcgagcgtgccgctgcgtgtgcccatcatcaggccgtccagcgcggagaagcccatggtggtggcctggctgcggccgtcgacggcggcgcacaggctggcgccgttgccgaggtgggccatcagtacgcggccgc

SEQ ID NO: 139397 - DNA, 406 bp, Homo Sapiens
  misc_feature (108)..(108): n is a, c, g, or t
gcggccgcgtcgttgctgtagatgccgagcatgcgttgctcgacgatagaggacaggtcgcgccacaccttgagtgaatcatgctcgatgggggcctggatcgccgcngcggaaagcggcatggacatcggcggtcaatgcctccagcagcgccggcacgctggcgaaaaagtgatacaccgacgacggtgggatctgcgcccgttcggccacgctgtagatcgacaagctcgccacgccttcgctcgccagcaaggtgcgggcggcgtcgaggatcgcatcgatccgggcctggctgcgggcgcggggtttgcgagtggcggcggggcgggtgggcatggaagtctcctacaaggcagagcgcattgtatgagcaggagggtgtgttgtctgccagggcctcatc

SEQ ID NO: 139398 - DNA, 446 bp, Homo Sapiens
tttgcattagacacagtttaatcgccttcaaatagatgaaaagttccggtttacactcccccaccgcataagtcatccagacaggaccctggcttagaaagaggaaaacacaggtgctctaggaaatatagccacatataatacataaatcttcttccctgaaatagagcaggtcctgagcagagctgactgggggccacagcccacccccagggtgaagtggctctgggactctgccggtggaagtgctggaagagcggggcttggaggaagcccccagtgtggttaccatagccagaggtgggccgaggccttagggtgagttacccgagagggcagcagtgctgggctttccctcactcagccgaggcttaatggaagaactagtcggacgcgtgggcggacgcggggtcgacgatatcccgggaattccggaccggtaccag

SEQ ID NO: 139399 - DNA, 718 bp, Homo Sapiens
  misc_feature (496)..(496): n is a, c, g, or t
gcggccgcccacgctcgacccaggtctacggcctgcgagaactggagcagatcgaaccgttcctcgccgacctctacagcgcctgcaaactccagggcatcccggcgcgcacggcgatttccgaatacgccccgggccaggtggaaatcaccctggagcatcgcagcgatgccctgcaagccatggacgaggcggtccgttacaagcgcctggtcaagggcgtggcccacaagcacgggatgaccgcgtgtttcatggccaagcctttcgatgacctggccggcaccggcatgcacatgcacgtcagcctggcggaccgcgacggcaataacctgtttgccagcgaagcgcccgacggcacgccgctgttgcgccatgcggtgggcggcatgctcagtacgttgctcgactcgttgctgatgttctgcccgaacgccaactcttatcggcgcttccagaccaacagctacgcgccgctggccgccacttggggcgntggacaaccgtaccgtcacgctgcgagtacccggcgggccggcgttttcccggcatatcgagcaccgtatctgcggtgccgacgccaacccgtacctcgcggcagccgcgattctggccggtattcaccggggcatccgcgaacagcgcgaccccggcgcgccggtggagggcacggttacgcccaggccaaagaatgctgcccgacgattggctgaccact

SEQ ID NO: 139400 - DNA, 442 bp, Homo Sapiens
gcggccgctgatgcgccagccgtcagcggtgcgcaccgccgtggtcgccggcagcccgccacgggccggggtgcccaggtcaggttcgacgcgcagcgcgttgatcaacgctccgttgcgcacggcgtcttcggcgacttgtacgcgcaggtgctgcggccaggttttgctgtcttgcaggcgtgtgtgttgcaggtactgcatcaccagaatcagcgcggtagacggctcgcccctggcaatcgcgctgatggccttgcgcgcctgcgccaagcttgcgccacccccacccagggccttgggcacggtgagggcgaccaggccatgttcatgcagccgcttgaagttggcgtgggggaaggcgccgctttcgtcatacaggtgcgcgctgctggccagctcggcgctgaggcgttcgagcagggcgtcgaattgcgccggc

SEQ ID NO: 139401 - DNA, 455 bp, Homo Sapiens
  misc_feature (146)..(207): n is a, c, g, or t
gaggtgaaaaaaaacaatttattcaagaagtgaggggactatcaaacaatgttaaacactgataaacccaacactgatttacttttctgaaacaggttcagaaatgattgcataattacttcctagatggttcctttacagccatnnnnnnnnnnnnnnnnnnnnnnnnnnnnnnnnnnnnnnnnnnnnnnnnnnnnnnnnnnnnnnctgtttaataaaaggaaaatctctgataataaccattttaaaatgataccaaattactcattttgcagtttattgccaatcattccgtgtttaaatgttatttaaaatagtatatcttcaataaaatacttgcttatgttcagttcattttctatatgtcctttctcttattcatcaagtcaagcatcttctcctatatctatccatctatttgctctttataaaagcagatctttgctagttttcag

SEQ ID NO: 139402 - DNA, 660 bp, Homo Sapiens
gcggccgcgacggtgtcccgttcgcccggacagtcgaggaccgcgagggcggcggcgcggtggtggggcgcgttggtgtgcagtcggatccagccgtccgctgtccggtagtcgccggcgatcggatcccaggcagccggtatcgtccagccgcacggtcgcagcgacgtcccgaaccacgccgaggccaagtgccggtccaccgttacctcaggcgcgtgtccgaacaggcccaggagctcggagacggcgaggccggcagcaccgatcgccgccgtcgccagcgcggtgaccgggaagcaggatggcagattctccgcgccggtcaccgtcagccgttccccggcatcgggccggagcgccagggcagccagcacctccgagaggatcgacggcagggcgtcaccggcggcgtgtcgttcgagcatggtcgcggccctcgaagggtgcctgcaccctgccggccgtcggcggatcaatcaatcttgatccaactgatcaacatgacggactggctggaccgcgccgaagtcctcgacgctcgacttcgcgctcacggccccgatccaaggcgtccctgccgcggagcgcaccctccacggtcctcatgctccgacggagccggggctgggcggggcacggcacctcgtgccgaattct

SEQ ID NO: 139403 - DNA, 770 bp, Homo Sapiens
  misc_feature (33)..(33): n is a, c, g, or t
  misc_feature (101)..(101): n is a, c, g, or t
tggcatggcgcgcttatctgctcatgggttttntcaatgaggagagtcctcatttgaaggcgtcgcgtaacccgaccacgtcttgcgacgtatagtcttcnatcgtcctttcctgccatttcatcctgggcaacgcccccactgaatcaaccgcattggactgagccttggcctcgacaaaccccctcggcctccgagacaggactgtgattggccagcctcatgaacgtttgaaaatcggtgtatgtcgcaatgcccggcgtccaaaactcttgcgcctgcacaaccgccgacagcttggcaaaggccgcagacttaaccaccaggttgctgggcatatcttcggcaatgaaggcagggtcagcgcctgcaagcaataagcgcgcggcggccggtgccagctcgacaggcaccttgccctggtccaccagatgtttctccaggcgcgagacgaccaccgaaggatggacatctcgattggctggctggtaaaggtcatacccggccacgacgccacgcttgctgccggcctgcggatccagctccagcaccattgcagccaacgcccaacttgcatctttgctggtcagtgacgcgtcactgttgagggccatttccagcgtttggcccaagtttctgatctgagcactgcccagtatgctttcaagcagctgcgcggcgctcatgccttgaagcgaaaccccatgcgtctcaaaaaaagcagcgaagatgcctttgccaggcgacagcgtggccatttcggcggccgc

SEQ ID NO: 139404 - DNA, 574 bp, Homo Sapiens
gcggccgcagcccggacttggttatcggaccgatgccgcggatgtggactccgccggtcgggcacgcggcccggcgccgtgacaccctcccgcccccttgctagaccgccgcggcgggcgcaggccggacgggccgggcgacgagacccccgcgcgagcgagatcgagacccatgaacatcttcgccctgttcgaggcgcgcgtgcgcgaggccgtggaggcgctgactcgcgccggccacctgcccgagggcctcgacctgggccgcgtggtggtcgagccgccccgcgacgcgtcgcacggcgacctcgccacgaacgccgcgctggttctggccaaggaggcgcgggccaacccgaaggcgctgggcgaggccctggcggcggagctccgcacggatccgcggatcgtcgaggcgagcgtcgccgggccgggcttcatcaacctgcggctcgaccccgcgatcttccacgcggtcctgcgcgacgcgctgtccgcaccggagacgttcggccgcgcgcagctgcccggcggcccgatcaacgtcgagtacgtgtctctcgtgccgaattct

SEQ ID NO: 139405 - DNA, 630 bp, Homo Sapiens
ggcacgaggccgaggcccatcatcaagcccaggccgatgacggctgacttgagcaacttgggcagaaggcggctcgatggagtggcgaatgtgcaagtcatgatgcagtcctgtttgacgagttgaattagggtgctgaaaggccgaccgttagcgcacagacaagccgacgacctgggacgtggtcagcacgtcaccaaaagtgtcttcaatctcagcgagtgccgaggcgtgcagttggtcctgggtcaccgactcaccgttggcacgggtgattgcccgggtcgccgaagcatcgctagcaaccacaatggcgtagcccaatgccgcaccatcacgggccgcacccgcgacacaggcgtgagtcatcaggccgcagatgatcagggtacggatgccctggtgctgaagttggttgtgcaggtcagtgctggcgaacacgctgacgctggtcttctgcaccagtgtgtcttgagcgcgcggctgcatcagtgggtggaaatcgacggtgttgccgtcctgggcaaacactgcagaaccggctggcgcgatgtgctggatgtgaatgaccgggatcttgtgctggtcggcgaattcgaccaggcactgggcgttatgcagcgcggccgc

SEQ ID NO: 139406 - DNA, 564 bp, Homo Sapiens
gcggccgcggccaccagcttggccaagaaggtgtttggggcactataagcttctcaaacacactggacccactgcgccaagaccgctaaccacgggccttggcgcagttgtttcaggccaagcccattaacgattcagcgtaaaaagcgggtaagtaggcctgtagggtgaaggctgctggtagaccacgggttgctgtggatacggtctgccatggttcgtctgggttggataggtgtggcccacgttcggccggactgtatgaggacgatgttggggatagtggtgattgtttgttgcgtgccccgacctatatccatttccaaaattgttgcgcggtgcattattgcccaacagggctccgagcagcgcacttttgaaagcaattacagcatcaaaaaaagccatgtaactctccataaactcattgaataggtcggactgccaactcagggaagtccaaacctgcgcctgtccatcaggcaattctgagtggagtaaaaaaggcaaacgttccaaaggcgcagacgcctgtttgcatcaggatgtgagtcagcctcgtgc

SEQ ID NO: 139407 - DNA, 754 bp, Homo Sapiens
cgtgtgcgccgtgctgaaaaaccgctgcacgccgtcaatccattgcaaccgtgcgtggtaacgctcaggcgaataaatcaggttgaaatcgcggatcggcccggtgatcaagcggcaggacacttcactttcacccttgaacgcaaacggctgcaacggtaacagcccgcgctgttcctcgccgtctacggtcaggaccatacccgcacctttgatcacggtgatcacacgctggtagccggcgaaggtagaaaacccgcccgactcggcaatatcggcaatcgacaggcgccagccaaagccatccaggccagtgcctgcgtcacgggtgatttcttcggtgctgccgccgccgtttttccacggcatgcggatgtaatcggtggcgcgccagactttcactgcactcatttactgaaacgtccttccaggctatgacgggaaccggggtggatcaaacgcgcggcggtgaccggctggcggccggaccaggtgcggcggcgaatcaacaggcagggctcgctcggctcgatctgcaacagcttgcactcggcggcgtcggcgaggatggcttcaaccacatgctcgccctcggtcaggggcgcgacctggttgaggtaggcgtacggcgtttgctgggtgaaatcctgctgcaagtattccggcgcaaccagagcgttgacgaagcggtcttcgatttgtacgggaatgtcgttttcaaagtgcacgatcaacgagtgaaacacgcggccgc

SEQ ID NO: 139408 - DNA, 568 bp, Homo Sapiens
ggcacgaggcgacaaactgctggcctccgaagagttcgccaagctgcgtgaccagcgcgagctgttcccgtttgccatgaccggcccggagctcgacacctacgtgaagaaacaggtggctgactacaaagtgctggccaaagagttcggcctgatccagtaatcgcccctcttttgcacggctgcgccctctttaacgggcggcgcagcccaggagttccacatgctcttacaacgcattttcgcctcggtgatgctgctggtctgcgccggcctggcactgatggcctggccgtatcaggcggcgttttcctacgagccggtcggcccacgtgcctttccgctgctgatgctcggcctgatgagcctgggcctgatctacatgatctttcgcccgcagccaaccaagcacaccgaagaagaacccgcgctggaccgcgaaaccctgatcaagatcagcctttgcgtcgcgctgctgatcgtgtttgccggcactttcgagcccttgggcttcatcctcagcagcatgttgatcggcattccaatggcacgcctgtatggcggccgc

SEQ ID NO: 139409 - DNA, 1070 bp, Homo Sapiens
gcggccgctgacttgctgcaacagcaaacacgtaccagggagagtcgttgatgagcaataaatcgctgaccgccctgattgtgggcgtcgtcgtggtcatcgctgcctggaactgcttctacatcgtgtctcagaccgagcgcgcggtgttgctgcaattcggtcgtgtggtgcaggcggatgtccagccgggcctgcatgtgaaagtcccctacgtgaaccaggtgcgcaagttcgacggccgcctgatgaccctggatgcaccgacacaacgcttcctcaccctggaaaagaaagccgtgatggttgacgcctacgccaagtggcgcgtcaaggatgccgagcgcttctacaccgcgacctccggcctcaagcagattgccgacgagcgattgtcgcgccgtctggaatcgggcctgcgtgaccagtttggtaaacgcaccctgcacgaggtggtatccggtgaacgtgatgcgctgatggctgacatcacccgttcgctgaacacgatggcagaaaaagagttgggcattgaagtggttgatgtccgggtcaaggctatcgacctgccgaaggaagtgaaccgcagcgtgttcgagcgtatgagcaccgagcgtgagcgtgaagcccgtgagcaccgcgccaaaggtaacgagttggctgaaggtatccgtgcggatgccgaccgtcagcgccgtgtactgctggcagaggcttatcgcgagtctgaagaggctcgtggtgacggcgacgctcaagctgcggcgatctacgccaaggcttacggccaggaccaggagttctacgcgttctaccgtagcctgcgtgcctaccgtgaaagcttcgcgaacaaaaccgacgtcatggtgctggacccaagcagcgacttcttccgctacctggaaaagtccaagtaaccaagcctgtgaccttagggcgcactccgtcgggcggctaaaatgcctggcggggtgatcctttcagaaaacgggtgtatgatgcggcagccgggaaattcccggcttttttgcgtctgcatgtttgattcggcaggcgccacaggtttttcg

SEQ ID NO: 139410 - DNA, 216 bp, Homo Sapiens
gcggccgctccagggtgatggcggcgttgacggccagtttcaggtcatcggtagccacataggcctgggtgccttcgaacttcatcggtcattcctcgaattcatcaatgcccggactataccgcgcagccccggcgactgtgaacgcagacgggttattcagtctctgaatggccggtcacatcgcaggccaacgggcggggtcatgcttatgct

SEQ ID NO: 139411 - DNA, 752 bp, Homo Sapiens
cagctcaagtcggcgccgacaagaacagcgaaggcaacatgcgcaaagtggcgcaggagttcgagtcgctgttcttgagcgagatgctcaagtccatgcgttcggccaccgaggcgctgggcaaggacaacccgctgaacaccccggctgccaagcagtaccaggaaatgtacgaccagcagttggcggtctcgatgtcccgcgaaggcggtggtatcggtttggctgacgtgctgatgcgccagatgcagaagaacaagccggtcgaggcgcagtcctcgaccttgcaaggcccggcggcggccgagccggtcaaggccaagaaggttgatgtgccgactgaaatcggcgccggcaccctggctaatggcccgttggggcgctccaatggccagcggccgttgtgggcttaccgcgttgcagagccgcaaggcgccagtgcgcacaccaacgacatggaactgatgaaccagcgccgcatggcgttgccgagcaagctgaccgaccgcctgctggccggcatcgtgccgagcactcagcccgccacgcaggccgcgagtgcgccactgcgtaacagcgccgccaccgataacgtggtcaacagcaccgcgcgcaactttgccgtgccgagcgggcgcatgcaggtttatggccgagcgattgcccagccaccgctggcgccggcgaaaaaagccttcagctcgcaggatgaatttgtcgccaccagtgctgccgatggccaaggcggccgc

SEQ ID NO: 139412 - DNA, 732 bp, Homo Sapiens
cggcacgaggcgggcgctcgtcacgctcgaccttgccgcccggcaaggcccatttcgagcgggccttgcgcacgaagaggatatgcccctgttttcacaaattacggttgcacggattttcaatgtctacacctgcctggcccaatggctgtcatgaaagtgtaatgcaattgtcatgctgattcaggctggcatgcaccagcggtgatgtggatactgcccccttgatgaaaacggacgaggacaactgatgaataccgtacgttggggcatgattggctgtggcagcgtcactgaactcaagagtggacccgccttctacaaagcgccaggttcggcgctggtggccgtgatggggcgccgtgaagaagctgtgcgtgattatgcggcacgccacggcattgcccgtttttataccgacgcccaggccttgatcgacgaccctgaagtggacgcggtgtacatcgccacaccgcccgacagccacctcgaatacagcctgatggtggcggcagccggcaagcattgctgcgtcgaaaagcccatgtcgttgaatgccgagcagagcgccttgatgcagcgcaccttcgagcgggccgggctgcacttgtttgtctcttactaccgccgttcgttgccgcgctttcaacaagtacgcgactggctgcaggcagggcgcattggcgagttgcgccacgtgacctggagcctgtgcaagccaccggcggccgc

SEQ ID NO: 139413 - DNA, 1103 bp, Homo Sapiens
cgaatcatgtcgatgctcctgatgctcagttggtgggggtcacgacttgcacggaagacggcagggacacggtcgacgaagtcaccgcattgccaccgccggagccagccgtcgaggacgaaccgccaccaccgccacaggcagtcagacccaacataaccaggccaaagcccagagcaagagaaattcgacgcataagccctccaagcggcagacgtgccacagcacaacccaagcactttcggcttgaggggtgaccgctttagcgggccatacggaaatcggacgatcgttcgtgatttaggggcgcaatgccccgggcaccttgctcagcgctgccccaccccgaagctgcgcgtccagctgaggtcgagcacccggctgttgagcccggcatgctggccacggatgcggcccacgcccaattgccactcgctgcccgggttgagcgacaggcccaggtaggccatgccttgtgccacggccccgccctggttgtcgacaccaccgccgcccgcggccccggcgagcaactcggccgacaagcgccagccctggtcgctcaggcccgtctgcaccccggcacccgccagccccaccgaataggcacccgcctggccggccaccgcactgtgcgcctgcccggtcaggtagacattcggccccagcaggcgcttgagcttgatgcccacggtgtccagatccagctggcgaccgtccttgcgcgctgctttgagcacgtgttgcacgctgcccgaccaggccaggccaaccacgggcgcatcctggggcaggccggggtggtccagctgcaggcccacttgccactgggcgtaacgcgcgttgtacgcgccgctgccggaacgcacggcaccggcttcgacacccacaaaagcatcgcaccccaactcccagcgcagcaccccggccgccttgccaagcgtgccgccgccggtttccaccgcgccgcccccgcccagacccagggccacgcgggcgcccaggtacagatcgctcaagccgatggccgatgccgaggtttcccagccgcctgtgcccaggatctccatgtagccgtcagccccaccatgcgtggcggccgc

SEQ ID NO: 139414 - DNA, 777 bp, Homo Sapiens
aggttgaccggcttgtcgcggtcggcgcgctcggcgcgggcgggcgtgctaaggccggcggccagcacgaggttgagcaggatcaggccggtaagggcagggcgcagagtcatgggcggcgggttctttcggagggtggctttgacgcgcgattcgagtatgtaggtctgtttgacgcggtcggcgaccatgccgacaccgtgtgccaccgatttgccctgcgtcagcttcaccggcttgtcggtacgggcaatctcgtcgtccgggtagacgttcagcacgctggtctccagcgtcatttccgggttgccgggactggcttcgcgcagcacgcgcacattgtcgcgcaggatggcttccttgccatccttcagcaactgcgcgcggtcggcgctgatgcgggtcggcgactgcttgccgcggtagagcagcaagggctggtccagttcggtgctgtcgtcgtccgggtagtgacgcagctgctgcgcggtcagcgtgtgctgcacctggccgctcgggtcgaagcggcgcacggtgaagttgtcgacgatcacgtccgggtcgtgcctgagcttgcccgaggacgggcggtcatcgacgcgcgtggcgcgctccagccacatggtcaggccgaccagcaggatcaggatcagcagcggcagtgcctgctggacgttgcgctgaaggttcaacgcaggcagtcctgcagcagcgcgtcgagcgcgccgcgggcgtcgagcaggtattcgcagacttcgcgcacggcgccgcggccgc

SEQ ID NO: 139415 - DNA, 905 bp, Homo Sapiens
  misc_feature (152)..(152): n is a, c, g, or t
acgtagacgaactgcggctgttggtgcagtcgccgactgcatagatatccactgcgctactgcgcatgccctgatcgatctgaatggcgccgcgttcatccaacagtacacccgccgcttccaggttcaggctttgggtgttgggcgtgcgnccggtggcgacgaacagttggtcgggcgcgcagttcaccgtggttggtggtcagtacgaattcgccgttggcgtgggtcacctgactggcttgtgtctgctcaagcacgtcgatgccctccatgcggaaggctgcggtcagcgcctcgccgatggccggatcttcgcggaagaacagcgagttgcgcgccaggatggtgacgcggctacccagccgggcaaaggcttgcgccagctccaaggccaccacggatgagccgatcacggcgagccgttgcggaatactggcgctggccagtgcctcctccgaggtccaatagggggtgtcttgcagcccgcgaatcggcggcacggccgcaccggcgccggtagcgatcaggcagcggtcgaacgcgacttcgcgcccgcccccctcgaccagttcgacgctgagcgtgtggccgtcctggaagcgagcggtgccacgcagcacggtgatggctggtgtgctctccagaatgccttcgtacttggcgtgacgcagttcgtcgacaaggccttgctgttgcgcgagcagccgctcgcgcaggacggtcggcggcgtggcgggcattccgtcatcgaacggactctcgcggcgcaaatgagccacatgcgcggcgcgaatcatgattttcgacggcacgcagccgacgttgacgcaagtgccgccgatggtgccgcgctcgatcagagtgacgcgggcgccggcttccaccgcattcaaggcggccgc

SEQ ID NO: 139416 - DNA, 386 bp, Homo Sapiens
  misc_feature (99)..(99): n is a, c, g, or t
aaaaaaagccagctgatattttggtagggatttaaaaaaatttattttccgatccaccccatcccatatctcccaagagggatttaaggccccggctgngagaaatacactggagacccctttcctctctcatccctcctctcctaattgacagagggtggcacctcttttcacggcagggtggcacctctctcaatgagacagggacaccctcttccctcaagctcccccaaacacacatggcaggaagtcaagagataactgcagaaaaggagtattactgagagaagcaacagggcagaagtggttgtcttcaagggagtgggattttggggtaggtcaagattgctttttattgtaagcttatattcttctcttttcttgtc

SEQ ID NO: 139417 - DNA, 808 bp, Homo Sapiens
  misc_feature (92)..(92): n is a, c, g, or t
ggtcgccaatacgctcgtcaataaagtatctcgctcggtcgactcgaccgcaacgaggaagcgtcgccatctacgacgaagtcgaccgccgntacggcgccgacaacgcacccaccttacgcgaggaggtcgccggggcgctctacctcaaaggcttcagactcggacgacttggtcgccatgagtacgagatcgccacctacgacgaagtcgaccgccgctacggcgccgacgacgcacccgccctgcgcgaacaggttgccggagcactcttcgtcaagggcctcacgttcaaccaacttggccgctacgaggacgcgatcgccacctacgacgaagtcgaccggcgatacaacgccgacgatgcacccgccctacgcgagaaggtcgccagtgcgctacgcaacaaaggcgtcgcgctcagccaacttggccgctatgaagacgcaatcgccacctgcgacgaagtggaccggcgctacggcaccgataatgcctcagccctgcgcgaacaggtcgccgaggcgctcatcaataaaggcgtctggctcggcgaactcggacgtaccgccgaggccattgtcgtattcaatgaaatcgaccggcgtttcggagcaaacgaacatcctgccgttcgggcggttgtcgatcaggcacgcgagcagaaaggccggctgcacggcgacacacatgacgacaatgcttcccccgaaaccgactgaccagacggctcatggcgtgccggccatctcccacccgccccccaccgccttgttcaacagcgcactggccgagaactggcggccgc

SEQ ID NO: 139418 - DNA, 1049 bp, Homo Sapiens
  misc_feature (726)..(738): n is a, c, g, or t
  misc_feature (931)..(965): n is a, c, g, or t
acagctgcattccctacgagcggaagattagggcaaaccccctttacggccaaacaatctgcacgacttgagacgaagtggaccaggggaagcccaggaggttttctcccagggggcaaacgtggacaaccatgtccaagaagaggaaggatagaaactgcccgagttggaggtccataggctgagttttctttaggatagagggtggctgggcaccaggaagtggaatgtcctggatcaaaatgttggaaggagcatgtggcatatctggcaaaggaatactctccacttccacatgctgagcattcttgacagcatcaaaatattggctaagttgagccctcttctgttcatattctacttctagctttctcaattctttgtaaatatctggattctctttttcatagagtcgtagaatacgttcaaaggtttcacgcagctttttacgcttgtctttcagtactttctcatttaattgtggctgttgcactgggttaaactccatttcatccaatttctccatgtctcggattatctgttttggatccttcatctttaaaactgcagctcgaaccatcatgcgctgttttttgttcttctttaattctctcttccgggcttcctttcgggcttggtctgtggggttcataaattttccactcttggtggatgatgtagatctccgtcccatgttgacaatttgtatggtttacttgttcattnnnnnnnnnnnnncacttctgctgtgctcccaggactacgagaagcgggtagggggcgactcccggcctctttcacttcgtaaaggccttcaactgggtctctcggtcaacccctcagctaccgccatcttgaaacctcgcgcccctccgcactccccggccgtaatggccgaattcccgggcatatgtccggtaccgtcgactgnnnnnnnnnnnnnnnnnnnnnnnnnnnnnnnnnnncggccgcttcctcgctcactacttcgctgcgctcgtcgttcggatatagcggagctagcgccctatagtgatcgataaagtttt

SEQ ID NO: 139419 - DNA, 850 bp, Homo Sapiens
  misc_feature (660)..(672): n is a, c, g, or t
ggggggaaggcccagggaggtttttctgccaggggggcaaacggtggaaacccccatgtccaaggaaggagggagggatggaaactggcccgagttgggaggtccataggctgagtttttctttgggatagaggggtggctgggcacccaggaagtggaatgtcctggatcaaaatgttggaagggagcatgtggcatatctggcaaaggaatactctccactttccacatgctgagcattcttgacagcatcaaaatattggctaagttgagccctcttctgttcatattctacttctagctttctcaattctttgtaaatatctggattctctttttcatagagtcgtagaatacgttcaaaggtttcacgcagctttttacgcttgtctttcagtactttctcatttaattgtggctgttgcactgggttaaactccatttcatccaatttctccatgtctcggattatctgttttggatccttcatctttaaaactgcagctcgaaccatcatgcgctgttttttgttcttctttaattctctcttccgggcttcctttcgggcttggtctgtggggttcataaattttccactcttggtggatgatgtagatctccgtcccatgttgacaatttgtatggtttacttgttcattnnnnnnnnnnnnncacttctgctgtgctcccaggactacgagaagcgggtagggggcgattcccggcctctttcacttcgtaaaggccttcaactgggtctctcggtcaacccctcagctaccgccatcttgaaacctccccccggccgtaatggccgaattcccgggcatatgtccggtaccgtcgactg

SEQ ID NO: 139420 - DNA, 713 bp, Homo Sapiens
gcacgccacagtgtgcaaggcgcgacgctaaaaaggcgcggcagtataacccgacgcggtggccgatacacccgactatggtcaaactgtcgcaggcatgattccctgtgccggtcccttctgattgagcctttatatgcttgaactgcacgtcggcgaacgccactggtcggtagccaccggcagcaacctgctggatgccttgaatctggcgggtgtggctgtgccctacagttgccgggcgggcagttgccatgcgtgcctggtgcgttgccggggtgaggtcgatgataagcaacccgatgccctgagcccggcgcagcgccaggacggttggcgtttggcctgccagtgtgaagttgtcgcagatttacaggttgaagcatttgacccactgcacgatggtttgcccgcgcaagtggtgggcgtcgactggttgagccccgaggtactgcgcctgcgcctgcaacccgaacgtggcttgcgttatcgggccgggcaacatctggtgctgtgggcaggtcaggtagcgcgcccgtattcgttggccagcttgccgcaggaagacccgtttttggagtttcacctcgattgccgcctgcccggcgaattcagcgctattgctcggcaattacaggtgggcgacagcctgcgcctcggcgaattacgtggcggggcactgcaatacgatcctgactggcaatcgcggccgc

SEQ ID NO: 139421 - DNA, 717 bp, Homo Sapiens
ccggcgtacgtcttctccagttcttctcgccatccttgccgatcaggatcacctttgtaccgctgccggcgccgagcttgagggcacggatcagcgcgttggtttcaggtggcgtgagcttcttgttgtccttggggtccttggcgaatttttcgccttcagcaccgatgctgccgaacttcacggtgtagaacaccctgctgcgctcttcaaaggactgcttggtagcaggctcatccaattgtttcttgagggtcgccaaagtgtcgttgccggaatcgagctccaccaccaccagcggccgagccttgcccaagtcctgcttgagcgggttgatatcatcagcggccaacagcggccccgtaaaagccatcaaggtagccagggtcagcgaccggatgagcatgcgcacctcctttgaattccatgcagggttcttgagtttcatgtctgcgacagtcaatttcaaggatgattcctacacctcgttaagaagcgtaggtcagtaagcctgccacgcaagggctcgaatggggttatcagtcattgtttcttcagattgcggaaccattacgaggcgttctattgcggccaatgccgcgcaaataccggcgccaccaccgggtcggcatccactcgcgccagcgtctgggcaaagcctggcgcgaggttgttcaacacctcccgcgccgcgtcccaacgcgacaccgcggccgc

SEQ ID NO: 139422 - DNA, 1252 bp, Homo Sapiens
  misc_feature (500)..(518): n is a, c, g, or t
aaatggttgaacccttttttcgggagctgtaaaaaaaagttaaaggttccattttttagggagggaggattcccaatttttcggggaggtttaacccaaatggttgtaaagggggttccccttcctgttcccaccgcttaaggggggaggaaaagccatttccttcagcccggtgtgaagttgtgtttacccaagtgccacagggtgagggaccggacccccaggcccagtgaagatgagggtgagggaaacgagtacaacagcatgggctatatcaggttttttgtccttcttcccaagccactggaaaaaacgtttcacagagagtgatagtggttacaagaccaaaacttggaatcaaaaaaattaaataatgcaaataacccaattaatttgctaatatctattaccgcagaaatagtgttagaggtagtttattaaagaggcgtttttaaaatcatcccactcatcatatcgtgcatttcaaaagtatcatcttnnnnnnnnnnnnnnnnnnntactttttagagcataaagcataacaggttgaagtggttttcaaaaagctacttctagtgttcttcagctttctattatggcagcatcatcttgtgatgaagacactggctcacttggacacacggtcagcatgcataaatacatctcagtgatgatcaagttactgccatctacaggaccgcttgcaaataagatgaagagagctacctcagtgttagcagcaaggcttcgaggtctgtactactcaaaccactcctaagggtatggccaatgcacagtttgaatgttagggaacacaccaggtaatgttaaagattcaccagttttccccttggaattaattctaataaaatcttccacagggtaaattaaaaataaatttctctccccttttactcttcattatttttagtctcaaaagcctcatatactgttccaatgaaacaagaattggctctgaaccaaaaccaaaaagaagggaagaaaatccagagtattctatgatgccctgttaagtattagcgtgtggcttccacaagaaagttgtcaaactgtgcaaattcaaaggagtgagttccaattgcagcccagccattctttggaaaattcacagggatgtctgtccacagagacttgtcattcagcatgccagaggcgaaatgacccttaatagttaacgtgagtgtataccatttttttgctgtaacttcaacacgtcctaaagcatatatgg

SEQ ID NO: 139423 - DNA, 757 bp, Homo Sapiens
tcggcacgaggcgcaccgacgtgacgccgaaccagatttccgtcgtcagcatcctgttcgctgcggtcggtgcggcgctgctgctgtggtggccgacgcccgccgggctggtcggctgcgcgctcgcgatacaggggcggctgatctgcaatctgctggatggcatggtggcggtcgagggcggcaagaagtcggcgctgggtgcgctgtacaacgaattcccggaccgcgtcgccgactcgctgctcatcgtcgcgctcggctacgccgtcggctggccggcgctgggctggttcggcgcactggcggcggcgctgaccgcctacgtgcgcgtgttcggcggcgcgctcggtcaggcgcagagcttccgcgggccgatggccaagcagcaccggatggccgtgatgaccgtcgcctgcctgatcggcgccggcgaactggcctgggccggcagccagtgggcgctgcaggtggcctgcatcgttattgcggccggctcgatgctcacctgcatcacgcgcacgcagggcatcgcccgccagctcaccgccggggctccgtcatgctgatttccgcgctgctgatcggaatcacccgcgcgctggtcggtgcggcgccgcgctggcagggcagcgcgccgtcgccggcgcagcgcatctacttcgccaaccactccagccacatcgacacgctggcgctgtggtcggccctgccgcgcgaactgcgccgccacacgcggccggtggcggccgcaagc

SEQ ID NO: 139424 - DNA, 692 bp, Homo Sapiens
tcgagttgaggaagatccaggcggtggggccgacgatgaacagaatcgccagcgccacgacgctatagccgatccaggcggcgcggccgtgcaaggggatcatcggccggtccttttgcgttcgatctgcgtcgccgaccatttgccgacggcgagggtggcgacgattacgccgatgatgctcagcgacagcattgcgccgtagccgagctggttctgctcgaagaacacgcggttcaaatgcaggctgagaagctcggtcgacgtacccggcccgccggaggtcaatagatagacctggtcgaacgccttgaacgcgacgatggcgcggaacaaggcggcgaccgccaaagccgggcccagcagcggcaggatgatcaagctgatcatctgccacgccgtggcgccatccacgcggccggcttccagcacgtcctgcggcagggtctcgatcgacgctaacaggatcaagaacacgaaaggcgtccagtgccacacatcgacgatgacgatcgacagcagcgcccagcgcgtgtcgcccagccagttgatcgggttgaggccgatcagcccgaccatctggttgaacaggccgaaatcgtagttgaacatcagcttccacatgctgccgatggcgaccgcgggcagcaggatcggcaggatcatcaccgtgcgcgcgaaattgcggccgc

SEQ ID NO: 139425 - DNA, 974 bp, Homo Sapiens
tcgataccttcctgcttccgttcgatcctgtcgtctcccgcgccgagcgggcgtcggcctgatccgaaagggcgatcgtcagtccacaatctttgcgaacgaaaactcggctccgtcttgctgtgtcacccgacctcttggcagcgctgacgtcggcttagtcctcaatttcagttggcattcaatagatgctgggcgaaggctggtgtagagatgcccggaatgctggtacgccaagcgacaaacaggtctttccgtagcggcgggtcaacaaaagatatggcgcgcaggcttccgacacgcacctcgtccagtacagccgacgccagaaccagagaaatgcccattccagcctttaccgcttgcttgacagcctcggtgctgcctagctgaagggaaacccgcggcacttgagcgctgtcgccgaaatatttcgcaagcattcgccctgtcccggtgccaggctcgccgccgagaagctcaaatttggataattgagcccgaccgatctgttcttgagacgccaatggatggtcgggcggcacgataacgacgacgggttcgcttttccagcgctcggcttggcaaccgtcgcggctgtcccaccattccagcacggctacgtcaatttcgacattctccagtttctcggcgatagatggattgcggtcaatcacgatatcaaaggccgatgaatcacggccttcgagaaatgaccgtaaatagggctgcagcagatagattccgatattggaactggcgccgatccgcagccgttccctggagacagcggcgagcgcacgctcgttcacccggaagatagtctgggcatagggtagaaaattcatcgcttcccgggtcggatcgcagcccgtccgggagcgatggaatagctgaacacgcagttgatgctcgagcttctggatgtgtaatgaggccgtcggctgagcgatccgaagatcgtccgcggccgc

SEQ ID NO: 139426 - DNA, 515 bp, Homo Sapiens
ggcacgaggatgttaattacattttcggcttgctgccggagacggcaaccgtcaacaagccaagaaattcatcaattttaccgttttcaatccaccgtacgacagcgaccaggtcattgtccgggtcaacatatataagattcgttccgtttccgatatgtgcaaatgcctttgccggagctgacggaaaaagtttgcggtcggtattcagaaaccagttcataaaaccataagttggctgcgaaacggtcggcgtttttgcctgggcaataaaatcggcaggcagaatctgtttactattccaagttccattgcggagagtaagcaaaccaaaccgccccatatcataagagtttataaaaataccgccgccccaatgtccgcctccgcttacggattggactatattaccgtctattaccacataggaattttcataaccaaaccaacgccatgtatcagaagcccctatttcatccattacaaattttttcagcacttccggaagcggccgc

SEQ ID NO: 139427 - DNA, 722 bp, Homo Sapiens
  misc_feature (712)..(712): n is a, c, g, or t
gcggccgcagcgggctgtcagcccacgcgcgaccgaattgctcgatcagcaccacgatgtcctgcgggagtcggtccggacagcggacgagaggcgtcacgccggatggcacttcttccttcagcttgcccgggccgacccggtcaggcagattctgcaaggtcacggtcgttaccgatcacattgatacgcggttgcgccatcagttgcgcgacgaaggggttgtcgtcctgcagccgcttgcgccagtcggcccgcgaatacagagtggggctcaccttacggccgatgaccgtctcgacctccgtcagcgcgccgtacagctcgccgtaagcgagcgtgtcgctcaccaccagcagatcgacatcactgtccgcgccctcggtaccgcgcgcaactgagccatagatgaaggcaaacgtaatctgttcggcgaagggcgacagcgcctgccgcagctgatcggcaacccccatggtcttgacgacaagggcgcgcagctccgagaacaccggagagtccgggttggcctgatagagcgtctggttgccacgccgattcaccgtcaccagcccggctgccgacagcttcttcaactcgcgactcacggcaccgccccctgactgcgcgagccgcacgatttcgttggtatgaaagctctgtccagcacgaccgaacaacagccctagcacccgctgctgggttcccgtanacagtactgc

SEQ ID NO: 139428 - DNA, 1063 bp, Homo Sapiens
cgccggccaccgaaagaatgcgttccgacccgtgtacgttttgctcacttttgggggctggttgcaggtgttcgatgataggtcgcagggttttgctgtcgctcatggtttgtctccaacaaaggcaagtgtaagtagctgactgtttgcaggcgctggatgttcccgaaatatcagtacttggggcctgagcgggtgttgttgcccttggccagacggtcgtacagcaccacattgacggtggcggcaaggttcatgcagccggtggtcgggatgtacaccacgtcttcacaccagtcgcggatctctttgtccagcgagccgtcttcggggccgaagatgtacagcgcgcggtccgggtgcgtgtattcgggcagcgggcgggcgccttccaccagctctacggcgaccgggatacagcccagcggcaggatctttttcaagtcatcgatgccgatcaacggaatgtcgtggtggaccttcttggtgtcggtgatgaagtcccgggcgcgctcgtaacgcacgccggtgtaaaacaccgaggccacgccgtagcagccggcggcgcgcatcaccgagccgacgttttcgggggatttggggttatacagaccgatgcagctgtagcgtttattgcccacggggaagggtgccttggaggaaaaccgcgattatacggccttggaggcatgtgttgcttgggcgatcgctatcgcgggcaagaagcccggctcccacacttgggatgcattcccctgtgggagctggcttgcctgcgatgcggcccgcacaggcaaagaagggcttcagtcgtccttcttcatcaaccccgccaacgccgcaaacgggttgtgcgtcgccttggcaatcgtcgggctgctggtggagccttcgccgaaatactgctggtcggtgtagcgcgagtgttcgttgtcgtggcagtacaggcacagcaactcccagttggaaccgtcctgggggttgtcatcatgattgtggttgcgatggtgtacggtcagttcgctcaagcgtttgccggcaaactcacgggcacagcggccgc

SEQ ID NO: 139429 - DNA, 884 bp, Homo Sapiens
gcggccgcactggcatggttctcggctattccaaaaccgaaaactctgcgcatctacctgcgcatcgaggaagatacccctgtcgagtcgctgaatgacgcgatcagcaagggcatctggttctactggtacgagttcgaaacctctatccgtgccgtggatgcagatgttttggccctggcggctgctggcgatgccgcaagcaagttctttgccttcaccaccaaccaggcaaccgttcgagacccgtctgtaaccaccgacatcgtcagcaaggcatttgtgcagggctctcgccgcatgttcattgtgagccatgctaccgagccctacgccgggtttgagctggcggctgtgttcagtcgcgtaaatttcaatgcggccaactcgaccatcaccggtgaattcaaaaagcttccgggcatcgacgccgaaagcctgacaccgaccgcctacagcaccatgaagtctaagggcgcgatcttctacacggttgtcgagaccggtggcgagaaggacatggggcgaatcatcaactccaagaccacttccaccttcggcgagtacatcgacgatgtgttcaacctggatgcattcgtaaactttgagcgcgtggcgctgtacaacgccctaaccaaggttcctacgaaactccggcagaccccgccaggccagcaggttcttatcaacgcgggctctcaggtcggcgaggtattcatcgacaacggctatctgggcgaacggatcttcaccgatgacgaaaccggtgaagaaaaaatcagccgcggctacgagatgctcaccaaagcggaggaaattcttcggatttccgattctgagcgcgccaatcgtgactccgcaccaatccgcatgcgcatcttccg

SEQ ID NO: 139430 - DNA, 961 bp, Homo Sapiens
ccaaagaaataccatgccttttatcatattctttgcaatatacataacattacttgtagccacatgctacattgtattataacaagctaagtgatgaactgcgtattgattactctttttataacttataaaatgaaaaaattaattcggttagatctgacatcattttaatcttgaattgcatgcttttagtaatctatcttataatacgttttgtaatttatttctcagtggtttaaaatatatctcaaaataagaattaataggcttcttagaactgaaaaatgaaatcagacttttcaagtcagacttggcagtttggtttgacaaaagggacagcgtttgcttgttaggttatgtggcagacattttccacaagtgaaagatttagggctccagtccaaggttttgacaaaaatgtatttaaaacgtgtgataagatataaacattttatttaacaaaactgtatttgtaagagagtcttaaaattaacactgctcccattttccttcccttttctgagcctgttgagttaaataattgcctctacgtgaaacagtacaattaacagtcatttgataagtcttggcaaaggcttttttggtaatcttcatcaaaattgaagtgaattatagtgatgagctataatagctttgtaaaaaatcctctttcaagtcaggtagcttttaactcttagctttcaacaaagttgaaggaacacatttaaaacatcagcgtatagatcattaaaaataatgtttgatagaagatcataacatgatgtattactaaggagatattactaaggagatcaacaaattgagtgatggtttagtaacaaaacccttccatttctatctatttgtgtatgaatatggtttctcaaaccttacttctgtataaataaagactaagaataaaattgatgttaaactcccattctagcattgaagcgaccgc

SEQ ID NO: 139431 - DNA, 644 bp, Homo Sapiens
gcggccgcgcccaggtgttccagccggcgccatcgcgcttgagggatggctgctacctggcgattgtgttgttgatatgcgccgtgttgctgctggtgttcggcatggcggtgtattcctcgctggtgaagttctggccgtacaacctctctctatcgctcaatcactaccagtttgaagacacggccggcggcggctggctggcgtatcgcaacagcctgaccatggcgctgtgcaccgcgctgatcggcagcgtactgatcttcaccggcgcctacctgatggaaaagaccaagggccagaaaggcctgaacctggcgctgcgcatgctcagctttgtgccgatggctgtgccgggcttggtgctgggcctgggttacgtgttcttcttcaacctcaacggcaacccgctacacgtgttctacggcaccatgaccttgctggtggtgtgcaccatcgcgcactacctgaccaccgcgcaaatgaccgcaaccaccgcgctgcgccagttggatgccgagttcgaagccgctgcgctgtccctcaaggcgccgctgtaccgccactatctgcgtgtcaccgtgccgatctgcctgcccgcgctgctggatatcgtgcgctacctgtttgtcctcgtgccgaat

SEQ ID NO: 139432 - DNA, 798 bp, Homo Sapiens
catgcctagtaaggtgtgccctctggtagaaggttttaacacattcggttacattaatagggtctctctcccgtgtggattctttgatgctgaatgagaggtgattgacgagtgaagtatttcccacaatctaaacactgattgcatttcttttgtgtatgatttctcttatggagagtaagctgcatattgtggcagtatagatttccacattccttacatacgtttcttgtacattttatcactgtgtcaaactgcgataatacttcattaatagccctctttgcagataactccttaatctctgcacctggcacatcttttccaaagagagttctagtctttgcctttggctcctgggagatggtcatctctgacaccttgaaatatcctggcaatgggcctcttatctcttcttttgccattatccaaggcagtttccttttctccaacagtgaaatcacagatttagaaatggaaagtcccagccagaccaggttctgataattctccagcatcacagttgtgtacaaatctctctgagcagggttcaggaatccccactcttccttggagaagtcaatggccacatcttggaatgtcactcatccctgagacatggctaacgcgcactgcgctggaaccgtgtcctgaatagtgaccaggtcctggaaatgcagagctcataatggcccagcctccgcgtggcgctgggaaaaatactgcccaagaaaggagaaacggcgacgctgcccacccaggtctccctggagcccgccgacctgaagcagcggccgc

SEQ ID NO: 139433 - DNA, 719 bp, Homo Sapiens
gcggccgcgtcgccgatcatgcgagcctgccattttggcgtgcgggggtaggtattcttgtcgtaggactgctcgaacatgacgtagacgggcttaccggctgaaccttcgaaagcgccaatcagcttgccagttgatacggtggaacccatgtctttaactcccagtcattcaggcctgctggccctgcgtttttgatgtgcccagtatccgcagcggacttgtgtgtcattggacgggcaaggcaaaaaccagaaactcgtcagccgccaacacgggagctgagaacccatgacagccgggcggggtggcgatggtgctacctgaaaatagacggggagtcacaaactcaacacacccctaagcggcgggccgccttggtcagctccttgagatagaacgcatacatttcatcgaactcgggctcgtagcagtcttcgcggtagtccagctgataattcaggtgcagagtgactgtggggtggatcttggctcgggtccggtatatgggggttgagaactcgcccatggagtcgtagtaccgaccgcccacctcaaccactgagtgtgcccaaggcagagccccacggttgaccacagttaccatcttgcaggccacgcgcgtgtgcaacaggtcatagagcgcggctgcaaagaccgagcacgtatccacctgggcatctttccgagcccgcccgatcttccctcgtgcgaattct

SEQ ID NO: 139434 - DNA, 390 bp, Homo Sapiens
ggcacgaggggttgagatggccttgaaccactcccccctggaagttgaaggagatctgcgcatgttccggtgtgagctcggagacgaatgcttcgagctggtctccacgctctatcggcgaggcgctgatcaaactgcagactcgatctgcagctgctcgtaggctgagtgcttgagggtggtttacggcagtgttcggagtgatatccggcatattggttctccctgcgcaaggtgctaacaatgttattaccctgcgcaggggaaatcaaactaccagctacgctttatgcccctgcgaggtaaggtagcggcccgaacgggatgtcgtcgtcgaagtctggcggagtaccttgttgcgacggcggtggggtctgcggtcgcggccgc

SEQ ID NO: 139435 - DNA, 839 bp, Homo Sapiens
  misc_feature (79)..(79): n is a, c, g, or t
ggatgtccgagtgcgaacgctgcgatgcgcgcatgaccgtacaccagcgccacggcgagtgcgctgccaccactgcgcncatgtggagcgcgtgccgcgccacttcccacaatgcggcaaagtggattgcgccccgtggtgcgggcaccgagcgtgccgaggagcgcctgggcattctgtttccggattacccggtgctgcgcgtcgaccgcgacagcacctcgcgcaaagacgcgatgaaccagctgttcgcgaccattcagaaaggccagccgtgcatcctgatcggcacgcagatgctcgccaaagggcaccacttcccacgggtaacgctggtgtcgatcctggacgccgacggtggtttgttctccggcgacttccgcgccagcgaacgcatggcgcaactgatcgtgcaggtggcaggccgtgccgggcgcgccgaagagccgggcaaggtgattatccagacgcatctggccgaccaccccttgctgattcaactgacagaacagggctacttcgctttcgccgaacaggccctgagcgaacgccgctccgccggcctgccgccgtttgcacacctggcactgttgcgcgccgaagcgcacaagccagggcaggccgaaaattttctcgacgaggcatgcagcgccgccgaacgtttgctcggtgagttgagtctggccggcatcgaattgctcggcccagtccccgcgccgatggagcggcgcgccgggcggtatcgcgctcagctactcttgcaggcaacgtcccgtgcaccgctgcatcgactattaaatagctggatgcttgccctggagcaaatgcccagcggccgc

SEQ ID NO: 139436 - DNA, 805 bp, Homo Sapiens
atcggcacgaggcgcagtaccaccccgctgtcatggcgtgctcggagtagtcgagcacgtggacaacgatgtcgagggagaccagtgcgtcgatgaaagccgacatcgcaccgttaccctcaccacggatctgagtgtccgccccattaatccgaaggttggcggtgagctgataggtaccggtttcggtggacgtcgtgcggctcaccagctcgatgccaggcacttgcagatactcgcggttaaacagatcccagatctcgtcgtggctgatctcgcgggcttggtcatcggtgtaattctgcactgcacgggagaactcgatctgcagacgacgcggcaggtcgacttggtgctcggtcttcaggaggtaggccatgccgcccttaccggactggctgttgacgcgaatgacagcctcgtaggtgcgtccgacgtcgtgtgggtcgatggtcaggtagggggcctgccagtcaacctcgtggataccgatgccctgctcctgggcctggcgttcgaggtcctccaggcctttcttgatagcgtcttggtgcgagcccgaaaaggctgtgaagacgaggtcgccggcgtagggctggcgtgccggcaccggtagtccagtgcagtactcgacggtgcggcggatttttggcatgtcagagaagtcgatacccgcgtcaactccctggctgacaagattcatacctaaggtgacgagatcaacgttgccggtgcgctcgccgtggccaaagagacagccctcgacgcgatcggcgcccgccatctgcgcgaactcggcggccgc

SEQ ID NO: 139437 - DNA, 556 bp, Homo Sapiens
  misc_feature (305)..(346): n is a, c, g, or t
ggcacgaggaatatactaaagttttaatattacatgataatatacaatatacagtctaatactatgcaatatacagttttaatatttatcatataatgctatatattttttacggacagacataatagaggtctcaacaaattcaggataactgttacttctaggtaaaaagaaaggaaaataatatcaggggttcaattgtataatatttcattttaaaaaaacctgaagcaagatggtaaagcaaaaggaattaatggagcaagtatgttggttcatgttccttgccgtactttcctgtttgnnnnnnnnnnnnnnnnnnnnnnnnnnnnnnnnnnnnnnnnnngctattgcaataattcaaagaagagattactgacaaactatctaacattaaagtttttaaataagatttccttttaagaacttcatgctatttcagaactgtaaactattacatttcaaaatacccacagttaaatattgatctgaaagaagtcctcctgacaacaccaataatgtatatactataaaaaaagcctacagccgcggccgc

SEQ ID NO: 139438 - DNA, 560 bp, Homo Sapiens
gcggccgcatcgtggcctggcgcgagggtgcagcgctggtgggcgtggtgacggcctcggtgctgcccgcgctgctgggcctgccggtcatgctcagcgtgtttgcactcaccttgctgctgggctggtgggcgtggacgcgtgccccgcgccccacaggccacacaggcgccgtggccggcgtgtaccgcccgccccaacgtgccagcctgtggcggccctgggggcggcccgccttccgccgcctgctggcggtgttcatgctcaacggcattgccagcgccatcccggccacgctggtgctgttcttcatccaggaccgcttgcaggccccgcccgcacaggagccgatgttcctggccgcttatttcgtctgcgcggcgctgtccatcccgctgtggctgcgtgctgtggcgcgctggggcctggcacgcacctggctggccggcatgctgctggccattgccgtgtttgtgtggacggcgttcctgggcgcgggcgatgtggtgccattcctcatcgtctgtgcgctgtcgggcgtggccctcgtgccgaattct

SEQ ID NO: 139439 - DNA, 848 bp, Homo Sapiens
acgaggacgaacgcaagtacgagcgtgagcagggttcgtcgggtgaacaaatgcatcagcggcatcagaagacgaaatccagcacgacggtgagcagcgtcaaactggcatcgcggaccggcaggccgctgggggtgatcagtatcgacgacgatgaggcatcgatcttttcgatttgtaccttcaaggcgtaatcggtggcgaagtcataacgcacaccggcgccgaaagtgcgctgattcatcgtcagccggtcgacgacgcggtcgtagacgacctgcagcgcagccgccggagccggcagcgtcagcgcactgtcgtccggttcgaaggagatgcgtccccaggtcagatagggtttccacgcgccgatgcgatagccggcgaccacgctcgaaccccagccggagtagcgcggaaactgcgagaaggtctcgcgcgcgagaatgccctgcagcgaccacgggccattttcgtagcgcgcgctgagaccggcgaaggtgatgtggtgcgaagtctgtatctgcgatgcccgcaactgcgcctgcgccagcggtaccgacgccagcgcatcgcgcagttcgaccagcgaacggtcgccgcgcgcgtgaatgtctgcccaggccgccttcagcgtcagcgtgtcgctcgcccattcgatcgtcgcgcccacggtggtcgcgtcgtcctgcgtcacccgctggccgtacaggtagaagtcgccgcgcgactgcccgccatacaccttgacgctgcccaggccgtcgccgatcggcgtgcgcaacgtgaggtcggcgccgtcgaagcggtcctgcgtcaccacgccgtacacttcggtcggcggccgc

SEQ ID NO: 139440 - DNA, 560 bp, Homo Sapiens
  misc_feature (74)..(90): n is a, c, g, or t
gttacgaaaatagagtttattaaaaacatccctattgttttgaggagctttcaccgttaccttgtcttaaattnnnnnnnnnnnnnnnnntagagagcacttctaattacgatttgtaaactttttaaagtcaaaacttttaaaaagttacagcaaaaagggtaatatttattcatattttcagtattttttgttattttgtggctatttttaaatagaagggaagcaatcaaattgcttacagttccccaccagctggcgcggggctgcagtacagcgggagcggatataatacagcatctgtacacctcaagctctacactccaggaagtgtcactgtcacattttcacaaattccagtctctaacgaggagcctctgctgctgagccagaatccttttcgggttcaacggatgaggtagcctcagcaggtaactcttcagaaggctttaggactgcagcctcagacacccccttctcaagttctgaagcagtgtctacatttcccacttggctaatgggaggttcaacggttttgttacctaccagccgcggcccgc

SEQ ID NO: 139441 - DNA, 624 bp, Homo Sapiens
cgtggcggcctcgctgaagcgcgcgctggccgagtcgctgcgacagctggccgacctgacccccacccaggtggtcgagcgccgtttcgagcgcgtcatgtcctatggaaagttcaaggagcaggcggtcgcctgatctttacgcccgtatcgccgccaatacggcggcgcatctggccgacggcgctcagctgctgatcggcttcagcggcgggctcgattcaaccgtactgctgcacgcactggcggcagcccgcgatgcccatcgctggcggttggcgtgcgcgcatgtccaccacggcctgagtccgaacgcagatgcctgggcagatcactgcgccgcgcaggctgccgcgctcggcattccgttctcgctgcaccgggtgcaggtcgacacggccagcccggacggacttgaatgcgccgcccgcgacgcccgttaccgggcgctcaacgcgcaggcgcagacccttggtgccgacgcactgctgaccgcccaccacgccgacgaccaggcggaaaccctgctgcacaacatggtgcgcggcgccgggctgctcggcttggccggcatgccggtctggcgtccagcgactcctgcgcgcccggcccagttgcggccgc

SEQ ID NO: 139442 - DNA, 750 bp, Homo Sapiens
agaattcggcacgagggcacctggcgcgggtggtcgttgcccggaattgagctgtcgatcagggccagcaactgcgcgcccagcgccgtgaggatgaagttctcaccattgccgccctcttcttccgggcgcgattcaatgaaaccgcgtttgaacaacagcgcttcgtaatcggcggcggtctttttcaacacgtccaggttaccggtggattcgcccgccgtggccttctcggcggcttcctgctcggcgtatttgcgcggcgcaaagctgccttcgccgttctgcacttcatgcagtagacgttcgatcagatcccagttgtaagtcgtcatcctgattactcccgcgggcagattaaaaagtggcccgtcataggtagtgacatgacctgacactggccgttcatcccaatagacgagcgtcatttctctgaactttccagacgttcgcgccctcaactgaacaccactgccaaggaggtccgaccatgaaaaccctgatgaacctggccatcgccgccgccctgctgagcgccctgcccgcctgggcctgcacgccggaagaggccacggccaaacgcgaacaactggccagggaagtgaccaaactgacccagcaaaacccggccaaggccaaggaaatcaacgatgagttgcaacacatgaacctggagactgccagcgcggatctgccggacaagtgccaactgatcgaccagcgcctcaaggagctggacgaggcggccgc

SEQ ID NO: 139443 - DNA, 850 bp, Homo Sapiens
attatctaaaaaagattggcaaaaagttaaatctccttttacttcaaaagtaaagaaaatcatgcaatgagatgatcctgttgggccttcagcacagacccatcctctcttccccggctcccagcagtccagggcaggtttctgtcctcagcaggctgagttttgttcagtccattcgttccttgctggatcagcacactctggatttctcagccctttcagtctgagtgttcctccctcatggccttcacaagccagtcctgttctgtcccctgctcagagtcactggtgtcactcacctccatggactgcagcttcgagtacttgattttccgctctcggggcagcctccgctgtatggacaggagcaaggccaaccagagcaacagggccacacagcaggcctggtagagcacagccaggctgaagcgcatcaccacgaagcccccgacaaagctgcccaggctacagccactcccgtaaaagtggcctcggaacaaggcactcagagccctctccatgtggggagtggccaggtcctctactgaggcccccacagcccaccacaaagctctgttgctaatggcactcaagatctgaatggggaggacggaccaccagctccagaggaaagagtagtacagcagctgcccagcgaggcagctcagccccagccccaccaggcccgtcctggacagtttcctaagcaatgtagctttgaacggatgaagcagaatttcccccagcaagctgagggcgaccgagaaacccatgaccagctcgccgctcccatggtccttcatgtgccagaacagaaagttctggacagtactgacgatggctcggccgc

SEQ ID NO: 139444 - DNA, 532 bp, Homo Sapiens
ccggggtcaagatgacgcacgtgccctacaaaggcagcgccggcgtggtcaacgccatgctggcgggtgacatcgacctcacgttcgacagcatctccacctccatgccgcacatccgcggcgggcgcatgcatgcgctggccgtcaccagcccgcagcgctcggccctggcgcccgaggtgccgacggtgcaggagcagggcatggccggctttgacgtgaccggctggtatgcgctgatcgcgccagccggcacgccacccgagatcacccagcgcctgagccgcgagatcgccgccgcgctgcgccagccccagctgcaatcccaactggccgccggcggctacgagcccgtgggctccacccccgaggcgctgcaggcgcacatcgagcgcgagatcacgcgctgggccgccgtggtcaagtccacgggggcaagagtggattgacaccccctgagccgctgcgccgcttcccccgctcgcggttgcgccggcgcggcgcggccggcataggccgcttgcgcggccgc

SEQ ID NO: 139445 - DNA, 674 bp, Homo Sapiens
aaggttgaacgaagacatttatttgtaaaatcagttctcaatggaggagagattgtatccatagaaagtaaaccagtgatcgttcagagggccacatgcacgcattagtgaaaccaagggaaaaaccaaaaagacagcactgctgcggacgacccgcgtggctactaatcctgccaacagaaaagcaaaatgtcctttccgcttgagaacgcggatgcaccaagatgtcctgtgagaaggcaatttggtctgacatccacgatgaagtgatcagggaacaagtgggggagcgtttttttctattccgtgtggcctgcttgtttcccgcagaaactggctgaccgcttccgttgtcctcccgcctccagtgggagggaggtggtgtcaaatccctggctttctcacatgcccatccttatgctctgaatgatctgaaagatagcttaagggagctgatggctgatgagatgtcttcaggctgtgcatctcagatcccgaggatgaactccagagcagatgaatggcctcagtctttccttcagggccagccagttcctttaaacatctcagttgccggtcttgggggtggggtgactccctctggatgttacaactttgagaaagttctggcagtctccaggagaggccaatttatgtggttgacctgagccaca

SEQ ID NO: 139446 - DNA, 862 bp, Homo Sapiens
gcggccgcgccgccatgctgcaactggacgtcagccagagcggcagcttcgatgcttttgtcgggcaaatcgctacggtgctcaaagacgttttcgcccagcaacattttaatttcctgatcaacaacgcgggcatcggcgctcacgcaagctttgccgaaaccaccgaagagcagttcgacatactggtggccattcacttcaaggcgccgtttttcctcacccaaaaactgctgccgctgatcagcgatggcgggcgcatcatcaacatctccagcggcctggcgcggttcagcctgccgggctacgccgcctatgcgtcgatgaaaggcgccgtggaagtgctgtcgcgttatcaggccaaagaactcggcccgcgtggcatcaccgtcaaccaccctggcacccggcgcgattgccaccgacttcagcggcggcgcagtgcgcgataacccacaggtgaatgcgatggtggccgacaacgaccgccctgggccgtgccggtttgccggacgatattgggggtgcaatttcgagcgtgctggccgatggcagcaactggatcaccgggcagcgtatcgaagcgtcgggcggcatgtttctgtaagcattctgcgctagcatcaatgccttcagatcactgacgggcaatcaccgatgagttttgatccaggcttggccggcggcatgggcgtattggccgccgtagtcgacagcggcagctttgcccgcgccgccaacagcctggagatgacgccttcgggggtcagccgggcgatttcccgcctggaaaaacgcctcggcattcgcctgtttgaccgcaccacccgctcggtgcaattgaccgacgaagggcgacgtt

SEQ ID NO: 139447 - DNA, 598 bp, Homo Sapiens
ggcacgaggttaagaacagtgtcggcagcttgtcgcaagatcgcttgaatgaagttcgcgagcaagtgttcccggcattgttcaaagacggcacgcgtgatgccaacttgaacttcgaagactatgtaattgccatgaatgactctggcgacccaaagaaatccgaaatggccgagttagacgtagaccgttattttgaatcgctgcgcatcctcgaaccggacagttacaccgcacgccgtcagacatttgaccagaacatgatgacgcaccagctcaacacctacatggagaaccccgacaaggtttcgccggaaaatgccgaaagtgggttgaaagcctcgttcacgatgatcaagggcggtatcaacgccgtcctcggtggcttggacaaaggcgacaaaacctacgacatgtacaaaaagatgaaggatgagatcgacatcctcgacggccatatcaaagggctgacaccggccgaaaacaaacagatcgcagcggccattcgtctcgcagccgccagcggcgacccgaaagccatcgacaaggtggtcgacacccagttgaagggcctgggcgacaaacgcgaggcggccgc

SEQ ID NO: 139448 - DNA, 648 bp, Homo Sapiens
ggcacgaggtcttcccggcggccgacgtgcccgcgcggctggacggcgctttcgcacgctgcgaaccgctgccggcggagcatctgctgttcttcgacaccgaaaccaccggcctggccggcggcaccggcacgcgcgcgttcatgatcggcgccgccgactggcacgcgggtgcgctgcgcgtgcgccagctcaccatcgtgagcctggccgcggagagcgcgatgctcgaggcgttccgcgcctggctgtcgcccgtcaccgtgctggtcagctacaacggccgctgctacgacgcgccgctgctggccacgcgctaccggctggcgcgcatgcgcaatccgctggaagggctcgcgcacgtcgacctgctgcatcccacgcgccggcgctaccgcggcgtgtacgagaactgccggctggcgaccatcgagcgccgcgtgctcggcatcgtgcgcgaggacgacctgcccggcgcggaagcgcccgccgcctggctcgcctatctgcgcggcggcagcgcgcagccgttgcggcgcgtgctggcgcacaacctgcaggacgtggtcacgctctcgcgcctgctgcggcacctcagcgcgctggcgatcgaaggggaggccggcgcgccctgagcgatgcggccgc

SEQ ID NO: 139449 - DNA, 904 bp, Homo Sapiens
ctcagacattcattatatgccagtgtctctccaaacttgaaaatggtgttctgccatgtcttatatctccactcttcgtacatattacttgaagtgaatgcgattgcattccacaaggttccatttctcggcgataatccccttggaccatctgtaaattcgagtttgcctcagaactgccagtgtctatctttcctaagagctgcatcaccttcatgtccaagtttttggaaagagtttccaggctgtgcacgaattcttgaatggctttctcaattgcccggtgctcttgcctgaataagtgaatgtctccagaaagcttcacaatgcttgaatcacatctggctactcttcctcgaagatctccaactcgttgtaggtgtttgatgtttatctcgtgtactgcaaagttagttcctgtggccgcctgatctcgagctcttatttggtcttctaaaatctcgatattttggctgagttttttgacgatgctggtgatggtctggatgtggctttccagtaacttcctggcgagcgattcctcttttcgaaagccatgggtcccctgcaggcaagcagagatgtcctccttgatgcggaaggcttgttcaagaaggaaagctatggtacgtgcctggttgttcagtctgtcttctagctgacctctctgggtgtttggaatgatggggagaaaagcatgactcttgtcaacatattcaactagatctgtagaattcttggttgacattttggctggagataatcttactttcttttcttggttattgtctgagccaggaagggggccatcaggttcaactggctgttcctctgcagtcgcagttggagaggcccccggccgtaatggccgaattcccgggcatatgtccggtaccgtcgactg

SEQ ID NO: 139450 - DNA, 1694 bp, Homo Sapiens
  misc_feature (592)..(614): n is a, c, g, or t
  misc_feature (803)..(818): n is a, c, g, or t
  misc_feature (1429)..(1429): n is a, c, g, or t
  misc_feature (1451)..(1501): n is a, c, g, or t
tcattcaatagtgttggtagtattgttctgtcgtcaaaattagaagctaactgaagtagcttacagcatcttttctagttagaatggtgaactgatagaaagacaaatgagtagaaagagttcatgaagaggtcatcctctgcttacaaaagcatggtcacctacacatgtttagggtgtctctgcacatgtctcaagcccatcacaagaaagcaagtacagtgtggatttcaaatggtgtgtaacttcagctccagctggtttttgacagctgttgctgtggtaatatttttgacatgtgatggtgatagtctctggttctccccatccccacaagggctgttgaaccacagcaccaggaagcctgagaatgaatcctgagggctctagcccaggctttgtcccaggctttctggtgtgtgccctcctggtaacagtgaaattgaagctacttactcatagtggttgtttctctggtcttgagtgactgtgtccacagttcatttttttccggtaggaataactccttttctacatccacgctccatagagtctctccttttcagacatcctgggatgaaagaatttggcnnnnnnnnnnnnnnnnnnnnnnnggacatctgttttctctcttaggcttttaaacaatagttattgcttttatccctctcagattctaataactgagagcgatggggctatattgaatctctgtatgcactgagaactgagctatgaagaggatcttattaaactgctggtctgactttatggattgacactgttcctttcttttattgtgnnnnnnnnnnnnnnnnccctgaaagtcttgggaaccccctaaagtcttttgggaatcctcaaaaagcatgggaagttaagtatttagctacataaatgttgtaagatcatatcttatgtatagaagtaataagaccatttggaattactggactaattgaatagttaaggtttctattcgggacaataaaatgtattttgaaagtgctgctaactattgatgctgacagtgtttcactcctatgagtgacccaaacatattataaatatgtggctaaagggaatggagcctgtggggtttgaccaaaatggtgcactaaactgtgcccggaactgaggtataaacaccttttatggataactgaaaaaaaccaaacgcgttagactttggttccctcccggctctcccgaagatttcattcccctaatggcgggccggccaccactttatcaccctttcttccaaatttgcgggcacgcgtcgaccccatcttcccgctaccttttctcccccttaacttactcggtccttcccgatgccgttacacccctctttgcggtaccgcccaccttcccttcccgcgacgtcgtgcttctttttcgccccctctctctacccccgcatcgnctccccttctatagccgtcagnnnnnnnnnnnnnnnnnnnnnnnnnnnnnnnnnnnnnnnnnnnnnnnnnnngtaataggtgagaaccctcatacgctgcgcgcggcggtcaggctgcgacctagggaaaatcgccccatatttttatacgaacaggcgccattaaggctgtgtgtatgatgcgcgcattccgataccaccgttctaattcatccccccatataccgccgctctctgcggcatctattttgggatcactccccca

SEQ ID NO: 139451 - DNA, 1101 bp, Homo Sapiens
gcggccgcgttgctcaagtttcttttcagatgcgccctgttctgcttcgggcttgcgttggtcgtggatgccgcgctgccaatgcgtacgcatcaactgcatgtcgaccggcacaccagcagcacgcagatcaacgccagactgagcatcgacaccagctatacggttcatctcgtcggaggcaacctgtcctcctgtgacgtgggctatgcaacgtatacggccttgaaggacggcgacagcgtggtcatccggtcgagcaatctgttcaggaagtgcatcagcatcgaccgcgacggcgagcgcatcgagtccaaccagtactgtcgatggttcgaactggccggcgccttgctgctgatcgcgaccgccatcggatggctgaagagcggtgacgaagaatcagaccgcgatggcatccgcgtgggctggtgaggaggggtgatgcaggcttcaagaacgacccctgtcctgatgccgctgacgttcgcctacttcgccgccagcctcgcccacttcagccacaacgcccagtacatcgccttctatcccggcatgccggcctggctgacgccggggcgggtctggctgttctggtttgccgtctgcggcgtgggcctgctggcctgggtactgacccgattgggcctgcgtgccctcggcctgctggcgctgggcgtgtacggcggcctgggcctggatggcctgctgcactaccggctcggcctgtgctctgagcacaccttgatggccaacctgaccatctgggccgaggccgcgtcggggctggtgctgttgctggtgtcggcggtgctgttcgcgaggcgtttgttcaggcccgcgagcgcctggggcgcatgaggctgctgcgctacttccaggccctgtccctgggcaagatggtgctgtggtgctatctgatctggtacgtctgcaccgtcatcgcctatttcgatccgacacccgcgatctggctgaattccgtcggcatcagcgtcatcgtcggcgtggccctgctgctcagcgtggggggccaggcggcagcctcgtggcagaccttccggctgttcttcatgcccttcgcggtgtccagttcgcggc

SEQ ID NO: 139452 - DNA, 578 bp, Homo Sapiens
ggcacgagggtgccctgcaaaatcacattccactgatgcacaccttgcgcatccggcttggcaatcaacgtagcgcgacgctccgcaggcacacaggccagcaacgggtcatcgacattcaacgcttcgccatcgaaatagatccgcgtcagcaggtgcttgaccaagccacgggcaaataccaacaccaccagatgcggcgcctgggtcgtgccttgcaggcccggcacactgcccggcttgatggtggtaaaccgaaagcggccttcggcatccaccggcacccggccaaacccttcaaagttgggatcgacggccttggcctgctcgtcttcggggtggtcgtacttgccggcggcattggcttgccagacttccagcatggcgtcgttgacgacatcaccgttgccgtccaccacctgcccgctgattgccacgcgctcgcccaaggtggccggcacggtcaggtcttcgcggttcagccaggtcaggccgatgtggtaatacggcccgacggtgtgggacgtggtcgcattgagggtcatctcatttctccatcggcgtggcgtcgcggccgc

SEQ ID NO: 139453 - DNA, 679 bp, Homo Sapiens
gcggccgcgtgcgccgtcagcttttggttttcgggcaggctgtcaaatcgatgctgcgcaaaactgccgaatgtcctcaatgccgctgttgtagctgcggccttggttagtttggtgagtgcttgccaatcccaggctgagttcatgcatgacaaaacgttcggcttcgccggctttgctcatccagtcgggcagagggatggtctccttcgtcgagtcgtctgtgcctgagggcgttgaaggcgcagacaaactgtcgcccatgtgctgatcgatgatgatgtcggcctgggcgctgaacatattgccggtcagcctgtcattcatagcacccaagccgttgagttcatcccagctcttaaacggggtgattttcccgctgggctccactaatataataatgtcgcgatttatgttcgccacgtagcgatgaatcaccatctttggcgctgtaccgaccaggctatagacggtggcccctgatgagttggggtcagttggggcggggcgtgtggcttcttcgggatgtcttgcgaccatgtctatggtcttgcgctgctcatcatccaggccgggttgtttcagactggccagttgcaagttgcttcggcagaattcgactaaccaatgccctggtggctgccggtaaaggcagcacccgcatcagtgccctccagcg

SEQ ID NO: 139454 - DNA, 1021 bp, Homo Sapiens
gccccctgggccatttattgggcggtgtctttcttttttccaatccgtgtctaggtttccccgagagcggggggaaatgtaaccgggttcccccgcattggcagttggaggttaggcctttggtttttatatggtggggggtcattccccaagggctttctgggtacagaattcataggctagttgtgtaatttcctcccttaaatgcttatttcccatgttctttctttgctttgagtgctttggcatttctgcaggcaatgcaggccttctcgtgttcaggagccatcctgagagcctgtacgaaaaactgaactgccttctcaatacaatcttcgtaataaaggcaaagacctcgtacatacagagcatctgcattggtggaatccattcgtagaatgtcactagccacagactgtgcttctggataacgacccagcattgctaaacattctgccttgaggattttgaagcgatggcaggcaggggcaaattctagggcacggtccatgcagaaaacaaccttccgaaaatctcgcttctcaaaatctgtttctgctattttctcatattccatgactgcattagcattcttgaactcttgttgtgcctgagcatttttatgatccagttctagggctctctggaagctgcgacatgctgccatggcattccccagagagaggtggcacttgccctctcgtagatgtccccggacaaaactgtcatccaacctcactgactgttgtgcatctccaagagcttcccggaaccttccaagcatcatcaaggtggctgctcgattaccataatagctagcatttttaggacacatatctatggcttttgtataataattataagcttcattgtaatctttcttggcatagtatgcatttccttgttccttgaaagtctctgcttccctcttcgcctcttggtcgtcgagcagctccggctcggtcgccgccattaccacatcgcactccgcggcagccgccatcttaccgccgggaccccc

SEQ ID NO: 139455 - DNA, 954 bp, Homo Sapiens
ctgaacggggtgttcatcgagcggcgaccctggcatgaatgcgtgcgccagtacgaccgcccgcactcgctgttcttcatggacccgccctactggaagaccgctggctacggtggcgacttcaagctgcatgagtacacggcggtggcggagttgatgcggactatgcaggggcgcggcatcgtcacggtgaacgaccacccggacatgcgcaaggtcttcgccggcctgaagatgaagcgggtggggatcacctacacgatcggcgacgccaagaagcgcaagccgaccggcgagctgatcatccagagttgggggaaggggcgagcccttaaaacggcctaggagcgcgccaccggcggcggcagtggccaggccttggcgggggcgagatcgcgtcgcctgggccgttctggagggccgattcggcccgcggaagtgttgcgacgcgtcacagttcggggttttggccgctccaggcccctctatagagagggcggcgggtctttcgcaacgcttggcgccacgcttcgcaacacttcccggctccgccgcgcatgcctgtcagaatggcgctcaacccgtatccaaagggcgtttaccgtcgtttcgagccgccgggccggttttccaggcccgccatctccaccccaaaccatgcgccgcccgaagtgttgcgaccccgccccctcaaacgccccctggcccgcgctaagttgttgtggttcaaagccttcccgccctttcccacttcttcccgcccgttcccggttctcccctagaccatgtggaacatcacagcttgggagcggcccggcgctcggcccgctggaaagcggcaccgccaacgtccactgggccgctgacatggccgagaccttgctgatttacgcgctgcctgtgttcctgctctgcatggccgccgaatgggcctgggggcgccggcgcggccgc

SEQ ID NO: 139456 - DNA, 517 bp, Homo Sapiens
ggcacgaggggatcgcgccaatgacccgacgccgcgagatgaagctgggtgtcgccgagttctggcatgaacacggcgcgcccgtcgatgctcaggctatggttgctgtcggtcaggtcggcggcattgtcgccgaacaccccgccctgcaacaacagcgccttgcccttatattgtgccgacagcccgacgcggcgctcgaacccgaacgcctggacgaaagcggcgcgttccatgaagctggtgaacaggtcgctcgtcatgtcgtcgagcccccagaagggtttgacctgccctgcggtcaccgtcagcgggccagtaccatagctcatatagacgtcggtcagctcgacctcgccattcgcgatgtcggcttcgacgcggtaggcaaagccgcccgggatcttgccatcgacgccgagatagacgcggcgaaactcggtcgcggtcccgccgcgcatcccggtcaccccggcgggggtatcgaccccggcgagatcgagctggacgcggccgc

SEQ ID NO: 139457 - DNA, 1002 bp, Homo Sapiens
  misc_feature (884)..(918): n is a, c, g, or t
tacaagacaaaggcgaatgagacttctcttatatctgagtaacattaagatggaaatcaaatttaaatgcagtccactctgctttttgaaagaggctttggttcagctcccaaatctcgattgcttgacgcagtctcctatgagaatactcagaaggtgtcttcttaaacaacaaacctatttttagtggtggagccgctcttagtagctgtgtctgcgtgggactgataaccaatcactatctttggaggaagtcctaacctttccttgtataccctccctatatgtgtaacagcttctctgttttcacattcagtagtccatattgctatcttatcacctttagctctaacattaacaacagcgccacatacatcatcactgtagtcatcaaaagattctccaataaggcacagaagtgtctctagccaaaagcgatcgaggtcacttcgtctctgctgtttgttcaatgtaattagccatcgtcctccccgtttgtttttctcatcttcccacataggctcaataccatccttaaaaagtgagtagtcacagccaggcattaaattactagacaactggatatggttgtacagagcccaaaagtcttcaacagtatcaaacttggagatcagccgcaggtttgcttgccaagttttgcttttatcatttttaaaaaaccagagtgcccatctgttctgtaggggatgtttaatatagtgttctgggttagcaacctcctgattagattccgttttctcctcttctgtagtcgggggattaggagtaggggtggtttccggttcgacagtcgccatcttagatcgatctgccccggccgtaatggccgaattcccgggcatatgtccggtaccgtcgactgnnnnnnnnnnnnnnnnnnnnnnnnnnnnnnnnnnncgccgcttcctcgctcaacatactcgctgcgctcgtcgttcgtctactacgacgctggcgccctatagtgatctatcagtcttt

SEQ ID NO: 139458 - DNA, 697 bp, Homo Sapiens
  misc_feature (630)..(630): n is a, c, g, or t
  misc_feature (665)..(665): n is a, c, g, or t
gcggccgccccagaagtccagttcatagctggctgagaggttggcaccgaaactgtcgacggtcttgttgctgtcggtggcgtccaaggaggcattgccactgccgcgcagcagtttttcacggctggcggtgaggttgaacttgacctcaggtaacaacggcgccccggcaattaccgcactcgcctgggcctggcgcacgcgtgccatggcggcggccacgtcataactgtcgcgtcgcgcctggtcgatcaggcggttgagcggcgggctgccgaagtgtgtccaccagcgttggttggtcgcctgcgtggcatcgcgttcggcgtactgccaggcgggcggcggcgcgaggccgctgtcgacgctcggcgggttgccggtacaggcgttgagcaacaggcatacgcccagcagggaagatcgtttattcactggtcaacgccttaaccggatcgagccgggcagctttacgggccggcataaagccgaatacgacaccggtgaccagcgcacagccaaacgcgccaaacaccgccaccagggaaaattgcaccgccacctcggccagtaccagcacgccgcccaccagcagcgcgagggcgatgccgaacaggccgccaaccaccngagagcatcaccgcctcggttaggaactggcgcangatgtcgcgctggcgcgcgccggtggccatgc

SEQ ID NO: 139459 - DNA, 981 bp, Homo Sapiens
gcgtccggcccggacggatcaaccatggcaaccgtggcgccaagcgaccgcagtccttcgtcggggaggtcatgcgggccgcgaagagggcagggcatctcggcgatagttttcggtcaagccaggggcggagtcgctcccggtttggccgaggccggcgcgcggcggcctccattcggctgcgctccaatgcccgacgcgtcgtaatgaaggcccgcgtcgtgcggcaccgcggcagccgcttccgctccgcgcccctatccaaacacatgacctatctgaagcgggacggcgtgacccgggacgacgaaaatgcccggatgttcgacggagcctccgatgctgcggacgagggtgcctttgccacgcgttgcaaggacgatcggcaccatttccggttcatcatctcccccggaagatggagctgagctcggtgacctcaagacatttacgcgggagctgatgcgcgacgtcgaggccgatctcggcaccaggctcgactggatcgcggtcgatcattggaatacggacaatccccacgtccatgttctgatctgcggacgtgccgacgatggtcaggacctcgttatcagccgcgaatacatcagccgcggttttcgtgaccgggcggccgaccgcgtcacactcgagctcggaccgcgcagcgaacacgacatccgaacgagcctcgagcgagaggtcgatgccgagcgttggaccagtctcgaccgcgcgctgcgcgacatctccgatgcctccggtggcatcgcggatctgaggcccggcaccggcgccgaagaccctgaaacgcgccggctgctcctcggcagggccgctaaacttgagcgccttgggctcgccgaacctgccggtcccgcctgctggacattgaagccgggactggaccagacgcttcgccagctcggtatgcgcggagacgtcatcaggaccatgcaccaggctatggccgccggcggccgc

SEQ ID NO: 139460 - DNA, 714 bp, Homo Sapiens
gcggccgcgatgccatcggtatcggccaggctgccggcaaggggctgaacacacgccacggcaccatccttgaccctgggaagacatcagcgtcagcttcgatggcttcaaggcgctcaatgacttgaacctgtatatcggcgtcggcgagctgcgctgcatcatcggccccaacggcgcgggcaagaccacactgatggacgtgatcaccggcaagacccgccccagccacggcaaggcctggtttggcgaaactctcgacttgaccagcatgagcgaagtgcagatcgcccaggccggcattggccgcaagttccagaagcctacggtgttcgaagccctgagcgtgttcgaaaacctggagctggcgcaaaagactgacaagtcggtatgggccagcctgcgcgcacgtctgagcggtgagcagaaagaccgcatcgaggaagtgctcgataccatccgcctgaccgcctcggcacagcgcccggcgggcttgctgtcccacgggcagaagcagttcctggaaatcggcatgttgctgatgcaggacccgcaactgttgctgctggatgaaccagtggcgggcatgaccgacgccgaaaccgagttcaccgccgagctgttcaagcgcctggcgggcaacattcgctgatggtggtggacacgacatggggtttgtcggttcgattgccgaccacgtgaccgtgttgcacc

SEQ ID NO: 139461 - DNA, 1039 bp, Homo Sapiens
  misc_feature (344)..(344): n is a, c, g, or t
  misc_feature (374)..(374): n is a, c, g, or t
gcaagcatcaaagtcgaaagtttcatggcagtattcccattaagagtgagtggtgttcgatcgctccgtgatccgattcatggagcgactatggggctgtcttattaagtgggaattaacatggaacggccccgaagttaacggttttgttaacttcggggatgcagtttatagccgccaatccagtgccagtgtgatggagcgtgggtctccccaatacacgccattataaaaaccgacgcgttcgtaatattttttatcaaatagattgttgacgttaactgacgccgaaacgtgttcgtcgaattgatagcgcgacatcaggttgaccacggtgtaggccntgctgggtgatcttggtgctttcggtaatncagccggccgtcactgtcccggccaccggtagggcgtggggcaaatttgtagaagtcgctctgccagttaaccgcgccacctacggtcaacccgcgccattggcccggcaggcgataggccgtcgatagtttcaacaggttgagtggctggtcggtgttgttgcgctgtttatcaccattgaccgagtgggtgtaggtgtagccggctgtcaggttccagtccggcatgacctcgcccgatgcttccacctcaaagccctggaccttgttgcctttgccgcccgacttgtagaactgctcgcgcgtgaccggatccggcggtgcgctgttatcgagttcggcgacgttatcctgggtgctccaaaagtacgcggtggccaggttcaggcgctcattgagcaggctgcccttgagcccgacttcgtagttgctgcccaccaccggctccaggtacttcttgctggaatcgcgctcatcctgagggttgaagatatcggtgtagctggcatacacggtgtactcgggggtgatgtcgtagagcagccccgcatacggcgtccacatatcgttgtgggtctggcgagttttgctcgattgagtcagttggttattgtcgttgtactgcggcgagacgctttcgatttcccaactgccatagcggccgc

SEQ ID NO: 139462 - DNA, 825 bp, Homo Sapiens
  misc_feature (153)..(153): n is a, c, g, or t
ccgaatagcaattggcggcgatgtataccagcccgcgcaggatctgcgcacggttgccggcgagcagctcggaggcgggaaactccaggcccaggtggatcaggatcgcggcgctttcggtcagcacctggccctcgggcgtcaccaacgtgnggaatttgtttgagtgggttgatgcgggccagggcgtcgctgccttcgccgtcttcccaagagctggcgtcgatgcgccgccatgccaccgcgcaacgctgcagggcgatttcgatcatgcaggagccggattcgtcgatgccgtagagcgtgtacatgggggttgtctccttatcgctgcagtttggcctgcaagctggccttcacctgcagccattccgaatctatgatgctgaaccgcaccgaattgcgcttgcgcccatcgggcatgatgcgctcgtggcgcacaatgccctcttgcacggcgccaaggcgcaggatcgcggcacgggatttttcgttgagttcatcggtagtgaactgcacccgcacacagtcgagcacttcaaaagcgtaggtcagcagcaagagcttggcttcggtgttgatgccggttttttgcgtggactcggccagccaggtgtgaccgatttccagcttgcgattggcccgatcgaccttccagaaccgcgtgctgcccaccacctggccagtgcctgcgcgcaccagggtgaaggggatcacgctgcccgcgtcgcggccggccaaggccgtgtcgatgtaggtgtcgatggtgtccggacctggcacgttggtgaccttgaggttccacaattggccgtcggcggccgc

SEQ ID NO: 139463 - DNA, 1020 bp, Homo Sapiens
  misc_feature (342)..(376): n is a, c, g, or t
aggctggaccggtccggaattacggaatagtggttcttcttctcggcttttcaaacccccgcggctgcttcctgggaaggtcgtgagtcccgctgagctgtccccggtgccgccgacccgggccgtgtgcccgtggctccagccgctgccgcctcgatctcctcgtctcccgctccgccctcccttttccctggatgaacttgcgtcctttctcttctccgccatggaattctgctccgtgcttttagccctcctgagccaaagaaaccccagacaacagatgcccatacgcagcgtatagcagtaactccccagctcggtttctgtgccgtagtttacagnnnnnnnnnnnnnnnnnnnnnnnnnnnnnnnnnnngcatttttgatacctcatattctgtttacacatcttgaaaggcgctcagtagttctcttactaaacaaccactactccagagaatggcaacgctgattaccagtactacagctgctaccgccgcttctggtcctttggtggactacctatggatgctcatcctgggcttcattattgcatttgtcttggcattctccgtgggagccaatgatgtagcaaattcttttggtacagctgtgggctcaggtgtagtgaccctgaagcaagcctgcatcctagctagcatctttgaaacagtgggctctgtcttactgggggccaaagtgagcgaaaccatccggaagggcttgattgacgtggagatgtacaactcgactcaagggctactgatggccggctcagtcaggggctatgtttgggtctgctgtgtggcaactcgtgggcttcgtttttgaaagctccctatttctggaaccctttgtattgtttggtgcaactattggtttctccctcgtggcaaaggggcaggagggtgtcaagtggtctgaactgataaaaattgtgatgtcttggttcgtgtcccactgctttctggaattatgtctggaattttattcttcctggttcgtgcattcatcctccat

SEQ ID NO: 139464 - DNA, 763 bp, Homo Sapiens
  misc_feature (726)..(726): n is a, c, g, or t
gcagttttttgagcgtttcctcgttagaaacacccttgtttttttcatcgcccagcggatccgacgtcgcaacaccccgacctgaaaaaaccgcgcccccgatgacaccacctgaaaccgccacactcgccatagcctgctctccacccgttgacctcagccttcttggcttcgtaggtggaaaaacaggcgtagggcgttccgccaaaaccatgtcatccagtgactgccctggacaatcgacaggcaaaaaaaagcccctcgaccgaggggcttttccagtgatgcggcttaaggcgacaacatcaggtcatctgaatgatggtctgcatgatggtgctttgggtggagatggtcttggcgttcgcctgatagttgctctgggccttgatcaggtccaccagctcgttggtcaggttgacgttggagttctccagggagttggccacgatcgaacccagggtcccgacttgcggggtatcaaaacccggctggcccgacgcgaaggtttctttccaggtggtgccgcccgctggctgcaggccctgctcgttgttgaagctggccagggagagctggccgatggccttgctctgctggttgctgaaagtggcgaacaacacaccgctgccgtcgattttcagcccggtgatttgaccggtggcgtaaccgtcggtggtgggcgggttgcggtaggtagccgagttgaactgggtgatgttcgcncatgttgacggccacgccgtctgtgttggcggccagc

SEQ ID NO: 139465 - DNA, 534 bp, Homo Sapiens
gcggccgcggctgtaggcttttttttatggatacaatttacttgttattggtctcttcagatattctttctcatgactggatttgcgtacgttgtatgagtacaaattttttcatttattctacgctgctctttattatatgcttccttctgtaaaatttggactgtttgttcttcccattatattaatagttgcttcaggtgtaacataaggttattttttaagtacttttctggtatcacaaatattggtgttttgtgtttcatctttcatttgtcaaaatattttttaacttccatttggatttaatgattcacccattcattattcaaaagcatattgtttaatttctatgtgtttgtgaacattctaatgttcattctactaatagttcctaggttcatgcaatgtgcttaaaaatgtggtataatttctgtattattaaatgtaaaactagtcttgattcgtaacataaggcctacgcaaagatccatcttctgcagagaagaatgtacattgtgccgctgttagacg

SEQ ID NO: 139466 - DNA, 371 bp, Homo Sapiens
  misc_feature (270)..(294): n is a, c, g, or t
tggcacgaggagaattttagtgaagtaaacaatcaaagacatcaacaagccagggaatataaaacatgtgtgatcatcagaattacccaggagatataaaaataaagatatcaggacccatctagagatttttctttgggtggggcttgaatgggggccaagtgattctgataattttcttaaacctctctatcccctgctatctcactaccactttgtgatacactgacttagactagccttctctaaagactaagtaatcttttcttnnnnnnnnnnnnnnnnnnnnnnnnncactttttaaatatcacactcaaatggtctcttaaaaagataattctgaataaaaaaaagcctacagccgcggccgc

SEQ ID NO: 139467 - DNA, 608 bp, Homo Sapiens
  misc_feature (236)..(256): n is a, c, g, or t
aattgccgtagcatcttatgaaaatcaattgaccataaatataagggtttatttccggattctgagttctcttttgttctgtaggtgtatccttcatgctaatactgcactgtcttactgactgtagctttatagtgaattttgaaatttggaattataagccctctaactttttcaggaatgttttgactatgccgggtcctgtacagttccatacaaattgtccatttctgccnnnnnnnnnnnnnnnnnnnnncagctggagttttggtaggaattgccttgaacctatagatcaatttggggagactcactgtcaacaacgttgagttttccaatccatgacacagaggtctctttatttaatttctctcagcagtgttttgtagttgttcggtgtacgagtcttgaattctttttgttaaatttattgccaagtattttattctttttccatgctgtcttgaatggtggaagtgttttctaattttcgttttcaggttgttaacgctaacctgtagaaatacaatcgatttgtccattgctcttgtatccttcgcccttgctgaactcaccagttgtagtagtttctttgtgaattccttaca

SEQ ID NO: 139468 - DNA, 943 bp, Homo Sapiens
  misc_feature (34)..(34): n is a, c, g, or t
  misc_feature (116)..(153): n is a, c, g, or t
gggtatgccgatacttattcgcgttgcaagatantttgtggtgtagaactagcaattgacgaaccacagttattgttttatgtaactcaattaaggcgcagaggtttgagagttannnnnnnnnnnnnnnnnnnnnnnnnnnnnnnnnnnnnnccgcactttcccgacggggtacgaatttgggatgggtggggaagttaagacggaatctattattgggagagctggacccgggagaccaagaagtcggagccgaggttttttgaaagggttttttaaagagggagaaaaaaatgcacacaaagcagtgaatagtaggctagactcattggggggtaattaccctagactcctaactttccaggctagttgaggaaactaaggaatgcctcccaatattccaaccctcaaagctcacactgcccccagaaaaacaaaacactcacccccaatccaatgaatcatctgcatagaaaaccagagccagcaggcctagggaaggagcggatgtttgtgccctcctctagcacatactagttcagtggtatgttctgccaggcagtgtggaggccctcagaggcctcactagggaataaaatcactgaggttctccttccacatctcgtttaattttcacaaatttgtgtgtggcaaaagtctcaaactttaccatcagcaccattcttagctcagaaaagcagaaataaggtcacttataatgccttaaggtttgtcccctgtggctattcccccccttctgcccatcattattttttggttcctattaacttaggatgctctcctttaaaacaataataacagaaagatgagaagataatgattatatagcatcgacgcgtggcgacgcgtgggtcgacgatatcccgggaattccggaccggtacagcctgcttgtttaaccacggttcatgttaagatgcgg

SEQ ID NO: 139469 - DNA, 911 bp, Homo Sapiens
ggtctcgatgccgaggcgcttcatcttggcctcggtgacgggcccgaccccatggaagcgcccgatgggcaattcggccacgaaatccggccccatcgccggggtgatgacgaacagggcgttcggcttgcggtggtccgaggccaccttggccaggaacttgttgtaggacacccccgccgaggccacgagacccgtccgctccaggatctcggcgcggatcgccttggccaccgctgtcgcggtcggaagtcccaagagattctcggtgacgtcgagataggcctcgtccagggcgacgggctcgatcacctcggtgtggcgggcgaagacggcgcggatctcctccgagacctgccggtagacctcgaagcgcggcttcacgaagacgagatccgggcagagccgccgggcggtcgaggccggcatggccgagcgcacgccgaaggggcgggcctcgtagctcgcggccatcaccacgccccgctcccgcgagccgccgaccgccaggggcctgccgcgcaggctcgggtcgtcacgctgctccacggaggcgtagaacgcatccatgtcgatatggatgatcttccggagggcgacctccgtctgcatcgctcggctcgtcctcggatgttcccggtccgttcaatgacaagggcaggggaggagggtcaaggtggcagggcccggcggccacaggcgattcagcgcgcggcccgccgccggaacggccagtcgatcagcccgccggcccagagggcggcccagacgaagaccggctgaaaggcgaggcggggcccgtgataccaccaggaatccgggatgccctcgatgtggatgtgctcgaaggcgtgcttcaggttcgccgggtagacgcagaccgcgtagagggcgaggccgatggcggccgc

SEQ ID NO: 139470 - DNA, 545 bp, Homo Sapiens
ggcacgagggatgcggtcggcctccgtccgccagtcggcgctgcgggcgaacgcgggtgtccccctggtgccgaacaatccctcatcggcgagatcggcgacccaggcctgacgctcggccgtgccctgcgccgaccacggcgtcagccccgcctcgcgcacggtctcggcgacctcccgcacctcctcggcgcggcggcggccgtgctcgatcacgcgctggaagaagtaggcgccctgcttctcccagtcgatttgaggaaacgtctcggccagcgaagccagcaccgcgtcctcgacgccataggcccgcgcggtggtgaagctctcgatcaccatggcctcgagccccttgatcatgatgctccggcacatcttcaccgccgacgacacgccgagcttgtcgctggcgacccgcgcggcaaacccgagcgcattgaccaggggcgcgagttcctccgcaccgggcccgccgagcagcagcggcaccttgatccggtagggcggcaccgaggtcatcaccgcgccctcgacatagcggccgc

SEQ ID NO: 139471 - DNA, 769 bp, Homo Sapiens
gccaacacgcgttcgccggcctgggtgaagccttcgaagcgctggccacgggtgaccaactccaggcccagctcatcctccagattgcgcaggcgcatcgacagggtcggctgggtgatatggcagcgcgcagccgcctggccgaagtgccgggtctgctccagcgcgatcaggaatttgagttgcttgatgtccatttaaagccccagcctgggaataagtgagcggtcaggataagtgcccgtgcctgcacccgcagcagaccctctcattgtaaggcctgcgcgtccaatcgcctgcattgacgtgatccccagcggatcaaaagcacagcagcaacctgattttcggcggtgtgatcggtttttttagcgcccactgaaacctgtacgcaatttgaaacgtttaagtggtttaatgtttatgtcggcttgcgatggatcgcagccgccgacagaccttctgtcattgaatcatcccaaggagctacaccatgcatggaagtatgaagtccaaacacctcgcgtttctgttgatcccgctggttgccgcttgtaccacaccggacagaacccgtgagtcggccgtcacaccgcaagcccagccccaacaggcctggcagttcgacaactgctcggtcggctgccccagcggtggcagcccactgacgctgaaccgccaggcgtacaccctgaacaataatggctcgaccaagtttgccaactgggtgtcatacaaaatcaccaagaccacccccgccagcggccgc

SEQ ID NO: 139472 - DNA, 939 bp, Homo Sapiens
gtacgaggctggggttgaatcggcacgaggctgaattctccattctgggctctgcctgtgaaatctttcttgctttccccatcttttcctcgcattttttcaccatctttccctcaatctccaggagccaatgcgagacttggctccgattaagcgacggcccgagactcggggtgcgcgaggaggatcgacagagtggtgatggagagcaccccttcaaggggactgaaccgagtacacctacaatgcaggaatctgcaggaattcttagggggcctgagccctggggtattggaccgattgtatgggcaccctgccacatgtctggctgtcttcagggagctcccatccttggctaagaactgggtgatgcggatgctctttctggagcagcctttgccacaggctgctgtagctctgtgggtaaagaaggaattcagcaaggctcaggaggaaagtacagggctgctgagcggcctccggatctggcacacacagctgctcccaggcgggctccagggcctcatcctcaaccccattttccgccagaacctccgcattgcccttctgggtggggggaaggcctggtctgatgacacaagtcagctgggaccagacaagcatgcccgggacgttccctcccttgacaagtacgccgaggagcgatgggaggtggtcttgcacttcatggtgggctccccagtgcagctgtcagccaggacttggctcagctcctcagccaggctgggctcatgaagagtactgaacctggagagccgcctgcattacttccgctggcttccagttcctgtttgctggacaccccggtcagctctggtactttatgtgcagtatttgcagacagcccagagccggggcatggactggtagagattctctccttctcttcaagctcagctctctactctgggcaggatt

SEQ ID NO: 139473 - DNA, 1001 bp, Homo Sapiens
  misc_feature (405)..(446): n is a, c, g, or t
aattcggcacgaggtataatcccatcgccattcccctccacatgtctccaggttacaaccagagagcttttggcatgacctgaatctgtgggcttaaagggaaaaaggaggagagagagaaaagggaagccactactttctccctgttaaaatgcccaagtcctagactgggggttcctgctctggcagcagcagacaccatatcccagaagcccctccacccggtctggctccatggaaggtgcccctgagtgccaagaggagcagcaagatagggagggcggctccttcccctcctgacatcccctgaccgccccgaggattctcagagacagatacgcaggcagacagccatggaggagaaaagagaggttgacagggccctgggggtggcactcctgcacnnnnnnnnnnnnnnnnnnnnnnnnnnnnnnnnnnnnnnnnnnatagagagagacagagacatataataaacagaataaaaactaagggcccagatgtacaaaaaatgtgtgagtgaggaagaaggtggggaggacagtgagagatggtcagtcctccggaagtctggctaccttcgtcagcttataaattacaacccccctggaaaatgggggtgggggcaatgcggaggctccggctgtggcctgagcgggagggctgggtggcggtcatagctgctctgcccatctggtggagtggtggccagagatgatgaccccttgggtggtgagggtgggccaggggaaggttcagcagccgctggcaggagtcacacaggccccctgggacttcaccttgtggcgctggccccctcgtcgccggcctccactgctgggcttaggctgaggctggagattgctggacgcagctggttgccctgcccctacagaggaggcttcatctccaggtgggggtgctcctactgctggcccaccagacgggcccccctcgtctcgtttcgtcagggggccctttttcgtcgactgcattttaatctg

SEQ ID NO: 139474 - DNA, 1235 bp, Homo Sapiens
  misc_feature (82)..(83): n is a, c, g, or t
  misc_feature (141)..(141): n is a, c, g, or t
  misc_feature (262)..(262): n is a, c, g, or t
  misc_feature (308)..(308): n is a, c, g, or t
  misc_feature (324)..(324): n is a, c, g, or t
  misc_feature (340)..(340): n is a, c, g, or t
cggcccccttagtttcagtccaaaaccccatttttggtaaatatggaaggaaaccagaacccgtggacttggatcccccgtnngaacccaaaaatttccatctggaaatggcaatggaatactctgacgcccgaccggaanccttggtgaagcccttgggcgattggtgatcaccttctagatccgtgaaagctggctgcccccccatcccggcaagcagggccaaggtggcatctcacatttcctggacccaccccagtancagcagcaggtatttcttctggtaaatgagagcctttcgaaaactntctgccctcaagtatntaccataaattctctntaaagtgacatgttcagaatcagggctcagagtttgaagtaaagagtcatttcttagttcagctttcagtttgtatacttcagcctctgcccttttcaaagatttctggagagtcaatttttctctgttccatacttctttttcagaggcaatgatggcttcaatgttggcaccaccattcaatgaaaacctggaagaattatctctaccagctcctgtctgtcgataccacctgatctgctcttccagcttcataaccatgttccttaagtcattcttctcttcagtcagttgactgatatgccctgtcagctcagcattttgtctcagtagtctttcagtcaatgagccacaagaagtacttggggacaccaagctgggctcttcaccttgctggccagttaatttctgtagttgtaaaataatttcatcaatattttcctgaacccaaatgaaatcttcatcatctgctgtttcaaactgtagtctctcagaggctttctggggtagaacctgtagttttgaagctacacattgaagcttttgtctgatcatttctaattcatgattacagccggttcctcctccattcatttcaatcaatttagcgtagtttgattcttttgtttctccttctattttctgttgaagaacccaatttctagttctatcactggttaagctccacgtggttggctcattaaggttctgatacagaattcttctactttctcgtttttcttctcgttctagttcttgcttctggaattcctgcatgattccttgtagtcgctgtccttcaaggtctaacttataaacttgttgtcttttctcttcccagctggcgctgaagatcttccactttggactggagctcatgcatttttttctgtcc
